United States Patent Application Publication US 2026/0191920 A1 - sequence listing, part 20

SEQ ID NO: 87689 - protein, 499 aa, unidentified
  source 1..499: note = Saprospirales bacterium
  REGION 1..499: note = tr|A0A2E4IAK2|A0A2E4IAK2_9BACT Uncharacterized protein OS=Saprospirales bacterium OX=2026790; GN = CMN33_02740 PE=4 SV=1
  VARIANT 137: note = Xaa can be any naturally occurring amino acid
  VARIANT 223: note = Xaa can be any naturally occurring amino acid
MKITIVGGGTSGWTNALILANDHPHHTFHVIESSKIGIIGVGESTTGYFTKLFNGRYPVSLKDFMFETNATPKYAIRHVNWAPSVNPSYIAPIDGSQSSSFHHDIFFNYGVNYLNRDKFHKISRLGNMLEWNRSLMXAETEDFISTDFAMHIDGQKTSQYFKKHVLKLPNVQLIDTEVENVNLDDNGYIKTLSLANGMTHSADFFIDCSGFNKILIKELEKDXWTSYKKYLPVDTAIPFFTKYEQNETPEPYTSSIAQSSGWLWRGPLAHRRGNGYVFDSNFISSDDAISEVESTLGQKIDPIKTVKFEAGRLNNSWIKNCFANGLCSQFLEPLEATAIHNTIVQAELFSLNFLRNTIEDTCNIDSQKIYNEQFRKTIDDIMHFLVMHYRGGREDTDFWKYVKNECSTELVDTLIGTATSRVPGMVDFPTYYGSGGWPLYSHVMYQLGLINKDVAGSHFGKFYMLDDVANSFHDQVDAWNFDTRNCISLTQLQKLRFKN

SEQ ID NO: 87690 - protein, 490 aa, unidentified
  source 1..490: note = Erythrobacteraceae bacterium
  REGION 1..490: note = tr|A0A2E0Q3R2|A0A2E0Q3R2_9SPHN Tryptophan halogenase; OS = Erythrobacteraceae bacterium OX=2026738 GN=CL953_02900; PE = 4 SV=1
MVVLGGGSAGWITACLLQREWAARGGSVTVVESSAIGIIGVGEGSTPQLKGFFDHLGIAEAEWMAACDATYKLGIRFTGWSERAGYESYFHPFPGPVDLHSEPGFVHNCMLARRGFDVPAHPDDWFLATDLAQHARGPHPAESFPFAPSYGYHFDAHKLGGFLRAWATQRGVTHLDRKVAEVEVADNGDVTALVCEDGERVEGDLFVDCSGFRSLIAQQALGVKFVPFASNLFNDRAVVMPTPHGDAPKPQTDAIAMRAGWRWRIPLTTRVGNGYVYSSAHITDAVAEAELREALGQPEAEARFLTMKVGRVEETWRGNCLAAGLAQGFIEPLEATALHIVIATALEFAQAYEAGGFTPQHRDAFNASIATRYEGIRDYIVAHYRLNQRTDTDYWRANARNDALSDGLKAMMSAWFRHEDMSRANDAAYAGKRYYANASWHCLFAGYGTFPPTEKMQPVPPGVGVADIEGTRGMIEACRANFASYDPLCA

SEQ ID NO: 87691 - protein, 536 aa, Sphingomonas paucimobilis; identical to SEQ ID NO: 85805
  REGION 1..536: note = tr|A0A0C9MU21|A0A0C9MU21_SPHPI Protein/1, contig: SP631 OS=Sphingomonas paucimobilis NBRC 13935 OX=1219050; GN = SP6_31_00130 PE=4 SV=1

SEQ ID NO: 87692 - protein, 93 aa, unidentified
  source 1..93: note = Sphingobacteriales bacterium
  REGION 1..93: note = tr|A0A4Q3GYN2|A0A4Q3GYN2_9SPHI Tryptophan 7-halogenase (Fragment) OS=Sphingobacteriales bacterium; OX = 2044944 GN=EOP48_15280 PE=4 SV=1
MEHKVKHVVVVGGGSAGWLTAGIIAAEHKSKHDMGVRVTLIESPEVRTIGVGEGTWPSMRSTLERIGISETEFVIECNASFKQGSKFVGWRTG

SEQ ID NO: 87693 - protein, 504 aa, Kordiimonas lacus
  REGION 1..504: note = tr|A0A1G7A5U7|A0A1G7A5U7_9PROT Tryptophan halogenase; OS = Kordiimonas lacus OX=637679 GN=SAMN04488071_2105 PE=4; SV = 1
MTATDRNIKKIAIVGGGSAGWMTAAALSNALQGACEITLVESEEIGTVGVGEATIPPIKIFNQSLGINEAEFVQRTEGSFKLGIEFVNWFKEGHRYFHPFGEYGAPFDAVQLYHYYLKARAEGPVDPIDDYSMAWVMAKNGKFSVPAQDRRMVQSTFDYAYHFDATMYARFLRDYAEARGVKRMEGKVVDVALRGTDGFIESLTLESGTKVDAEFFIDCTGFFGLLIEKTLKTGYEDWTHWLPCDRAVAVPCEHGGEFTPYTRSTAHKAGWQWRIPLQHRIGNGYVYASQHISDDEAQATLLDNLDGTPLADPRLLRFKTGRRKKFWNRNCVAIGLSAGFMEPLESTSLHLIQSGITRLLALFPTLDFDQYGIQEYNRITTGEYERTRDFIILHYKATERRDAPLWQYVADMEIPAELAYKIEQFRRGGRIVAHELELFRNPSWLAVFTGQGIWPERHDPLADARDVDYQGRLQGLRRVMEETAAAMPSHADFITKHCPAKRTT

SEQ ID NO: 87694 - protein, 508 aa, unidentified
  source 1..508: note = Burkholderiales bacterium
  REGION 1..508: note = tr|A0A257CD97|A0A257CD97_9BURK Tryptophan halogenase; OS = Burkholderiales bacterium PBB6 OX=2015568; GN = CFE46_13635 PE=4 SV=1
MQQDIHAAPDSVRNIVIVGGGTAGWMTAAALSKLLPPWRKVRLIESDDIGTVGVGEATIPMIRFFNSSLGIDEDEFIRQTRGTFKLGIEFVNWGQVGERYIHGFGKIGQDEGMVSFYHYWLKQHQRGLARPLEDYSINTAACHDNKFMRARHDLANSPLADIAYAFHFDAALYARFLRDFAVARGVHRTEGIVAQTIQRSADGFIEALVLDSGERVEGDLFIDCSGFRGLLIEQALQTGYDDWTHWLPCDRAVAVPCEHGSTPLLPYTRSTAHAAGWQWRIPLQHRIGNGHVFSSKFMSEDEATSILLANLDGPKLAEPRTLKFVTGKRKKFWNKNVIAVGLASGFMEPLESTSIHLIQSQIARIATFFPDRGFAQADIDEFNRQADFEFERIRDFLILHYQQTRRTDSAFWNYVRTMPIPDTLQAKLDLYRSSGRIFRESTEMFTHVSWLQVMHGQGVHAGSYHPLVDNLDDDALKQYLDNVSGTIAKCVEVMPTHAEVVSHICSER

SEQ ID NO: 87695 - protein, 501 aa, Sphingomonas paucimobilis
  REGION 1..501: note = tr|A0A0C9N6J4|A0A0C9N6J4_SPHPI Protein/1, contig: SP650 OS=Sphingomonas paucimobilis NBRC 13935 OX=1219050; GN = SP6_50_01210 PE=4 SV=1
MPDAIRSVLIVGGGTAGWMTAAALAHACPRGLTITLVESDEIGTVGVGEATIPPIRLFNQTLGIDEAEFLRETKGSFKLGIEFVGWGREGHRYFHPFGTHGKSFDLVAVHQHWLAAGGAEGVVPPLDDLSMAWGAAKRGRFAAPMADPHSVASTFDYAYHFDAGLYARFLRRYAEARGVVRVEGRIAGHALEGERGHVASVMLDDGRTLAADLFVDCSGFRGLLIEGALHTGYEDWTHWLPCDRAVAVPCATGGDGLTPYTRSSARAAGWQWRIPLQHRTGNGYVYCSRHISDDEAAATLLAHLDGPALGDPRFLRFTTGRRRLFWNRNVVAIGLSSGFMEPLESTSIHLIQAGVAKLLAYFPTKAFEPPAIEEYNRVAITEYERIRDFLILHYKLTERTDAPLWRECAAMPIPDTLAMKIAHFRDHGRLIARDMDLFGPASWAAVHVGQFNLPRATDPLLAYADPAQSRAFVGKLAGAIGQMAESMPTHADWLRRIGAMA

SEQ ID NO: 87696 - protein, 793 aa, unidentified
  source 1..793: note = Methylobacterium currus
  REGION 1..793: note = tr|A0A2R4WJM2|A0A2R4WJM2_9RHIZ Tryptophan halogenase; OS = Methylobacterium currus OX=2051553 GN=DA075_13115 PE=4; SV = 1
MRAPGERDGPRRVVIVGAGLAGLLAAAVLKPALRRAQWRIELVGPRPRSAGPAAVATGPDLTRLLRGAGVDEAVLMRRCAGTYRLASRFEDWFEAGTGHWLPLGPTGPRPNGLDLFHYWVRFALAGEGAGAYGDYALNARLAAQARGPSGPDGASPVAEAGDYGFHLDRDALLGFLRDLARAEGVRWTEGRVGGVERDAFGRVTALDLDDGRRVAGDLFLDCSGAAGRLIGTELGEPWLGEAAGERESLWLSLPPDPAWIPATAYRGLGAGWTARLPLADRTACRLVAGTGEAAALARSLGGEASGAAPLRTGHRAAPWRENVVAIGAAAGAVEPLAGLGLSLVLAAVGALIDYLPRGPVEAPLRRAYNARMGRLQAAARDAVALHYGLVRRPEPFWARGRAASLPDSLADRLDLYEAAGCIEEPPGAFDETAYLHTLAGAGHLPQRAFAPADLASRHESERFLAAVRDRIARLTEAMAPHARHLARIHGPLPEPGAAAALRAEPAAPDLLAPLRGSEHGARLLDRVLALGQPFGCERSIKAAGGRLQADRFLLSLHRTALGLDPGRAVGRIAAELGLAAPARAEAAAAIAGADILHLGFEDGPGGPLYKLYVEWSAEADRRWRAGPEPGERPVLVHRAYKWSPLRAADPVVTLYHWPCLRGPDEIALRLEQVADATGGAFALGLAREILAIVRARGSGLPHYLEASEEPGPRLSYDLNLYATGLTVAAVEEVMGRAFAALGVPAAEAGAALAARRGETLGHVAAGLGRDGAPFVTLYSGVRGQDSGARGQER

SEQ ID NO: 87697 - protein, 588 aa, unidentified
  source 1..588: note = Moorea producens
  REGION 1..588: note = tr|A0A1D9FZM7|A0A1D9FZM7_9CYAN Tryptophan halogenase; OS = Moorea producens JHB OX=1454205 GN=BJP36_13220 PE=4 SV=1
MNNIQSQEYDVVIMGAGFAGVCQARHLLLNIPNIKIALIDPRPEERTEKDLKIGESMVEIATLFVCKELGLYEYMIDNHPPKFGLSFHWPKDPTKTESTDDYYHIWANRQPPLGSFQMNRAKFERDLLKMNKAMGAIFYQGRVVDVDLTPKDAIKTVKVKKVDGEYIELKAKHVIDGAGRKFIIGRKTDNVLFGPDNLFGLNTGSAWVRVKGVDRTIFHDGYDPNSTTCSHYYATNHWFGHGHWLWMIPTEKESQEISIGIAQHRRVIPDKKINTKEKFYAFLKANHNMLYRLVTSGEAVDFHYLPRPSHTSKTMFSEDNWYVLGDAACIFDPFYSLGTTMIAFAIEGVTEIIRAKLAGEYNAEEKRSAYNQFNLTYTRFNNHLIKEHDKQLGHASVMSWRIYQDYIWWFGVVVPMYLGKWHLDLDFIPRYVKGLQANMNGYSEHLYQQFNELVERGANIGFMDCYRGDQLVWGYNTLEHFDDFLENTKLEPKRCNIFASMKYTSLYNTIWYAKFLWKGFGLSGFIAPKNLYYLFNNLNNTIQIAIGEIIYKHFTKDLPANSKIAKMRQEFTSYQYRAELQPWIKEVA

SEQ ID NO: 87698 - protein, 502 aa, Kordiimonas lacus
  REGION 1..502: note = tr|A0A1G7A7S5|A0A1G7A7S5_9PROT Tryptophan halogenase; OS = Kordiimonas lacus OX=637679 GN=SAMN04488071_2099 PE=4; SV = 1
MQENSIKKLVIVGGGTAGWMAASLLVKLMRGQLEIVLIESDDIGTVGVGEATIPPIQIFNNVLGLNEDEFVKATQGTFKLGIQFENWGAVGDKYMHAFGSIGRQIGMVPFQHYWLRAKEAGFAGDLWDFSFNYQAAKEDRFDRMRQIPNSPLEGITHAFHFDAGLYARYLRKGCELSGVNRIEGMITDVSLDSASGNIASVTLKDGQVVEGDFFIDCSGFRSLLLGQALGVGYTDWTGWLPCDRAVAVPAENGPRMRPYTQSIAHKAGWQWRIPLQHRAGNGHVFCSDHISEDEATQTLLDNLEGKPLADPRVIPFKTGRREKFWHKNCIAVGLSSGFLEPLESTSIHLIQTSIVRFVQMFPSLGLDATNIDEYNEQVGFEFESIRDFIILHYHATQRDDSAFWKRCRTMEIPESLKHKMDLFRETGRIFRFNNELFSEAGWLQVMLGQRVMPKAYHPMADGLSDKQLREYFTNLKTIISGTVPKLPKQVDFIAKHCAAAPM

SEQ ID NO: 87699 - protein, 501 aa, unidentified
  source 1..501: note = Sphingobacteriales bacterium
  REGION 1..501: note = tr|A0A4Q3B7M3|A0A4Q3B7M3_9SPHI Tryptophan 7-halogenase (Fragment) OS=Sphingobacteriales bacterium; OX = 2044944 GN=EOP53_20170 PE=4 SV=1
GGGNAGWLSANHLGLELSRDPEIKITLIESKDIPVIGVGEGTVPLIRNSLQIFGISEVDLLLQCDATFKTAIKFSNWMSSEKYGNDNFYYHTFDAPFPGGYDVTHYWLGNKADAHYSKLSAAYYVAEKKRSPKRPDSPPYKGLVNYAYHFDAAKFTVLLANNAKKRFGIRHIYETVKNVMLHDDGSVKGFQYESGEHEEFDFYIDCSGFSALLFGKTLKVPFIDKSDVILTDTALALQVSTESDEELFPYTKAAAHNAGWIWDIPLTTRRGTGIVYSSQHMTDDEALKEFSNYHGKDLENSNARKIPMKAGYREKIWEKNCVTLGLANGFVEPLEATSLFITDFCAGMIAKKIPLHKEEMPLFAKSCNEIATLIWERVFDFIQLHYCISDRRDTQFWRDVTEKVALSALLKERLEMWKYSIPQRTDFASTFDFFHTESYLSVLYGMDYPTRAPSVNDAVGHFSKQKISEHLINARNLAGSLMAQRKWLTELKEYAAKNRPA

SEQ ID NO: 87700 - protein, 519 aa, unidentified
  source 1..519: note = Paraglaciecola psychrophila
  REGION 1..519: note = tr|K7AAX8|K7AAX8_9ALTE Uncharacterized protein; OS = Paraglaciecola psychrophila 170 OX=1129794 GN=C427_0191; PE = 4 SV=1
MKTRVVIVGGGTAGWLTAGIIAAKHCLEKSTGKSTENTLTQETEVILVESPDVKNLGVGEGTWPTMRDSLRQIGISERTFLSCCDASFKQASKFVGWSDGENEHYYHPFTAPVGYGAVSIAEHWSATPKDIDFESWVCAQGTICKQNLAPKTPQMPEYAFALNYGYHLNAGKFVKMLHQHCVEKLGVQYIQGHVEHVLPAENGDIASIALVGGEHVEGDLFIDCSGFAAILIGKHYEIPFTSKQNILFNDTALALQVDHASDEVPIASCTVATAQKNGWIWDISLQNRRGIGHVFSSDFTDVEQAEQALLKYVHNDPFLAAQKLSPRKIKFTPGHRETFWHKNCVAIGVSAGFVEPLEATALVLIEKSAEWISQQLPRERSAMTVLAKRFNLLTLQRWQEIIDFLKLHYVLTNRTDSEYWRAHQQPDSIPESLQDTMTLWRTQAPGLYETNQRFELFSSASKQYVLYGMGYHTAREQGDLGRQEASMVKRLRNETLHTTEKLLSVLPSNRQFLSGLKKG

SEQ ID NO: 87701 - protein, 501 aa, Streptomyces caeruleatus
  REGION 1..501: note = tr|A0A117RKG6|A0A117RKG6_9ACTN Tryptophan halogenase; OS = Streptomyces caeruleatus OX=661399 GN=AQJ67_34735 PE=4; SV = 1
MTASYLKAAFGDRIDITLVESGKVGTIGVGEATFSDIRHFFEFLGLKEKDWMPACNATYKLAVRFENWREKGHYFYHPFEQMRSVNGHPLTDWWLQDGPTGRFDKDCFVMASVIDAGLSPRRLDGTLLDSPFDENAEEMQGLTMSEHQGKTQFPYAYHFEAALLAKYLTRYAVERGVRHVIDDVEDVDLDERGWISSVRTAGHGELTGDLFVDCTGFRGLLLNKALQEPFISYQDTLPNDSAVALQVPMDMERRGIRPCTTATAQDAGWIWTIPLTGRVGTGYVYAKDYVSPEEAERTLREFVGPAAADVEANHIRMRIGRSRNSWVNNCVAVGLASGFVEPLESTGIFFIHHAIEQLTKNFPGADFHPTHRDRYNDAVAHVMDGVREFLALHYAAAKRSDTQYWRDTKTRPLPDGLAERIEKWRTQLPDSETVYPYYHGLPPYSYMCILLGMGGIDVKPSPALALADPTAAQLEFEAIREKTEQLTRTLPAAYDYFTQLG

SEQ ID NO: 87702 - protein, 516 aa, unidentified
  source 1..516: note = Erythrobacteraceae bacterium
  REGION 1..516: note = tr|A0A2A4P3J6|A0A2A4P3J6_9SPHN Tryptophan halogenase; OS = Erythrobacteraceae bacterium OX=2026738 GN=COC07_03005; PE = 4 SV=1
  VARIANT 2: note = Xaa can be any naturally occurring amino acid
  VARIANT 46: note = Xaa can be any naturally occurring amino acid
  VARIANT 60: note = Xaa can be any naturally occurring amino acid
  VARIANT 104: note = Xaa can be any naturally occurring amino acid
  VARIANT 108: note = Xaa can be any naturally occurring amino acid
  VARIANT 117..118: note = Xaa can be any naturally occurring amino acid
  VARIANT 120: note = Xaa can be any naturally occurring amino acid
  VARIANT 187: note = Xaa can be any naturally occurring amino acid
  VARIANT 227: note = Xaa can be any naturally occurring amino acid
  VARIANT 359: note = Xaa can be any naturally occurring amino acid
  VARIANT 424: note = Xaa can be any naturally occurring amino acid
  VARIANT 464: note = Xaa can be any naturally occurring amino acid
  VARIANT 473: note = Xaa can be any naturally occurring amino acid
  VARIANT 502: note = Xaa can be any naturally occurring amino acid
  VARIANT 507: note = Xaa can be any naturally occurring amino acid
MXSEFNRLVIVGGGTAGWLSACLLAARRPELDVTLVEAPDIPTIGXGEGSWPTLRETLAXIGIDEARFLSACDASFKQGSRFDGWVDGSADDSYYHPFTPPASXPMAXILSAWSAQXXKXASFAGAVTPQIAVCDRDLAPRQRAMPAFTGALNYGYHLDAGKLGALLAEHGTARLGVTHVRAHVTGXERGEDGLLAKLMLRGGDTVEGDFFIDCTGMAARLIGDELXVGWRDRSDVSFNDRALAMQVPVAPGSAIASQTVGTAHKAGWLWDIGLPTRRGIGCVYSSRFLSDEDAEAILADYITAKVPGADPGALAPRKLQFATGHREQFWRGNCLAVGLSAGFIEPLEASAIVLIELSXKALADAYPHSRSALPRLADRFNALFRYRWDRIVDFLKLHYVLSKRGEPYWQAQRDPATIPETLAXQLELWRDHPPSAADFPQVDEIFSAFSQQYVLYGMGFPLPXAARPAPEPXALRRLAEVSERSRALAAALPSNRTYLDTXRAAEXDRGAQGAIA

SEQ ID NO: 87703 - protein, 494 aa, Sphingomonas paucimobilis
  REGION 1..494: note = tr|A0A0C9MTJ3|A0A0C9MTJ3_SPHPI Protein/1, contig: SP630 OS=Sphingomonas paucimobilis NBRC 13935 OX=1219050; GN = SP6_30_01870 PE=4 SV=1
MTDNRIRRIVILGGGTAGWMTAAALSRAVAGQGVTITLIESDAIGTIGVGEATIPTIHWFNQIIGLDERQFMAETKATVKLGIEFVGWNGAGSRYFHPFGTFGPPGDGAMFLHRLIRGRADGDAAPTEAYSLTAQAAKAGRFARPVADRRSLLSTLGYAYHFDAGLYARYLRGLAERSGVTRIEGIVASVGQEGESGFIASLTLEDGRTVAGDLFIDCSGLRALLIGETLGVGYDDWSHWLPCDRAWAAPSAAETSLTPFTRATAAEAGWRWRIPLQHRVGNGYVFASRFQDEDAARASLLAGMDGPPLADPRLIRFTPGMRREAWRANVVAIGLSSGFLEPLESTSIHLIQSGIAKLLSLFPAADCSPLLARQFNRVFGQEMHDVRDFLILHYHATAGRDEPMWRERQAMTIPDSLAERIAHFRHSGRIVLSSDELFRDASWFAVLDGQGERAEDHNPLIEAVGRDDNLRHLATLRAEIAKVAASLPPLPARG

SEQ ID NO: 87704 - protein, 496 aa, unidentified
  source 1..496: note = Paraglaciecola psychrophila
  REGION 1..496: note = tr|K6YYT1|K6YYT1_9ALTE Tryptophan halogenase; OS = Paraglaciecola psychrophila 170 OX=1129794 GN=C427_2235; PE = 4 SV=1
MKNVIKKVVIVGGGTAGWISAALLKRVIGNSLEIELIESEAIGTVGVGEATIPPIRLLNNVLGINEAEFLRETKATIKLGIQFENWRVKDESYFHSFGAPGKSMAFCQFHHFWKRSQLLGDTSSLWDYDLNYLCAMQGKFAQINSKDSILELPYAYHFDASLYANFLRKFSEKMGVKRTEGIVQQVALNNESGFVESLTLKDGQVIAGDLFIDCSGFKGLLIQQQLGTGYDDWSHWLPCDRAVAIPSERFETTLPYTRSIAHSAGWQWRIPLQHRNGNGLVYSSAHYTDAEATDLLLSNLESKPLGDPNLIQFKTGRRRKQWNRNVLAVGLSSGFLEPLESTSIHLIQSAIVRLIHLFPHQGIDNSVVNEYNQQSKVEFEQIRDFLILHYHLNERNDSQFWRDLRNMEVPQSLLHKIQLFADSGKIFREQNDLFLESSWIQVMLGQGIIPKDYHPIANNISDEKLFEMLKSIKNIKHEPLSKLPSHDDFLKKYCEL

SEQ ID NO: 87705 - protein, 323 aa, unidentified
  source 1..323: note = Paraglaciecola psychrophila
  REGION 1..323: note = tr|K7ARM9|K7ARM9_9ALTE Tryptophan halogenase; OS = Paraglaciecola psychrophila 170 OX=1129794 GN=C427_2236; PE = 4 SV=1
MAERAVSKVVVHRQEKITDVSINDNGNIAALVTESGEHISADFFVDCSGFSAFLMQKTLGVKFNSYKENLFNDSAVVLPTAITDNIPVETQATALSNGWCWKIPLTNRYGNGYVYSADFISSDAAEIELRSHLDCLHGSQSARHLKMKVGQLDKHWERNCLALGLSQGFIEPLEATALHLVQISIELFITEFENGGFGNTHQAAYNSKMSQRFERVRDYIVAHYKLNTRNDSEYWRANRNNPKISDSLGQLLDVWFNRGDMEVEIERQNLSSHFNSTSWHCLLAGYGAFPPLAAKQPNQGDLYKDQKIQTFLHSCSLNFDPNK

SEQ ID NO: 87706 - protein, 516 aa, Kordiimonas lacus
  REGION 1..516: note = tr|A0A1G6SVW8|A0A1G6SVW8_9PROT Tryptophan halogenase; OS = Kordiimonas lacus OX=637679 GN=SAMN04488071_0009 PE=4; SV = 1
MTAQAKNIVIVGGGSAGWITAGLIAARTRASAARPVNVTVIEAPDIPIIGVGEGTWPSMRMTLRTMGINEQDFIAACHASFKQGSKFRQWRKNTPEDFYYHPFDLPEGFEDGDIAAYWLKAGTQSFSRTVCPQEHLCERHFAPKSLTSPGYAGFTNYGYHLDAGTFSVFLRSHATSQLGVTHIADKVLGVVAAENGDIAAVETEASGRIDGDLFIDCTGSRSLLLGGHYGIGLTPKSDILFADTALAVQVPYGEADPVQSTTVATAQPAGWVWDVSLSSRRGVGHVYSSNHMDEEAATECLRGYLGLDDAQFGALSVRKLAIGSGYRQAFWHHNCVAIGLSAGFLEPLEASALMLIETSANMVADALVAESGDLATSRDAFNRDLHQIWDDIIHFLKLHYCLSERTEAFWQDNRQPDSMPASLVADMEAWRQPHQGQAPRYGGGTVFPPASYLYVLYGMGFRPDGTAGTLTPDAQSFGKKCADKVERTVAQLQALLPQNRALLDTLNGAMGTGQGG

SEQ ID NO: 87707 - protein, 504 aa, Pseudoalteromonas sp.
  REGION 1..504: note = tr|A0A2A2UYI5|A0A2A2UYI5_9GAMM Tryptophan halogenase; OS = Pseudoalteromonas sp. HM-SA03 OX=2029678 GN=CKO50_09145; PE = 4 SV=1
MKNQKIVILGGGTAGWMAANMMAKSWADKAIEITVVESSSIGTIGVGEGSTPQFKGFMDYLGISEAEWMPACNATYKNGIRFIDWSTKPGFSSYFHPFPAQPDDYSAPAFFHNSFVRRKAIDVEGHPDHFFLATHLADLNKSPIAAESFPFEINYGYHFDSALLGQLLARKAVEFNVKHIDATIIDVRTHVDGDIAALITSDGTEIAGDIFIDCSGFKSLLLQHTLGVGFESFESNLFNDAAVVIPTMQLDTIRSETQSVARQFGWSWHIPLTNRIGNGYVYSQRYCDADQAETELRAALGLLDSEVEARHIKMKVGQVKAHWSKNCIAIGLSQGFIEPLEATALHIVQETVQSFIECYQDADFTDGNRDKHNRALSERYQAIRDYIVAHYRVNSRTDTNYWLDNANNNNLSRSLYQILQTWVSGNNLSDELVRQNVEQYYPSVSWHCLLAGYGIYPEQAQLKSGNALANQHNIEKVNDFIRRCGLNFKDHRMELESFAANVHK

SEQ ID NO: 87708 - protein, 509 aa, unidentified
  source 1..509: note = Paraglaciecola psychrophila
  REGION 1..509: note = tr|K7A9R2|K7A9R2_9ALTE Tryptophan halogenase; OS = Paraglaciecola psychrophila 170 OX=1129794 GN=C427_0898; PE = 4 SV=1
MSSEIKQIIVLGGGTAGWITAGLLAKKHAAGVKVTLIESPDISTIGVGEGTWPTMRQTLAKLGVPEAKFLKKCHATFKQASKFVNWINTENDTYYHPFTEPQGFNKVDLSPYWREATQGKCSFSQAATFQHYLCENGLAPKSIANKQYEAVANYGYHLDAGQFIELLREHCTAELKVELISDTVSRVLMAENGDIKSLVTNENGELSAELYVDCSGMRSKLLGESLNVPFLPCDDIFFSDTALATQIPYTDIHSPISSCTISTAQDAGWIWDIGLQHRRGVGYVYSSQFCTEEQAYDTLAQYLGDKYKIDKVKKINFTPGHREIFWKNNCVAVGLSAGFLEPLEASALMLVETSANLIAEQLPANTQQMPMVAKRFNASMLMKWRGVIDFLKLHYVLSKRDTPFWVKNRDPSSVPDTLKELLELWRFRSPSEYDFTDNMEAFSAASYQYILYGAGFQTDFSNNAYLYEKSALASKQIMLNRQRLEQLKYSLPRHRDLLEKVNQVGFSAI

SEQ ID NO: 87709 - protein, 151 aa, unidentified
  source 1..151: note = Sphingobacteriales bacterium
  REGION 1..151: note = tr|A0A4Q3F4Y3|A0A4Q3F4Y3_9SPHI Tryptophan 7-halogenase (Fragment) OS=Sphingobacteriales bacterium; OX = 2044944 GN=EOP48_34035 PE=4 SV=1
MSANTISKVVIVGGGTAGWMTAASLSHAFAHLPISFTLIESSEIGSVGVGEATIPTIREFYQALGISDIEIMRATNATCKLGIEFKDWHTKGKSFFHPFALYGQAVRGIAFHHYWMKLRQAGYAADISEFSLGVMLAKNEKFTFPSENPPS

SEQ ID NO: 87710 - protein, 499 aa, Microbulbifer marinus
  REGION 1..499: note = tr|A0A1H3YDF3|A0A1H3YDF3_9GAMM Tryptophan halogenase; OS = Microbulbifer marinus OX=658218 GN=SAMN05216562_1664; PE = 4 SV=1
MDERIIKNLVILGGGTAGWMTAALMAKVLGKSIGITLVESDKIGTVGVGEATIPPIINFNQALGLNEQEFLQATKGTIKLGIQFEDWYRRGESYMHAFGTVGKNFPFCDFHHFWRRSKLGGNDSSYWDYSLNYQAAIHNKFAPLAQIKGTNLPGLSYAYHFDAGLYAKFLRQYSEGKGVKRIEGTVQDITLRSGDGFVESLLLENGATVAGDLFVDCTGMAALLIDKTLGVEFEEWSKWLPCDRAMAVPSAGSRPLVPYTRSIAHAAGWQWRIPLQHRTGNGIVYSSRHWSDDDAREVLMSNLDGAPLAEPKLIPFRTGRRARQWEKNVVSIGLSSGFLEPLESTSIHLIQSAATRLIKSFPHRGVKPEEVAEFNRQSRVEIERIRDFIILHYKVNQRRDSDFWRDCEEMEIPAALADKIELFRRTGKVFRNYDDLFTEAAWQQVMIGQGIFPEDHHSIADSLSEPQLEDLMHSLKTLVDGSVKSLPDHEQFLFGQKSR

SEQ ID NO: 87711 - protein, 506 aa, Catenulispora acidiphila
  REGION 1..506: note = tr|C7PZI2|C7PZI2_CATAD Tryptophan halogenase; OS = Catenulispora acidiphila (strain DSM 44928 / NRRL B-24433 / NBRC 102108 / JCM 14897) OX=479433 GN=Caci_2724; PE = 4 SV=1
MSRSDRRILTKRMVFSEMTEVIVVGGGPAGSTAAALLAKNGVSVTLLEREAFPRYHVGESITYSCRGVLDYIGALEKIEARGYTRKTGVLLRWGQELDWAIDWTAQFGPDVRSWQVDREDFDQVLLQHAAECGAQVLEQAQVKRVVFEDGRAVGVEWTPQGHSEPQITRADLVLDASGRAGLISAQHFRDRRATEIFRNVAIWGYWDGGELLPDSPSGSINVISSPEGWYWVIPLSGNRFSVGYVTHKSVFVERRKDYDTLDDMLAAVVAESPTVSEAMAKGTVRPGARVEQDFSYAADSFCGPGHFLVGDAACFLDPLLSTGVHLAIYSGLLAAASVLSIENGDVTETEAYAFYESRYRNSYERLFTLVAGFYQKHAGKDRYFELAKALTREHKGLEGSADLAFGEITSGITDLREAKDDSGLGDRPIRESVAEAASRRSKVQDLLSATEQAQQRAEAGLPNTGGDRGRSRVQIDADDLYDAATGLHLVMEPRLGIQRAAVPAAG

SEQ ID NO: 87712 - protein, 503 aa, Sphingomonas paucimobilis
  REGION 1..503: note = tr|A0A0C9N3K5|A0A0C9N3K5_SPHPI Protein/1, contig: SP631 OS=Sphingomonas paucimobilis NBRC 13935 OX=1219050; GN = SP6_31_00110 PE=4 SV=1
MVSDKVRAVVVGGGTAGWMTAAALARLLPGQCNVHLIESEAIGVVGVGEATLPHIRAFNERLGISEADFMARTRATFKLGIEFRDWGRIGDSYIHPFGTFGRGGGAIDFHHYWARLMQGGQDLPPLDQLSYACTLARQGRFDHPGRERDQLSSTFGYAYQFDALLFAPYLRSLAEEMGALRTEGIVIDVERDGESGLIRAVTLGDGQRIEGDLFIDCSGFRSLLLGQTLGEPFEDWSKWLPTDRAVAMPCRTRTAVTPYTSAIAMPAGWRWRIPLQHRTGNGYVYASDFISDDDARDALIEAVEGEPIAEPRLLRFKAGRRQRSWVGNCIAIGLASGFLEPLESTSIYLVQQAITALIEIFPERHPSDADRDEFNRIIDLEYDRIRDFLILHYHATTRDDSPFWNYVRTMPIPDSLAEKMELWRRRARVVKYREGVFLDASWIAVYLGQGIVPQGWDPRADIAATPELTQAVAALRAEIAHDVAARPDHRDFLDRYCPMGAAA

SEQ ID NO: 87713 - protein, 499 aa, unidentified
  source 1..499: note = Paraglaciecola psychrophila
  REGION 1..499: note = tr|K7ABT9|K7ABT9_9ALTE Tryptophan halogenase; OS = Paraglaciecola psychrophila 170 OX=1129794 GN=C427_3390; PE = 4 SV=1
MKTQYKKINKVVIAGGGTAGWMAAAAFAKLIGKNLEIVLVESDDIPTVGVGEATIPTLHIFHQLLGISEQEFMAATNATFKLGISFENWRDVKKDYLHSFGFLGQGCWAAGFQHFWLKGRERGIASDIGDYVPEHLGAREGKFAVLAGQDLNHAYHLDAGLYAKFLRKIAEKNHAKRVEGKIDKVNLNDKSGFIDSLTLASGQVVEGDLFIDCTGFKGLLIEEALHTGYDDWSHVLPCDSAIAVQTKTVGRPVPYTRAIAHDAGWQWRIPLQNRTGNGFVFCSKYMSDDEAKKTLLANIEGERLNEPRVIKFKTGQRRKHWVKNCVAMGLSSGFIEPLESTGIHLFQRAIVRLLLMFPSQGIKQSDIDEYNVQTKEEAEHIRDFIILHYNLTERKDTPFWRHCSSMEVPESLKHRMTLFKDSGQVFKKADELFGETSWIQVMMGQGLMPEQYHPIVDMMGDDELRDFLNNIKSGVKRKVQNWPDSNDFIKHYCPSSVNT

SEQ ID NO: 87714 - protein, 174 aa, unidentified
  source 1..174: note = Paraglaciecola psychrophila
  REGION 1..174: note = tr|M4RPC2|M4RPC2_9ALTE Tryptophan halogenase; OS = Paraglaciecola psychrophila 170 OX=1129794 GN=C427_3386; PE = 4 SV=1
MHKPLKKIVIVGGGSAGWLTAGIIAAEHSTDAVSGIEVTLVESADVPTIGVGEGTWPTMRSTLKKMGISETDFLLECDASFKQGTKFINWQTNTNEYYYHPFTLPRGFNETNLAPFWQPFRDKISFADAVCMQSHLGEHDYAPKQISTAEYDFSANYGYHLDAGKFAFFYKNMV

SEQ ID NO: 87715 - protein, 494 aa, unidentified
  source 1..494: note = Paraglaciecola psychrophila
  REGION 1..494: note = tr|K7A672|K7A672_9ALTE Tryptophan halogenase; OS = Paraglaciecola psychrophila 170 OX=1129794 GN=C427_0190; PE = 4 SV=1
MNAKTKVIVAGGGTAGWLTAYSLVTRLGKLLDITLVESDQIGTVGVGEATIPTIRTFHGLIGIDEKEFMAATQATFKLGIQFDNWGQQGDSFFHSFGEIGKRAWMAEFHEFWMEAKAQGFGGSLDDYCLELKAAKANKFSTMAGKKPVNFAYHMNATAYAAYLRGKSEKAGVKRIEGRIKQVQNDQAGNISSLVLEGGEPVSGDVFIDCTGFRASLIGDNLDVGYEDWSHWLAADSAIAVQTQAVEAPRPYTRSIAHSAGWQWRIPLQNRVGNGIVYASQFLSDDEATGTLLANLSGETITEPRQLRFKTGRRKKAWHKNCIAIGLSSGFLEPLESTSIHLVTTAILRLMKLFPFGGNTTMLAEQFNRETQLELETVRDFVILHYHQTQRNDSAFWDHYRSMEVPDSLVHRMAMFHENGYAWPDDVGLFRVDSWVQVMMGQGLMPKQHHGAGRVLPADGLKQQMMTLRNMIDNTVSQMPAHSDFIQSYCPAQDL

SEQ ID NO: 87716 - protein, 511 aa, Streptomyces viridochromogenes
  REGION 1..511: note = tr|L8PAW3|L8PAW3_STRVR Putative Halogenase; OS = Streptomyces viridochromogenes Tue57 OX=1160705; GN = STVIR_5720 PE=4 SV=1
MIVGGGTSGWMTAAYLRAALGDSIDVTLVESRRIKTIGVGEATFSTVRHFFDYLGLPETEWMPKCNATYKLGIRFENWRHQGHYFYHPFERLRVVDGFPLTDWWLQKKPSDRFDQDVFLMSAICDAERSPRYLDGRLFEQDFVEQREGGELERTTLAEQNTQFPYAYQFDASLLADFLTEYATERGARHIEDDVLEVVRDERGWISHLRTREHGDIAGDLFIDCTGFRGMLLNQALEEPFISYQDTLPNDSAVALRVPVDMEVKGLRPCTTATAQEAGWIWTIPLFGRIGTGYVYAGDYITPDEAERTLREFVGPEADELEANHIRMRVGRSRNSWVNNCVAIGLSSGFVEPLESTGIFFIQHGIEELVKHFPDATWDPRLRDAYNQAVANVMDGVREFLVLHYRCAARSDNAYWRDAKTRAIPDGLAARLEAWQAKLPTQETVFPHYHGFESYSYLSMLLGLGGLDLKPAGALALMDDTRVTKEFQLIKDQARELVQRLPSQYEYLAQMH

SEQ ID NO: 87717 - protein, 517 aa, Kordiimonas lacus
  REGION 1..517: note = tr|A0A1G6ZJ11|A0A1G6ZJ11_9PROT Tryptophan halogenase; OS = Kordiimonas lacus OX=637679 GN=SAMN04488071_1831 PE=4; SV = 1
MESDTRKSILVAGGGSAGWMTALYLNRLFNHAEKTVDITVVESPDIGIIGVGEATVHSVRFFFAAMGLDEAELMRETNATLKLGIMFRGWMKPVDGEMHQYFHPFEHQRLGRVLDISSMWFLSGRAATERYDEGVCLSAEMIKRGHGPKGPNTPAYQGVVPYGYHLDATLLARFLRKKAVEAGVVHVEATIDDIDVAGETITAIHTNTGQSFSADWYIDCTGFRGLLIDKVAPDNWDSFEDALPCNRAVALQRELAPGEAPNPYTVATALKNGWAWQIDLTNRQGTGYVYDGNRMTADEAEAELRDFLGPQSRVLKSTHLKMRIGCRKRFWVGNVIATGLAGGFIEPLESTGLHLINLAAGLMGTHLAGTAPTDDSRESFNRLMRGFYQDLKQFIVLHYCLTNRDDTAFWRAAPQTVEHTPWLKAQLEVWKHKVCEYHDLAGAFSTTFTDENYRYILYGMQHTPTLGLVADGAESDRMFSQLRQMQENACALTMTHADYLAKLNGTAEQNLEAKASA

SEQ ID NO: 87718 - protein, 488 aa, unidentified
  source 1..488: note = Erythrobacteraceae bacterium
  REGION 1..488: note = tr|A0A2D9PBM3|A0A2D9PBM3_9SPHN Tryptophan halogenase (Fragment) OS=Erythrobacteraceae bacterium OX=2026738; GN = CL952_06305 PE=4 SV=1
  VARIANT 373: note = Xaa can be any naturally occurring amino acid
  VARIANT 385..386: note = Xaa can be any naturally occurring amino acid
  VARIANT 389: note = Xaa can be any naturally occurring amino acid
  VARIANT 392: note = Xaa can be any naturally occurring amino acid
  VARIANT 398: note = Xaa can be any naturally occurring amino acid
  VARIANT 427: note = Xaa can be any naturally occurring amino acid
  VARIANT 432: note = Xaa can be any naturally occurring amino acid
MSSDYKPRRIVVAGGGTAGWMTAAALAKTMGEAIDLTLVESDAIGTVGVGEATIPPLINFNRLLGINEAEFMRETQATFKLGIEFENWKRDGEKYFHSFGSTGRDHWSAGFQHFWGEGLLRGHDYSYDDYCLELCAAYAGKFAHLPDNRLNYAYHLNATAYAAFLRRIAEGAGASRVEGKIAHVELDGESGNIAAIGLENGQRLEGDIFVDCTGFRSLLIEGALHVGYDDWSHHLPCDSAIAVQTELSASPVPYTRAIAHDAGWQWRIPLQHRGGNGIVYCSRYLSKDAAHDRLMSTLEGKAISEPRAIPFTTGARRKQWHRNCIAIGLSSGFLEPLESTSIHLIQRAVIRLLRMMPAGEVSERDIAEFNDQXLTDMIQVRDFLXXHYXATXRRDSAXWRQCATMDIPDSLTQKMELFRETGRVFRXNDELXVENSWVQVMLGQGILPQAFHPVAKKMSDEELSKFLEMLRTNVARTVQGLPAHHAYV

SEQ ID NO: 87719 - protein, 507 aa, Colwellia psychrerythraea
  REGION 1..507: note = tr|A0A099K8J3|A0A099K8J3_COLPS Tryptophan halogenase; OS = Colwellia psychrerythraea OX=28229 GN=ND2E_0466 PE=4; SV = 1
MIISSSNNSSKNPSIKLVIVGGGTAGWMAANLFAKKWPKQKVEVTLIQSPDVGIIGVGEGSTPTLKRFFEMLDIKEHQWMPRCNATYKVSIRFNGWSPQSGVDSYSHPFPTQVDTFTSRAFQVNCATRRLGLEVNTQAEDFLLNGELAKQNKGPLTPDNFPFKMEYGYHFNSHLLGEFLAEQAVNMGVTLRQEHIINVERHPNGDIAAVQTKSGERIAGDFFIDCSGFSSVMMQKTLGVTFNSFKENLFNDSAVVMTTEMTDVVPVETVSTALSAGWCWKIPLANRFGNGYVYSADFISQNDAELEFRQHLGTEEDKQECRHLKMKVGQLSQHWSHNCLGLGLSQGFIEPLEATALHLVQIGIEYFISQFEKGNFSALHRDHYNQFMTRRFDCVRDYIVAHYKLNTRDDSEYWRANRENSNLSESLIQLLNVWYKREDLATEIERQKLSEHFDSVSWHCLLAGYGAFPALALNQPGTGDLYKDKGISAFLKGCSLNFNNHSDYLTKG

SEQ ID NO: 87720 - protein, 524 aa, unidentified
  source 1..524: note = Erythrobacteraceae bacterium
  REGION 1..524: note = tr|A0A2A4NWP9|A0A2A4NWP9_9SPHN Tryptophan halogenase; OS = Erythrobacteraceae bacterium OX=2026738 GN=COC07_07580; PE = 4 SV=1
  VARIANT 301: note = Xaa can be any naturally occurring amino acid
  VARIANT 407: note = Xaa can be any naturally occurring amino acid
  VARIANT 428: note = Xaa can be any naturally occurring amino acid
  VARIANT 496: note = Xaa can be any naturally occurring amino acid
MNHTHTGEASPQALRSICIVGGGTAGWSAAALLSRVLQGSGCRITLVESSDIPTVGVGEATIPPIFDFLRNIGADEVAFIRRCQATFKLGIQFRDWLQRGHSYWHPFGNLGVTINQRPFHHYYWKNLAEGHDEGLADLCPSVALAEDNKFAFPSPDRNWPGGAVAYALHFDAGLVAAFLREHAEAAGVERLDRRILRAERGEGEHIAAVHFDNGESLSADFYIDCSGFRGLLIEEALEAGFDDWRRWLPCDRAVAAPTAAQSVRAPYTVATARSAGWQWRIPLQHRTGNGLVYCSDFIRDXDAAEELREGLGGPPIANPRVLRFTPGLRKRVWIGNCLALGLSAGFLEPLESTSIHLIHTGLNRLLDLFPDRSFDPVLIDSYNRDVEREYAHIRDFLLLHYYPNQRXGEPFWDHVRNIELPDTLVEKXALFERTGRIMSKHRELFSDISWFYVAAGMGLRPAAIDPLVDVAPFEEVRKVIVQLRDAMGAFRAAAPXHDAILDRLLDPKETRRPNFGAGAGWANR

SEQ ID NO: 87721 - protein, 529 aa, Actinoplanes utahensis
  REGION 1..529: note = tr|A0A0A6UP48|A0A0A6UP48_ACTUT Tryptophan halogenase; OS = Actinoplanes utahensis OX=1869 GN=MB27_14840 PE=4 SV=1
MSDRIRNVVILGGGTAGWMTAAYLGKALESGVDITVLEAPSIPRIGVGEATVPNLQRAFFDFLGLSEEEWMPECNAAFKTAVKFINWRTPGAGSTQTRQLGDRPDHFYHPFGLLPESGGVPLSHYWFNDLKAGRTTEQFDDACFRETAIMDAGRAPRYLDGRRATRYAWHFDAHLVADFLRRFATEKQGVIHVQDEMTHAVQDSRGHITALHTKSGKVLEADLFVDCSGFRSLLIHQVMREPFLDMSDHLLNDRAVATALPNDDEANGVEPYTSSIAMSSGWAWKIPMLGRHGSGYVYSSRFASQDEATQEFANMWGLDPEKHTFNHVKFRTGRNRRTWVKNVVSIGLSSCFVEPLESTGIYFITAAIHQLAKHFPNRNFDQILIDRFNTEINEMFDDTRDFLQAHFYYAPRTDTPFWRANKELHLADQIKEKVAMYKAGLPVCPPSTSEDGYYGSFEAEFKNFWTNGSYYCIFAGLGLLPDQTMPALAHRPTAVEGARPHFEEIKRLQAELAATLPSNYEYLKQLHRR

SEQ ID NO: 87722 - protein, 503 aa, Brevundimonas sp.
  REGION 1..503: note = tr|A0A514BZH8|A0A514BZH8_9CAUL Tryptophan 7-halogenase OS=Brevundimonas sp. M20 OX=2591463; GN = FKQ52_04815 PE=4 SV=1
MSTPPEPIRKVLIVGGGTAGWMTAAALSHVLRGAVQVELVESEAIGTVGVGEATIPPILLFNALLGIDENEFLRETQATYKLGIQFQDWFRKGHAYFHPFGQYGSRVGAASFHQYWLRLQAAGLDDDLDAYSAPAMAARLGRFARPQGDPRSINAAMAYAFHFDASLYARFLRGRAERAGVVRHEGRIADVRMAPNGDIGAVALEDGRVLDADFFIDCSGFRGLLIEGALKTGYEDWTHWLPCDRAVALPCARVEPPTPYTRSTALEAGWRWRIPLQHRTGNGYVYCSEHISDDEALARLRGSIDGECLADPNLLRFHTGRRKKAWNRNCLAIGLSSGFLEPLESTSIHLIQTGITRLLLSFPDTAFSQPDIDNYNHLSQLEYERVRDFVVLHYKATERTDTPLWRQVGAMEIPDSLRRKMELFRSRGRVFRFEDELFQDTSWIAVLLGQGVRPERHDPITEVMPLEATRDHLHRMRALIRDGVERMPTHDDFIRGAVQAAPR

SEQ ID NO: 87723 - protein, 267 aa, unidentified
  source 1..267: note = Sphingobacteriales bacterium
  REGION 1..267: note = tr|A0A4Q3H0S9|A0A4Q3H0S9_9SPHI Tryptophan 7-halogenase (Fragment) OS=Sphingobacteriales bacterium; OX = 2044944 GN=EOP48_15435 PE=4 SV=1
YEDWSHWLPCDRAVAVQTESVRPSVPYTRSIAHDVGWQWQIPLQHRVGNGLVYSSHYLSDEEAKEKLLNNIQGALLTEPRTIKFQTGRRREVWKKNCVALGLASGFIEPLESTSIHLIMMGVNRLMHLFPFSGVNDALISEYNRLSRIEMEQLRDFIVLHYHTTERNDSAFWNYCRTMSIPETLKLRIDLFKQNAHAYQADGELFRVDSWTQVMIGQRLHPSHYHHLVKMMPETELQKFLNNISASVLQAVEKLPLHADFVRAYCGK

SEQ ID NO: 87724 - protein, 158 aa, unidentified
  source 1..158: note = Sphingobacteriales bacterium
  REGION 1..158: note = tr|A0A4Q3GZ65|A0A4Q3GZ65_9SPHI Tryptophan halogenase (Fragment) OS=Sphingobacteriales bacterium OX=2044944; GN = EOP48_15290 PE=4 SV=1
TSIHLIMMSAMRLVKFFPSNGIKESNVNEYNQQTVTEIERIRDFVILHYHATQRDDTDFWRYCKNMDIPEALAHRVQLFKDTAAIALEEKELFLNDSWVQVMMGQGIMPTSYHPIADVMDEMELKNFLGYLKKSVGEKVAAMPSHQELINRYCKAPAM

SEQ ID NO: 87725 - protein, 535 aa, Alloactinosynnema album
  REGION 1..535: note = tr|A0A1H0FWX2|A0A1H0FWX2_9PSEU Tryptophan halogenase; OS = Alloactinosynnema album OX=504798; GN = SAMN05192558_101554 PE=4 SV=1
MTKSGAAANLTDPGKTKSVVIVGGGTAGWMTAAYLKAAFGDRIDVTVVESAHIGSIGVGEATFSDIRHFFEFLRLEESDWMPACNATYKLGVRFEDWREPGHHFYHPFEQLGSVDGFPLSDWWLRMPQSSRFDRDCFVMAALCDAERSPRYADGTPLAQGVFENVGGGQSARSNIAEYQGAQFPYAYHFEAHLLAKFLTKYGTDRGVKHITDNVVDVALDEQGFVSHVDTAENGRLSGDLYIDCTGFRALLLKQALGEPFVSFQDTLPNNSAVALQVPMDMERKAIRPCTTATAQDAGWIWTIPLISRIGTGYVYADEYLSAEDAEKTLREFVGPEAADIPANHIKMRIGRSERSWVKNVVGIGLAAGFVEPLESTGIFFIHHAIEQIVRYFPGGRDDDVRRDAFNRSIEHVMEGVREFLCLHYVGAKRADNQYWKDTKTRKIPDALAERIEIWKHKVPDSESVYPYYHGLPPYSYNCILLGAGGIEVKHSPALDLADPTAAQVEFDRIRLKADKLVQELPSQNEFFAAMRANAK

SEQ ID NO: 87726 - protein, 293 aa, unidentified
  source 1..293: note = Sphingobacteriales bacterium
  REGION 1..293: note = tr|A0A4V1T899|A0A4V1T899_9SPHI Tryptophan 7-halogenase (Fragment) OS=Sphingobacteriales bacterium; OX = 2044944 GN=EOP48_20985 PE=4 SV=1
MTEHTTMNSIRKIVIAGGGTSGWLAAAAISKILGKNLDITLIESPEIGRIGVGEATIPTLRVFHKLLGINEQELMASVQGTFKLGIEFSNWGNKGDKYFHSFGLTGKDCWACQFQHFWMAGKKYGINVPFGDYCPESKAARLEKCNGESEGINYAYHFDANLYADYLKAFSVKLGVKHVEGFIDRVNLSPENGFITSLLLKDGQIIEGDLFLDCTGFKAMLIEGALNTPWIPYGHYLPCDSAVAMQTELVRAPRPYTQSIAHDFGWQWRIPLQHRAGNGLVYSSRHVSDDEAI

SEQ ID NO: 87727 - protein, 502 aa, Kordiimonas lacus
  REGION 1..502: note = tr|A0A1G7D874|A0A1G7D874_9PROT Tryptophan halogenase; OS = Kordiimonas lacus OX=637679 GN=SAMN04488071_2998 PE=4; SV = 1
MTAQTIKRVVIVGGGTAGWMAATALSKIMGGVLDITLIESDQIGTVGVGEATIPTLVNYNRLIGIDEQAFMAATKATFKLGIEFVNWKQKGESYIHSFGITGKDHWTAGFWHFWLRGLKEGIDYKFGDYCLELIAAEQSKFAHLPKLGLNYAYHLDATAYAGFLRKMAEEHGAKRVEGKITSVQQNGESGYVESVTLEGGKVIEGDLFVDCSGFRALLIEGALHTGYHDWTHWLPCDSAIAVQTEAVSDPIPYTKSIAHDSGWQWRIPLQHRVGNGLVFCSNYQSDQSAIDTLMSNIEGKPLVDPRVIKFRTGTRRKHWNKNVVAVGLSSGFIEPLESTSIHLIQRSIFRLMQMFPHTGIVQADIDEFNAQTSYEMEHIRDFIILHYHVTERRDTPFWRQCANMDIPDGLKHRIALFRDAGRVFRPNDQLFAENSWVQVMLGQGIMPGQYHPIADRMTDEELHNFLAHIRSNVEKTAMQLPSHNDYVQQYCKATEVMAKGAA

SEQ ID NO: 87728 - protein, 502 aa, Streptomyces sp.
  REGION 1..502: note = tr|A0A429A335|A0A429A335_9ACTN Tryptophan halogenase; OS = Streptomyces sp. WAC 01420 OX=2203203 GN=DMA10_17835; PE = 4 SV=1
MDQAQTEEADVVVVGGGPAGSTLAALVALQGHRVVLLEKERFPRYQIGESLLPATVHGVCRLTGVADELAAAGFTRKLGGTFRWGANPDPWTFSFSVSPRMAGPSSYAYQVERSTFDQILLDHARRLGVDVREGTAVSEVLDDGERVRGVAYTGEDGTRHEILSRYVADASGNRSQIHGSAGGTRKYSDFFRNLALFGYFTGGKRLPQPYSGNILSAAFSSGWFWYIPLSPELTSVGAVVRRDMAQKVQGDPEKALLALIDECPLVKEYLADAERVTTGQYGQLRVRKDYSYQATAYWRPGMVLIGDAACFVDPVFSSGVHLATYSALLAARSVNSVLAGTVDEETAFKEFEARYRREYSVFYEFLVSFYDMNADENSYFWKAKKVTGGSGEEFESFIELVGGVASGETALAGERTTATGLRARSAEFSEAVDRISTGQDATMVPLFRSEVVRNAMREGGQVQNQAMLGEDSEAEAPLFPGGLVSSPDGMFWQHPGSEATAR

SEQ ID NO: 87729 - protein, 500 aa, unidentified
  source 1..500: note = Erythrobacteraceae bacterium
  REGION 1..500: note = tr|A0A2D6NM87|A0A2D6NM87_9SPHN Tryptophan halogenase; OS = Erythrobacteraceae bacterium OX=2026738 GN=CL951_07890; PE = 4 SV=1
  VARIANT 54: note = Xaa can be any naturally occurring amino acid
  VARIANT 105: note = Xaa can be any naturally occurring amino acid
  VARIANT 120: note = Xaa can be any naturally occurring amino acid
  VARIANT 123..124: note = Xaa can be any naturally occurring amino acid
  VARIANT 333: note = Xaa can be any naturally occurring amino acid
  VARIANT 345: note = Xaa can be any naturally occurring amino acid
  VARIANT 386: note = Xaa can be any naturally occurring amino acid
MSSDYKPRRIVVAGGGTAGWMTAAALAKTMGDAIDLTLVESDAIGTVGVGEATXPPLINFNRLLGINEAEFMRETQATFKLGIEFENWKRDGEKYFHSFGSTGRXHWSAGFQHFWGEGLXRGXXYSYDDYCLELCAAYAGKFAHLPDNRLNYAYHLNATAYAAFLRRIAEGAGASRVEGKIAHVELDGESGNIAAIGLENGQRLEGDIFVDCTGFRSLLIEGALHVGYDDWSHHLPCDSAIAVQTELSASPVPYTRAIAHDAGWQWRIPLQHRGGNGIVYCSRYLSKDAAHDRLMSTLEGKAISEPRAIPFTTGARRKQWHRNCIAIGLSSGXLEPLESTSIHLXQRAVIRLLRMMPAGEVSERDIAEFNDQQLTDMIQVRDFLIXHYKATDRRDSAFWRQCATMDIPDSLTQKMELFRETGRVFRKNDELFVENSWVQVMLGQGILPQAFHPVAKKMSDEELSKFLEMLRTNVARTVQGLPAHHAYVAQFCGAKEVAAA

SEQ ID NO: 87730 - protein, 518 aa, Colwellia psychrerythraea
  REGION 1..518: note = tr|A0A1Y5EPF7|A0A1Y5EPF7_COLPS Tryptophan halogenase; OS = Colwellia psychrerythraea OX=28229 GN=A9Q75_02975 PE=4; SV = 1
MNEQVKQVVVVGGGTAGWLTAANLAKKFNSIESGAIQVTLVESPDIPTIGVGEGTWPTMRKTLAKLGISEADFLSKCNASFKQATKFVNWQKAPKNGINSHYYHLFTSINDPLDFNLAPYWKLGMIGDNNSYADTVSMQAAICESGLAPKLITNREFEGIQNYAYHLDAGLFTDLLREHATSKLGVKHISANVTDVNVDDDGYIKNIHCDSVGAVSGDFFVDCTGFKSLLIGKALGIPFKSIKDTLLCDHALAIQVPYDNEESPIASCTISTAQEAGWTWDIGLSNRRGTGYVYSSAHTSHERAEQVLREYIGPQAEQLESRLIKMNVGYREKFWHKNCFAIGLSAAFVEPLEASAIFLIEASANMLSELFPRDRHAMLAVEKKVNKSFKFRWDKTIAFIKMHYFLSKRTEPFWQDNKAVSTVPETLLASLDSWKHQLMTGYDFDNVYEPFPLDSYQYVLYGMGFEQALTFNESSYSLQDFAKQQYDTVQELTQKMQQQLPENRALLSKIAQYGFQKI

SEQ ID NO: 87731 - protein, 507 aa, Colwellia psychrerythraea
  REGION 1..507: note = tr|A0A099K8N2|A0A099K8N2_COLPS Tryptophan halogenase; OS = Colwellia psychrerythraea OX=28229 GN=ND2E_0496 PE=4; SV = 1
MKKIVVVGGGTAGWLAANHLGKKFKGNGEVTVTLIESPDIAPIGVGEGTVPNIRKTLSSFGISETEFIRECDVTFKQSIKFVNWMDKQKHGNDNFFHHLFDAPDKFSEDLTPYWLKHGQANRYADMLSPQHSACEHNKAPKSITTPEYEGMLGYAYHLNAAKFAHLLCKNAVEKFAIEHIKANVTNVELSNTGSIAALNTKELGKLEFDFYLDCTGFESLLSGKALNVPFVDKSKELLVNSALVVQVPTEETDEIPPYTVATAHQAGWIWDIALTNRRGVGFVYSDNHMSDDEAKAKLDHYLKGNSSGLTYRKLPMKVGHREKFWHKNCVSLGLAQGFLEPLEATSILLTDFAASFLADRFPESNEQMILLEQRFNHVMGYAWDRVVDFIKLHYCISDRTDSKFWMDNQKEETIPGSLKARLDLWQQFSPQKEDFFSKFEVFDYDNYLYVLYGMRYKTQLAYLPSSDHDKAKEQAERIKAIAAQLNLQLPNHRELINKIKKYGLQDV

SEQ ID NO: 87732 - protein, 496 aa, Colwellia psychrerythraea
  REGION 1..496: note = tr|A0A1Y5EMA7|A0A1Y5EMA7_COLPS Tryptophan halogenase; OS = Colwellia psychrerythraea OX=28229 GN=A9Q75_06925 PE=4; SV = 1
MNSPIKKVVVLGGGTSGWISAALLKKILGTAIQLELVESDAIGTIGVGEATIPPIKHLNNVLGINEAEFLRETKATIKLGINFENWKSQGHSYLHSFGAAGKSLAFCHFHHLLKRANQLEDDSHLWQYDLNYLCAKAGKFAHIKSKDPIIELPYAYHFDAGLYANFLRKFSEKIGVIRTEGLVEHVEQCPISGHITSLKLKNGQTVTGDLFIDCSGFKGLLIQEKLRTGYEDWSHLLQCDRAIAVPSERLEKTLPYTRSIAHAAGWQWRIPLQHRNGNGLVYSSSHCSEQQAMDTIMGNLDTKPIADPKIIKFQTGRRYQQWNKNVIAIGLSSGFLEPLESTSIHLVQSAVVRLAHLFPHQGINSSLVDEFNKQSATEFEQIRDFLVLHYHATERTDSDFWQDMRHMKIPDSLAHKIEIFKQSGRLFREQNDLFTDSSWLQVMLGQGIVPQDYHPIANTMSDEKLAEMLRKVKEIKQAPIDKLPSHDEFLRIFCHQ

SEQ ID NO: 87733 - protein, 500 aa, unidentified; identical to SEQ ID NO: 83121
  source 1..500: note = Gammaproteobacteria bacterium
  REGION 1..500: note = tr|A0A2E1UEX3|A0A2E1UEX3_9GAMM Tryptophan halogenase; OS = Gammaproteobacteria bacterium OX=1913989 GN=CMP97_05445; PE = 4 SV=1

SEQ ID NO: 87734 - protein, 517 aa, Streptomyces sp.
  REGION 1..517: note = tr|A0A401MXT0|A0A401MXT0_9ACTN Tryptophan halogenase; OS = Streptomyces sp. NL15-2K OX=376149 GN=SNL152K_10712; PE = 4 SV=1
MESSIKKIVVVGGSVVGWTVAARLAQAFGGTVLVTVLQAPSDLADGVETGQVTAVPPELQRVLFDQLGVAESVWMRSCRASFRAAVRHVNWRTPGAAGATARTLPNGGADHFYRPYADMPECEKYPLSDYWQSRRSQGETVEPYDYACFREPPLMDARKSPRWLDGRAALPYGWHVDTRLFTEFVRDLAVRRLGVRVFRDRLRYAARDADGMISVLHTEQGRTIPGDFFLDCTGKEGLLLNRTLGEPFHPAHDRLLCDSTVTVTVPHDDDTHGIEPFATATAMPYGWTWKMPLPGRFVTGLVYARALTGPDEAARALCELWGLPPARTEVRRTSHRFGRSHRSWVGNCVAAGASACSVEPLGGDGLTEALDTIDRLVRDFPSRDARDAPAARFNRAVEARQTRALDVAQLHYAAAPRTDPGFWRAQRELPLSAALQECVQAFSAGLSAGPGEDVHYGLLAALHTGCPAPRVSIGHRPGARRAAGEHFTRVKRQQRILLETLPSAHAYLRRLHRDAVA

SEQ ID NO: 87735 - protein, 556 aa, Dinoroseobacter sp.
  REGION 1..556: note = tr|A0A2D8TNE4|A0A2D8TNE4_9RHOB Tryptophan halogenase; OS = Dinoroseobacter sp. OX=2003366 GN=CL945_15305 PE=4 SV=1
MGEPIKSITIVGGGTAGWMTALILQSYLSRAATGGKAARITLIESPNIPTVGVGEATVPGMPRTLRTAGLSEQEFFKTCNASFKLGVLFANWNTDKHGRQVDYVNPFSGPGVIDGIEQAYYYLQHGAGGQDFTQIFCPHTDLARAGKGPRPLGEKPYTMKIGHAYHLDAGKFANMVRDICVERGVQHIREDVLDVEQDERGYVSALQLDKTGRHEVELVVDCTGFKGVIINQVMKEPFIDYSRYLANDRAMAVQIPHPDPTRIPSMTRAYALGAGWSWRVPLFNRIGTGYVYSSAHRTDEEARDEFVAHLGDTWNGVEPRVIPMRIGRNQNAWVKNVVAVGLSGGFIEPLESTAIHMIDTAVRWLAIYFPDSDYAEPLRKHYNKLVGNLYDEVRDFICLHYALGNRTDSQYWIDAREGLEVPDSLAENLEVWRYALPGPYDLKFDSLFSAGTYQAVLLGKKVYETGFAAPSFAKNLSLSTELWQRHLAKARETSKILVQRMADHHTLLLELRGELQKPAPAPNFVTAQPTVAMPGTPVMTRKPTPPALDEDGASLL

SEQ ID NO: 87736 - protein, 494 aa, Colwellia psychrerythraea
  REGION 1..494: note = tr|A0A099L0A7|A0A099L0A7_COLPS Tryptophan halogenase; OS = Colwellia psychrerythraea OX=28229 GN=GAB14E_0248 PE=4; SV = 1
MNNQKITKIVVAGGGTAGWMSAASLSKLLGKSFDITLVESDGIATVGVGEAAIPTLTAFHRLLGINEQAFMKATHATFKLGINFENWKKGDDEYMHGFGRVGKECWAGEFQHFWLHGKQNNIEFAFDHYSPEIQAAKAEKFALSKKGLNYSYHLDATLYAKFLRTFAEDHGVKRIEGKIIDVAKDSKTGEIKSLQLANGNVIEGQLFIDCTGFVGLLIEKALHTGYEDWSHWLPCDSAVAVQTKSVSAPLPYTRSIARESGWQWRIPLQHRVGNGLVFCSKYLADDDAKTFLIDNIEGEPINQPRVIKFKTGRRRKGWNKNCVALGLSSGFLEPLESTSIHLIMSGVLRLIRLFPFEGISPSAVNEYNQQLTSELEHIRDFIILHYHATQRADTPFWQYCKGMEIPDSLKQRLDLFKETGRIFTSEGELFRVDSWAQVMLGQGVYPEQYHQIAAIMKPHELDKFLSDIRQTIDKAVADLPSHQIFLDQYCRSNH

SEQ ID NO: 87737 - protein, 518 aa, unidentified
  source 1..518: note = Gammaproteobacteria bacterium
  REGION 1..518: note = tr|A0A4Q5QAJ0|A0A4Q5QAJ0_9GAMM Tryptophan 7-halogenase OS=Gammaproteobacteria bacterium OX=1913989; GN = EOO53_05550 PE=4 SV=1
MDNIIKRIVIVGGGTAGWLVAGVIAAEHPAATGVEVTLIESPDITAVGVGEGTWPTMRSTLQKMGISETELVRECDVAFKQASKFVKWTTGEDDDEYYHPFTLPERYTEINLANSWQTFRDKISFADAVSFQSHICHRHMGPKQITTPEFAGVANYAYHLDAAKFATFLGKHCREKLGVKYIRDNVTKVNPAENGDILSLATQNTGDIEGDLFIDCTGLASILLGKHYQIPFISTRNVLFNDAAFAAQVAYPDPECDIASNTISTAQTAGWIWDIGLPSRRGVGHVYSSSHISDELAEKELRDYFAKDIGRKKADAVDLKKIKFNPGHREVFWHKNCVGVGLSAGFVEPLEASAIILIEISSKIISEQLPETRKAMDVVARRFNAKLTTHWKNIVDFLKLHYVLSKRTDSQYWIDHRNPESVPQSLQDLLEIWSYQTPWFYDEHLRDEMFPSASFQYILYGMGFETKTRLARKSIAAEIQQSEYSFQENSRKTKEFLKGLPTHRDLINKIKEYGLQKI

SEQ ID NO: 87738 - protein, 513 aa, Sphingomonas ginsenosidimutans
  REGION 1..513: note = tr|A0A2A4HW89|A0A2A4HW89_9SPHN Tryptophan halogenase; OS = Sphingomonas ginsenosidimutans OX=862134 GN=COA17_14560; PE = 4 SV=1
MAGAMSETSRAVRKVTIVGGGTAGWMAAALLSRLFAGGGFDIRLIESDEIGTIGVGEATIPAIRTFMELAGLDQVEMIRATQATFKLGIEFVDWRAKGTSYIHGFGTIGQDLLWLHTHQFWLKYAARGQAKPFDAYALNCLAARRNRFCMPDARNPDSPLAGLDYAYHFDASLFARHLRAQSEARGVTRIEGRIVDTICRGEDGHVDHVVLADGRTVDGDLFVDCSGMRSLLLGQALGVGYEDWRHWLPCDRALAVPCASIAPLTPYTRSTARDAGWQWRIPLQHRIGNGHVYASDYISDDDAAATLLANLDAAPLADPRPVRFVPGRRLRAWDKNVVAIGLSSGFLEPLESTSIHLIQTALLRLVALFPGEGVKPADVAEYNRQTAFEMTDIRDFIIAHYKVTEREDTPFWAYVKHMAIPDSLAERLELFRTSARFFLHSRAELFREESWVQVLIGQGLAMRHDPMVDLIPDADALAYLRDIEAVIDDVSARMPDHAAFVARNCSAAATPAR

SEQ ID NO: 87739 - protein, 510 aa, Streptomyces sp.
  REGION 1..510: note = tr|A0A429JQJ9|A0A429JQJ9_9ACTN Tryptophan halogenase; OS = Streptomyces sp. WAC 06725 OX=2203209 GN=DMH15_03005; PE = 4 SV=1
MGERAVANSANAGNPANPETYDVVIVGGGPAGSTLGALVARQGHRVLILEKEFFPRYQIGESLLPSTVHGVCRLTGVADDLAAAGFTRKRGGTFRWGATPEPWTFSFSVSEHMAGPTSYAYQVERSKFDEILLRHAGRCGAEVREGCAAADVIADEERVRGVRYTDADGAEREAYGTFVIDASGNKSRLFQRVGGQRTYSEFFRSLALFGYFEGGKRLPEPNSGNILSVAFDSGWFWYIPLSPTLTSVGAVVRREMAEKIQGDQEEALRALIAECPLISEYLADARRVTTGQYGQLRVRKDYSYHQTTFSRPGMLLVGDAACFVDPVFSSGVHLATYSGLLAARSINSVLAGLVDEAVALREFEARYRREYSVFYEFLLSFYEMHHSEQSYFWQAKKVTHHKRSEMEAFVDLVGGVSSGETALTDADAMAERLRADSAEFAGAVDQLAHSEDGSMLPLFKSSVVSQVTREGSQVQMRALLGADAEPETPLLPGGLVSSPDGMFWLPASSG

SEQ ID NO: 87740 - protein, 521 aa, unidentified
  source 1..521: note = Gammaproteobacteria bacterium
  REGION 1..521: note = tr|A0A2E1PQN2|A0A2E1PQN2_9GAMM Tryptophan halogenase; OS = Gammaproteobacteria bacterium OX=1913989 GN=CMQ80_03355; PE = 4 SV=1
  VARIANT 231: note = Xaa can be any naturally occurring amino acid
MNDKAIKDIVIIGGGSAGWLAAGIIAAEHNNPKHDVHFINVTLIESPNISSIGVGEGTWPSMRTTLKKIGISETAFIKDCDVSLKQGTLFAGWKNGSDVYTHPFTVPHGYAEHNLVNEWQESSSHIPFAEAVCSQNTLMLRNQAPKNITTPEYSFNLNYGYHLDAGKFAKKLNTHCTEVLGVIHKRAEVVNINSHENGDLKSLQLDSGEIIQGDLFIDCSGSRSLLLGKHXGIPFSSKQKYLFNDSAIASQVPYSSDDDPIASSTLSTAQSSGWIWDIGLPSRRGIGHVYSSSYTDATSAEKELRHHIKNLVGEEIAEHVSTRKIEFSPGHLEKFWHKNCVAIGMAAGFIEPLEASALVLVELSANMIAEQLPQNRKIMDIVSKRFNEKFLYRWDTIIEFLKLHYILTDRDNSEYWRDNVSHESIPASLQEKMDLWKWQGPYHKDTLHIDEMFPSASYQYILYGMGFKTNPGNFRRSNQETSAVALDLFDENAMRTKQLVSSMPTNRDFIAKVHQYGLQKI

SEQ ID NO: 87741 - protein, 520 aa, Colwellia psychrerythraea
  REGION 1..520: note = tr|A0A099KKF9|A0A099KKF9_COLPS Tryptophan halogenase; OS = Colwellia psychrerythraea OX=28229 GN=GAB14E_3680 PE=4; SV = 1
MSVINSQPKKIIILGGGSAGWMTASLLDKAWADKGTEILLIESDLINKIGVGEGSTPSLRLFFNHLGISEQEWMPECNATYKCGISFPGWTNRDDPAYADFPAYIHPFYSKADWKTGNAFMHNARLRRDGIDVPAHPDDYWLQSYLAKHFKGPIASQKLRDEMDYGYHFDSALVGDFLKKRLLNKGLSHLVDTVNDVILNDKGEISSVVTKDNGAHTADIFIDCTGFAARLIRGALKVDFIDYSDCLFNDRAIAIQSPIDCTQDIPSQTTSTALSSGWAWRIPLINRYGNGYVYSSKYLSDGEAEKELRDHIGPSCKNQDARVIKMRLGRLSQHWYKNVLAVGLSQGFIEPLEATALMLIQHTVESFIGDYQDMFAKKRDLCVQQDIYNSQLNKVFESIKDYIVAHYRLNSRTDSQYWRDNRENKNNSARLNALLSAWHTQGADFEAELHNHNAELTYFAPSWYCLFAGKGHFPASLNKPSANTKVAPTAEIIKYCQHVSQQFYNHNEQLEKVYGNRWPK

SEQ ID NO: 87742 - protein, 519 aa, Colwellia psychrerythraea
  REGION 1..519: note = tr|A0A099L2C1|A0A099L2C1_COLPS Tryptophan halogenase; OS = Colwellia psychrerythraea OX=28229 GN=GAB14E_0249 PE=4; SV = 1
MSKVIKNIVIVGGGTAGWLTAGVIAAEHNSKSASGLQVTLIESPEVNTVGVGEGTWPTMRETLDKIGINETDLFRECEASFKQGAKFSKWVTGAEDDYYYHPLVLPQGYTKTDLVFPWQKHRGEISFADAVSYQGHICEQGRAPKLISTPEYAGIANYAYHLNAVKLGQFLRKHCIEKLGVKHVVDHVAEINSADNGDIDSVLTKEHGDITGDLFIDCSGFSSILLGKHFKVPFISKKHILFNDTALAVQVPYPDENSDIASHTISTAQSSGWIWDIGLPSRRGVGYVYSSDHTNEKDAEVELRAYIESSIGKAETDKLNIRKISFNPGHREKFWHKNCVAIGMASGFLEPLEASALVLVELAAAKISREMPATRETMDIVAKRYNRQFLYRWQRIIEFLKLHYILTKRSDSAYWRDNCNAETIPESLQELLTLWEHQPPGPQDFHHVEEVFPSSSWQYVLYGMGFETQESEVSRKFVNEEMAHQFFSENVQLTKKYLSALPSNRELINKIKQYGMHKI

SEQ ID NO: 87743 - protein, 795 aa, unidentified
  source 1..795: note = Methylorubrum zatmanii
  REGION 1..795: note = tr|A0A1W6RMQ3|A0A1W6RMQ3_9RHIZ Tryptophan halogenase; OS = Methylorubrum zatmanii OX=29429 GN=B2G69_19640 PE=4 SV=1
MFRSERSAPPRLVVAGGGPAGWMAALYLKRVLRRAGWTITLVGSAPAAGASAALATRPAFTRFLKGFGIDEAIFMRRCAATYRLASRYDDWFAEGQGHWHPFGACGPRIAGRDLFHYWMKLRGEGAEDEAGSYADYAPQALMAAEGRGPRPLADRSSLTESGDYGYHLDRTALVRFLRELALSEGVRGVTGRVREIERNLYGDVGALVLDGGQTVEGDIFLDCTGAAAQLIGTALGEAWVAGSGPGDRVARLSLPRSPEVPPFTAYRGRAEGWTASLPLADRTEHLFVYDIRTTPPDAAAATLRRTFDGQAGIVDAELRHGRRAAPWQRNVVAMGAAAGAVEPLLGFDLDLVLAGLETFLAYLPRQGEGGDVLRRAYAARLNRFHDDAAEAVAAHYVLGRRSEPFWAAARAVMIPDRLADRLDLYELAGHVALNEEAPFSEGDHYLLFSGADFLPRRPFAPVDVADGREIARLLASIRAQSAQIAGAMAPHVRLMDALHGEAPVAAPAVRIAAASAPAGPAALRRTPEGARLADLVAGLGQPFGYERSVKASPAGLQTDRFLMSLHRASLGLTPEATLDRLAAGLGLPERERAEAAGVIGGADILHLGYEDGPSGALYKLYVEWSSRTDAAWTGADEAGAEPMLVHRAYKWKLGGTHPPVVTLYHWPRVRGPEEIAARLTRMAGEWGPAGAPARDTAHAILRLAQERGRGAVHYLEAREEPGLRLSYDLNLYACGLTVADAEPLLGQAFVDLGVPRDAAAMVLRERLQETLGHVAGGVGRDGQPLVTVYSGVAGG

SEQ ID NO: 87744 - protein, 500 aa, unidentified
  source 1..500: note = Gammaproteobacteria bacterium
  REGION 1..500: note = tr|A0A4Q5QAC6|A0A4Q5QAC6_9GAMM Tryptophan 7-halogenase OS=Gammaproteobacteria bacterium OX=1913989; GN = EOO53_01705 PE=4 SV=1
MREPLEIIVVGGGTAGWMSAVALANATNDQICKITLVESEEIGSVGVGEATLPQIKEFNDRVGINESDMMKFTQATFKLGIEFVNWGRLGASYIHPFGKHGEAIQGNEFHQIWGRVRSQEGIADIGAYSYAIEAGRKHRFDFPVSDGNYINSTYSYAYHFDASLYALFLRQEALKQGVRRIEGKILNVKKHAVSGNIESLTLASGKEISGDFFVDCSGLRSLLLAQELGEEFEDWSPWLLCDRAWALPTSKLEDIPPYTRSTAKAAGWQWRIPLQHRTGNGYVFSSQFSTEQSALDSLEQSINEQAIADARLIKFKAGRYKNSWTKNCVAIGLSSGFLEPLESTSIYLIQVAIQNLLKLFPSKQSNSLAIQEYNRLMDNEYARIRDFLILHYKLNDGSLGDFWQHCKNMEIPKSLAEKLEIFKRRGFVDTYNYGLFSLPSWVSVFIGQGWFQEGFDPFALGLADEDITLQLNKLSTKINIKLADTPTHQAFINQYCAAKA

SEQ ID NO: 87745 - protein, 505 aa, unidentified
  source 1..505: note = Gammaproteobacteria bacterium
  REGION 1..505: note = tr|A0A4Q5QD80|A0A4Q5QD80_9GAMM Tryptophan 7-halogenase OS=Gammaproteobacteria bacterium OX=1913989; GN = EOO53_02615 PE=4 SV=1
MIKDSGALIQKIVIVGGGTAGWMAAATFARTMGKQVSIQLIESDEIGTVGVGEATIPQIKLFNSLLGVDENDFLKATQGTIKLGIQFNNWGRQGDSYMHAFSGIGIDLGMIDFYQYWLRSIHDGVTSSLWDYSLNTQAAYKNLFAKMERVGETRLPGINYAYHFDASLWAKYLRTYCEHYSVVRIQGKIATTILDPDNGFIESVVLENGDTINGDLFIDCSGFRSLLIEGALKTGYEDWSHWLPCDSAIAVPCASSEILLPYTRATAHSAGWQWRIPLQHRIGNGHVFCSKFMSDDKATQILLDNLDGEALAEPRKLQFVTGKRKKIWNKNCIALGLASGFMEPLESTSIHLIQHALGKLVELFPRKDFAQADADEFNRQLSAEYEHIRDFIILHYHATERTDSEFWNYCRTMEVPASLKRKMNLFRESARLFRDDNELFSEVGWLQVMIGQRIIPKSYHPLADALTAEELKEYLANIKTIVEKAVAVLPTHEAYISKFCAAVKI

SEQ ID NO: 87746 - protein, 492 aa, unidentified
  source 1..492: note = Gammaproteobacteria bacterium
  REGION 1..492: note = tr|A0A2E7DJ18|A0A2E7DJ18_9GAMM Uncharacterized protein OS=Gammaproteobacteria bacterium OX=1913989; GN = CMQ41_01105 PE=4 SV=1
MQGTNTNKRHVTIVGGGNAGLICALILRRVFSEYEITVVKSEKIGTIGVGEGSTEHWLGFMNFVDIPVAELLVATLGTHKKGIRFEGWTNHTPDYFHSISSLPDGVPHVSNFNGAYAKLLVEGQLFTDAISPLGIKDNKVHAIYPHRAVNQFHFDTQELNDFFISKAKSRQIDFVEGEVKTVNVSEDWIGSVELEDGTKLTSDFWIDASGFNRVLMSCLPDEKWNSFSDYLLTDSAIAFRTPSDESGQIRPYTRSRAMSSGWAWEIPTQTERGNGYVYSSQHCTEEEAISEMEELLDIRISDYKHFQFDPGYLEKAWVGNCVAIGLSGSFVEPLEATSIGTSINQSFALITPLSSFRKGHTWVAKEYNRVFEKMMLNILNMIRLHYISDRDDSSFWVAQQEMPIPDELEHLLGVWSERTPVESDVHGLWNLFGFAHFYYVGQGQGVISPQSAQESINALGLENITDKFLWELRESRNSHPLKDHAETLKELT

SEQ ID NO: 87747 - protein, 506 aa, Sphingomonas ginsenosidimutans
  REGION 1..506: note = tr|A0A2A4I467|A0A2A4I467_9SPHN Tryptophan halogenase; OS = Sphingomonas ginsenosidimutans OX=862134 GN=COA17_04940; PE = 4 SV=1
MTGEAAMDGPVRSIVIVGGGTAGWMAATYLARRLGHLRPDITVIESAAIGTVGVGEATVPAIRDFLAAIELGEPEVLRETGGTIKYGIRFDGWKREGHRFFHPFGLYGVAARGVAFHHYWLKMRAAGDATPLSDYCLATQLAERGLFLPPSDRPANDLGVFNFAVHFDASKFAALLRRLAVANNVRHIDARIDAVERDGDDGRVAAVTLDDGRRVAGDLWIDCSGFRSLLLGEALGVPYVDWRHWLPCDRAIAIPCAAADGPTTPFTVATARAAGWQWRIPLRHRVGNGYVYCSDHVDDDAAERALLASLEGEPLAAPNRLRFTTGHRARFWEKNVVALGLASGFLEPLESTSISLIQSGLERFVALFPDKDVDPRLAATYNRQSVLEFERLRDFLLLHYWSNRRVGEPFWDRMRALAPTEGLQIKLDAWRAGGEFVRNEWDTFQDPSWLSMYAGFDDLPARHSPLADQVSERDLADSLSRMRAAIAGTLGHAEPHDAFLARTVGA

SEQ ID NO: 87748 - protein, 541 aa, unidentified
  source 1..541: note = Bdellovibrionaceae bacterium
  REGION 1..541: note = tr|A0A2D6JGE8|A0A2D6JGE8_9PROT Tryptophan halogenase; OS = Bdellovibrionaceae bacterium OX=2026715 GN=CL674_05690; PE = 4 SV=1
MSEQRVNMDLNQLIDECFDLSFLGTENFARTDYKSILLLGGGTAGYLSALALKKTHPYLDIKIVESSKIPVIGVGESTTTEIIPFLHHFLGIDPVDFFQEVKPTFKLGIQFDWGKKNERPFHFNFFAGHLFENLHYKNHTGSFNWPAQLMYDKKFPVISTGDGGFYSLLNSIPFAYHLENRSLITYLKKKIIENDIAIIDEEITSIERDSEGNLLSLITNSMEKLEADFFIDCSGFRSKLLGDELQEDFISYEDSLFCDKAITFNLSNNMDPAPYTEAITMNCGWCWRIPLRNEDHLGYVFSSKYLSEEDAIEEIKNKFNPNSEQNFKVIPFKTGRHKRALVNNMMAIGNSYAFIEPLESTAIQTLVQSIMILCRLFPKNNNDQISKDAINKEISENWDSFKAFLAVHYKFNEKLDTQFWQEVRQSVSLDRAESIISLYHQKAPLSYTHFGNNHGYTALESLVFNSYSYDSLLMGQGLLPNSQPKPRFSKEELETRLESYKKMSEIAFSQKELFENQELFIEGIWQELFANPDSWINETNV

SEQ ID NO: 87749 - protein, 506 aa, Sphingomonas sp.
  REGION 1..506: note = tr|A0A0Q4CPQ5|A0A0Q4CPQ5_9SPHN Tryptophan halogenase; OS = Sphingomonas sp. Leaf9 OX=1735674 GN=ASE58_09170 PE=4; SV = 1
MAIDQEPVRRVAIIGGGSAGWMTAAALARFLPAGTAVTLVESDAIGTVGVGEATIPQLRLFNHNLGIDEDDFVARTGGSFKLGIEFAGWNGADSRYLHAFGTIGRAVGLVPFQHYWLAAGGGDRPQSLWSHSACAVAAAQNRFDRDPGSPQAPSGVSWAYHFDAARYAAYLRELAEAGGVVRVKGRVVDVAQDGESGLIAGVTLDDGRLVEADFFIDCSGFAALLIGRMAGDRWDDWSALLPCDRALAVPCASVAPITPYTRATARAAGWQWRIPLQERTGNGLVYSSAHLSDDEAAATLLGNLGGAALGDPRPLRFTTGRRQAPWIGNCVALGLAAGFMEPLESTSIHLVQSGIARLLALWPAATPRAADIAEFNRQSAREWLSIRDFLIAHYALNGRDEPFWRERRATPLPDSLAGRIALFEQSGRIVRDEHELFAEVAWLQLLIGQGVVARGYHPLAAALPAERRDQFLDISAQHVAATVARMPTHDQFLRAHCPAPDAKVAA

SEQ ID NO: 87750 - protein, 522 aa, unidentified
  source 1..522: note = Gammaproteobacteria bacterium
  REGION 1..522: note = tr|A0A2A4VSG2|A0A2A4VSG2_9GAMM Tryptophan halogenase; OS = Gammaproteobacteria bacterium OX=1913989 GN=COB35_07050; PE = 4 SV=1
MNTQAIKKIVIVGGGTAGWLAANHLAKNITSKQPDGVEVMLIESPNIPTIGVGEGTVPLMRQSLQALGISETEFITECDATFKQGIKFVNWQNNPIVDKPEYYHHAFDYPNLALTPYWLLHKSKHKNSHESATSFADAVTIQAKICDAGLAPKLITTPEYQGLTAYAYHLDAGKFATILTRNAVEKLGVQHLRAEVRSVNLADNGEIKSLNTDTLGEIEADFFVDCTGFKALLIGDALKVDFVDKSDVLFADHAVTIQIPYDNENAEIPSYTISTALECGWVWDIGLKQRRGIGHVYSSKYISHDQAEAQLRAYVGKAADGVNSRLIAMKIGYREKFWHKNCVALGLAQGFVEPLEATGLLVFDVTAKMLAEQFPSTKAEMPLVAQQFNKNVRKSWDNVIDFVKLHYCISQRNDSQFWLDNRDPNSIPETLKEQLERWKFQPPTQYDFASRFEIFNLENYLYVLYGMNYPTDISLIASRLTNIDNAQQEFTHIAEQAELATSRLPTNRALIEKIHQYGLQKN

SEQ ID NO: 87751 - protein, 519 aa, Sphingomonas sp.
  REGION 1..519: note = tr|A0A0Q4CBX6|A0A0Q4CBX6_9SPHN Tryptophan halogenase; OS = Sphingomonas sp. Leaf9 OX=1735674 GN=ASE58_16135 PE=4; SV = 1
MDSGTGHRQADCRTEGVRVVDEAPGGVRRIVIVGGGTAGWMAAAALSRALGPIGRTVTLVESDAIGTVGVGEATIPPIRAFNAMLDIDEDRFLRETMGSYKLGIEFVDWSRIGARYFHPFGAAGQDFHGVPFHQLWLRHRARGGTTRLTDYSMCTVAAREGRFGIAAPGDRTPLAHIAHAYHFDATLYAALLRRVSEAQGVVRHEGRIVRVDRDGERGDVTALLLEDGRRIAGDLFVDCSGFAGLLIEGALATGYHDWSHWLPMDRALAMPTGRIDPLPPYTRATAHPAGWQWRIPLQHRTGNGHVFASAFTTADAAEALLRAHAPGAPCGDVRSLSFTTGMRRRAWSHNVVALGLAAGFVEPLESTSIHLIQHGILRLLALFPGAAVHPAERDAYNADMARAFAAVRDFVVLHYKATRRDDSAFWRMVQAMTVPDSLAHRIELWRAQGRLIPQEGDVFQVPSWAAVLTGQEWWPAAYDLAVDRLNAASVEAAMADMRAAYRRTALALPAHAAALPAAY

SEQ ID NO: 87752 - protein, 288 aa, unidentified
  source 1..288: note = Gammaproteobacteria bacterium
  REGION 1..288: note = tr|A0A349E9K3|A0A349E9K3_9GAMM Tryptophan halogenase (Fragment) OS=Gammaproteobacteria bacterium OX=1913989; GN = DCS33_08020 PE=4 SV=1
MENNNIRHIVIVGGGTAGWMSAAALSRIIGTQNCKITLIESEQIGTVGVGEASIPPIVEFNNLLGIDADEMLRATQGTFKLGIEFINWGRIGDSYMHPFGVFGRTILNVSFWHYWKKARDLGLSPGLDAYSLNWLAAKQNRFLRAGNVPNSPLSKVPHAYHFDAGLYARFLRKFSTELGVNRIEGLLEQVFQDPESGFITGIKLQDSKLINGDFFLDCTGFRGLLIEQCLGTGYEDWTHYLPCNSAQAVPTEAISEKHPYTKSIAHSIGWQWRIPLQHRTGNGIVYST

SEQ ID NO: 87753 - protein, 515 aa, unidentified
  source 1..515: note = Gammaproteobacteria bacterium
  REGION 1..515: note = tr|A0A4Q5VCP4|A0A4Q5VCP4_9GAMM Tryptophan 7-halogenase OS=Gammaproteobacteria bacterium OX=1913989; GN = EOO52_08650 PE=4 SV=1
MSTPVKSIVIVGGGTAGWITAGRIAAKYKANPANISVTLIESLTINIIGVGEGTWPTMRNTLIKMGISETDFMRACDATFKQGAKFAKWVDGTPNDFYYHPLMLPQGFSKVDLPPHWQAKFSHQSFSDAVCFQEQLCEKGLAPKLITTPEYASIANYAYHLDAVKFAEFLKNHCTKNLGVRHLLADVTGVISKENGDISALSTATLGNISGDLFVDCTGMSSLLLGKHLQVPFVDKSDVLFIDTALAVQLPYADDESPIASHTISTAQEAGWIWDIGLIRRRGIGYVYSSRHTTHEQAEIALRKYAGSAVDNLATRKIPISAGHRKLFWKNNCVAVGLSAGFLEPLEASAIVLVELSAEMIAEQLPACREVMDITAKRFNETFLYRWDRIIDFLKLHYILSKRSDNKFWVDNRNPQTIPESLQELMQVWRYRSPKNCDFTSNNEVFPAASYQYVLYGMGFKMDSAYLDHSRAPTDEALAMEQINLNSNAIKNALAKLPTNRELINKIHKYGFAKI

SEQ ID NO: 87754 - protein, 495 aa, unidentified
  source 1..495: note = Gammaproteobacteria bacterium
  REGION 1..495: note = tr|A0A4V1ZQ98|A0A4V1ZQ98_9GAMM Tryptophan 7-halogenase OS=Gammaproteobacteria bacterium OX=1913989; GN = EOO53_19170 PE=4 SV=1
MNKQTINRVVIAGGGTAGWMAAATLTKSLGTQLEVTLIESDEIGTIGVGEATIPTMLSFHHLLGIDEQEFMKAVNGSIKLGISFENWLERGDKYIHSFGKTGKECWAGEFQHFWLKGLEQGIDAPFGDYCLELQAAKEGKFAISKDPWINYAYHMDATAYGKFLRKFSEKLGAKRIEGMIEKVNLNIDTGFIESLQLKSGQIIEGDLFIDCTGFRSVLSEQALHTGYEDWSNWLPCDSAVATQETAVAPPIPLTRAIALDHGWQWKIPLQNRVGTGLVYSSRYQSDDNAKQTLLDNLEGEAFFDPKVIKFRTGRRLKGWNKNCIAIGLAGGFIEPLESTTIFLISSNLIRLMRLFPINGIEQVLVDEFNKQAKAEIELVRDFVVLHFHATRRTDTAFWRHCRTMPIPDSLSSRLDLFLETGRIFIGAEELFRVDSWTQVMIGQGIVPKQYHPVANLMGDDELRRFLNGYRASIQNIITKLPMHGDFLKHYCPTEI

SEQ ID NO: 87755 - protein, 566 aa, Streptomyces globosus
  REGION 1..566: note = tr|A0A344TZK9|A0A344TZK9_9ACTN Tryptophan 7-halogenase OS=Streptomyces globosus OX=68209; GN = C0216_11990 PE=4 SV=1
MRPPPGRDGDAYHRLLGRMCRARRLPRPHPRHATQRRTSVARPVQKIVIVGGGTAGWLSAAYLNRAFGSKVEITLVESARIGRIGVGEATVPTLRTTLAFLGMKEEDWMPRTNASFKSAVRFNDWRTPRPGTDRHTFYHPFFTVPEPPVPSYERPFHKRFGRGVSLAHFWTKLRLAGDSRVRETFGDAGMALQHLCELNKAPKPLPGSGAPDPGFRYAYHFDAALMAEYLRDLATGRGVRHVVADVTQVTRDGRGHIDKVITETGAELTGDLFLDCSGFRGLLINQTLEEPFVSAQDWLLCDSAIALPADHHPDGIRPYTSANARPNGWIWEIPLYHREGTGYVYSSRTTTPDQAEQDLRDFLGPRAHDVPGNHIRMRVGHNRRSWVDNCVAIGLSSCFVEPLESTTIALIEYQLALLVLHFPDSELDERRQARYNELMVSAFEDLRDFIVMHYALTDRTDTEFWRAVRENPIPDSLAEKLTEYAESVIIPDGSQLRLFETRSLWAILSGMDFAFTKAPPSVELMSDEAAWQAFEQIDKEREIYAAALPDNRTYLEAVHAGRADSA

SEQ ID NO: 87756 - protein, 505 aa, Sphingomonas sp.
  REGION 1..505: note = tr|A0A0Q4CTQ9|A0A0Q4CTQ9_9SPHN Tryptophan halogenase; OS = Sphingomonas sp. Leaf9 OX=1735674 GN=ASE58_02895 PE=4; SV = 1
MTPLKRILIAGGGSAGWMTAAMFARLFKGRYAITLIESDAIGTVGVGEATIPAIKKFNDLLGLDEDDFLRRTQGSFKLGIRFDDWSRIGSSYVHGFGVIGRDLEWLRCHQYWTKLHRAGAGGPLDDYSINTVAATANRFLRPRADMPDSPIGQIAYAFHFDAGLYAAYLADYARARGVERREGEIVAVGQHPDTGFLSSVTLADGAVIQADLFIDCSGFRGLLIEQTLSTGYESWSHWLPCDRAVAVASERSADFPPYTCSTARPAGWQWRIPLQHRTGNGHVYASRHMDDATAEALLLDHLEEPAVGTPRRLSFVPGKRRKGWVRNCVAIGLSAGFLEPLESTGLHLIQSAILRLVRLMPDAGFDPATIAEYNRQTDFEMERIRDFIILHYKATTRDDTPFWRHVRTMDVPETLARKMALFAANGRIFREDDELFAEESWIQVLIGQGIVPAAPDPLVDVTPAAEIERYLADVRGVIAKCVARMPAHDAFVAHHCAAPSPTGTA

SEQ ID NO: 87757 - protein, 511 aa, Sphingomonas sp.
  REGION 1..511: note = tr|A0A0Q4CP61|A0A0Q4CP61_9SPHN Tryptophan halogenase; OS = Sphingomonas sp. Leaf9 OX=1735674 GN=ASE58_07920 PE=4; SV = 1
MTQRVRRIVVVGGGTAGWLAACRIAAAADRQADAPLSVTLVESPDVATIGVGEGTWPTMRGTLARIGIDEATFLRAADASFKQGSRFDGWRTGGPDDFYYHPFTAPADLPAADLLRGWREGRFAEAVCAQALVCADDLAPRQPAMPPYAGALNYGYHLDAGKFATLLRDTACNRLGVTHVRDHVTAVEAGEGGDIAAVVTRQSGRIAGDLFLDCTGHAALLIGGHYGVGTIDRTPILFNDRALAVQVPVAPDSPIASQTNATAHDAGWLWDIGLPSRRGIGCVYASDHLSDDAAAATLRGYLSRTAPGVDPDHLSFRQLRFRSAHRERFWQGNCVAIGLSAGFLEPLEASAIVLIELSIDALLDRFPVERGAMAHHAQRFNALFRYRWDRIVDFLKLHYVLSDRDTPYWRAHRDPASWTASLQDQLDLWRTQPPSPADFAHADEVFPAASHQYVLYGMGFAPPPAGPLRAAPGADAALHQVRQRSRTLAASLPTNRAYLRVLTPPAGIAHV

SEQ ID NO: 87758 - protein, 526 aa, unidentified
  source 1..526: note = Gammaproteobacteria bacterium
  REGION 1..526: note = tr|A0A2A4QFS8|A0A2A4QFS8_9GAMM Tryptophan halogenase; OS = Gammaproteobacteria bacterium OX=1913989 GN=COB83_08730; PE = 4 SV=1
MSKLTKTVVVVGGGIAGWLTAGRLAAKHQSHKKNGLKVTLIESANIPAVGVGEGTWPTMRSTLRALGISETDFIRECDASFKQGAKFAKWCNGKEDDFYYHPLVLPQGFGKTDMAAHWLARQARSKAGQEQVSSFSDEVCYQEALCERGLAPKTIRTAEFADIANYAYHLDSGKFAIFLQKHCQEKLGITHIIDDVIAVNSITTEQGEKGDISSVTTQNNGEIAGDLFVDCTGFSSLLLGKHYGVPFKSCSDVLFIDTALAVQVPYDSDDADIASHTISTGQDAGWIWDIGLQHRRGVGYVYSSKHSTEAEARAVLANYVGDKFSSLKVRKIPIVSGHREKLWHRNCVAIGLSAGFLEPLEASALVMVELAGQMLSEQLPQSREIMDVVAKRFNEIALYRWQKIIDFLKLHYILSERKEPFWTDNREDDTIPQSLQELMALWQYRAPADHDFTSNNEVFPAASYQYVLYGMGFKSDYRHTPYVLDDIDFAQKQFMQNKKFIDTALSSLPSNRELLNKINKFGFNRI

SEQ ID NO: 87759 - protein, 516 aa, unidentified
  source 1..516: note = Gammaproteobacteria bacterium
  REGION 1..516: note = tr|A0A2E1IC95|A0A2E1IC95_9GAMM Tryptophan halogenase; OS = Gammaproteobacteria bacterium OX=1913989 GN=CMQ88_03815; PE = 4 SV=1
MLLKIVRKSQTICKLNEDLRVSNRPVKKVVIVGGGTAGWMAAASIAKLIGKNLDVTLIESDAIGTVGVGEATIPTMITLHRLLKIDERKFMKAVQGTFKLGISFENWKNVNENYIHSFGFTGKDCWAAGFQHFWLKGKEQGISSEFGDYCNELQAAKQNKFAVIPQNGLNYAFHMDAGLYANYLRKIAEHNGCKRIEGMITEVAKDPQTGNISHVTLESGEAVEGDLFIDCSGFMGLLIDKALQTGYDDWSHYLPCDSAVAVQTKSVAEPIPYTRSIARDAGWQWRIPLQHRVGNGMVFCSKYLTDDQATETLLKNIEGEPLTKPRVIKFRTGQRHKHWNKNCIALGLAAGFLEPLESTSIHLIQRGIIRLLQLFPTQGISESDVTEFNTQMREEFLNVRDFIVLHYHVTEREDTPFWHHCKTMKIPETLKHRIELFKQSGRIFQKENDIFAENSWSQVMLGQGLMPEQYHPIVNMMGDKELENFLNGIKGAVDNLVDQLPSHQQFIDQYCKAPSM

SEQ ID NO: 87760 - protein, 521 aa, Colwellia psychrerythraea
  REGION 1..521: note = tr|A0A099K9Z7|A0A099K9Z7_COLPS Tryptophan halogenase; OS = Colwellia psychrerythraea OX=28229 GN=ND2E_0497 PE=4; SV = 1
MSVISSQPKKIIIIGGGSAGWMAASLIHKAWAKKGTKILLIESDVISKIGVGEGSTPSLRLFFNHLGISEQEWMPQCNATYKCGISFPGWTNTDDPAFADYPAYIHPFYSQADWKTGNAFMHNARLRREGVDVPAHPDNYWLQSYLAKSFKAPIARQQLSDEMDYGYHFDSALVGDFLKKRLLNMGLNHLTDTVDGVELDDSGQISSVITKRNAAQSADLFIDCTGFAARLIRQALNVDFVDYSDCLFNDRAIAIQSPIDCSRDIPSQTTSTALSAGWAWQIPLSNRYGNGYVYSSKYISDEEAEKELRKHIGPSCLGEKARMIKMRLGRLSQHWHKNVLAVGLSQGFIEPLEATALMLIQHTVESFISSYEDMQLSKRDILAQQDIYNSQLNEVFESIKDYIVAHYRLNSRTDSKYWCDNRENKNNSARLKALLSAWSTPGGDFEAELHRHNAELTYFAPSWYCLFSGKGHFPTSLNKPSANTKVAPTTEIIKYCHQVSKQFYNHNEQLEKVYGERLDIL

SEQ ID NO: 87761 - protein, 561 aa, Ruegeria faecimaris
  REGION 1..561: note = tr|A0A521EWW2|A0A521EWW2_9RHOB Tryptophan halogenase; OS = Ruegeria faecimaris OX=686389 GN=SAMN06265380_11476; PE = 4 SV=1
MNNRLRKITIVGGGTAGWMTALILEMVFSRTSAPKDRPRICLIESPNISTVGVGEATVPRMPVTLRQAGISERDFFRETNASFKLGVKFCNWNKDAKGNRIDYVNPFAHGQLLEGLEPAEYFLRFGNGDRDFTQSISPHDDLARLCKGGRPLGQPEFEQRFGYAYHLDAVKFAGMLTRVCTKRGVEHIQDEVKSVELDEQGNVSHLMLEKKGRHDIEMVVDCTGFRGLIINKALGEPFMDYSDYLPNDRAMALQIEHPDPEKIESVTRSTALGAGWTWRVPLFNRVGTGYVYSSAHRTDEQAADEYLEWLGDSGKGATPRVIPMRIGRVRNAWVKNCVAIGLAGGFIEPLESTAIHMIDHAVRWFAEHLPTRDIEPSLRARYNKQMDKLYDEVLDFICLHYRLGNRTDDQYWIDARTEMKIPDRLAENLELWQHRLPLERDIEFATLFDFRVYQTVLLGKQVYDTGYGAGIRDRLRPLKKPIWFQWWKGAKVDLAQILRSMPDHKTLLRDIRGELERPAFGKAAAAKPTVAMPGAAPVPLAVQNMPNFAEIQSGSKDLQLF

SEQ ID NO: 87762 - protein, 496 aa, unidentified
  source 1..496: note = Gammaproteobacteria bacterium
  REGION 1..496: note = tr|A0A4Q5QDB8|A0A4Q5QDB8_9GAMM Tryptophan 7-halogenase OS=Gammaproteobacteria bacterium OX=1913989; GN = EOO53_03530 PE=4 SV=1
MVQQIQKIVIVGGGTAGWMAAAALSKFFESRKISIQLVESDDIGTVGVGEATVPGIHQFNRYLDISELDFIKATQATFKLGIEFKDWFKQEHTFFHPFADYGLPINGVNFYQCWLKMQKSGYVYDLEDFCLATQIAKQRRFAQVDHDLETPLALYNYAYHFDASLYAKFLRNYAEQRGVIRQQGKIVSVAQNSSTGFIESVTLTDGQVISGQLFIDCSGFAGLLIDKTLKTEYINWSKWLPCDRAIALQTENVEDATPYTSSFALTAGWQWKIPLQHRVGNGYVYSSNVISEDEAIESLLINTSGAKLTSPRVIKFTAGMRKNFFVKNCVALGLASGFLEPLESTSISLIQTGITKLINYFPDMSFDSKKIAEVNRLNEMEYSRVRDFIILHYKANQRNVNDFWKALAAMDVPETLQNKMTAFKKDGTLISYELESFQDASWLSMYNGFKITPEQCIPDANNLDVTKLKQVMEKIKLAIQQGVLHAPTQKEFLSSI

SEQ ID NO: 87763 - protein, 494 aa, unidentified
  source 1..494: note = Gammaproteobacteria bacterium
  REGION 1..494: note = tr|A0A3B8RCT3|A0A3B8RCT3_9GAMM Tryptophan halogenase; OS = Gammaproteobacteria bacterium OX=1913989 GN=DCE20_04905; PE = 4 SV=1
MTNPNSQSNVVIVGGGTAGWMAAAALSKLLGKTLNVRLVESEEIGTVGVGEATIPTLMTLHRLLKIDEAAFLKATQGTIKLGIQFENWQKEGHQYFHSFGYTGEGCWAAGFQHFWLKGQQLGFGDPDYGQYAPELVAAQAEKFGFLKPAALNYAYHMDASGYARFLREIAEANGASRIEGRIVDVLQKDNGDIASVVLANGDTISGDLFIDCSGFYGLLIDKTLGVGFDDYGDWLPCDRAIAVQTQSTRPPRPYTRSIAHSAGWQWQIPLQHRVGNGLVFSSQHYSEDEALHRLRQNITGDERTDPRLIKFQTGQRQAHWVKNCVAIGLSASFIEPLESTSIHLIMRAIIRLMQMYPHQQTSASDIQEFNNQMRAEVEFVRDFIILHYHRNDRTRDPFWRDMANLRIPDTLRHRLDLFQETGRVFQAQGDVFGENSWTQVMLGQGLRPKRYHHIVDMMPEAELKAFLNTQRSRVEAMVKVLPSHQDFLSAYLSP

SEQ ID NO: 87764 - protein, 497 aa, Sphingomonas sp.
  REGION 1..497: note = tr|A0A0Q4CJH8|A0A0Q4CJH8_9SPHN Tryptophan halogenase; OS = Sphingomonas sp. Leaf9 OX=1735674 GN=ASE58_14030 PE=4; SV = 1
MTEEGQGVRVVVVGGGTAGWMTAAGLVGLLPAACTVTLVESESIGIVGVGEATLPHLRLYLERLGIDEAAFMAATEATYKLGIEFCDFGALGDRYIHPFGTYGRPLGGVAFHHYWLRRAAAGAMPPIGAFSAGVTAAEQRRFERPGSDPNDPTTSFGYAYQFDATRFAPFMRDWSEARGATRIEGRIVAVEREGDTVRAVTLDDGQRIEGDLFIDCSGFRSLLLGDALGEPWEDWSHWLPCDRAVAVPCASPAGVIEPYTRATAMPGGWRWRIPLRHRVGNGYVYASGHVSDDEAAAALLAGLDGEALADPRFLRFRAGRRRRSWAGNVVAVGLASGFLEPLESTSIYLVQAAITALIEHFPDGRVAEVDRDGFNAAIDAEYDRIRDFLILHYHATTRDDSPFWNHVRTMTIPTTLADKLALWRGSAQVSKYSHGLFLEPSWVAVYLGQGVLPEGWDPRADRPDAAGLDRALGSLATAIADRVAAMPTHDAALERRA

SEQ ID NO: 87765 - protein, 484 aa, unidentified
  source 1..484: note = Gammaproteobacteria bacterium
  REGION 1..484: note = tr|A0A354VPH6|A0A354VPH6_9GAMM Tryptophan halogenase (Fragment) OS=Gammaproteobacteria bacterium OX=1913989; GN = DDZ32_13695 PE=4 SV=1
ADFSVTLLESPNVPIIGVGEGTWPSMRSTLQKLGLSEIEFLRECDASFKQGTEFVNWSNHDAPARYIHPFSLPSEFASLNLANYWLDQRQHSDFADFVSPQAQVALSGLAPKQCQTPEFAFNVNYGYHFDAGKFAQFLQRHVTQALGVEHVLGHFEQVISDEQGDIAALVLSDGRHIEGDLFIDCTGQRSLLIGEHFGTPLEPVDALLFNNRALAVQVPYADAQAPIASTTRATAQQVGWIWDIGLQSRRGIGYVYSDQYQDLQGAESTLRAYIAATSPGVETASLALRPIEFQPGFRQQFWVRNCVAVGLSAGFVEPLEASALALVEQSANIITDHLPRTRQVMDIVAKRFNEKMHYHWQSILEFLKLHYVLSKRSEPYWQDNARRESCPDALVEKLRLWQQQPPWHEDAPRIDELFPSASYQYVLYGMGFEPAQGGSARASHIREQAKAAQVVRMNRERTEKLRQGLPSNRELLTALVGQSG

SEQ ID NO: 87766 - protein, 522 aa, unidentified
  source 1..522: note = Gammaproteobacteria bacterium
  REGION 1..522: note = tr|A0A4Q5Q5Y7|A0A4Q5Q5Y7_9GAMM Tryptophan 7-halogenase OS=Gammaproteobacteria bacterium OX=1913989; GN = EOO53_11460 PE=4 SV=1
MLQHNADPTIRSLIILGGGTSGWMTAAALAHFFVPRGVQVTLVESEAIGTVGVGEATLPHLRFFNQTLGIDEQEFMRATGATYKLGIEFSNWGKQGDAYIHPFGDYGQDIRGVAFHHYWLKQYLQGKAYPIDEYSLPIMAAQQNKFLFPSSDERSILSTFSYAYHIDAGLYARYLRNYSEARGVARQEGKVVSVSQTDSGDIKSITLDNGKELAADMFIDCSGFRGVLIEQTLKTGYEDWSHWLPCNRAVAVPTERSASFPPYTKAIARDAGWQWRIPLQHRTGNGVVYCSDFCSDEQALDALLKNLDAPTTADPNFLRFVTGKRKQAWNKNCIAIGLAGGFLEPLESTSIYLIQIAIMKLVEFFPDREFDAAPRAEFNRQLDLEYDRVRDFLILHYHATQRTDSAFWNHCRTMKIPDELAHKMELFRARGHVVQYKQGLFLEPSWVAVYLGQGVIPQAFDSRVNAVSERDCTALMAETHNLVARASGDMPLHEKFLQHHLQVPAAQYASPKARMSLYGVRT

SEQ ID NO: 87767 - protein, 520 aa, unidentified; identical to SEQ ID NO: 85066
  source 1..520: note = Gammaproteobacteria bacterium
  REGION 1..520: note = tr|A0A2D7FW23|A0A2D7FW23_9GAMM Tryptophan halogenase; OS = Gammaproteobacteria bacterium OX=1913989 GN=CMP96_02245; PE = 4 SV=1

SEQ ID NO: 87768 - protein, 507 aa, unidentified
  source 1..507: note = Gammaproteobacteria bacterium
  REGION 1..507: note = tr|A0A4Q5Q823|A0A4Q5Q823_9GAMM Tryptophan 7-halogenase OS=Gammaproteobacteria bacterium OX=1913989; GN = EOO53_06990 PE=4 SV=1
MNIKRVAIIGGGTAGWLAANHLGVELKHENIEIMLIESEDIGIIGVGEGTVPYIKKSLQRFGISEAELIANCDVAFKQGIKFVDWLSAEKHGAGHFYYHPFSSPYPAGYDVTPYWLANRENLEFSAVTEVIGVAEAMRSPKKISSPPYLGEVNYAYHFNAVKFGKLLAKNAREKLSVKHLITTIVGATKNDDGSIAKLVTSDGGEVEFDFYVDCSGFASLLIDRELQVPFIDKSKQIFTDTAFALQIPSDGMEEIKPYTTATAHKAGWTWDIPLTQRRGTGFVYSSSHMSESQALEEFSKYLQLDVEKLSPRKISMKIGYREKFWCKNCVALGLAQGFVEPLEATSILLTDFSAEILARNFPRNSENIEVLSGYCNKVLSYAWERVIDFVQLHYCISDRDDSDFWQENINSTSLSEILHERLEMWKLNHPKKIDFFSQFDLFNVDNYLFVLYGMKYLTRVPPISTYEAGVSKAQFAQVKQRSEQLAKELPSHREWLSKFERAISNPK

SEQ ID NO: 87769 - protein, 525 aa, Rheinheimera sp.
  REGION 1..525: note = tr|A0A0U4V7V8|A0A0U4V7V8_9GAMM Tryptophan halogenase; OS = Rheinheimera sp. F8 OX=1763998 GN=ATY27_01540 PE=4 SV=1
MPSCPPAKTEVLIVGGGAAGWLTAAVLSATHNLDEGVLAAQPRIQVTVLESPDVPTIGVGEGTWPSMRQTLKLIGLSETEFFRCCDVSAKQGSLFVDWTEPGSSYLHPFTLPAGWPEFNLAACWLPFATDIAFADAVTTQYQLSHAGFAPRLPQAPDYQPVLNYGYHLNAGKFTALLQRHCQDKLGVSYIPAHLKEVLLRDDGAIDKLLAMPAGSNDLCAYQADLYVDCTGMQSLLLGQALQTPFTSVKHILFNDSALAVQVPYPDAQTPIASNTISTAQHSGWVWDIGLPTRRGVGFVYASDYCSDDEADACLRSYLTQTVSAELAAAAEPRKLQFQPGYRSGCWQHNCIAVGMAAGFIEPLEASALALVEWSAKTLAAALPLEPALYGLAAAKMNRTFLRHWQQIIEFLKLHYVLSERDTPYWRAHRETASIPQTLQDQLQLWRQQVPQPLDFAYQDLLFPAASYQYVLYGMGALTRTLAAKPSQQARARALFAQNYQDLTKLQQLLPDNRQLLQQLALKHSN

SEQ ID NO: 87770 - protein, 494 aa, unidentified
  source 1..494: note = Gammaproteobacteria bacterium
  REGION 1..494: note = tr|A0A4Q5VG26|A0A4Q5VG26_9GAMM Tryptophan 7-halogenase OS=Gammaproteobacteria bacterium OX=1913989; GN = EOO52_04950 PE=4 SV=1
MIKSLVILGGGTAGWMTAAAFSQMFRHDTLNILLIESDEIGTIGVGESTIPAIRDFNRLLGIDEQEFIRETRATPKLAIKFSDWGHIGQDYFHPFGQAGHDINAVDFHHHWLSLRHEADIAEFSRFSISAEAAEQGRFSIPSQSNNFWSSTFSYAFHFDAGLYAKYLRKYAEARGVKRVEGKYLSADRNRVTGDIERLNLVSGQQIEADFFIDATGFRALLLNGVLQSPYESWSEWLKCDSAIAIPCATGKPFKAFTHATAHSAGWRWRIPLQHRVGNGSVYSSEYMSKENALDNLLANLEAEPLAEPRYLSFMPGMRQAQWENNCVGIGLSAGFLEPLESTSIYLIQYGIQKLIEYFPVSKDFSLAQKEFNLQLAKEFVRIRDFIIMHYAENQRDDSQFWIDCRNMHLPEGLAYRQAMFRGAGLVDPTQYGLYASVCLGQNVMPEFFDARVSAIPTQQRKKILQGIKHDQEAFILQFPLLVDWLRSSGAIINE

SEQ ID NO: 87771 - protein, 511 aa, unidentified
  source 1..511: note = Gammaproteobacteria bacterium
  REGION 1..511: note = tr|A0A2A5CSQ2|A0A2A5CSQ2_9GAMM Tryptophan halogenase; OS = Gammaproteobacteria bacterium OX=1913989 GN=COA74_13045; PE = 4 SV=1
MKQNSTINNVVIVGGGSAGWMTAAALSKHLPKSINIKLVESDLISTVGVGEATIPAIRIFNQGLGIDEAEFMKETNATFKLAIKFENWARQGDSYFHAFGFYGYPVNGVPFHNYWLKQNNTIKSDSIHDYNLAHQACVANKFAYRQFNPNDEDSRYFYAFQFDATLYAQYLRKISEGRGVERIEGKVVDVLQNTQSGTIESLVLESKKTVSGDLFIDCTGFRALLIDKTLKVGYKDWSHWLPVNNAWAVSTDYPKGATIPPYTRARALSAGWQWRIPQQNRTGDGNVFCDAYISKEEALDEFLSNLEGKPISDPRLIKFRTGMREKLWSKNCVSIGLSSGFLEPLESTSIYLIQASILQLIQNFPNGEENKSNQNEFNSLMKSRYEEARNFLILHYKATEREDTKFWKYCKNMSIPDELAYRIKLFEDRGFVAGKKLDLFSEHSWLAVYFGQRIMPKAYDPRTDNLSMEQINNNLSKIKMGINNSLDKMPTHNETLKAFCPADIATPLKNS

SEQ ID NO: 87772 - protein, 496 aa, unidentified
  source 1..496: note = Gammaproteobacteria bacterium
  REGION 1..496: note = tr|A0A4Q5VF92|A0A4Q5VF92_9GAMM Tryptophan 7-halogenase OS=Gammaproteobacteria bacterium OX=1913989; GN = EOO52_02965 PE=4 SV=1
MSQQIKKVVIAGGGTSGWCMAMALSQQFGELLDITLIESNEIGTVGVGEATFPTICTFHRMHGIDEKEFLSATAGSIKLGISFENWTRKNDRYIHSFGFIGKSHWLGEFHNYWMAAKSLGYEGQLEDFCFELQAAKHHKFAVTEKPKINYAYHFDASLYARFLRKLSEAKGVKRIEGKISNVKQNLDNGFIESVMMESGENVEGDFFIDCTGFRGLLIEQTLKAGYEDWGHWLRNDSAVALQTDFSGDIPPYTRAIAHGSGWQWKIPLQHRQGTGYVYSSSYITDEDARNTLLDNLDGDIRVELRLLKFNTGRRKKTWVKNCAAIGLAGGFIEPLESTSIHLIQMGVTRLLQLFPFDGCTEAHINHYNEQSRIDYEKIRDFIILHYKATERDDTPYWRDCRDMEIPDSLAHRMELFREAGVVYQDPNEIFPVASWLQVMMGQRIEPKRYNHFPHTMMGKDVMFAELDKLKTNIAEFVETMPSHANFLKTYSPMSWS

SEQ ID NO: 87773 - protein, 505 aa, unidentified
  source 1..505: note = Gammaproteobacteria bacterium
  REGION 1..505: note = tr|A0A2A5D340|A0A2A5D340_9GAMM Tryptophan halogenase; OS = Gammaproteobacteria bacterium OX=1913989 GN=COA74_02890; PE = 4 SV=1
MINQSEVEALKQIIIVGGGSAGWMTAAALTKVLGCNNYSITVIESDTIGTVSVGEATIPHIRAFNSLLEIDEDDFLKHTHGTFKLGIEFVNWKEMGHSYMHPFGAYGTNMHGVPFHHYWLKSQKIQPKDDLLDYCLEGYAAKKNLFSRPLNYPNTPLTSVNYAFHFDATLYAAYLRTYSEKLGASRIEGIVTQINTNNETGFIESLLLENGALINGDLFIDCTGFKGLLIDGVMESPFEDWSQWLPCNSAIAHASESLPDKKPYTISTAQKSGWQWQIPLQNRIGNGHVYSSDFLNQDDALTTLFSNLPSKPMGEPNFLKWTNGKRKKLWVKNCVAIGLSGGFIEPLESTGLQLIQASIERLLSLFPNKSFQQKDIDIFNENADIELKQIRDFIVLHYKLTTREDSPFWKYCKEMSIPDTLQSKIELYKTNGRVFRENNELFAELSWLSVLSGQGIIPQSYHPLVDNTSTENLHIQLSKMKEVVRLCSKKMPTHAEFITKHCSAS

SEQ ID NO: 87774 - protein, 496 aa, unidentified
  source 1..496: note = Gammaproteobacteria bacterium
  REGION 1..496: note = tr|A0A2A4VKJ0|A0A2A4VKJ0_9GAMM Tryptophan halogenase; OS = Gammaproteobacteria bacterium OX=1913989 GN=COB35_13500; PE = 4 SV=1
MKQPIKKIVILGGGTAGWMSAALMKKVIGAAVDIELVESETIGTIGVGEATIPPIRTFNQVLGINEAEFIRETKATIKLGIQFEHWKNIGDSYLHSFGAPGRSSAFCQFHHYFKRAQQLGLKDSLWDYDLNALCAKAGKFAVINSKDPVLELPHAYHFDAGLYAKFLRKFSEKLGVKRTEGLVEQVQQNKQSGYVEALVLKDGSVINGDLFIDCSGMRALLIEDTLKTGYENWDHWLTCDRALAVPSQRFDKTLPYTRSIAHAAGWQWRIPLQHRNGNGLVYSSAHLSDQQAHDLLLSNLESKAIGDAKLFKFNVGRRKQQWHKNVIAIGLSSGFLEPLESTSIHLIQSAIVRLLHLFPHHGIADSSVAEYNKQSKVEYEQIRDFIILHYHVQQRTDSNFWQYLRNMDIPETLQHKIQLFKDNGKLFRDQNDLFLESSWLQVMVGQGIEPLDYHPIANNLSAAQLMDMLSRLKAIKNEPLPKLPSHDDFINNICKH

SEQ ID NO: 87775 - protein, 520 aa, unidentified
  source 1..520: note = Gammaproteobacteria bacterium
  REGION 1..520: note = tr|A0A2E9C6Z1|A0A2E9C6Z1_9GAMM Uncharacterized protein OS=Gammaproteobacteria bacterium OX=1913989; GN = CMD65_02535 PE=4 SV=1
MKKINKILIIGGGSSGWMTAAALINRFPDKDITLIESENISTIGVGESTVQVFRQYTGMTGLIDEEWMPKCNATYKLSIDFTNWSGDGKTVKYPFGKGTWLNKYKPIDWFIYNQDKNIKNHYSYENFAIGHSELLRQNKMVYEDDHINGWDFNDITGFQLDATLFANYLKTDYSLPRGLNYIQDTIKDVTLDYDGNIKSLISSSDREFEADLFIDCTGFKSLLLGKTLKTPFVSFGKYLLNDKAVATHIPYTDIEQEMVTSTDSYAHKNGWIWNVPLWTNIGKGYVYSSQFLTEDEAEKELKEYLINNTKCSKEIINSLQYSHIQMTPGFHEKSWVKNVCAIGLANGFIEPLEATGLMFIGDAIEFLVDTLAARDGVVNSYDKSIFNKRVRQRAEYFVGFVIGHYAMATKNDTEYWKTITEDIDYLSIDEDWTKYLQVYMLEFFSELINKWQYLKPEDGTPYIMAGFGFNPVVDKIIQSGHHKESNLKLHKDIESYINYQKEYVSQFPNMYNYLKANIYK

SEQ ID NO: 87776 - protein, 491 aa, unidentified
  source 1..491: note = Gammaproteobacteria bacterium
  REGION 1..491: note = tr|A0A2E7DS49|A0A2E7DS49_9GAMM Uncharacterized protein OS=Gammaproteobacteria bacterium OX=1913989; GN = CMQ41_15695 PE=4 SV=1
MRIVVVGRGNAGFISSLILRRAFPNFPITIIGSQEVPIIGVGEGSQEHLAIFLDYCKLERAEILPASLATLKKGIRFENWGSSFPDYFHAIVGGPQDFSLGSFGFNAEYAELLRTETPISEGLVTKERIFSDETSVNQPFRSVNQYHFDTYELNDYFTLKAKQRNIQVVDGHVEKVNTKDGIIGSVVLKDGSLINGDFWIDASGFNRILMSHLSENNWCSYSDYLLTDSAIAFRTPLDESGKIHPYTRARALSSGWAWEIPTQTQRGNGYVYSSQFCSEEEAVAEMEKLLNVEISEYRTFTFDPGHLKDIWVGNCVGMGLAGSFIEPLEATSIGTTIAQTNGLLQYLASYQPSNDNSRQQYKEGFEALMSNILDMIRLHYVSDREDTPFWKAQKEAPLTESLEKLLDLWKEKVPDVSDIRIKNREMHMFFGSNFYLVAQAQGLLDPQLAEKSLDAYGLSESIKDVMYKIREHHLSSPYEDHAEAIKRLSSN

SEQ ID NO: 87777 - protein, 519 aa, unidentified
  source 1..519: note = Gammaproteobacteria bacterium
  REGION 1..519: note = tr|A0A2E8WQC1|A0A2E8WQC1_9GAMM Tryptophan halogenase; OS = Gammaproteobacteria bacterium OX=1913989 GN=CMQ23_04770; PE = 4 SV=1
MTSPIEHVAIVGGGTAGWLTACILASEFQDSAGHPSVKVTLIESPDIPTLGVGEGTWPSMRTTLQAIGLSETEFLTTCAASFKQGTLFEDWLESGHQYIHPFTPPLKDGVTDLASAWQGPNSEFSFAWSACPSAGLAFGDKAPKQITTPEYAFAANYGYHLDAGAFAKLLTEHGVKRLGIQHHLLNIKETKSTLAGTIEALIAEGGDTIKADLYIDCSGSNALLLSRILEVPLLKKSNILFNNAALAVQVPHLAQDSPIASSTRSTAMDHGWIWDIALKHRRGIGYVHSSTFVDERDAELTLRRYIAKEFNAEIANEIAPRKLTFEPGYRNCFWKQNVIAIGMSSGFIEPLEASALVMVETSAWLLAKNLPTCLEDMTSSADRFNQGLSRHWERIIHFLKLHYVLSKRPGAYWDAHRDPLSWPDSLVEDLRGWANRPIDYADADRISDLFPAASYQYVFHGMGRPVGHDHRARKSLLKTTAAAPRMTAELSKKQKALFDAMPTNRGLLEKIHTFGLPTI

SEQ ID NO: 87778 - protein, 500 aa, Sphingomonas ginsenosidimutans
  REGION 1..500: note = tr|A0A2A4I183|A0A2A4I183_9SPHN Tryptophan halogenase; OS = Sphingomonas ginsenosidimutans OX=862134 GN=COA17_03710; PE = 4 SV=1
MAAEGAKAMRVVIVGGGTAGWMTAAALARLVPAAQAEIVLVESDEIGIVGVGEATLPHIRAFNTRIGIDEADFMRATGATFKLGIEFRDWARIGDSYIHPFGVFGRDTDGVGFHHYLARAGQIERLQDFSLPVVAARGARFAPPADDPESLLSTYGYAYQFDATRYAPYLRVRAEADGAQRIEGRVVAVDRDADGGRVTAVRLADGRAVAGDLFVDCSGFRALLIGDTLREPFEDWSRWLPCDRAVAVPCASQGPLLPYTSAVAMPAGWRWRIPLQHRVGNGYVYSSAHVDDDAARDALLAAIEGPALAEPQLLRFHAGRRPRGWVDNVVAIGLAGGFLEPLESTSIYLIQIAITALVELFPDGAIDPADRDEFNRVLGIEYDRIRDFLILHYHATERDDAPFWTRMRTMEVPDTLARKMALFRARGRVETYREGVFLEPSWIAVYLGQRIVPEGYDQRADAPDAAGLARAVERLHAVTAAAARAMPDHREYIATIGAAA

SEQ ID NO: 87779 - protein, 510 aa, unidentified
  source 1..510: note = Gammaproteobacteria bacterium
  REGION 1..510: note = tr|A0A4Q5Q5A0|A0A4Q5Q5A0_9GAMM Tryptophan 7-halogenase OS=Gammaproteobacteria bacterium OX=1913989; GN = EOO53_13625 PE=4 SV=1
MKIKRIAIVGGGNAGWLAANHLGVELSRDPEIEITVIESKDIPVIGVGEATVPLIRTSVQSFGISEVDLLLHCDATFKTAIKFANWMSTEKYGKDNFYYHTFDAPFPNGYDVNNYWLGNREEAYYSKLSPAYYIAEWNRSPKRTDSPPFKGMVNYAYHFDAAKFTTLLAANAKKRFNVRHIYETVKEVILQDDGSVKGFEYDSGEYEEFDFYVDCSGFASLIFGKTLKVPFVSKNDIILTDTALALQVPTAPDEDIFPYTKATAHEAGWLWDIPLTTRRGTGFVYSSNHMSDDDALKGFSKYHGIDIEKMNPHKIPMRAGYREKIWVKNCVSLGLANGFVEPLESTSLFVTDFCAGMIAKKLPLNTEELHLFAKPCNEITTHIWERVFDFIQLHYCISDRRDTQFWRDVTENVEMSSLLKERLEMWKYSVPQRVDFPSTFDFFHTESYLSVIYGMDYPTRAPSVNDMVGNFSKQKIAEHLVNSKKLADSLMPQRKWLTELKEYVAKNRPS

SEQ ID NO: 87780 - protein, 494 aa, unidentified
  source 1..494: note = Gammaproteobacteria bacterium
  REGION 1..494: note = tr|A0A3C0KZ74|A0A3C0KZ74_9GAMM Tryptophan halogenase; OS = Gammaproteobacteria bacterium OX=1913989 GN=DCL32_05010; PE = 4 SV=1
MTNPNPQSNVVIVGGGTAGWMAAAALSKLLGKTLNVRLVESEEIGTVGVGEATIPTLMTLHRLLKIDEAAFLKATQGTIKLGIQFENWQKEGHQYFHSFGYTGEGCWAAGFQHFWLKGQQLGFGDPDYGQYAPELVAAQAEKFGFLKPAALNYAYHMDASGYARFLREIAEANGASRIEGRIVDVLQKDNGDIASVVLANGDTISGDLFIDCSGFYGLLIDKTLGVGFDDYGDWLPCDRAIAVQTQSTRPPRPYTRSIAHSAGWQWQIPLQHRVGNGLVFSSQHYSEDEALHRLRQNITGDERTDPRLIKFQTGQRQAHWVKNCVAIGLSASFIEPLESTSIHLIMRAIIRLMQMYPHQQTSASDIQEFNNQMRAEVEFVRDFIILHYHRNDRTRDPFWRDMANLRIPDTLRHRLDLFQETGRVFQAQGDVFGENSWTQVMLGQGLRPKRYHHIVDMMPEAELKAFLNTQRSRVEAMVKVLPSHQDFLSAYLSP

SEQ ID NO: 87781 - protein, 497 aa, Sphingomonas sp.
  REGION 1..497: note = tr|A0A0Q4C8H9|A0A0Q4C8H9_9SPHN Tryptophan halogenase; OS = Sphingomonas sp. Leaf9 OX=1735674 GN=ASE58_14020 PE=4; SV = 1
MTDRRIAHVVIIGGGTAGWMTAAAAGRFLDDGQRRITLVESDAIGTVGVGEATIPSILNFNNLLGIDEGEFLRETKGSFKLGIEFAGWHRPDSGYFHPFGSFGRDIEGINFHQLWLKLRGEAGIGPIADYSPSTVAARAAAFSPPVGDPRSPLSGMAYAYHIDATLYAAFLRRRAEAEGVKRVEGRIVAVERADNGHVAAVVLDDGRRVEGELFIDCSGFRSLLLGDAMGVGYEDWSHWLPCDRAIAVPTERTEPVLPYTRATAHQAGWQWRIPLQHRTGNGVVYCSRFLDDDAAEALLLSRLDSAPTAAPRRLSFTAGQRHRMWEGNVVAIGLSGGFLEPLESTSIHLIQQGISKLFALFPDRDFSGVERTEYNRQMADNYRSIRDFIILHYHATARDDSPFWHHVRTMDVPNSLTRKLDLFRRKGRIFRYDDELFATPSWVAVLLGQGVDPVGHDPVADALDGERLAGALRQMRSATQSAVAGLPSHGAVLARLG

SEQ ID NO: 87782 - protein, 458 aa, Streptomyces auratus
  REGION 1..458: note = tr|J2K685|J2K685_9ACTN Tryptophan halogenase; OS = Streptomyces auratus AGR0001 OX=1160718 GN=SU9_04076; PE = 4 SV=1
MRAGTQVLVIGGGPAGSTAAGLLARQGVQVTLLERETFPRYHIGESILPSCRPIFELLGVWDKVEAFGFQPKGGAYFSWGPDEWEVRFAELGADGANAWQVTRADFDKLLLDHSRELGVDVHEGVTVKKIEFDGDRPVAARWAGGGKTGRLTFDYLVDASGRRGVMATKYLGARKFHSVFRNVATWSYWKNAKSLDRGPAGSITVASVPDGWFWAIPLHDGTTSVGLVTGRDTFNRRRREQGGIEAVYDDALRQCPLVQELLAGAERVSDFKTEQDYSYTSETFHGPGYLLCGDAACFLDPLLSTGVHLATYSAMLAAAAIGSVLRGEVEESEAWAFFDGVYRSSYERLLVLVSVFYESYRGKEFHFYNAQRLSAEDRDALDLQASFDHIITGIADLKDAEDVYRRVRQHLGGAESGDPNPLANLNKEHELKVAPISPDRAVSGLYLSYRPQLSLRRA

SEQ ID NO: 87783 - protein, 533 aa, Sphingomonas sp.
  REGION 1..533: note = tr|A0A4R2P8S1|A0A4R2P8S1_9SPHN Tryptophan halogenase; OS = Sphingomonas sp. BK235 OX=2512131 GN=EV292_11044 PE=4; SV = 1
MNEHTIRHVVILGGGTAGWMAAAALSRFLNNGVTRITLVESEEIGTVGVGEATIPPLLTFNRMLGIDEQDFIRATGGTFKLGIEFVDWGGLGERYFHPFGAHGHDLGGVHFHQLYLRERQRRVMHDISAWSMSAVAAQAGKFAPPSPSAQSAVKELLYAYHFDAARYADFLRGYAERNGVRRVEGKVTAVAQRPEDGYVTALRLEDGQVIAGELFVDCSGFRGLLIEETLATGYEDWRRWLPCDRAVAVPSALAGDPDPYTRATARGAGWQWRIPLQERMGNGLVYCSDYQSRESAERELLHHLEGAPLAQPRHLAFTTGRRVLAWNRNVVALGLASGFVEPLESTSIHLVQSGIAKLIALFPDRRFAAVERDEYNAQMHELYEDVRDFVILHYKATRRDDTPFWERCRTMDVPASLQRKIDLFRAKGRVFREGRELFATTSWVAVCLGQHIVPDEHEPAADALDEERVAEAIEQMRRDYLAVADKLPRHGDFLRHIGAATAPAAAPPPAAPDPGPTFSFASETPFNFSADPL

SEQ ID NO: 87784 - protein, 501 aa, unidentified
  source 1..501: note = Gammaproteobacteria bacterium
  REGION 1..501: note = tr|A0A4V2AAC3|A0A4V2AAC3_9GAMM Tryptophan 7-halogenase OS=Gammaproteobacteria bacterium OX=1913989; GN = EOO52_17435 PE=4 SV=1
MNQINPIKKIVIVGGGTSGWIAASMLSYHLKSELCEIELVESEDLGTIGIGESTIPPVVRLIQNLGIDETQFIQSTQACFKLGIKFIDWRQKNESYFHPFGVIGKRIGSHDFYQCWLKSTMQGENVPLQDFSPCSVMAQQEKFFWPTQLQNTPIGGASYAVHLDAKLVVSYLNKYAHERGVKRTEGMVEQVVKSDTGNIEKLVLKDGKEIHGDFFIDCTGFKALLIEKALGVGYEDWSNYLPCDRAVVVKTAAQEKRPPYTTATARKAGWSWKIPLRNGTGHGYVYSSKFCSDAEAKSTLLKNLDGPRINDPRVIPFSTGRRKNMWEKNCLSLGLASGFVEPLESTSIHLIARGMDFFLRFFPDRDCDPSLIKEYNRRMTTDFEEVRDFIMLHYCTTQREDTDFWRWCKTMELPESLQERITLFKGHGLIREGTDELFRSTSWQSIFEGMGIRPNKYCPRVDNMDYQEISDTLKLARQAIQSMVKTLPSHDEFLRQNLADE

SEQ ID NO: 87785 - protein, 503 aa, Sphingomonas sp.
  REGION 1..503: note = tr|A0A4R2PM17|A0A4R2PM17_9SPHN Tryptophan halogenase; OS = Sphingomonas sp. BK235 OX=2512131 GN=EV292_103496 PE=4; SV = 1
MRPVRRVVIAGGGTAGWLAAALLTRQLGGMIAVTLVESEEIGTVGVGESTIPTVRAFHGLIGVDEEDFVRATGASYKLGISFEGWSRADERYFHSFGTVGQSTWMAEFHHFWLEARAQGVAADLGAYCVEHEAARAERFAGRPDASLNYAFHFDAARYARYLRERCESDGLFRIEGRIDRAERDAEGDIAALVMADGRRVEGDLFIDCTGFRALLIGETLGVGYEDWTHWLPTDRAIAVQTAATGPAVPYTRAIAHDAGWQWRIPLQHRLGNGIVYSGAHLSDDAARARLLDTVTGEVLIEPRLIRFRTGRRARAWERNCVALSLASGFVEPLESTSIHLIMIALTRLLQLFPYDGATASLATRFNDMAQREIEGVRDFIILHYHLNQRDEPFWHHLREMPLPDSLAERIALFREGAQAFQANDELFTVTSWVQVMLGQRLTPRSYNRVAQMMPPGRLAEALDGMARGIAGQVAALPAHQAYLDRLVGASAAPAAARSSAVAR

SEQ ID NO: 87786 - protein, 504 aa, Caulobacter sp.
  REGION 1..504: note = tr|A0A318BCC9|A0A318BCC9_9CAUL Tryptophan halogenase; OS = Caulobacter sp. D5 OX=357400 GN=DMC18_03720 PE=4 SV=1
MTNDRIRHVVIVGGGTAGWMTAAALGRFLKDGVTKVTVIESEAIGTVGVGESTIPQINMFNRMLGLDEDDFLRRTKATYKLAIEFRDWKEIGHTYHHPFGPYGVDMEGVSFHAYWLRYQAMGEAADLSEYSLQSLAASQAKFQRPTGQKNSPLGDIAYAFHFDAGLYARFLRDYAEARHVRRIEGRITNVALRGTDGFVESVTLENGTLIEGDLFIDCSGFRGLLIEGALKSGFEDWSHWLLNDRAVALPCASGGSTDPVTRATARPAGWQWRIPLQHRIGNGYAFSSQHISEDEATAYLLANLDGEPLADPNLLRFKAGRRKKSWNRNVVAIGLSAGFMEPLESQSIHLIQVGISRLLAMFPDRRFQQPDIDRYNRVMTFEYEKIRDFLILHYKATERSDTPYWDYLREMPIPDYLADKIAVFESHGRIFRENEELFNDTSWFAVMVGQGLKPRGWDPMADVMSEDLLRARMNEIRAVIARSADTMPDHMTFVADRVRQAEAA

SEQ ID NO: 87787 - protein, 518 aa, Caulobacter sp.
  REGION 1..518: note = tr|A0A318AWC9|A0A318AWC9_9CAUL Tryptophan halogenase; OS = Caulobacter sp. D5 OX=357400 GN=DMC18_21390 PE=4 SV=1
MERGRSILIVGGGTAGWLTAAYLAKSLRIAEQDHLKITVLESPDIGIIGVGEATFPTIRTTLQFLGIDETRFIRETSATFKQGIRFVDWGHAPEDGRRHQYFHPFEAPFSADGASLAPYWLLQDEATRPPFAEAMTIQARVAGAQRAPKRPHEGNFAGPLNYAYHFDAAKLAQVLADRARELGVERLEGLLTNVALDADGAIDHVACAEHGRLEADLYVDCTGFRAELIGQALKAPFKSTRPVLFTDRALACRVPYERPDAPIQSFTVATAHEAGWIWDIGLAGARGVGCVYSSDHMDDARAEAILRAHIGPNVEITPKAISFEAGYRERQWVKNCVAVGLSAGFLEPLESTGVVLIEAAVAIIAELFPHNGPIDAPARRFNQLMTARYDNIIAFLKLHYCLSRRTEPFWRDNADPASIPERLAELLEQWRHRPPSRYDFILDLETFAFFNYQYILYGMGFKTDLSPGRGEFPDVQSAARQFARIRAFGERATHDLPSHRDLISQINRFGFDRPLEPA

SEQ ID NO: 87788 - protein, 501 aa, unidentified
  source 1..501: note = Alteromonadaceae bacterium
  REGION 1..501: note = tr|A0A1Y6BLB4|A0A1Y6BLB4_9ALTE Tryptophan halogenase; OS = Alteromonadaceae bacterium Bs31 OX=1304903; GN = SAMN02745866_00668 PE=4 SV=1
MNDKQIKKIMIVGGGTAGWISAALLSSRFGSEYCEIQLIESDEISTVGVGEATIPPIVGFNNLLKLDENEFIRETKATFKLGIEFIDWNKKGESYIHPFAKYGTAFTHEPFHHHWLNLHPQGKAQALKNYSLACMASEQNKFMRPINRPGSPLSAIGYAFHLDAGLYAQYLRKYAEKRGVKRTEGKIVNTYLKDDGFIESVEMENGEIYSADLFLDCSGFRGLLIEKALNTGYQDWRHYLPCDRAIAMPSESGLTLRPYTQAQAHSAGWQWRIPLQHRVGNGHVYSSQHMEDQQALDILSENLEGKALGEPRFIKFTPGRRDVFWNKNCVAIGLSSGFLEPLESTSIHLIQLSLYKLLDLFPTKDFKPEVVDNYNRIMITKFEQVRDFIVLHYKATERDDSSFWNYCRTMAIPETLQQKMDLYKSSGVIFRENDELFAENSWLAVLHGQGLRVDSHHPLVNAMPDAQAENILKQIEEKVAEAVAEMPDHKAYLQSQCGVRF

SEQ ID NO: 87789 - protein, 495 aa, Sphingomonas sp.
  REGION 1..495: note = tr|A0A2T7VUX3|A0A2T7VUX3_9SPHN Tryptophan halogenase; OS = Sphingomonas sp. TPD3009 OX=2171625 GN=DC425_07525 PE=4; SV = 1
MTTIVIAGGGTAGWMAAAAFGGLLESGYRIRLVESEEIGTVGVGEATIPQIRLFNQALGLDEDAFLRATGGTFKLGIAFDGWREPGHSYMHAFGDVGRDVGLIAFQHYWLRARTLGLAKPLDAYALNEVAARAGRMHRGSPITAQTLPTMPYAFHFDAGLYAAYLRRFAVNRGVERTEGKIDRVERNGDTGDIAALVLASGERIAGDLFLDCTGFRGLLIEGALETGYDDWTHWLPCDRAVAVPSANVGAPLPYTRAIAREAGWQWRIPLQHRTGNGYVYCSRHLSDDAATAALLANIEGEAQADPRHLRFVTGRRKRAWNRNVVALGLASGFLEPLESTSIHMIQSAIARLVKLLPSFPIADALRDEYNRQTDFEIERIRDFLILHYWANGRAEPFWQERREADLPDTLRAKIALWQQAGTITREHEELFTEDGWLQVLAGQGVKAAAYHPLADQIGTDDLGEYMETLELLYRREAQAMPTHADLIARHCAARP

SEQ ID NO: 87790 - protein, 503 aa, unidentified; identical to SEQ ID NO: 83614
  source 1..503: note = Verrucomicrobiae bacterium
  REGION 1..503: note = tr|A0A2A2Y7P6|A0A2A2Y7P6_9BACT Uncharacterized protein OS=Verrucomicrobiae bacterium AMD-G2 OX=1982328; GN = CAK88_10625 PE=4 SV=1

SEQ ID NO: 87791 - protein, 491 aa, Sphingomonas sp.
  REGION 1..491: note = tr|A0A2T7VRZ4|A0A2T7VRZ4_9SPHN Tryptophan halogenase; OS = Sphingomonas sp. TPD3009 OX=2171625 GN=DC425_07500 PE=4; SV = 1
MTPPPPSIAILGGGTAGWMAACLMAKAWPQARITVIESPDIGIVGVGEGSTPQLKSLFDTLGIAESDWMPAADATYKAGIAFHGWADDTPAYFHPFAGQIDLHTQGAFFASTRARRHGADVPAHPDRFFLNARLAEAGRAPIAPGNFPFRIGYGYHFDAHKVGHVLRAAALARGVVHLPRRVRDVVVDATGQVATLTLDEGDAIHADLFVDASGFASVIAQQALGVPFRSFADTLFADRAVVMPTPRKDALPVQTKATALSAGWAWDIPLTSRTGNGYVYASRYLSPDAGETELRRHLGLLDTDVAARHLSMKVGRVETSWTANCLAIGLAQGFIEPLEATALHIVQATIEGFIGAYQAGSRDAFNASIARRYDGIRDYIVAHYRLNRRSGPFWRDVAANDDLSDDLKAIMTAWFTGGDVAAVVEGRGLAGYYAPMSWEVLLAGYGTFPDATRLRTAPPVADLAAIDSLLSGCLLNFPDHQAALDGHRRMP

SEQ ID NO: 87792 - protein, 551 aa, unidentified
  source 1..551: note = Rhodobacteraceae bacterium
  REGION 1..551: note = tr|A0A559Q862|A0A559Q862_9RHOB Tryptophan halogenase; OS = Rhodobacteraceae bacterium PT6CLA OX=2135812; GN = C7961_3247 PE=4 SV=1
MGAPITDVTIVGGGTAGWLTATLLQSILTRPGRAGKDVKITLIESPNVPTVGVGEATVPGMPRTLRNAGIPEQEFFKTCNASFKLGVLFRKWNVDRDGQQIDYVNPFNPVPSIEGIDAGYFMLRHGAGALDFVQTYSAAVDLARAFKGPRALGAKEYDRRIGFAYHLDAGKFAHMLRDICVERGVTHILEDVVDVEQDERGYIAAVNLEESGRHPVQLVIDCTGFRGVIINQVLKEPFVSYSKYLANDKALAVQIPHSDPAKLPSVTQSTALGAGWVWRVPLYHRIGTGYVFSSAHRTDEQAMDEFLAHLGDEAKGAEPRVIPMRVGRTRNAWVKNCVAVGLSGGFIEPLESTAIHMIDTAVRWLATYFPDQDFPEPLRARYNKLSNALYDEVRDFICLHYALGNRTDDPYWIDARNMEVPDSLAENLELWKHTLPGPYDLEFASLFSPGVYQTVLLGKRVYETGYGSPTMTATLPLRQEVWGRHLQNARAAIKQSVEAAADHRMLLTELRGEATPAPFLPLAQATVGMPGAAAPKAVALAVPEKEDASLL

SEQ ID NO: 87793 - protein, 514 aa, Catenovulum sp.
  REGION 1..514: note = tr|A0A2S0VNI5|A0A2S0VNI5_9ALTE Tryptophan halogenase; OS = Catenovulum sp. CCB-QB4 OX=2172099 GN=C2869_04745 PE=4; SV = 1
MSMVKSLVIVGGGTAGWLTAGILAAQFQSRIQAGQLSITLCESANVPTVGVGEGTWPTMVTTLKAMGISETDFLRHCEVSFKQGSKFVNWGTESGDFYYHPFDIPNGAFEGLCPTYWLNTASGTAYAQQFSSQFDICEAGLAPKTITTPEYANYAHYGYHLNAGAFSTFLQKHCIAKLGVRHCVDDVTDVTLATNGNIESISLKEYGVLAADLFVDCTGFKSLLLGKALNVEFVDVNDVLFADTALAAQVAYPTDDAPIKSYTQSTAQDAGWIWDIGLPTRRGVGHVFSSQHMDEDKAIKTLEHYIKQSGGTFDPDTIRKISFRAGHRKHFWHKNCVAIGLSAGFLEPLEASALVLVELSANMLAEQLPNTQADMPIRAQRFNDKFAYRWSRAIEFLKLHYVLSERQSAFWQDNRAAESIPSRLQDLLTLWQHDVPKLTDFDATGELFQAASYQFVLYGSSYRSKLLQNVEASHMQYIEQQLQQNQLKTQQLLSTLPSNRELLNKVQKFGFAKI

SEQ ID NO: 87794 - protein, 518 aa, Rheinheimera sp.
  REGION 1..518: note = tr|A0A437QM79|A0A437QM79_9GAMM Tryptophan 7-halogenase OS=Rheinheimera sp. KYPC3 OX=1834037; GN = EOE67_12510 PE=4 SV=1
MQNSITPQAPPLKLLIVGGGTAGWLSALMLAWHFRQQPWVHIELVEAPDIATIGVGEGSTPALTRLFRQLEIAEADWMPACQATYKNGIQFSDWSTIPGYQHYFHPFPSSEDNAVLPEFFRQVRAAQQGQPNDAHPDSFFLQHQLAITGKAPFCADHQIQLQYGYHFDAGLLGQCLKKIAIQRGVAYRPFKVTDVQCFADGAIAQLHTAEGATLAADFYVDCTGFASKLMRQTLGSKFHRYQQMLPNNAALTIATQAESHPLSQTTATALRHGWCWQIPLQHRTGNGYVFSQDFISADIAETELRQHLGLSEQEGSSRLLKFESGRLQQHWQHNCVAVGLSQGFIEPLEATALYLVQQTVSHFLLHWQQSQYQCRGELVARSDYNLLINNYFDRVADYIVLHYKTNSRSDSDYWQHNRKLEFISPELRQLLQCWQSGGDLPALLAAKQLEKYYHAVSWYCLLAGTGYLPERGRLPEYSRQQLPAAQQRLQRWQQLAAWCPEQLAHLRQLAASNRLVTP

SEQ ID NO: 87795 - protein, 521 aa, Xanthomonas arboricola; identical to SEQ ID NO: 86498
  REGION 1..521: note = tr|W4S3T9|W4S3T9_9XANT Tryptophan halogenase; OS = Xanthomonas arboricola pv. pruni str. MAFF 311562; OX = 1414836 GN=XPU_2350 PE=4 SV=1

SEQ ID NO: 87796 - protein, 499 aa, unidentified
  source 1..499: note = Altererythrobacter aquimixticola
  REGION 1..499: note = tr|A0A4T3F5R6|A0A4T3F5R6_9SPHN Tryptophan 7-halogenase OS=Altererythrobacter aquimixticola; OX = 2489173 GN=E5222_00310 PE=4 SV=1
MQGRPVRKVVIAGGGTAGWTVAAALAKNLGELIEIVLVESDAIGTVGVGESTIPTARRFHELLGLDEAQFVRATGASFKLGISFENWTRDGERYFHSFGVTGRSTWMADFQHMWLEARAMGIAGDIGEYSLETQAAMANRFRTGGEVPLNYAYHLDATAYGLFLREFAEPLGVTRIEGRIRDVRKHGESGDIAALELDSGEVVGGDLFIDCTGFRGLLIEDALETGFDDWTHWLSTDRALAVQTKAVGPARPYTRAMAHEAGWQWQIPLQHRVGNGLVYCSEFMSDDEARARLEQRLDGEMLTEPRVIPFRTGTRRKAWNRNCIAIGLSSGFVEPLESTSIHLIMIAVTRLMQLFPFDGVSDALAQRFNDLSRTELEGIRDFIILHYHLNNREGEPFWDRCRALDIPDTLAQRIALFRESATAYQASDELFRIDSWVQVMLGQGLQPQSHHALGRMIGAEKLGASLDTLASNLRRAAQSLPEHQAFLDQYAGKAEAGAA

SEQ ID NO: 87797 - protein, 499 aa, Caulobacter sp.
  REGION 1..499: note = tr|A0A318BAH2|A0A318BAH2_9CAUL Tryptophan halogenase (Fragment) OS=Caulobacter sp. D5 OX=357400 GN=DMC18_03535; PE = 4 SV=1
MEANTPLEIVIVGGGTAGWMVATALVSGLRPHQARVRLVESDDIATVGVGEATIPAMRDYNRFVGIDEVEMLRATNGTFKLGIEFLDWGFKGSNYHHPFGVHGQSIGGAGFHHQWNRARLAGHDFDIEDFSYAIAASRADRFEFPNPNPEAIDSTYSYAYHFDASLYAKFLRKVAESRGLKRTEGKVVDVTLDGASGDVASITLASGEVVKGDFFVDCTGFRGLLIGQTLNSPFEDWTHWLPCDRAWAVPCARAGRFTPFTRSTAREAGWQWRIPLQHRTGNGYVYSSAHISDDEAAAVLLANLDGEALDDPRQVKFKAGRRTASWTCNVMAAGLSSGFLEPLESTSIYLIQIAVMNLLKLFPGKRVEPALVEDFNRRVDMEYDRVRDFLILHYHANTRTDGTLWKQCREMPIPDSLREKLELFRHRGHAPNYRDGLFAMPSWISVLLGQGVTPRGYDPMADNAPLAQTLAELERQRAAITRRVPAMPSHAEFIDRHCA

SEQ ID NO: 87798 - protein, 492 aa, Sphingomonas sp.
  REGION 1..492: note = tr|A0A2T7VKC1|A0A2T7VKC1_9SPHN Tryptophan halogenase; OS = Sphingomonas sp. TPD3009 OX=2171625 GN=DC425_08465 PE=4; SV = 1
MSDTRIRRIAILGGGTAGWMTAAALSRALVGQGVAITLVESDAIGTIGVGEATIPTIHWFNQIIGLDERQFMAETKATVKLGIEFVGWNGEGSRYFHPFGTFGPPGDGAMFLHRLIRARADGDTASTESYSLTAQAARAGRFTRPVPDRRSLLSTLGYAYHFDAGLYARYLRGLAERAGITRIEGMVASVERHDDSGYVRSLTLADGQVVAGDLFIDCSGLRGLLIGETLGVGYDDWSYWLPCDRAWAAPSAAEVGRTPFTRATAAEAGWRWRIPLQHRVGNGYVFASRFQDEEAARASLIAGMDGPPLADPRLIRFTPGMRREAWRANVVAIGLSSGFLEPLESTSIHLIQSGIAKLLSLFPAADCSPLLARQFNRVFGQEMLDVRDFLILHYHATAGRTEPMWQERQAMAIPDTLAEKIAHFRASGRIVLSSDELFRDASWFAVLDGQGERPGDHNPLIEALGRDDNLRQLAALRADIAKVTATLPPLPA

SEQ ID NO: 87799 - protein, 503 aa, Catenovulum sp.
  REGION 1..503: note = tr|A0A2S0VTQ5|A0A2S0VTQ5_9ALTE Tryptophan halogenase; OS = Catenovulum sp. CCB-QB4 OX=2172099 GN=C2869_13935 PE=4; SV = 1
MNPNTNTQRHILILGGGTAGWMAANLMAVKWRDYPNIKISLMESPQIGIIGVGEGSTPQLRAFFNSIDVEESQWMKRCNATYKVGITFANWSTKPGFTSYFHPFYSQVDSYVASTFKQNTYFRRKGANVEALPDHYFLGTYIAQQALSPKADHNFPFDVHYGYHFDSHLLGEFLKELAISRGVNYIEGKVNHVELANNGDIHSLLTEEGQQIQADFFVDSSGFRSVLLQQALKVPFKKFNENLFNDSAVVLPTEKHKQLQTQTVSTALKYGWTWDIPLTNRTGNGYVYDSNFCSAQQAEQELREKLNLVESDVEARHLKMKVGRVEKHWSRNCVAIGLAQGFIEPLEATALDIVQDTVLNFMAAYQSGNFTDKNRDMFNERVNKRFEGVRDYIVAHYAMNSRDDTEYWIANREHKNWSNALSTAVQCWNSCGDMQKALEDQAISDYFPEISWYCLMAGYGCFPDKVITRHDLPAQKYSFSQVKEFMNSCAINHKSHLDELANI

SEQ ID NO: 87800 - protein, 561 aa, unidentified
  source 1..561: note = Ruegeria arenilitoris
  REGION 1..561: note = tr|A0A238KXH6|A0A238KXH6_9RHOB Flavin-dependent tryptophan halogenase RebH OS=Ruegeria arenilitoris; OX = 1173585 GN=rebH PE=4 SV=1
MNNRLQKITIVGGGTAGWMTALLLEMVFSRTSATKDRPRICLIESPNIATVGVGEATVPRMPVTLRQAGISERDFFRETNASFKLGVKFCNWNKDAKGKRIDYVNPFAHGQMLEGLEAAEYFLRFGNGDRDFTQSISPHDDLARLCKGARLLGQPEFEQRFGYAYHLDAVKFAGMLTRVCTQRGVEHIRDEVQSVELNEQGNVSHLMLERAGRHDIEMVVDCTGFRGLIINQALGEPFMDYSDYLPNDRAMALQIEHPNPRKIESVTRSTALGAGWTWRVPLYNRVGTGYVYSSAHRTDDQAADEYLEWLGDSGKGATPRVIPMRIGRVRNAWVKNCVAIGLAGGFIEPLESTAIHMVDHAVRWFAEHLPTRDIEPSLRDRYNRQMNKLYDEVLDFICLHYKLNNRTDDQYWIDARTEMKVPDRLAENLELWKNRLPMQHDVEFATLFDHRVYQTVLLGKQVYDTGYGTGIRDRIRPLRKDIWFQWWKGAKVDLAQILKAMPDHKTLLRDIRGELKQPTFAMAKAAQPTVPMPGAAPEPVVIQNMPNLAEIQSGKKDLQLF

SEQ ID NO: 87801 - protein, 501 aa, Caulobacter sp.
  REGION 1..501: note = tr|A0A318B3U1|A0A318B3U1_9CAUL Tryptophan halogenase; OS = Caulobacter sp. D5 OX=357400 GN=DMC18_08675 PE=4 SV=1
MTAGPIRNVTIVGGGTAGWMSAALLARALGPSATITLVESEEIGTVGVGEASIPQLRFFNAFIGLDEDAFLRATQGTIKLGIEFVDWLRPGHRYMHAFGSVGRSLGTTPFHHWWLDARRRGTAGEDFWAWSANALAARAGRFGRVAPEGGEPLSWAFHFDAVLYARHLRGHAEAQGVQRVEGRVVAVDQDPDSGFVRAVTLKDGRRVEGELFVDCSGFRGLLIEEALKTGYEDWSRWLPMDSAWAVPSRDAAPPVPYTRAWARDAGWQWRIPLQHRTGNGHVFSGAWTDKETARQVLMDNLEGEPLADPRLLTFVTGRRKAFWNRNVVALGLASGFMEPLESTSIHLVQSGLARLLALFPDQGFDPALTAEFNRQTGDEYARIRDFLVLHYKATERDDTPFWASRKAMEIPESLAARLSLFTGPGRVFSHEDDLFKETSWVQVLLGQGLTPAAAHPMTAAVADARVDDWLADLAHAAARTANALPTHAAFLAGAVRAELVG

SEQ ID NO: 87802 - protein, 518 aa, Rheinheimera sp.
  REGION 1..518: note = tr|A0A437R5J2|A0A437R5J2_9GAMM Tryptophan 7-halogenase OS=Rheinheimera sp. KYPC3 OX=1834037; GN = EOE67_02345 PE=4 SV=1
MTTAVKKLVIVGGGTAGWLSAAIIAAQHRSNTAEGLQVMLVESADIPTIGVGEGTWPTMKNTLQQIGLKEADVFAHCHAVFKQGGKFVNWVRSAAQLSSDSGPEQEFYYHPFTVPMGYGRIDLAPYVDDVSQFAIDSNFQHQICEAGLAPRTLAEGEYQGQCNYAYHLDAGAFADLLKQHCKTKLGVEQRIGTVERCELTADGQIKALHLTDGSEPIEADLFVDCTGFASLLLGKTLGVPFESVDHLLFNDSALAMQVPYDNPDAPIPCHTIATAQNAGWIWDIGLTHRRGVGHVYAAKYLSDDEAEFNLRRYIGKAAEGVAVRKISFATGHRTKFWQHNCVAIGMAAGFVEPLEATAIMLVEISARFVADNLPADQATMPLVARRFNQQMLYRWQRILDFLKLHYMLTKRPEPYWQAHLDPATIPQSLQDDLQLWRHRGPQIADFNGALELFPAASYQYVLYGMGFKPDFSAQAYLYQQQGQAQQIIRRNQQLTTQMLQTLPSHRDYINRWLAGSRG

SEQ ID NO: 87803 - protein, 528 aa, Rheinheimera sp.
  REGION 1..528: note = tr|A0A437QIJ4|A0A437QIJ4_9GAMM Tryptophan 7-halogenase OS=Rheinheimera sp. KYPC3 OX=1834037; GN = EOE67_15905 PE=4 SV=1
MDNPIRSLVIVGGGAAGWITAGLLAAEHNADQGVLAAIPKLTISLIESPDVPIIGVGEGTWPSMRLTLQKIGIGETEFLLCCDASFKQGSKFIHWRGQTAANRSFPDSYIHPFSLPIGQQELNLCPFWLPHQQDVAFADAVCQQFQLAELGLAPKQISTAEYSFINNYGYHLNAGKFSQLLQKHVTEKLGVRYIADHVTAIHSQQNGDIASLSTKSHGEISGDLFIDCSGSRSMLLGEHLQVPMISQQQVLFNDSALAVQMPYPTADAAIASCTHATAQSCGWIWDIGLPTRRGIGHVYSSAHLSDDAAEQQLRRYLTADFGASAASSAEFRKLSFAPGHRALCWKNNCIAIGMAAGFIEPLEASALALVEWTAKALSSQLPANRAVMDIVAARVNKVFLQHWQQIVEFLKLHYVLSQRADDDYWYEHRESSSIPTSLQDALQLWRYQVPSAMDISHSDVLFPAASYQYVLYGMGFQTQLSGSQKPSLQRKAQQLFNENIQRIQTLKQVLDDNRSLLQKIRQHGLPTI

SEQ ID NO: 87804 - protein, 509 aa, Caulobacter sp.
  REGION 1..509: note = tr|A0A318B0E3|A0A318B0E3_9CAUL Tryptophan halogenase; OS = Caulobacter sp. D5 OX=357400 GN=DMC18_18405 PE=4 SV=1
MTQAVRNIVVVGGGTAGWMTAAALSQVVGTKRYSITLVESEQIGTVGVGEATIPMILLFNKVLGLDEDVFIRETNATFKLGIEFVDWRRRGHSYFHPFGLYGADMDGVGFQHFWLRWARESGQTDHSLFNAESLAAKAGRFLRAPPQSLATLPKINYAFQFDAALYAAFLRRYAEARGVVRVEGKISGVERDGESGHVSRLVLDDGRAIEGDFFVDCSGFRGLLIEETLGAGYDDWSQWLPCNRAAAMPCVRAGELTPYTRATAREAGWQWRIPLQHRTGNGYVFSDAFIAEDEAVRLLGERLDGAALADAKVLKFTAGRRRKSWIGNVLAIGLSSGFLEPLESTSIHLVQAAIAKLLALFPKTGFDPWVVDKFNREMSLEYEQVRDFIIAHYKVTERDDTEFWRWCQAMVPPDSLTQRLEVFRSRGEVLVGQQELFKETNWFAILAGQGLIPEDYHAVADTISSDELRRRVGMIRSAINERVAGMPPHDLYLDKAGLLGAAARAAVPA

SEQ ID NO: 87805 - protein, 502 aa, Caulobacter sp.
  REGION 1..502: note = tr|A0A318AWS2|A0A318AWS2_9CAUL Tryptophan halogenase; OS = Caulobacter sp. D5 OX=357400 GN=DMC18_22510 PE=4 SV=1
MDRAIGSIAILGGGTAGWMAAAVLAQVLRGTGTSITLVESADIPTVGVGEATIPPIVDFLRLLEIDQAEFMVATEGTFKLGIRFDDWTTPGERYWHPFGTFGPTIDRRPFHNMWHRLRAAGDDPRVEAYSLSAALGDAGRMAFADPRAGGVGPSGGLRHALHFDAGLVARFLRTWSERRGVTRLERKVEGAVLRDDGFVEALALKGGGHLAADLFIDCSGFRGVLIEEALKTGYEDWSRWLPCDRAVAGLTARDPNPPPFTQAAARPAGWRWRIPLRHRTGNGYVYSSAHVGDDEALADLAREAGPLLSEPRFLRFKGGRRKAFWSRNVVALGLASGFLEPLESTSIHFVTSGLMKLLDHFPDKDFDPANIAAYNAALIAEYEAARDFIVLHYQPTRRDEPFWRERAAAIPDTLAERLELYRGTGRIPFRPGELFTDLSWFYVLEGMGVRPAAYDPLVNFSNLAETRAGLVGWRGRVAQGVAEAATHEAVLDAIAARARPAA

SEQ ID NO: 87806 - protein, 499 aa, Catenovulum sp.
  REGION 1..499: note = tr|A0A2S0VTD8|A0A2S0VTD8_9ALTE Tryptophan halogenase; OS = Catenovulum sp. CCB-QB4 OX=2172099 GN=C2869_13940 PE=4; SV = 1
MMKKVITIVGGGTAGWMAATLINKVLNEENIQVQVNLVESPEISTIGVGEGSTPQLKNFFQQLGIAEYEWMKCCQATYKLGIKFSGWSSRAESDSYFHPFISQVDDQTAPAFFFNSQMRRKGADVIGHPDTFFLNSYLAKQGLSPIARNNFPFETAYGYHFDAGLLGQFLRDYAVKNAIKHIQTKVENVHLAHDGSIAYLETTKGELQSDIFIDCTGFNGLLIQKALKVPFIDFSDNLFNDSAVVLPTESLEKKPTYTGASTLKNGWLWSIPLRNRTGSGYVYSSQFTDSDLAETELRNSLGLIDSEIEARHIKMKVGRIQSHWYKNCLAVGLSQGFIEPLEATALHLVQETIQNFCAAYKAGNYTNQHQSRFNQVINNRFEGIRDYIVAHYRVNSRNDSEYWRANANNNHLSNNLVQILQTWMAGDNITQVLEQLKLSQYYASYSWHCLLAGYGIYPDSSQLLAPNEEASQHNIDEIKDFITRCSMNFLEHQEALDLS

SEQ ID NO: 87807 - protein, 503 aa, unidentified
  source 1..503: note = Verrucomicrobiae bacterium
  REGION 1..503: note = tr|A0A2A2YDZ3|A0A2A2YDZ3_9BACT Uncharacterized protein OS=Verrucomicrobiae bacterium AMD-G2 OX=1982328; GN = CAK88_03080 PE=4 SV=1
MIQSILVLGSGSAGLIAALTIKRKIPQVRVTIVRSPEIGIIGVGEGTTPNFPRHLFDYLGISRKEFYAIAKPTWKLGIRFLWGERKEFYYGFSQQLDAQWSALPKPNGYYCDDDFSAVDLPVAMMEQGKVFARQANGAPDVQPWHAFHIENVNLVECLERYARAIGVEIIDGKVVGAERGPKGISAVFTEDGRKFEADFYVDSSGFHSELLGKTLEEPFVSFDKSLFCDRAVVGGWERGADEPILPYTTAETMDSGWAWQIEHEHHVNRGYVYSSHFISDDQAAEEFTRKNPKAPKSPRVVKFRSGCYKRMWVENVVAIGNAGGFVEPLEATALMIVCSESQTLVEFLLHSNLKPTDTFRNLFNKALWNTWEEIRNFLALHYYANTRMDTPYWKACREETDISGLQELLAFYRENGPTGFGRHTLPHTGTDFGMEGYLVMMVGNKVPYQNRSTPTEAEWNIWRSAQAQNRAIASQAMTVKEALYFVHHPGWQWTSDAQPLISK

SEQ ID NO: 87808 - protein, 511 aa, unidentified
  source 1..511: note = Altererythrobacter aquimixticola
  REGION 1..511: note = tr|A0A4T3F1D7|A0A4T3F1D7_9SPHN Tryptophan 7-halogenase OS=Altererythrobacter aquimixticola; OX = 2489173 GN=E5222_00265 PE=4 SV=1
MSGQPITQVVIVGGGTAGWMAAAAISKIMGAFPGLSIRLIESEAIGTVGVGEATIPQINQFNKLLGVDEREFVRETHATYKLGIEFVDWTRLGDRYVHPFGFYGIDMLGIEFHHFWLKGRELGDTSRLDDYSIGAMAGKANKMFWPQPDQPNSPLARLGYAFQFDASRYAGYLRKLAEKQGVTRVEGRINGVEQDPESGHVTSVTLENDESIAGELFIDCSGFRSLLLGQTLEVPFNDWSKWLPCDRAVAIPCTSAGDREPLTRSTARPAGWQWRIPLQHRIGNGHVYSSAFMEDDAAIELLLANLDGEPLAEPNRLRFTGGHRAKNWEKNVVALGLAGGFLEPLESTAIHLVQAGIARLMAYWPTTDFTPTEIARFNAETERDYVDIRDFLVLHYKATERDDSEFWNYCRNLEPPDGLKDKLEMFRSSGRVIREHNELFTETSWLSVMACQGVQAGGYHPAAGLLPDAELLQRLGHVRQVISQAVSQMPTQEEFLASNGSAIDPGQRITA

SEQ ID NO: 87809 - protein, 502 aa, Rheinheimera sp.
  REGION 1..502: note = tr|A0A437QMF9|A0A437QMF9_9GAMM Tryptophan 7-halogenase OS=Rheinheimera sp. KYPC3 OX=1834037; GN = EOE67_12940 PE=4 SV=1
MNTTEAIKNVVVVGGGTAGWITAALLVKMLGKVINITLVESDDIGIVGVGEATIPPMINFNAALGIDEKAFLRETKGTIKLGIEFENWGTPGERYMHAFGAIGKEFPFCNFHHFWLKSQQQGMGFDFWDFSLTYQAAKQHKFGRLDRIEGVNLPGLAYAYHFDAGLYAQYLRRFAEPLGVKRQEGTIAQVKQCPQSGDVTSVVLKSGVEISGDLFIDCSGLHSLLIEKTLNTGFEDWSHWLPADSALAVPCESVTPITPYTKSIAHPNGWQWRIPLQHRIGNGIVYSSKYCSDEEAKATLLANLDGKPLAEPRKISFRTGRRLKQWHRNVVSIGLSSGFLEPLESTSIHLIQSGVFRLLKFFPHQGIADSDRDEFNRQSKIEFEQIRDFIILHYKLNQRSDSQYWRDCQAMDIPETLARKMEIFAATGRVFREQDELFSEVAWQQVLIGQGLIPKDYHPLVNALSDEQLRDLMQNLKDIMAVTATRLPDHQAFLDSCGGMAK

SEQ ID NO: 87810 - protein, 504 aa, Caulobacter sp.
  REGION 1..504: note = tr|A0A318AY98|A0A318AY98_9CAUL Tryptophan halogenase; OS = Caulobacter sp. D5 OX=357400 GN=DMC18_14360 PE=4 SV=1
MLDQPIRKVVVVGGGTAGWMTAAAFSRLLVGPTVQVEVVESEAIGTVGVGEATIPTIRHFNEKLGLDEVEFIRQTQASFKLGIDFRDWGRIGHRYFHAFGDFGADHEHVQAHQLWRRLRVLGDDSGLEDWSLPTAAAALNRFIPPSPDPRSPLHDYSYAYHFDAGLYAAFLRRYAEARGVVRTEGRIVDVALRGEDGFVEAVVLDDGRRVEGDLFVDCSGFRALLIEGTLKAGFEDWSRWLPCDRALAVPCATGGDGLTPYTRSTAHEAGWQWRIPLQHRTGNGYVYSSAFVDDQRAADTLMSNLDGAALDDPRPLRFLAGRRRKFWDRNVVAVGLSGGFLEPLESTSISLIQNGIARLLEFFPDRRCDPLLADEFNRVSAQEYERIRDFIILHYCINQRDEPMWRQVREVELPDSLQAKIALYKARGHVAIHEGDSFARPSWISIYNGLGVVPETYDPLADRIPEAELRRLMDHRRAVIRHAAQSIPTQAAFIAQHCAAEPIG

SEQ ID NO: 87811 - protein, 505 aa, Caulobacter sp.
  REGION 1..505: note = tr|A0A318B5Z5|A0A318B5Z5_9CAUL Tryptophan halogenase; OS = Caulobacter sp. D5 OX=357400 GN=DMC18_14365 PE=4 SV=1
MQDTDRSLRKIVVVGGGTAGWMAAAALSQLVGGRFGAIEVIESDEIGTVGVGEATIPPLHLFHALLGIDENAFVRATQGAFKLGIEFRDWGRKGGRYFHPFGAYGAPMGLSPFHQAWLRASAEGVADDLDAYNLAASAAALNRFVRPPAGQAPPVFSTFGYAFHFDASLYAKFLRRFAEARGAQRTEGKIVDVALRDDDGFVEAVTLEDGRRIDGDFFIDCSGFRGLLIEQALKTGYEDWSHWLPCDRALAVPSANAGPLTPYTRSTAEAAGWRWRIPLQHRTGNGHVYCSAHISDDEAASALLAGLDGEALADPRPLRFTPGRRRKAWNRNVLALGLASGFIEPLESTSIHLIQTAITRLFSYFPDRDFDPATVDEYNRLSAQEFEEARDFVILHYAVGERDDTELWRYCQAMSLPGSLRRKIDLYRGHGRIHVLPNELFKEHSWLAVLEGQGARPERLDPLTSLIDGAALRGQLGAIQAAVRQTAQALPSHEAFIASHCRAEA

SEQ ID NO: 87812 - protein, 517 aa, Caulobacter sp.
  REGION 1..517: note = tr|A0A318AUX4|A0A318AUX4_9CAUL Tryptophan halogenase; OS = Caulobacter sp. D5 OX=357400 GN=DMC18_20625 PE=4 SV=1
MSQDVREGRIRSIVIVGGGAAGWMAAAALRRHFGQSPIGITLVESSEIGTIGVGEATIPTIRAFYRNLGLDDLEVLRATQGTCKLGIRFKDWMAPGSAFIHPFGLYGQDLNGVAFQHYWAKARASGEVGAFGEYCLGASLAAAGKFTVPAANPPSSLSVFDWALHFDASLFAQLMRRVAEANGVRRIDAKVVKVNLRPDDGFVASLDLHTGQTIEGDLFIDCSGFRGLLIEEALETGYEDWSQWLFCDRALAVQSQPPANSSGEGAEPPPYTDVTAHDAGWRWRIPLQHRYGNGYVYSSRHIDDEAAKAELVAAVPDRLLHEPRLIRFTPGRRKQVWNRNVVALGLASGFLEPLESTSIALIETGIEKLKALFPDRGFDPAVIDEFNDWSRREMERVRDFVILHYKAAQRGDTPFWRTTRDADIPETLARKVELFRARGHVARYRWEMFQPPSWLAILDGFDIRPQGWDPALDGIDGRALAASLNQMRAGVARVVAEAPTHGEFLRRYVAAQPAAAE

SEQ ID NO: 87813 - protein, 507 aa, unidentified
  source 1..507: note = Altererythrobacter aquimixticola
  REGION 1..507: note = tr|A0A4T3F1A6|A0A4T3F1A6_9SPHN Tryptophan 7-halogenase OS=Altererythrobacter aquimixticola; OX = 2489173 GN=E5222_00250 PE=4 SV=1
MTGETQPKLRVVVLGGGTAGWMTAAGLVRMLPGLCTVALIESQDIGIVGVGEATLPHIRGFVERLGIDEAAFMKATHATYKLGIDFRDFGRVGESYIHPFGTFGEDVGGIGFHHYWLELQRQGLAAELGTYSLAVAACRANRFAPPSEDSSLGSTYGYAYQFDATLFGPFMREFGTANGVTRHEGLVTEVERDPESGDVTALILKDGRRIEGELFVDCSGFRSLLLGQELEEAWDDWTHWLPCDRAAAMPCTHRTSDIRPYTIATAMPAGWRWQIPLQHRMGNGYVFSSAHIGEDEACEAIRNSAEGDPLADPRILKFRPGRRTKSWSHNVIGVGLASGFLEPLESTSIYLAQMAITYLIELFPTDGRIDPRDRDEFNRLVDMEYDRVRDFLILHYNATTRDDSDFWNHVRTMQVPDTLADKLELWKRTGRIEKYSEGLFYDVSWMAVYLGQGLLPEAHDSRVSLPDPQRVAGAMERLQREIDAHVAAMPGHVDYLTREAARLAQAA

SEQ ID NO: 87814 - protein, 506 aa, Xanthomonas arboricola; identical to SEQ ID NO: 86615
  REGION 1..506: note = tr|W4S666|W4S666_9XANT Tryptophan halogenase; OS = Xanthomonas arboricola pv. pruni str. MAFF 311562; OX = 1414836 GN=XPU_3185 PE=4 SV=1

SEQ ID NO: 87815 - protein, 495 aa, unidentified
  source 1..495: note = Verrucomicrobiae bacterium
  REGION 1..495: note = tr|A0A2A2YAE0|A0A2A2YAE0_9BACT Uncharacterized protein OS=Verrucomicrobiae bacterium AMD-G2 OX=1982328; GN = CAK88_07440 PE=4 SV=1
MKIQSVIVLGGGSAGFTAAITLKRLLPQLTVTILRSPEIGIIGVGEGTTPFFPHHFHQFLKLPLKEFYERAQPTWKLGIRFLWGQRESFDYSFDQQFAKRSPGLPRNNGFYHEEPPAAWCLGAGLMARNKAFTRNQRGIPEITLDTTAYHIENIKLVAYLEWQATELGVVVRNETVGQVDHQQDQITTLHLLSSEKMTADFFVDASGFAAKLLGETFQEKFHDYSDTLFCDSAIIGPRHREEHEEIQPYTTAETMDHGWCWRIDHENHINRGYVYSSKFVSDEDAEAEFRRKNPAVQQTRIVRFRSGRYQRSWIGNVVAVGNAAGFVEPLEATALMILCGQCRSLAEALIDSDCDPGPMLKTMFNRFMGERWDEIRDFLAIHYRFNKRLNTPFWQHCRENTPLHGAEEIYQFYLENGPSMLANAIFISPNDQFGAEGYLAMFLGMQVPHQKKHQPNEQELAVLKQLDQTIATRASSGATVAEALQVIRDPRWRWA

SEQ ID NO: 87816 - protein, 498 aa, Rheinheimera sp.
  REGION 1..498: note = tr|A0A437QFP4|A0A437QFP4_9GAMM Tryptophan 7-halogenase OS=Rheinheimera sp. KYPC3 OX=1834037; GN = EOE67_17330 PE=4 SV=1
MQNNSNQAVKKVVVAGGGTAGWVAAAALSKRLKGLVEVVLVESEDIGTIGVGESTIPPVQLFHNILGIDEQEFMRATDATFKLGISFENWGQIGDRYIHPFGTTGKGSFLTDFQHYFLHGQKLGVEASFGDYCYELQAAKAHKFGKSATSNISYAYHLDAGRYARFLRTFSESHGCRRIEGKIASVTQHQNGDIKSLLLASGEEVSGDLFIDCTGFRALLIEQTLQTGFVPWDHWLPCNKAVVVQTESAATIPPYTRAIAHDSGWQWKIPLQHRVGNGLVYASDYLSDELARQRLVDGLETSALFEPRFLSYQTGQRKKFWNKNCVALGLSSGFIEPLESTSIYLFMNGVVRLLRLFPFDGVRQALADEYNQQSISELEKIRDFIILHYHQTERTNSPFWNYCRTMQVPDSLAHRMELFRESAHAFQSGEEMFRLESWTHVMLGQRLQPNSYHQLVASLPEQELRQHLQNIRDTIGRAVEKLPSHRDFLRQYCPANDK

SEQ ID NO: 87817 - protein, 502 aa, Sphingopyxis sp.
  REGION 1..502: note = tr|A0A0M4CR79|A0A0M4CR79_SPHS1 Tryptophan halogenase; OS = Sphingopyxis sp. (strain 113P3) OX=292913 GN=LH20_00455; PE = 4 SV=1
MGDSRITKVVIVGGGTAGWMAAAALSRTMDGLSIRLVESEEIGTVGVGEATIPSIRLFNALVGIDENDFIRETRGSFKLGIEFQNWGRIGDVYMHAFGQIGRSLGMLPFQQYWLRGRAEGIAGRFGTYSLNETAALQNRFARLPHIPNTGLEGIAYAFHFDAALYSAYLRRIAEAAGVDRTEGKVAEVRQNGESGHVEAVVLEDGTAIDGELFIDCSGFRALLVGDALQTGFEDWTHWLPCDRAIAVPSENAGPARPYTQAIAHQSGWQWRIPLQHRTGNGHVFCSDFISEDEAAAVLLANIEGRPLAEPRTLRFRTGMRSRAWSGNVVALGLASGFLEPLESTSIHLIQNGIARLLAHFPGRDFDGANVDAYNRRVRFDYERIRDFIILHYHANQRTDSAFWARCREMAIPETLTLKIDLFRSQGQIVREADELFVEIGWFQVLTGQNVAPRAYHPMADQLSRDELSGFFGDIETIVAGTASRLPTHDDFIAQHCAAGVPA

SEQ ID NO: 87818 - protein, 503 aa, Catenovulum sp.
  REGION 1..503: note = tr|A0A2S0VUT1|A0A2S0VUT1_9ALTE Tryptophan 7-halogenase OS=Catenovulum sp. CCB-QB4 OX=2172099; GN = C2869_16750 PE=4 SV=1
MNKTTIAIIGGGTAGWMTAAILAKGLPQAQYNITLVESPDIPTVGVGEATIPPIIQLCKYLEVEEKALLEAVEGTYKYGIHFENWSQIGHSYMHAFGKTGTEFYHDDKPVSFEKMWLQHAAQLGLKSFTAFSPTATAAYNNKYSDAIPAPENANPKFYYPLSHLFHAYQFDAGLLANWLKEYAVPLGVNFISATVNDISQHSNGNIACVHLDNGEKISSDYFVDCSGAKGLLSKQTLNGEFIDWSAYLPCDSAWAVQTKPTTLPFPYTKSIAQSSGWRWQIPLRQRNGNGYVYSSQFIDDQQAKNELEQALKGQEQLTEPKQIKFNTGCLKQAWHKNVIALGLSAGFMEPLESTSIHLIHKYAIELKNAFIYGKNMQQEADMFNSKYLEDTHAILDFLTLHYHCTQRSDSAFWRHCSNMPIPESLADKLQQFTNTGWIDLPQGALFSYSSWLQVLMGQGYLSSYEQFKQNDISEHSARQFFTNVHAALNNEVAKLPAHSLALL

SEQ ID NO: 87819 - protein, 504 aa, unidentified
  source 1..504: note = Novosphingobium fuchskuhlense
  REGION 1..504: note = tr|A0A117UU02|A0A117UU02_9SPHN Tryptophan halogenase; OS = Novosphingobium fuchskuhlense OX=1117702 GN=AQZ52_13240; PE = 4 SV=1
MTEAHAKQGPKRRVVIAGGGTAGWMAAAALARTMGDAIDLVLVESDNIGTIGVGESTIPPLVTYNRLLGIGEADFMRATQATFKLGINFENWRVPGESYFHSFGNTGRDHWSAGFQHFWMHGLSKGHTASYDDYCIELQAARSAKFAHLPDGRINYAYQLDSGLYAVFLRKLAEADGCRRVEGKIAEVLLDGESGDIAALLLESGERLEGDLFLDCTGFRALLIEGALHVGYDDWSHWLPCNSAIAVQTASVRPPVPYTRAIAHDAGWQWRIPLQHRQGNGIVYCNRYLSKDAALDRLLSTVEGDVLTKPNVISFTTGARRKQWHRNCVAVGLSGGFMEPLESTSIHLIQRAILRIIRMLPAGSISPRDVAEFNDQQMTDMEQIRDFLILHYKATDRRDSPFWRQCAAMEIPESLTHKIELFRETGRVFRKNEELFVENSWVQVMMGQGIMPQSYHPVAKKLSDTELGHLLAGLRESVAKTVAGLPDHQAYVAQYCGAQEARAA

SEQ ID NO: 87820 - protein, 515 aa, Sphingomonas sp.
  REGION 1..515: note = tr|A0A2T7VRT4|A0A2T7VRT4_9SPHN Tryptophan halogenase; OS = Sphingomonas sp. TPD3009 OX=2171625 GN=DC425_07120 PE=4; SV = 1
MTLPVPDHAIHNIVIVGGGTAGWMAAAAFSRLLNTGYTRVTLIESEEIGTVGVGEATIPPLLNFNRMLGIDENEFLSATAGTFKLGIEFRDWGAIGDRYIHPFGTFGQDLQGISFHQLWLRERSRRAIPDITAWSMSAQAAARGRFGRAREDARSPVRELFYAYHFDASLYARYLRSYAERGGVTRIEGRIADVRLRGQDGYVEALTLADGRQVAGDLFIDCSGFRGLLIEEALHTGYESYAQWLPCDRAVAVPCALPNAREPDPYTRATARAAGWQWRIPLQHRMGNGYVYCSDDLSDEAAEFDLLASLEGEPLGDPRRLRFTAGRRRQSWNRNVIALGLSSGFVEPLESTSIHLVQAGIQRIVAMFPDTRFDPAERDEFNRQLHGLYEDIRDFIILHYAQTRRTDTPFWDRVRTMPLPDSLTRKLDLWRGKGRLFREGYDLFSVPSWVAVCLGQGLVPSTWEPAADALDETLVAEAMETMRRGYADTAERLPTHGDFLRMVAPSPLANWGQAR

SEQ ID NO: 87821 - protein, 531 aa, Lentzea flaviverrucosa
  REGION 1..531: note = tr|A0A1H9SG03|A0A1H9SG03_9PSEU Tryptophan halogenase; OS = Lentzea flaviverrucosa OX=200379 GN=SAMN05216195_10738; PE = 4 SV=1
MNAGADVTRTIPDRVVVVGGGTAGWMTASYLKAAFGHRVSVTVVESSRIGTIGVGEATFSDIRHFFEFLDLKEEDWMPACNATYKLAVRFQDWRRPGHHFYHPFEKLPSVGGFPLTDWWLRNGPTERFDADCFVLASLCDAERSPRRLDGSLLDRGAIDGGSTPMGLTMSEHQGATQFPYAYHFEAALLAKYLCQYAVDRGVRHVVDDVEDVLLDQRGWITSVRGKESGEIHGDLFVDCTGFKGLLLNKALEVPFVSYQESLPNDSAVALQVPLDMRERGIPPYTQATAQEAGWIWTIPLFGRIGTGYVYASDYCAPDEAERVLREFAGPAAADAEANHIRMRIGRSAESWVRNCVAIGLSSGFVEPLESTGIFFIHHAIEQLVKHFPDAGWSEHNRGMYNSAVGNVMDGVREFLTLHYLAAERSDTQYWRDAAHRPMPDGMAERLERWKVQLPDTENIFPYYHGLPPYSYMCILLGMGGIATSYPPAVGLSDDTAAQKEFAAIRGRAGHLIESLPNQYDYFAQMRKGSLR

SEQ ID NO: 87822 - protein, 546 aa, unidentified
  source 1..546: note = Acidobacteriia bacterium
  REGION 1..546: note = tr|A0A321M1D7|A0A321M1D7_9BACT Tryptophan halogenase; OS = Acidobacteriia bacterium AA117 OX=2169412; GN = DMG65_01575 PE=4 SV=1
MESKPKKVLIVGGGSAGWMTAAYLSKVFGRQVNISLVESATIGTIGVGEATFSTIHLFFKFLGLQEEDWMPACNASYKLAIKFVNWNAERRHFYHPFQRYEVVQGHNVAEWWLKGDREECFDESCFVIPAICEAQRSPRYMDGRVYDNLFAKQVADCPNDSFLLRELKVQYPYGYHFDASLIAKFMAKYAQERGVTEILDEVDDVVLAEDGSILGVQTRAHGRLDADLFVDCTGFRSLLINKALGEPFIPFSESLLCDRAVAMQVPSDPQNEGINPYTSATALSAGWVWNIPLFHRTGTGYVYSSAFISPEEAEREFREHLGERSKGCKPNHIKMRIGRNRNSWVKNCVAVGLASGFVEPLESTGIFFIQHAIEELVNHFPGNSIDPATVKSYNKAIAGCIDGVRDFLVLHYVASTRADSAFWKATKTEIRIPENLAENLELWKRRLPTNRTINPQFHGFEAYSYSVMLLGLGFRPTEGLPILDYCGHAPALKQFENLRSRSEYLVATLPSTYEYLASLYQDNGRKKEIYHKAHAAPVAYPQSRPT

SEQ ID NO: 87823 - protein, 506 aa, Sphingomonas sp.
  REGION 1..506: note = tr|A0A2T7VRT0|A0A2T7VRT0_9SPHN Tryptophan halogenase; OS = Sphingomonas sp. TPD3009 OX=2171625 GN=DC425_07110 PE=4; SV = 1
MAGERRQTTRVVIVGGGTAGWMTAAAIARLLPHRAEVHLIESEAIGVVGVGEATLPHIRAFNERLGIPEAEFMARTRATFKLGIEFRDWGAIGDSYIHPFGTFGTGSGAVDFHHYYARLLCEGAKLPPLDRLSYACALAREGRFAMPETDRRSLAGTFGYAYQFDALLFAPYLRGLAEEMGARRSEGIVVDVARDGKSGDIVAVTLADGTRIEGDLFVDCSGFRSLLLGEALGEPFEDWSRWLPADRAVAMPCRTETAVTPYTSAIAMPAGWRWRIPLQHRTGNGYVYASAFLSDDAAAAALRGVVEGEALADPRPLRFKAGRRRHSWSHNCVGIGLASGFLEPLESTSIYLVQQAITLLVELFPDGRTSAADRDEFNRVIDLEYDRIRDFLILHYHATTRSDSPFWDYVRTMPIPDTLSEKLELWRRRGRVVKYREGVFLDASWIAVYMGQGIVPAGWDPRADVSPEGDLRRGIGSLAEQIAADVARRPGHRAFIDGYCPMAEAA

SEQ ID NO: 87824 - protein, 462 aa, Amycolatopsis keratiniphila
  REGION 1..462: note = tr|R4T0R7|R4T0R7_9PSEU Putative tryptophan halogenase OS=Amycolatopsis keratiniphila OX=129921; GN = AORI_6626 PE=4 SV=1
MRATTQILVIGGGPAGSTAAGLLAKEGFEVTLLERDHFPRYHIGESLLPSCRPILERLGVWDKIAAAGFQPKGGAYYFWGPEEWEVRFRPHGRDGSTSAWQVIRADFDKILLDHAREVGVDVTEGIAVKKLDFDGDRPVAAHWAEAKNPANSGRIEFDYLVDASGRGGVMATKYLKNRKFHNVFRNVAAWSYWKDAKQLDRGPSGAITVASVGDGWFWGIPLPDGTMSVGLVTGRDSFNAARNELGGVDPVYHKAIGDCPAIQQLLIEAEQVTEVKVEQDYSYAAERFQGPGFLLAGDAACFLDPLLSTGVHLGTYSALIGTAAISSVIRGEIGEREAWDFYEVVYRRAYERLLVLVSTFYESYRGKEHHFFRAQQLSEKDWEGMDVQAAFDRFVTGIADLEDTEEVYRRIQGHLLGEESGKHNPLDNLNRVHEHKQAPEKPEKAINGLYLSYEPHIGIRRA

SEQ ID NO: 87825 - protein, 491 aa, Amycolatopsis keratiniphila
  REGION 1..491: note = tr|R4T052|R4T052_9PSEU Tryptophan halogenase; OS = Amycolatopsis keratiniphila OX=129921 GN=AORI_1485 PE=4; SV = 1
MSVEDFDVVVAGGGPGGSTVATLVAMQGHRVLLLEKEVFPRYQIGESLLPATVHGVCRMLGVADELANSGFPIKRGGTFRWGARPEPWTFHFGISAKMAGSTSHAYQVERAKFDDILLKNAKSKGVVVREGCSVNDVVEDGERVTGARYTDADGNAHEVSARFVIDASGNKSRLYTKVNGSRNYSEFFRSLALFGYFEGGKRLPEPVSGNILSVAFDSGWFWYIPLSDTLTSVGAVVRREDADKIQGDREKALNTLIAECPLISEYLSNATRVTTGRYGELRVRKDYSYQQDSYWRPGMVLVGDAACFVDPVFSSGVHLATYSALLAARSINSVLAGDLDEKTALNEFEARYRREYGVFYEFLVSFYQMNVNEESYFWQAKKVTQNQSTDIESFVELIGGVSSGETALTAADRIAANSAEFAAAVDKMATGDGDDMVPMFKSTVVKQAMQEAGQVQMKALLGEDAEPELPLFPGGLVTSPDGMKWLPHHPA

SEQ ID NO: 87826 - protein, 495 aa, Shewanella sp.
  REGION 1..495: note = tr|A0A2N7CUB3|A0A2N7CUB3_9GAMM Tryptophan halogenase; OS = Shewanella sp. 10N.286.51.B7 OX=1880836 GN=BCU84_08685; PE = 4 SV=1
MTKKITNVVIAGGGTAGWMAAVAFSKLLGKNINVTLVESDLIPTVGVGEATIPTLHVFHDLLKIKEADFMAATNATFKLGISFENWRDVNQDYMHSFGYIGQSCWAAGFQHFWLKGFNQGVASDIGDYCPEHVASRVGKFAVLPNQDRNHAFHTDAGLYARFLRAFAEKHGANRIEGTIAKVNLNNENGFIDSLTLANGECIAGDLFIDCTGFKGLLIEEALHTGYDDWRHWLPCDSAVAVQTKQTKPLVPYTRSIARESGWQWQIPLQNRMGNGLVFCSKYLTDDQAKALLVENIEGEQLNEPRVLKFRTGTRRKHWNKNCVAIGLSSGFIEPLESTSIHLIQQSIVRLMQNLPTTAMESGVVDDFNQKMRVEIENIRDFIVLHYHVTERQDSEFWRYCKQMDIPESLQKRIDMFKQSGQVYKTDQELFGEASWLQVMLGQGLLPEQYHPIVDNMSDQELAQFLGTIKQSIKRRVNSWPNHIDFINNYCKSNIL

SEQ ID NO: 87827 - protein, 442 aa, unidentified
  source 1..442: note = Caballeronia peredens
  REGION 1..442: note = tr|A0A158F1W3|A0A158F1W3_9BURK Tryptophan halogenase; OS = Caballeronia peredens OX=1777132 GN=AWB71_00371 PE=4; SV = 1
MQEDAQIWDVAVIGGGPAGSTAATLLAERGYRVRLLEKARHPRFHIGESLLPANLRLFDKLGVAGEVRAIGMVKLAAEFVSPQHENRTQRFLFADAWDKSMPSAYQVRRSELDEILLRNAAKHGAEVSEGCRARDVAFAPDGAGATISAEHDDGRIEEVRARFVVDASGRDTLLANHFKTKRRNERHNSSALYGHFRNARRNAGENEGNITVFWFEHGWFWFIPLADGATSVGAVVWPAYLKRRPKGTSVEAFFRETIALCAPLAERLKDAELMSEVHATGNYSYTGDMTHGRNFLLLGDAFAFIDPVFSSGVMLAMQSAFMGADAIDTALADPSRAAAALAKFDRDVRHGPREFSWFIYRMTSPTMRNLFMGPRNPLRMKEALLSLLAGDIFGKTPIWHSLRAFKGVYYIAATLDWRNSLRAYRMRRRNLSEAERAELSAN

SEQ ID NO: 87828 - protein, 518 aa, unidentified
  source 1..518: note = Altererythrobacter aquimixticola
  REGION 1..518: note = tr|A0A4V6UGB6|A0A4V6UGB6_9SPHN Tryptophan 7-halogenase OS=Altererythrobacter aquimixticola; OX = 2489173 GN=E5222_00270 PE=4 SV=1
MNGNDITNVVIVGGGTAGWMAAAALSKYLADGRRRFTLVESDAIGTVGVGEATIPPIRSFNQMLGLDENKFLRETKGTFKLGIEFVNWGKQGDRYFHPFGEYGQDLHGISFHQLWLREVALGGQAGGIHEYSMSSMAAMMGRFGRPAPGAQSLVSQIFYAFHFDAGLYARFLRGVAEGQGTVRREGKVAHVHRDSESGDVTAIELEGGERIAGDLFIDCSGFRGLLIEQALETGYEDWSHWLPMDRAIALPTSLPASPPPFTRATAHGAGWQWRIPLQHRMGNGHVFSSQYMDSEEATRILLDNVEGEPQAEPRELRFVTGMRSKAWNHNVVSLGLSSGFIEPLESTSIHLIQNGIQRLFALFPDKAISPAERDEYNRGMRELYEDVRDFIILHYKATQRDDTAFWRYVRDMDAPESLTRKMELWRLHGRVFRENAELFAMPSWIAVMLGQNIWPQRHDPMADTLDPDKVAGAMAQMRADYRRTAEALPTQEQFLRQAGAWVGDETASGMAASVMAPS

SEQ ID NO: 87829 - protein, 527 aa, Shewanella sp.
  REGION 1..527: note = tr|A0A2N7CX40|A0A2N7CX40_9GAMM Tryptophan halogenase; OS = Shewanella sp. 10N.286.51.B7 OX=1880836 GN=BCU84_03895; PE = 4 SV=1
MAQAIQNIIIVGGGTAGWLTAGILAAEHNADNGKLSPSPKLNITLIESPDVPTIGVGEGTWPSMRSTLKNIGISETEFLIHCDASFKQGSRFFNWTHSANTRNRSGEQYLHPFSLPIGTNELDLCPYWMPHREQVSFADAVGQQNQLSQLFLAPKQITTGEYQFQNNYGYHLNAGKFSQLLQKHCTEKLGVTHIQDHVTSIHKNDNGDISHLATKQSGILKADFFVDCTGVKSLLLGEQLSVPFICQKSVLFNDSALAVQVPYPSPDSEIASCTHSTAQTNGWIWDIGLPTRRGVGHVYSSSHTDQDQAEKQLIDYLRPTVNIDVDNLEFKKLSIAPGHRQVCWKNNCMAIGMAAGFIEPLEASALALVEWSANTLAKQLPANRQVMDIVASRVNQRFSQHWQQIIEFLKLHYVLSKRSDSDYWHDHRESSTIPDSLQQQIELWRTQAPNIHDIQHTDVLFPAASFQFVLYGMEFQTMVPTQLKPSLQHKAQQLFSENIKRTQGLKQILPTNRELLAKIAQYGLPKI

SEQ ID NO: 87830 - protein, 503 aa, Shewanella sp.
  REGION 1..503: note = tr|A0A2N7CXG7|A0A2N7CXG7_9GAMM Tryptophan halogenase; OS = Shewanella sp. 10N.286.51.B7 OX=1880836 GN=BCU84_03485; PE = 4 SV=1
MENNKIKNIVIVGGGTSGWMTAAMLSKLFKNQLSITLIESKDIGTIGVGEATIPPLQIFNSVLGIKEADFIKQTQASYKLGIQFENWGKEQDSYMHAFGDVGKDIGYTQFHHYWKKSQSQASHSQEPSSFWDYSLNYQTAKANKFNLMDRIQGSPLAGITHAYHFDASLYAKMLRQYSENLSVQRIEGLITSAELNSQGNIESVTLKDNQVINGDLFIDCSGFAALLIEKQLNVGYENWQHWLPCDSAYAVPCERSEPLVPYTRSIAHNAGWQWRIPLQHRTGNGLVYSSKHISDEAAKALLLDNLDGKALAEPKKINFKTGRREMQWHKNCIAIGLSSGFLEPLESTSLHLVQSAIIRLTKFFPHNGIQQANVDEYNRQSKLEFEQIRDFIILHYHVNNRANSSNNPDLWQQCRDMQIPDSLEQKIELFRATGTVTRYQDELFTEAAWVQVLLGQGIEPDDYNPLANNITDSDLKEFLANVKQIIATAVNQMPSHDDFIKRL

SEQ ID NO: 87831 - protein, 533 aa, Streptomyces sp.
  REGION 1..533: note = tr|A0A1V0R8N1|A0A1V0R8N1_9ACTN Tryptophan halogenase; OS = Streptomyces sp. Sge12 OX=1972846 GN=B6R96_31210 PE=4; SV = 1
MTSSDTRLQKVVILGGGTAGWMTAAYLGKALQGTVDITVLEAPSIPRIGVGEATVPNLQRSFFDYLGIAEDEWMRECNASFKMAVRFVNWRTDGQGESTARELPGGGPDHFYHPFGLLPDYDQTPLSHYWFKRKYEGRTTEPFDYACFREPPVMDAMKAPRWLDGRPATRYAWHFDAQLVADFLRRFSTEKQGVNHVQDEMVRVEQDGRGYVTTLHTKGGLALDADLFVDCSGFRGLLINQAMAEPFIDMSDHLLCDSAVATAVPHDDEANGVEPYTSAIAMSSGWAWKIPMLGRFGTGYVYSSKFADQDTATREFADMWGLDVEETKFNHIRFRVGRNRRAWVKNVVSIGLSSCFLEPLESTGIYFITAAIYQLAKHFPDKTFNEGLVNSFNHEIEVMFDDTRDFIQAHFFYAPRNDTPFWQANKKLVLPENIQQKISAYKAGLPINSPITDESTYYGNFEAEFRNFWTNGSYYCIFAGLGLEPDAPLPSLAHRPDSVASAEPLFDAVKRQQQNLLETLPSAYDYLRQLHGA

SEQ ID NO: 87832 - protein, 499 aa, Sphingopyxis sp.
  REGION 1..499: note = tr|A0A095AL37|A0A095AL37_9SPHN Tryptophan halogenase; OS = Sphingopyxis sp. LC363 OX=1120705 GN=FG95_03752 PE=4; SV = 1
MSDRKPVQRVVIAGGGTAGWMMAAAIARTMGHTVDLTLVESEAIGTIGVGESTIPPLVNFNRILGIAETEFMRAAQATFKLGILFDNWKHDGDSYFHSFGLSGKDHWSAGFQHFWLNARERGHEQPYADYCLELVAGMQGKFAHLPEERMNYAYHVDATLYGRYLRKLAEADGCKRVEGKIARVELDGTSGDIAALHLDGERRIEGDMFVDCTGFRGLLIEGALHAGFEDWGHWLPNDSAIAVQAKHLGPPMPYTQAIAHDAGWQWRIPLQHRMGAGIVYASGYLSRDAAYERLMSSVGEPLIEPFDIKFRGGVRRKQWFRNCVAVGLAGGFVEPLEATTVHLIQRAVLRFIRLMPNGRVSERDAMEFNDQQRLDIEQIRDFVVLHYKATNRRDSPFWRHVAAMPIPDSLQQKIELFRETGRVFRKNEELFAENSWVQVMMGQGIEPQTYHPIAAKLRDDEVERLFQTLRDNIEQTVATLPEHHSYVARYCGAEEPKAA

SEQ ID NO: 87833 - protein, 513 aa, unidentified
  source 1..513: note = Acidobacteriia bacterium
  REGION 1..513: note = tr|A0A321M1M8|A0A321M1M8_9BACT Tryptophan halogenase; OS = Acidobacteriia bacterium AA117 OX=2169412; GN = DMG65_01995 PE=4 SV=1
MNNGKNSTENFDVIVTGGGPAGSTVASFIAMEGNKVLLLEREKFPRHQIGESLLPATINGICVMLGVSEELAKANFTYKLGGTYRWGRHPEPWSFTFGPSSMIPGSQAFAYQVERMKFDHILLNNARRKGVDVREQHTVTEVLEEGGRVVGVSFNDDQGQKKTAKARYVIDASGNTTTLSRTVGERIYSKFFQNVALFCYFKDGKRLPPPYSGNILSEAFSEGWCWYIPLSSELTSVGAVVAREHADRLKAGPEAAMQHFLNSTVMVKDFLSSATRIIEGPYGQYRIRKDYSYCNTRFWAPGALLIGDAACFVDPVFSSGVHLATYSALLAARSVNSCLRGEIGEERSFNEFEERYRREFSNFYQFLVAFYDMDKDMDSYFWSARKVLNTEERANDAFIRLVSGTSFTGEPLFSNAAEFFQAHVGVGDLFRTAYEEAANPIDDRNFDISKFDIAKFNPKDFIRDFRRGIVGLIRQAQTGTHRREAPVFDGGLISSSNGLSWMEPAEGDAAAGD

SEQ ID NO: 87834 - protein, 511 aa, Rheinheimera sp.
  REGION 1..511: note = tr|A0A437QIS8|A0A437QIS8_9GAMM Tryptophan 7-halogenase OS=Rheinheimera sp. KYPC3 OX=1834037; GN = EOE67_15920 PE=4 SV=1
MQQVQFGAAASDAYSSIKNRPIKKVVIAGGGTAGWMTGAAISKLLGKNLDVVLVESDEIGTVGVGEATIPTLHIFHRLLGINEQEFMAATNATFKLGIMFENWLQQDQKYLHSFGFLGKDCWACGFQHFWSKAQQRGIAREIGDYCVEHLAARQGRFAVLPNQDLNHAYHMDATIYAKYLRKLAEQHGLKRVEGKIAEVQQHADGHISALRLMSGELIEGDLFIDCTGFRALLIEQTLNTGYEDWSHFLPCDSAIAVQTKTTESPVAYTRAIAHPSGWQWKIPLQSRVGNGMVFCSKFMSDDEAKALLLANIEGERLIEPRVIKFRTGTRHQHWNKNCIAIGLSSGFLEPLESTSIHLIQRSIVRLLQMFPSNGIQTAEVDEFNKQTQIEMHNIRDFIILHYKATQRDDSKFWRYCRDMAVPESLTHRMELFAQSGKVYKFAQELFGESSWIQVMMGQGILPAQYHPIVDAMSDGELTDFLGTIAANVQKTVQNFPTHQDFLQYYCKSAIV

SEQ ID NO: 87835 - protein, 544 aa, Luteimonas sp.
  REGION 1..544: note = tr|A0A5C5U1W9|A0A5C5U1W9_9GAMM Tryptophan 7-halogenase OS=Luteimonas sp. YD-1 OX=2599615; GN = FQY79_06505 PE=4 SV=1
MSEGRIRRVVIAGGGTAGWIAACALTHQFPKDVLKVVLVESEQIGTVGVGESTIPTIRTFHDLLGIDEREFMSSVAASFKLSISFENWLRPGHRYFHPFGLTGLNTWACEFHHFWLDSRRRGVQSELGDFCLETVASRADRFVLLGKDGSAGQWSTRWASGGMSPDRLRVNYAYHFDAGLYAAYMRERAERQGLVRIEGRIEQVRQHPETGYIEALVLDDGTVIEGDLFIDCTGGRAVLSEQALKTGYEDWDNWLPSNRAVALQTEADGPAVPYTRAIAHEAGWHWKIALQHRIGCGIVFSNAHMSDDEATARLLKENPAKPLRDPWIIPFRTGRRRKAWNKNVIAIGLSSGFIEPLESTSIHLTLSGVARLIKLFPHDGIDESMVRRYNDVSRSEMEHVRDFIILHYHLNQRDEPMWQQVRHMQLPDELAHRIQMFRDRAHATQGENELFRLDSWTHCLLGQGVEPRSWHPLARTLADDDLKRLFDGIRQPIRQAVAAMPSHQQFLDQYCKAPQSAWELMYERARAHARITGKIAGVGGELRQ

SEQ ID NO: 87836 - protein, 493 aa, Rheinheimera sp.
  REGION 1..493: note = tr|A0A437QG95|A0A437QG95_9GAMM Tryptophan 7-halogenase OS=Rheinheimera sp. KYPC3 OX=1834037; GN = EOE67_16305 PE=4 SV=1
MIKKVVIAGGGTAGWMAAALLKKVLHQQIDVELVESDDIGIIGVGEATIPPIQVFNQYLGLDEAEFLRETKATIKLAIKFENWKTKGESYYHTFGAPGAQLGFCPFQHYWLQAKKAGLTESLWDFDLNFLCAEQGKFNIIKTPNPLYEMPYAYHFDSGLYGRYLRKIAEKAGVVRTEGMIEHIQQDAMSGHIRSLHLKDGRQIDGDLFIDCTGLRALLIRKTLGVAFENWSQYLPANSALAVPSERFAQTLPYTRSIAHKVGWQWRIPLTHRNGNGLVYCSDYLSDDEAHHTLMGNLDSKALAEPRKISFQTGRTMQQWCKNVVSIGLSSGFLEPLESTSIHLIQSGIVRLLKMFPHQQISQTVIDYYNADSKQEFETVRDFIVLHYHVNQRDDSKFWRDMRQMAIPARLTEKIALFQETAAIFNDQNDIFRDASWLQVMLGQGIAPRDYHPAAKAVPDAQLLQTLQKIRGAKQQPLAQMLSHDEFLLRYTKQ

SEQ ID NO: 87837 - protein, 433 aa, Kangiella koreensis
  REGION 1..433: note = tr|C7R9X3|C7R9X3_KANKD Tryptophan halogenase; OS = Kangiella koreensis (strain DSM 16069 / KCTC 12182 / SW-125) OX=523791 GN=Kkor_2584 PE=4 SV=1
MPELNSQYDVIIIGAGPAGSLAASLLTQNNVSVLVVEKQHFPRFSIGESLLPQSMVYLQEANMVDAIKAAAPELGFQYKDGAAFFADNHPCHFDFGEKFTPGPGSTFQVKRAPFDQLLAQVAEQQGATFCFGQQVTQVRLQDPCIVTLQDEDGTSRDIQTRFILDASGFAKVLPRLLDLTLPSTFPVRSSVFCHVQDNIDSKTYDRNKILIETHPQCKDVWYWLIPFADGTASVGCVAKPDFFEKLESEQLETVSSSHEHSSHEHSVHEQWFDEAVNQSVRIKQLLATSTKANSVQYITAYSSNVKQLFGERYALLGNAGEFLDPIFSSGVTIAFKSAKLATDVLLKQLNDEDVCWQSEFADPLQQGVQTFKAFVESWYQGQLQDIIHFDDAPENIREMVCSILAGYAWDTNNPFVKHAKRRLNTLGQLCATS

SEQ ID NO: 87838 - protein, 519 aa, unidentified
  source 1..519: note = Alteromonadaceae bacterium
  REGION 1..519: note = tr|A0A1Y6BSR6|A0A1Y6BSR6_9ALTE Tryptophan halogenase; OS = Alteromonadaceae bacterium Bs31 OX=1304903; GN = SAMN02745866_01666 PE=4 SV=1
MGNAVKNIIILGGGSAGWLTAGLIASEHGIDRARGMNITLVESPDIPIIGVGEGTWPTMRRTLKKIGVSESDLFKECEASFKQGAKFEKWVNGTADDFYYHPLVEPLGYSDTELFYQWKNGEYNTSFGDAFCFQGHICEHGRAPKLITTPEYSGIANYAYHLNAYKLGEFLKKHCINKLGVNHVIDNVLKACSHDNGDIAALETENKGLLKADLFIDCSGLSSILLGKHYGIPFISKRHILFNDSALAAQVPYREPDDAITSHTISTAQKNGWIWDIGLPSRRGVGHTYSSAHTSDEQAEIELRQYICHSLGEQRSAELSLRKISFEPGHREVFWHRNCVAVGMASGFLEPLEASALVLVEMAANRISEEMPANRTVMDIVSKRYNQRFLYNWDAIVDFLKLHYVLSKRTDSQYWLDNVSKESIPERLRELMLLWRYQPPNRHDFPYAEEVFPSASWQYVLYGMGFNSSQRPTRKAMNRSALSDKYFRETQEFAARCVSKLPSNRELIDKIVQFGMQPV

SEQ ID NO: 87839 - protein, 525 aa, unidentified
  source 1..525: note = Altererythrobacter aquimixticola
  REGION 1..525: note = tr|A0A4V4U994|A0A4V4U994_9SPHN Tryptophan 7-halogenase OS=Altererythrobacter aquimixticola; OX = 2489173 GN=E5222_01020 PE=4 SV=1
MTQFDPGEHLPQPPSDQSLRRVLVVGGGSSGWMAATMLATTLSKDISVELVESEAIGIVGVGEATIPPMQKFNHFVKLDEAAFMAATQGTFKLGIEFHNWGRKGDRYLHQFGAVGREIDALVKLHHWWLLGRLAAAQDGRPYPQFQELYVAQAAARENRFAPAGRPKDQLPNRYTHAYHFDAHLYARHLRSVAEERGAVRHEGRITDVERDGESGFVSAVVLEDGRRLEADLFIDCSGFRSLLLGGALEEEWDDWSRYIPSDRALAVPSKRPDGDIRPYTQGIAHSVGWQWRIPLQHRTGNGHVFASAFSSESEAEERLLATIEGEALDTPRLIKFRTGRRKRAWVKNVVGLGLSSGFLEPLESTSIHFVQSALERLVDYFPTRAMDPALAEAFNRRTEQEWLDVRDFIVAHYHLSEREDSEFWRYTRNMAIPDSLAHVLDVWRARGILDISGGHLFQLGSWSSMLIGQRCLPGGVHALADRADPAYAAQAVRRIADECRTAASRLPKHADFIAGYCAAQPMEMA

SEQ ID NO: 87840 - protein, 500 aa, Sphingopyxis sp.
  REGION 1..500: note = tr|A0A095B3T6|A0A095B3T6_9SPHN Tryptophan halogenase; OS = Sphingopyxis sp. LC81 OX=1502850 GN=FG91_00026 PE=4 SV=1
MNEDKRVQRIVIAGGGTAGWMAAAAIARTLGQAVDLTLVESEAIGTIGVGESTIPPLVNFNRILRINEADFMRATQATFKLGILFDDWKDLGTQYFHSFGLTGKDHWSAGFQHFWLYGRTKGHQQPYDDYCMELKAAIAGKFAHLPEDRMNYAYQLDSGLYARFLREMAEADGTKRIEGKIARVELGGTSGDIAALVLDGDRRIEGDLFIDCTGFRALLMEGALHAGFDDWSNWLPCDSAIALQTPNVHPPVPYTRVMAHDAGWQWRIPLQHRTGNGIVYCSRYLDKDAALDRMLGNIEGDVLTEPNFLRFTAGTRRKQWYRNCVAMGLSAGFMEPLESTAIHLIQRSVLRFIRMLPAGRVSERDVAEFNEQQMQDMLQIRDFLVLHYKVTNRRDSPFWRHCAAMPIPDTLAQKIELFRETGRVFRKNEELFAENSWVQVMMGQGIEPQSHHPIAEKLRDDELDRLLEAIRSEVRQTVASLPAHQDYVARYCGAAVPQAA

SEQ ID NO: 87841 - protein, 501 aa, unidentified
  source 1..501: note = Novosphingobium fuchskuhlense
  REGION 1..501: note = tr|A0A117UVD1|A0A117UVD1_9SPHN Tryptophan halogenase; OS = Novosphingobium fuchskuhlense OX=1117702 GN=AQZ52_12300; PE = 4 SV=1
MRIVVAGGGTAGWMAAAAFGHFLDAGFTVTLVESEEIGTVGVGEATIPQIRMFNQALGIDEDAFIRATQATFKLAIEFVGWGAPGERYMHAFGDVGRDVGLCAFHHIWSRGHRLGLAGPLGNYAINDIAAHAGRMHRGSPLTSRNVPEMPHAFHFDAGLYAAFLREFAEGRGVIRREGKIADVRKEPLSGDITALVLASGEEIAGDLFIDCTGFRGLLIGGAMGSGYVDWTNWLPCDRALAVPSGRVEDFTPYTRATAHTAGWQWRIPLQHRTGNGRVYCSAFTSDEEAAESLLAHLDAPALADPRPIRFTTGRRVEAWRGNVIAVGLSSGFLEPLESTSIHLIQSAISRILKFMPGKEQTQAERDAYNHQFTFEMERIRDFIVLHYHVNQRPEPFWQAMREMALPDSLAERIELFRANGHIFRHGDELFSEVGWFQVMAGQGIVPKRSHALAETIDEADLKSYLETLNGLYRREVERYPSHAEFIVQHCAAPPINLGVAA

SEQ ID NO: 87842 - protein, 561 aa, Alteromonas sp.
  REGION 1..561: note = tr|A0A010QAL0|A0A010QAL0_9ALTE Tryptophan halogenase; OS = Alteromonas sp. ALT199 OX=1298865 GN=H978DRAFT_3483; PE = 4 SV=1
MSNSQNQYGLHRVVIVGGGTAGWLSAGVLAAKLSAKHSVTLVESPTVSSIGVGEGSWPSLRDTLQDIGINESEFLTLCQGAFKQGSSFVNWRKGGHRYHHPFTIPTGYNELDLHACWQAFAPDVKYEDAFSLQAAMCAADKAPKQIATPDYAHVLNYGYHFDATKLAELLKKHCVDKLSVDHVIGHIATVISHPNGYIEKVVTECGQEVFGDLFIDCSGNNGLLIDKHFNVPWVPVKHAMLNDRAIAVQVPYADNDNEIKSTTMATAQTCGWTWDIALQHRRGTGLVYSSQFTNAEQAKQVLIDYVCERYPGAKEHELSFRTLSFEPGYRSQFWVKNCLSLGMSSGFVEPLEASAIAMVELGLRMLCEAFPQNKAHMEIVSKRYNTRFEYRWQRVIDFLKLHYVLSDREEPYWVAQRSDASIPDSLAELLKLWKFQSPSRLDLIENEEIFPSASYQYVLYGMGFTTLAPPLCMNEKEKRKSLHIRETLQQTKNTYFQGLPTNNALLKDIAKRYNDEQKHLHAHFQRQDYGHTLASSDSATDINNNTSLNKKDTSYDRIGFR

SEQ ID NO: 87843 - protein, 501 aa, unidentified
  source 1..501: note = Alteromonadaceae bacterium
  REGION 1..501: note = tr|A0A1Y6BRZ9|A0A1Y6BRZ9_9ALTE Tryptophan halogenase; OS = Alteromonadaceae bacterium Bs31 OX=1304903; GN = SAMN02745866_01665 PE=4 SV=1
MSDYKLNVVVAGGGTSGWMAAAAISKLLSDKVNVTLIESDEIGRIGVGEATIPPLREFNRLLGIDEQDFMSSINATFKLGIEFNNWGRKDDSYIHSFGVTGRDCWACDFHNFWLKGKNEGIVEDFGQYCVELQAARHKRILGSDQHGVNYAYHLDAGLYAQYLKELALKNNTRRLEGKIVSVNLCEKSCNIKSLSLDDGMLVEGDLFLDCTGFKALLIEGALNVQYEPYGQYLPCDSAIAIQSEISGEPRPYTQAIAHDAGWQWRIPLQTRVGNGLVYCSRHLSDENAEQLLLKNLESRPITESRMFRYKTGRRIEAWKNNCIAIGLASGFLEPVESTSIHIAMSSILRLLRLFPVDKTFSNTLVAEFNQQTKTEMEQIRDFIIMHYNVTERDDSEFWRYCKNMSIPETLKHRLELFQQTAAFPIMEKELFKIDSWIQVMMGQRLVPESYHPIVDLLSKKELEGFFYSILTKVRSSVENMPGHQDFINQYCKSKEAEGLPK

SEQ ID NO: 87844 - protein, 587 aa, Microcystis aeruginosa
  REGION 1..587: note = tr|A0A552BNS7|A0A552BNS7_MICAE Tryptophan halogenase; OS = Microcystis aeruginosa Ma_OC_LR_19540900_S633; OX = 2486261 GN=EWV62_06630 PE=4 SV=1
MMKTTNSVRQFVYDVVIMGAGFAGVCQARHLMLKVPNIKIALIDPRPENRSDKDLKIGESTVEIANLFICKELGLYEYMIENHPPKFGLNFHWPKDSHKTDTIEDYYHIWTNRQPPLASSQMNRAKFERDLLRMNKEMGVDFYNGRVVDVTIHPGNDPHQVKVKLHDEVIELTAKHLVDAAGRQFIIGKKTDNVIFDPEHLCGVNTGSAWVRVKNIDRTLFHSGYDPEATSCSHYYATNHWFGQGHWLWMIPTDTDTQEISIGVIHHHEIIPADYLNQEQKFYAFLKANHKLLYDLLSSGEKIDFHYWPRIAHTSKEVLSADNWYVIGDAAYIFDAFYSMGTSLTTFAIESVTEVIRSKLAGEADAEVKRVAYNQFNLAQAEGVNQLMRDHKTQLGHASIMSWRIYFEYIWWFGILVPLYVGKWHLNVSFIEGFVKIHRQTVNSLFVEIYEQLNQLVERKANLGLLDCYRGDQLLGDYQPLVHFDSFLENVQYEPFRSNIFTSIKYTHFYGAIWYLVFQWRGFGLGGVIAPKHLYHFLRLLLLSGVASFGEFYHRLKMKKIPHNHQIACTTEEFKHYQYQSSLNPWF

SEQ ID NO: 87845 - protein, 473 aa, unidentified
  source 1..473: note = Acaryochloris marina
  REGION 1..473: note = tr|B0C5X8|B0C5X8_ACAM1 Tryptophan halogenase, putative OS=Acaryochloris marina (strain MBIC 11017); OX = 329726 GN=AM1_5024 PE=4 SV=1
MGTKDQTTFDVCVIGGGPAGSVVSHRLASLGYKVCIIESQKFPRPNHIGASLLPSTLPLLDCIGVRESVENTGFLLHERTIVWWSETFPIYKNQHEQPGFHVDRGQFDQLLLQNAKENGVEVHQPAHAFRPERIKTQKWQIRIRQDGMQRTILSKIVVDASGGRSLVPGRRILASAPLLALYAYWKGTNFQTIEARIEAGESEWFWYAPLSQNKAVTAVFLDPSCLSLNSKQGIENIYHKLLNRFRLFPAKFIKGIEGKVKICDASTRYAENPIGDSFIRIGDACLCLDPLSSQGIQSAVASGLQAAIIINTFLKYPEDTELAISFYNARQKEKRNEYITKTASFYQQVAAVRNKLFWHQRATFPEGQLAPILKTKSFDGNCKIQLSDHAYMNSTPIIEGNRIISKHALYHDMLSRPIAFVGGVEIVPLLRKVSPGTTIQDILQVWSKNLPVELSYNIMAWLWIRKIIVPFHL

SEQ ID NO: 87846 - protein, 561 aa, Phaeobacter inhibens
  REGION 1..561: note = tr|I7DTD4|I7DTD4_PHAIB Putative tryptophan halogenase OS=Phaeobacter inhibens (strain ATCC 700781 / DSM 17395 / CIP 105210 / JCM 21319 / NBRC 16654 / NCIMB 13546 / B S107) OX=391619 GN=PGA1_c26580 PE=4 SV=1
MNNRLRKITIVGGGTAGWMTALILETELSRTSAPKDRPKICLIESPNIATVGVGEATVPRMPKTLRQAGISERAFFRETNASFKLGVKFCNWNKDAKGNRIDYVNPFAHGQLLDGLEPAEYFLRFGNGDRDYTQSIAPHDDLGRLCKGARPLGQPEFEQRFGYAYHLDAVKFAGMLTKVCTKHGVEHIQDEVTSVELDEQGNVSHLMLEQRGRHDIEMVIDCTGFRGLIINQALGEPFMDYSDYLPNDRAMALQIDHPDPEKIESLTRSTALGAGWTWRVPLYNRVGTGYVFSSAHRTDDQAADEYLEWLGDSGKGATPRIIPMRIGRVRNAWVKNCVAIGLAGGFIEPLESTAIHMIDHAVRWLTEHMPTRDIAPSLRTRYNRQMDKLYDEVLEFICLHYRLGNRTDDQYWIDARTEMKIPDRLAENLELWQHRLPMSHDIEFATLFDYRVYQTVLLGKQVYDTGYGPGIRDRLRPLKKPIWFQWWKGAKADLAQILKAMPDHKTLLRDIRGELDQPGFGMAAAMKPTVPMPGAAPVPWAIQNMPSFSEIESGQKDLQLF

SEQ ID NO: 87847 - protein, 504 aa, Alteromonas sp.
  REGION 1..504: note = tr|A0A010PBW3|A0A010PBW3_9ALTE 2-polyprenyl-6-methoxyphenol hydroxylase-like oxidoreductase OS=Alteromonas sp. ALT199 OX=1298865; GN = H978DRAFT_0131 PE=4 SV=1
MTAKLKIFILGGGTAGWMTANLLAKAWEKQGVSITLMEAPDVPTVGVGEGSTPYIRRFFERMNISESEWMPKCHATYKTGIRFTDWSTTPGFQHYFHPFTTELDNVTFNLFKHHVSLRRQGLNIHVHPDDYFLMTRLANNFQLPSSNDFVKQQTFYAYHFDAKLLGDYLKNKALEQGVSHVEGKVLGVEKHPNGDIAAVHDQSLQRFDADIFIDCSGFKSLLMQKALKVPFISYGDTLLNDAAVAIPTAAEKPYCPQTLSAAMPCGWRWKIPLTQRTGNGYVYSSSHLSAEDAEKQLRHSLGADSETNAAHHLKMKVGRNTKHWYRNCLAVGLSQGFIEPLEATGLQMTLVTIEQFITHFEKGKYTNEYQDNVNNGINAAFDHIRDYVSLHYLANSRNDTRYWQDCRNDIAISDSLKRVLEVWSQGGDLEQELNQQNISQYYPSLSWFAILTGMGIYPKTCTVDKKEIERFHQARANMASFFNNYITPSGKGNSAQQHGVVRYA

SEQ ID NO: 87848 - protein, 527 aa, unidentified
  source 1..527: note = Rhodopirellula islandica
  REGION 1..527: note = tr|A0A0J1EPZ5|A0A0J1EPZ5_RHOIS Tryptophan halogenase; OS = Rhodopirellula islandica OX=595434 GN=RISK_000637 PE=4; SV = 1
METDDTTVLHHDQQLGDSPSANAPHIVVVGGGTAGWMSAATLKRRLGCRVTVVESARVPPIGVGEATIPAIVDWIENMGIDEDDFIRRTGATYKLAIRFDNWVEPQHRYWHPFGICGSPIDGVDLIHTWQRGVRQGWIPVESKYTDYSFQRELCERGRGPRAPGQPSLAHNYAFHLDAGKLAAFLQEIAINEGVQHVVADVCGAAHDEQGNIQSLSLDGQTAVAGDLFIDCSGFASVLIEREMRSEWTDWSGQLICDRAITMRRPRNELGDDEESSAELPPFTISTGMNSGWSWQIPLHENTGCGYVFSSAHISDEDARSELIDLVGGDGETMETRVVPMRVGMRPMSWVGNCVSIGLSAGFVEPLESTGIFLVQRALDELVECLPTTILPGVFDKRSCDTQSFNTRMTEVYAQVRDFVLMHYVVSQRRDTAFWKEAATVALPDSLARLLEEYTRTGRVLMPQRDPTFLDVNHHYILSPAGVQPGCLPGARDSQPGTAQFLEHIRSTHTEIAMRLPSHASLIDTIHP

SEQ ID NO: 87849 - protein, 500 aa, unidentified
  source 1..500: note = Streptomyces qaidamensis
  REGION 1..500: note = tr|A0A143CDU1|A0A143CDU1_9ACTN Tryptophan halogenase; OS = Streptomyces qaidamensis OX=1783515 GN=A4E84_32635 PE=4; SV = 1
MTAAYLRAAFGERISVTVVESKRIKTIGVGEATFSTVRHFFSYLGLPENVWMPRCNATYKLGIRFENWRRKGHYFYHPFERLRKVDGFPITDWWLDRRTGDRFDQDVFLMAAICDAERSPRHLDGTLFEQEFKERGDSEAERSTLAEQDTQFPYAYQFDASLLAEFLTEYATERGARHIEDDVVEVAQDERGFISAVRTREHGDVEGDLFVDCTGFRGLLINQTLDVPFQSFQDMLPNDSAVALRVPVDMEQRGLRPCTTATAQDAGWIWTIPLFGRVGTGYVYASDYTTPEEAERTLREFAGPGAEGLEANHIKMRVGRSRSSWVKNCVAIGLSSGFVEPLESTGIFFIQQGIEELVKHFPDESWDPGVQASYNRTVADAIDGVREFLVLHYRCAARADNDYWRDAKKRVLPDGLAERLEIWKSRTPTAENIYPHYHGFEAYSYHAMLLGLGGLELRPPAALRLMDGAGAEREFQMLRDQSKELVSRLPSQYEYLAQMH

SEQ ID NO: 87850 - protein, 520 aa, unidentified
  source 1..520: note = Novosphingobium fuchskuhlense
  REGION 1..520: note = tr|A0A117UXC3|A0A117UXC3_9SPHN Tryptophan halogenase; OS = Novosphingobium fuchskuhlense OX=1117702 GN=AQZ52_04875; PE = 4 SV=1
MAHAGKRQGAAEGNALVNEGDRRIRSVLVVGGGSAGWMSAAMLATMLKRDCRITLVESDEIGIVGVGEATIPPIRLFNETLGISEADFIRETRGTFKLGIEFVDWGSVGSRYFHPFGPHGRNFDMVPLHQYWLKTREEPGAFPLDELSMAWQIARAGRMARPVPDQRSLLSTFDYAYHFDASLYAAFLRRHAEARGVTRVEGKIGDVTLNGETGIVESVTLEDGRTLEADLFIDCSGLRALLIEGALKTGFEDWSHWLPCDRAVAMPCANAGPPTPYTRSTAREAGWQWRIPLQHRIGNGYVYSSPFLEDDKAAELLTSRLDGEALGDPRFVRFRTGRRKLHWNRNVVAVGLSSGFLEPLESTSIHLIQANISKLIGLFPDRDFDPATIDEFNRIAHAETDRIRDFLILHYKLTQRQDHELWRYVSSMDVPDTLALKLEHFRRHGRLIAREMDLFAPASWLAVHIGQHNYPEGLDPLIAHRGIDARDYLAKLRAGMAAEAAKLPSHEAYIAGLIGAPAAA

SEQ ID NO: 87851 - protein, 510 aa, Alteromonas sp.
  REGION 1..510: note = tr|A0A010PKB6|A0A010PKB6_9ALTE 2-polyprenyl-6-methoxyphenol hydroxylase-like oxidoreductase OS=Alteromonas sp. ALT199 OX=1298865; GN = H978DRAFT_3224 PE=4 SV=1
MNHSSNTSQKQRIVIVGGGTAGWLTAAIVAAKHKVAMGECGLDITLVESSDIPTVGVGEGTWPTMRNTLKDIGLSEKEVFRRCSAAFKQGGKFVSWVKGNGDSYYHPFTVPLGYGRVEMAPYVGDVANFANATNFQQHVCERNMAPRTLSEQEYSSAQSNYAYHLDAGAFADMLRDFCKTELGVKHIVATVQSVAATSSEHIENVTLNNGMVLDADLFVDCSGFRSLLLGETLGESVISTDDVLFNNSALALHVPHEEDFEIKPYTQATAQEAGWIWDIGLSSRRGVGHVYSTDFTTDERAEEVLRQYVGDEHGDLKARTIRFNSGYKKRIWKGNCIGVGLSAGFVEPLEATALMLIEISARYIAEQMPLPASAMPIVSQRFNKQMNYRWQRIIDFLKLHYIFNQRSEPYWVANRDASSIPDSLKEDLEIWKYRGPQIADFSAAIELFPAASYQYVLYGMGFSPDFSLQSHFYNERDLADKVIQQNQLITQQKLSSLPNHRDYIEQWLAS

SEQ ID NO: 87852 - protein, 497 aa, Alteromonas sp.
  REGION 1..497: note = tr|A0A010Q4W8|A0A010Q4W8_9ALTE Tryptophan halogenase; OS = Alteromonas sp. ALT199 OX=1298865 GN=H978DRAFT_1386; PE = 4 SV=1
MINQTVKNVVIVGGGTAGWISAAVIKRLIGEGVNVTLVESEEIGTVGVGEATIPPIITLNNVMGIDEKEFLRETNATMKLAIKFENWRVQGESYFHTFGAAGKSYAFCHFHHYFKRAQELGLSDSIWEYDLNYLACKAGKFAHIKSPDPIIEMPYAYHFDASLYARFLRKKCEAMGVTRREGIIVDVKQDSNTGFITGVTLKDGAHIEGDLFIDCSGFKGLLTQQTLNTGYEDWSHWLPCDRAVAMPSERHEHTHPYTRSIAYAAGWQWRIPLQHRNGNGLVYSSNYYTDDQALDILSSNLDTRPLADPNFIRFRTGRRRKQWNKNVVAVGLSSGFLEPLESTSIHLIQSAVVRLIHLFPHDGFKQHQIDEYNKQSQLEYEQIRDFIILHYHVNERTDSHFWKDLREMDVPDSLTHKIELFRESGNLFREQNDLFLESSWLQVLMGQGVIQKDYHPLANALSEQKLQELMQNIKRIKNEPIDKIASHDDFLKQFCGS

SEQ ID NO: 87853 - protein, 510 aa, Streptomyces griseoflavus
  REGION 1..510: note = tr|A0A0L8MMY8|A0A0L8MMY8_9ACTN Tryptophan halogenase; OS = Streptomyces griseoflavus OX=35619 GN=ADK76_35110 PE=4; SV = 1
MGERAVANSANAGNPANPETYDVVIVGGGPAGSTLGALVARQGHRILILEKEFFPRYQIGESLLPSTVHGVCRLTGVADDLAAAGFTRKRGGTFRWGATPEPWTFSFSVSAHMAGPTSYAYQVERSKFDEILLRHAGRCGAEVREGCAAADVIADEERVRGVRYTDADGAEREAYGTFVVDASGNKSRLFQRVGGQRTYSEFFRSLALFGYFEGGKRLPEPNSGNILSVAFDSGWFWYIPLSPTLTSVGAVVRREMAEKIQGDQEEALRALIAECPLISEYLANARRVTTGQYGQLRVRKDYSYHQTTFSRPGMMLVGDAACFVDPVFSSGVHLATYSGLLAARSINSVLAGLVDEAVALREFEARYRREYSVFYEFLLSFYEMHHSEQSYFWRAKKVTHHRRSEMEAFVDLVGGVSSGEAALIDADAMAERLRADSAEFAGAVDQLAHSEDGSMLPLFKSSVVSQVTREGSQVQMRALLGADAEPETPLLPGGLVSSPDGMFWLPASSG

SEQ ID NO: 87854 - protein, 512 aa, Stenotrophomonas sp.
  REGION 1..512: note = tr|A0A4V2FGL2|A0A4V2FGL2_9GAMM Tryptophan halogenase; OS = Stenotrophomonas sp. BK441 OX=2512175 GN=EV592_0141; PE = 4 SV=1
MTEGNRVDNRRIRKVVIAGGGTAGWLAGCALSHQFGRELDITLVESEQIGTVGVGESTVPPIRAFHHFLNIDEQEFLRAVAGTFKLSISFENWRRPGERYIHPFGMTGQNTLVCHFHHYWLDSLRRGMESSLGDYCLETVASRGDRFALGTQPQVNYAYHFDAGLYARFLRARAEKQGLVRVEGKIQQVHQDPHSGDVVALTLEDGQRLDGDLFIDCTGFRGLLTEQTLHTGYEDWNQWLPSDRAVAVQTESVGPPVPYTRAIAHEAGWRWHIALQHRVGCGLVFSSKHMSDDEARAKLLRDVGAPAIKEPWLVPFRSGRRLKAWNRNVVALGLASGFIEPLESTSIHLTISAIVRLLQLFPSSGDEDALRTLYNETSQKEMEHVRDFIILHYHATQRDEPMWKAAREMELPESLAIRLRAWRERAHAWQGTDELFRVDSWTHVLLGQGTQPGAPHPLARALSDADLSRLLAAVRQPIERTVAQMPSQQGFIDRYCKAPPEVWGARKPVAFA

SEQ ID NO: 87855 - protein, 737 aa, unidentified
  source 1..737: note = Mucilaginibacter ginsenosidivorans
  REGION 1..737: note = tr|A0A5B8UT13|A0A5B8UT13_9SPHI Tryptophan 7-halogenase OS=Mucilaginibacter ginsenosidivorans; OX = 398053 GN=FRZ54_05295 PE=4 SV=1
MSKTASPMKIILTARQTGSVLYNFLLVQLNYIEWVSCTGLDYQAVKNGSEADFYINILEGNTLGEIIDICAFFRNKKKKSITVSSWNNSLVTGPTHFPGKSAGADSAILILQQEYGHPADKLELKSQITSTVSANDVRDNPDIFYTAFAGLLNELKILYNDKPAQRLNFVDGVRLFRLHQKDQATYESKYIYPIFDNGADGVPHESLADYKVLVGKFLHSVSQIKNGFFNAPPPEGPEDEYKNVAIIGGGTAGYLTALLFKEKYPKMQVTLIESSKIPVIGVGEATTPEIRSFLFGVLKFSAHEFYEKVKPTWKLGIKFFWGLPGDYYFNYPFGWPDVKSSYVADGDINNSSLTATLMDQESSFVVAANDGRGLQQYSTLSDDLFYALHLDNVSFINYLKIKAQEKGIIHIDDLIVDAERKVDSDELAAVIGETGRRHVYDFYVDCTGFSSLLLGKTLKSEYVSYDKSLFCDTAIVGNIPGVKKIKTYTYAESMDHGWCWNIPMRGEDHRGYVFSSGYCSIGEATDEFLRKNPEIRNPGIVRFKTGRHREICIGNVFAIGNSFAFVEPLESTGIHMIITEAKRLVNNFSELKRSPALRKKINTDINDNWDYLRDFLAIHYKFNKKFDTPFWKDCRALTDVSGIQDMIDLYHEVGLLSCANKSLVRMINSSIKDVIFGLVGFDVMMMGQGEIPKNFDRSVRNQHIWKSNVETWKAIRSLTVPVDKDLDILNEYLESRW

SEQ ID NO: 87856 - protein, 494 aa, unidentified
  source 1..494: note = Alteromonadaceae bacterium
  REGION 1..494: note = tr|A0A1Y6BX99|A0A1Y6BX99_9ALTE Tryptophan halogenase; OS = Alteromonadaceae bacterium Bs31 OX=1304903; GN = SAMN02745866_02130 PE=4 SV=1
MKNDKKLHVVIAGGGTAGWMTAASLSRMMNHHVRVTLVESDDIGTIGVGEATIPTMQTFHHLLQIDEQEYLKETQGTFKLGIQFENWGKPGDKYIHSFGETGKDSWAGEFQHFWRRGLDEGVDAPFGDYSPELQAALAGKFAITNKPRLGFAYHIDATLYAKYLRKLSEEKGATRLEGKICNVNIDPGNGHIQSLALESGELVEGDLFIDCTGFNGLLIEKALHTGYQDWTNLFLCDRAVAVQTQAVADPIPYTRAIAHKYGWQWRIPLQHRVGNGLVYSSKYMSEDEARELLLDNIEGERINEPRVIKFKPGRRLKVWNKNCVAIGLASGFIEPLESTSIHLISSSIIRLMRMLPLTGIKEVDVDEFNRQAIEELESVRDFVALHYKVTQRDDSEFWQYCKNMKVPESLRSRVAMYSDSARLYWGADELFTVNSWNQVMLGQGIMPETYHPIADIMSSEDLKEYLEKYRSSLQDFITKLPSHKDFIAQYCSAS

SEQ ID NO: 87857 - protein, 507 aa, Porphyrobacter sp.
  REGION 1..507: note = tr|A0A2L0GMV4|A0A2L0GMV4_9SPHN Tryptophan halogenase; OS = Porphyrobacter sp. HT-58-2 OX=2023229 GN=CHX26_14690; PE = 4 SV=1
MDRPEVRKLVIVGGGTAGWITAAAFARLLGERLSIELVESEAIGTVGVGEATIPQIIRLNAILGLDEHAFLRATSGTFKLGIEFVDWGSKGSRYLHTFGDTGMNLGNVAFHHYWRRSAGEAPDPKGLWHWSLHQLAADQARFGKLERVGNTAMTGLAYAYHFDASRYALFLRAYAEGRGVKRSEGIVESVQRDGESGDITAITLKDGKQVSGDFFIDCTGFRALLLGETLGVGYQDWSKWLPCDRALAVPSERLPTIVPYTRATAKDAGWQWRIPLQHRTGNGHVYSSGFKSDDDAADTLLAGLDTKPLGDPRPIRFTTGRRAAFWAHNCAAIGLSSGFLEPLESTSIHLIQSHVSRLIQLFPRTGDAAAERAEYNRRCAAEFAQIRDFLILHYHQTTREDSEFWRYCKHMEVPDSLTHKRELFAASGRVGRDVDDLFRDASWVQVMLGQGITPASYDPMADQIAPAQLAEFLANLRTLIARAVASLPNHEEYLRQHCPVDPALLAA

SEQ ID NO: 87858 - protein, 496 aa, Rhodanobacter sp.
  REGION 1..496: note = tr|A0A1E4Q316|A0A1E4Q316_9GAMM Tryptophan halogenase; OS = Rhodanobacter sp. SCN 68-63 OX=1660134 GN=ABT19_08315; PE = 4 SV=1
MTALLLAHSGYGRLLQVTVLESPQVGIIGVGEGSTPWLRGFFEELGIEEAEWMPACHATYKSGIRFDGWSTRPGHESYFHAFASMLDNLTMTQFVDHVHRRLDGEDVPAHPDRYFLAARLAHECKAPRPRHEFPFDVWYGYHFDSVLLGAFLQRKAIERGIRHLPRHVTSVDRNEHGDIAALQLEGGEALAADFFVDCTGFAGLLIDKTLKTPYVSYADALFNDAAVALPTPLHGPIMSQTISTAFDHGWAWTIPLTQRYGNGYVYSTAFCTPEQAETELRTRLGLLDADVPAPHLRMRTGRVERHWHGNCLAVGLAQGFIEPLEATALMLVQRTASLFVDALEKGDLGAAAQATFNAAVNAQFDGTRDYIVAHYKTNTRTDTDYWRANAANTQLSEPLTRLLKTWLARRPIVGGIQQGAFGQGYPVMSWYSLLAGMGLFPEQASVPTSGSQTPPHSVAAIENLIERSALNFPDHRSLLQNIPPARREESLQVYFW

SEQ ID NO: 87859 - protein, 510 aa, unidentified
  source 1..510: note = Lysobacter aestuarii
  REGION 1..510: note = tr|A0A508AMK6|A0A508AMK6_9GAMM Tryptophan 7-halogenase OS=Lysobacter aestuarii OX=1706195; GN = FKV25_04080 PE=4 SV=1
MKHVAVVGGGSAGWMTALLLANSAYGERLRVTVIESPQVGTIGVGEGSTPWLRGFFDGLGIEEAEWMPACNATYKAGISFEGWSTRPGFERYFHPFASMLDNLTMTQFVQNVHARLQGADVDAHPDRFFIAARLARDALAPRPSRNFPFDVWYGYHFDSSLLGAFLHRKALERGVRHVPRHVRAVNRAANGDIATLELDGDETLAADFFVDCSGFASLLIGKALETPFVPFSDNLFNDAAVALPSPASGPIMTQTVSTALSHGWAWKIPLTERHGNGYVYSTAHCTADQAETELRAHLGLLDADVPARHLKMRVGRAAASWRHNCVANGLAQGFIEPLEATALQFVQRTASLLVEALESGDIGDAARSRFNDTLNAQIEGTRDYIVAHYKTNNRTDTEYWRDNAANAHLSESLVQLLRTWMARKPIIGGLRQGQFGNAYPVVSWYCLLAGMGIFPDAASLQAPTPLQAQHNLAAIENLIERSALNFPDHRGLLADIPPRPKEDALQLYLW

SEQ ID NO: 87860 - protein, 503 aa, unidentified
  source 1..503: note = Gammaproteobacteria bacterium
  REGION 1..503: note = tr|A0A4Q5VG50|A0A4Q5VG50_9GAMM Tryptophan 7-halogenase OS=Gammaproteobacteria bacterium OX=1913989; GN = EOO52_04940 PE=4 SV=1
MSTTLKKVVILGGGTAGWMTAAAMIKLLGPQYCEVVLVESDEIGTVGVGEATVPPMSIFNKTLDIDENDFLKNTQGTFKLGIEFVNWGKIGDRYIHAFGDVGKDMNSLHFYQYWLKMHLAGKAHYLEEYGLNAKASYQNKFMRSENRGNSPLSNIAYAFHFDAGLYAKYLRNYAEQRGVIRIEGKVQQVNLRPEDGFIKSLLLNDGQIIEGDLFIDCSGFRALLISDALKVGYEDWSHWLPCDRAWAVQCEAAADPVPYTRSTAHAAGWQWRIPLQHRVGNGHVFASQYMSEEKAREILIENLESPPITEPRLVKFKAGKRKEIWHKNCVAVGLASGFLEPLESTSIYLVQSAIARLLALFPSTEFKQEDIEEFNRQSDFEYEKIRDFIILHYYANERDDSEFWRYCRNMSVPEALTRRINLFKSSGRVFRQTVEMFCELSWVEVLLGQGVTPRAYDPLVDRMSEDEIAQRLESVRQVIQRSVDYMPSHAEFIAHNCKAEKMM

SEQ ID NO: 87861 - protein, 508 aa, Caulobacter sp.
  REGION 1..508: note = tr|A0A318AT29|A0A318AT29_9CAUL Tryptophan halogenase; OS = Caulobacter sp. D5 OX=357400 GN=DMC18_20620 PE=4 SV=1
MANNLRKIVIVGGGSAGWITAAMLSHYLKDSSCEIELIESEQIGIIGVGESTIPPFLQLIRGLGIDEVEFMQETQAAFKLAIRFENWRQKGEVYYHPFGLIGGPVDVHEFYQVWLRGKAEGHPAALQDFAPASVMADRWKFMSPAMAPRTMIANANYAVHIDAALLAKFLRKFAEARGVKRTEGIVSDVATRPDGFIEKVILQDGREASGDLFIDCSGFRSLLNGKTLGTEFLDWSDVLLCDRAIAVQTANLRDPHPYTLAQAQDSGWRWRIPLQHRAGNGYVYCSQFCSDDEARATLMSQVEGEAVREPWLVPFKTGMRKQLFNKNCVAIGLAGGFIEPLESTALHLIYRGVDYLLRFFPDRDCDATLAAEYNRRMRADYEEIRDFIVLHYFTTKRDDTPFWRAYQQVTPPESLRERIALFKAGGVLRDGVDDMFRAPSWQSVMEGMGIRPQRYQQLVDTLPAGVVKGLLDKSAPMLSDLVDTLPSHGDFLRQYCPAPVPEALRKAG

SEQ ID NO: 87862 - protein, 502 aa, unidentified
  source 1..502: note = Idiomarina atlantica
  REGION 1..502: note = tr|A0A094IJM8|A0A094IJM8_9GAMM Uncharacterized protein OS=Idiomarina atlantica OX=1517416 GN=IDAT_11560; PE = 4 SV=1
MTDPYHIVILGGGSAGWMTAAALSKVLDRQHYKITLIESKVIGTVSVGEATIPGIREFNQLLEINEDEFLKATHGSFKLAIAFENWQNIGDFYLHPFGPYGITLNGIPFHHYYLRHEREQGANAVPLADVNLEWTVARQHKFTRPIADKRSPLGHIKYAYHFDAQKYAAFLKDFACKRGVMALEDRVLEVKQREKHGAIQALITEQHGEVGGDFFVDCSGFKALLIGEAMGVPYHDWRKWMPCDSAVALPGQHDAEDILPYTRSIAHPEGWRWKIPLQHRTGEGWVYSSRFTDHEKAEQDFRETIGNFDSKANHLRWINGRRDEPWKHNCAAIGLAAGFIEPLESTGLQLTQSAIIRLISLLPGAGEMRQRAKAFNHFCAEEITNIRDFVMCHYKLTNRDDSEFWRYCRDMEIPDSLQERIDLFRENASIFRNSNNELFNEISWFSMFHGQGLRPHNVHPLAEQMSQQELAQHIHTVQRIFKQVTAPLPSHAQFIQQHCKAQ

SEQ ID NO: 87863 - protein, 507 aa, Caulobacter sp.
  REGION 1..507: note = tr|A0A318B8K5|A0A318B8K5_9CAUL Tryptophan halogenase; OS = Caulobacter sp. D5 OX=357400 GN=DMC18_03725 PE=4 SV=1
MSDQRLKSVVIVGGGTAGWMTAAALAKTLSAQGLKITLVESEAIGTVGVGEATIPPILTFNAMLGLDERAFMRATKASFKLGIEFVDWGAIGETYHHPFGTFGLDLEGVKFHQVWRKFAKQAGPIGDFNLTEAAARRWRFALPDPDPAKVMSSLKYAYHFDAGLYARFLRGFAEARGVMRVEGRIAQVDQHAETGFVEAVVLEDGRRVEGEFFVDCSGFRGLLIGQALKVPYQDWSRWLPNNRAVAIPCELGGDGLTPFTRATAREGGWQWRIPLQHRIGNGYVYSSHHVDDERALDTLLTNLDGRPTDEPNFLRFTPGRRERAWEKNVCSIGLSAGFIEPLESTSIHMIQAGITKLLALFPGHGVDPLEIDEYNRLTAEQVDRIRDFVVLHFHATRRDDTDYWRYLSSMTVPDSLARRMELFAHRGRWFPSDYDLFHEPNWLAVLLGQGITPEEWDPLVDSLPGDQVMQRLAHLSALITRTAEAMPSHADFVARYCGEPAPSGVPA

SEQ ID NO: 87864 - protein, 508 aa, Rheinheimera sp.
  REGION 1..508: note = tr|A0A437R546|A0A437R546_9GAMM Tryptophan 7-halogenase OS=Rheinheimera sp. KYPC3 OX=1834037; GN = EOE67_01200 PE=4 SV=1
MKIKKIAIVGAGTAGWLAANHLGHELRADPEVQITVIESADVPTIGVGEGTVPYVMKGLERFGISEAELLLQCDTTFKQGIKFVDWLDKETHGDNHYYHPFDSPYPAGFDISPYWLTQQDKLPFDDIGIQARIAELGLAPKQRSSAEYQGPLAYAYHFNALKFAALLAKNAKQRFRVVHQIATVTGAETDEQGLIRCLNTSNGDQLHFDFYVDCSGFASILIDKTLKVPFISKADELLTDRALVQQIPLTDGQSLPPYTTATAHAAGWIWDIPLTSRRGTGFVYSSKHMSDDEARREFASYLGLDPATFAPRQIPMPIGYREQFWLGNCVALGLAQGFVEPLEATSILVTDFAAELLARHFPRHLADVTVCQPYYNQVLRYVWDGVVDFIKLHYFLSDRQDSAFWQDNRDESKLSAQLKNRLAMFKLRPPQQSDFFSRFDLFNEKNFLYVLYGMKFQTQLQPLTPYEIRRSEELLQSNQQLVAGASREFMPHRAWLDALKQAAQQRAG

SEQ ID NO: 87865 - protein, 511 aa, unidentified
  source 1..511: note = Proteobacteria bacterium
  REGION 1..511: note = tr|A0A1Z8V5H6|A0A1Z8V5H6_9PROT Uncharacterized protein OS=Proteobacteria bacterium TMED61 OX=1986601; GN = CBC21_11945 PE=4 SV=1
  VARIANT 30: note = Xaa can be any naturally occurring amino acid
  VARIANT 33: note = Xaa can be any naturally occurring amino acid
  VARIANT 42: note = Xaa can be any naturally occurring amino acid
  VARIANT 177: note = Xaa can be any naturally occurring amino acid
MKPMTSQPTNIPKNILIVGGGTSGWMVAAXLAXQWKDKDVSXKLIESESIGTIGVGEGSTPKMRRFFDSLNIDEREWMPKCNATYKCGIRFPSWATREGFKSYYHPFFSQKDDTSIRAFHQNATLRSKNFNVYAHPDSFFVSNFLASEKLAPTPDKKTDYHTDYAYHFDASLLGEFXRNFSVQNGVTHVSDTVSEVLRSENGDISGVETDQHGTIDADFFIDCTGFSGLLINKTLGVEFLPYKKFLYNDSAVALPSHINLDKGLPAQTVSKALKNGWMWNIPLTNRFGNGYVYSSDFTDRNSAEEELRKQLGLMDAAVEARHLKMRVGRSAVCWEKNCIAIGLSQGFIEPLEATALMIVQDTAETFANKLESSGNTDNSRAEVNTKVNSIFDGVRNYVQMHYKLNTRSDTEYWLENRKNVHISDDMEKILRVWDKGGDLLSELRNQASRLVYSPTSWYCILAGMGRFRNKPKRPKANVQYYSKKQAEEHSRSFIQQFPSHLGAIQEHSKTP

SEQ ID NO: 87866 - protein, 96 aa, Modestobacter multiseptatus
  REGION 1..96: note = tr|A0A543C4R0|A0A543C4R0_9ACTN Tryptophan halogenase; OS = Modestobacter multiseptatus OX=88139 GN=FB553_1034 PE=4; SV = 1
MQHWDVVVVGGGPAGAACAAAVRRASPAGSVLVLDRSGFPRDKVCGDGIAPEALDVLAGLGIDTAALIEGFPAVPRLRLSSPGGTTVERTMQGLRS

SEQ ID NO: 87867 - protein, 520 aa, unidentified
  source 1..520: note = Lysobacter aestuarii
  REGION 1..520: note = tr|A0A508A4M9|A0A508A4M9_9GAMM Tryptophan 7-halogenase OS=Lysobacter aestuarii OX=1706195; GN = FKV25_09310 PE=4 SV=1
MSEAIRDVVILGGGSAGWLVAGILAADHGAASGGGLRVTLVESPDVATIGVGEGTWPTMRDTLRRIGVSESDFFRECDASFKQGSKFIGWRDGTAGDQYHHPFVLPQGYLEADLVGAWLQHPAEAFGERVCFQPRLCEAGRAPKQFATPEFAAVANYAYHLDAGKLGAFLRRHCVERLGVRHVSDHVTAIDAADNGDIAGLRTRDHGILAGDLFVDCTGMRAVLLGEHYGIAHESQQHVLFADRAIAVQVPYADPRGPIACQTLSTAQPNGWTWDIGLQSRRGVGHVYSSAHTSDDKAADVLRRHVLATGGAEPDPASMRRIGIRPGYRKQSWHRNCVAIGLSSGFVEPLEASSLVLVELASTMLSDQMPATRATMDLVAARFNDSFAYRWERVVDFLKLHYLLSTREDSDFWRDHRRPESIPPRLQVLLELWRHHPPSRYDLPRVEEIFPSASYQYVLYGMGFRPPPAPAPTARRRVDAIAKADRYSREAADLARRMIAGLPSHRDMIDHAIQHGMPRL

SEQ ID NO: 87868 - protein, 497 aa, Sphingomonas sp.
  REGION 1..497: note = tr|A0A2T7VMK1|A0A2T7VMK1_9SPHN Tryptophan halogenase; OS = Sphingomonas sp. TPD3009 OX=2171625 GN=DC425_08500 PE=4; SV = 1
MSAVTPRRIVIAGGGTAGWMAAAALTRTLGRTATVTLVESDAIGTVGVGESTIPPLITFNRLLGISEAEFMAATQATFKLGIQFDGWKGPDDSYFHAFGLTGKDHWAAGFQHFWLDGQARGHTESYDDYCLELVAAREGRFAHLPDDRMSYAYQLDSTLYGRFLRRMAEGDGATRIEGKIARVELEGESGDIAALVLDSGVRVEGDLFLDCTGFRALLIEQALHVGYNDWTHWLPCDAAIAVQTESVRPPVPFTRAMAHDAGWQWRIPLQHRVGNGIVYCSRYLSQDAALDRLLGNVEGAVLTEPNRLRFVTGARRKQWHRNCVAIGLAGGFMEPLESTSIHLIQRAILRLIRLLPPAGAISAHDIAEFNDQQLTDMDQIRDFLILHYKVTERRDSPFWRQCAAMDIPDSLAQKIGLFRETGRVFRRNDELFAENSWIQVMLGQGIVPQTHHPIAAKLPDDELARFLGGLRKGVATTVRGLPAHADYVARYCGAAPA

SEQ ID NO: 87869 - protein, 325 aa, Idiomarina baltica
  REGION 1..325: note = tr|A0A348WR81|A0A348WR81_9GAMM Tryptophan halogenase (Fragment) OS=Idiomarina baltica OX=190892 GN=DCR58_09725; PE = 4 SV=1
MNNSQNQCGLHRVVIVGGGTAGWLAAGVFGAKLSTKHSVTLVESPTVSSIGVGEGSWPSLRDTLLDIGISESEFLTLCQGAFKQGSSFVNWRKNAHSYYHPFTVPAAYNELDIHACWKALAPNTPYQDAFSLQAAMCVAGKAPKQIATPDYAHVLNYGYHFDATKLADLLKQHCVDKLNVDYVSGHIGSIKSSSDGYIEKLITECGKEIVGDLFIDCSGSSGLLIDKHFNVPWIPVKRTMLNDRAVALQVPYSDTDTEIKSTTVATAQTCGWTWDIALQHRRGVGLVYCSQFTNEEQAKQVLIDYVRERYPSAHDAELSFRTLSF

SEQ ID NO: 87870 - protein, 508 aa, Pelomonas saccharophila
  REGION 1..508: note = tr|A0A4R3VLM1|A0A4R3VLM1_PELSC Tryptophan halogenase; OS = Pelomonas saccharophila OX=304 GN=EV671_1002285 PE=4; SV = 1
MRSRALRKVVIVGGGSAGWITAAPLARMLCRPGQPDHCEVTLVESTEIGTVGVGEATLPTISFYNQMLGIDEADFVRKTQASFKLGIEFRDWGRVGHRFFHGFGGFGPAIHNRPLWAYWLRLRRLDPTLPSYEEWSTATVMARNMRFMPPQPGEPSPTNAFNYAYHFDASLYGAYLRSYALHHGAQRVEGTIVRVETSEHDGFVTAVHLSDGRRVEGDLFIDCSGFRALLIGGAMNSPYEDWSHWLPCDRALAVPCARVDPMTPFTTSTARGAGWQWRIPLQHRTGNGLVYCSGHLGDDAAADLLLSHLDGQPLDEPRQQRFVTGRRRQGWVKNVVAIGLSSGFLEPLESTSIQLIMDGVSRLTSMLPDRDFAPKLADEFNRQMAYRYESVRDFIILHYKLGKRRDSEFWRQCAAMSIPDGLAHQIELFSQAGRVTILEPEGFLEPSWASMFLGLEVLPERHDPYIDLVDVEQIRRHMWGVHDSIRRAVERMPTHGKFVASVAGNQPA

SEQ ID NO: 87871 - protein, 515 aa, Sphingomonas sp.
  REGION 1..515: note = tr|A0A2U0VFY7|A0A2U0VFY7_9SPHN Tryptophan halogenase; OS = Sphingomonas sp. CF311 OX=2135485 GN=C7501_0058 PE=4; SV = 1
MQPRSNPSATPLRVVIVGGGTAGWMTAAGLTRLVPNSDYALTLVESDEIGTVGVGEATLPHIREFNAMLGLDEAEFMAATQGSFKLGIEFVGWDKPGGRYVHPFGTFGERWGGLDFQHHWLRARAAGQEVGEWPEYSFAAAMCREGVFDLPSEDTRSIRSTFSYAYHFDAGLYARFLHAWSTARGVRRVEGKITQVARHPATGLVEHVTLESGAVIEGDLFIDCSGFRSLLLGNAMGVAWQDWSAWLPCDRAMAVPSASVDGITPFTRSTAQTGGWTWRIPLQHRTGNGYVFSSAFCTEEQARETILDAIDGAPLADPRTLRFQAGRRDKGWVGNVVAIGLASGFLEPLESTSIFLIQAAVMDLANLMPLPGAAPDPRLAAEFNRLYEIHYDRTRDFLVLHYTANARHGEPLWDHVRNMTLPDSLAHKIALFRSSGRAPDYKLGLFSRDSWLAVLMGQGIIPEAYDRQADRAPLDEVTGRLADLRTRIATNAAAMPPHAAFLTGYCAAGDRAAVA

SEQ ID NO: 87872 - protein, 517 aa, unidentified
  source 1..517: note = Amycolatopsis rhizosphaerae
  REGION 1..517: note = tr|A0A558CJD8|A0A558CJD8_9PSEU Tryptophan 7-halogenase OS=Amycolatopsis rhizosphaerae OX=2053003; GN = FNH05_17310 PE=4 SV=1
MVEKIVIVGGGTAGWMTAAYLRKAFTDRISITLVESGKVGTIGVGEATFSDIRHFFEFLDLPETEWMPACNATYKLAVRFQNWREPGHHFYHPFEQLRSVDGFPLTDWWLQSGHSDRFDKDCFVMASLCDAERSPRYLDGGLLDGPFREGTEEPVGLTMSEHQGKTQFPYAYHFEAALLAKFLTGYAKDRGVRHVVDDVLEVPQDERGWISGVRTAEHGVLEGDLFIDCTGFRGLLLNQALGEPFISYQDTLPNDSAVALQVPLDMRARGIRPCTTATAQDNGWIWTIPLFGRIGTGYVYARDYCEPEEAERTLRAFVGPEAAGVEANHIRMRIGRSRNSWVRNCVAIGLSSGFVEPLESTGIFFIHHAIERLVKHFPGNDWNPAQRELYNEAVGHVMDGVREFLVLHYVSAARENTQYWKDTKTRKIPDGLAERLERWRVQLPDSETIYPYYHGLPPYSYMCVLLGMGGIKLTPSPALRLADDTAAHKEFEQIRDKAKCLVETLPSQYEYFAATRS

SEQ ID NO: 87873 - protein, 502 aa, Sphingopyxis sp.
  REGION 1..502: note = tr|A0A095B6Y9|A0A095B6Y9_9SPHN Tryptophan halogenase; OS = Sphingopyxis sp. LC363 OX=1120705 GN=FG95_00838 PE=4; SV = 1
MGDSRITKVVIVGGGTAGWMAAAALSRTMDNLSIRLVESDEIGTVGVGEATIPAIRLFNALIGIDEDEFVRETRGTFKLGIEFRDWGRLGDSYMHAFGQIGRSLGMLQFPQYWLRGRAEGVAGRLGDYSLNETAARQNRFARLPQIPNTGLDGIAYAFHFDAALYAAYLRKVAEGAGVVRTEGKIESVKRNGASGHVGAVVLENGEEIGGELFIDCSGFRALLIEQALETGFEDWARWLPCDRAIAVPSENVGPARPYTQAIAHKAGWQWRIPLQHRTGNGHVFCSDFIGEDEATATLLANIEGRPLAEPRTLRFKTGMRSRAWNGNVVALGLASGFLEPLESTSIHLIQNGIAKLLAHFPDRDFDAANIDAYNRRVRFDYERIRDFIILHYHANQRTDAPFWIRCREMEIPETLARKIALFKSQGQIVREGDELFIEIGWFQVLTGQNIMPDGYHPMADQLTDDELAGFFADIETIVARTASHLPRHEEFIAQHCAAGVPA

SEQ ID NO: 87874 - protein, 485 aa, Sphingopyxis sp.
  REGION 1..485: note = tr|N9WC99|N9WC99_9SPHN Tryptophan halogenase; OS = Sphingopyxis sp. MC1 OX=1174684 GN=EBMC1_12175 PE=4 SV=1
MAAACLRRFLPAGWSMSLVESDEIGTVGVGEATIPQIRLFNDALGIDEDEFLAATQGTIKLGIEFNGWTRPGHRYMHAFGAVGRGLGLLEFHQYWLRARAAGVAETLDHYSLNERAAYARRMQRDAPRTSPHLLEMPYAFHFDAALYAAFLRRRAEASGVERIEGKVVDVRLNGETGDVTGVALDDGRSVEGDFFIDCSGFRGLLIEGALETGYEDWSHWLLNNRAVAVPCAHGATPQLPWTGATTRDAGWQWRIPLQHRIGNGYVYCSDHVSDDEAVATLLANLDGPAQAEPNRLRFVSGKRRRMWNRNVVALGLASGFMEPLESTSIHLVQAGISRLLKMLPSGATDPAVAAEFNRQSDFEWERIRDFIILHFKATERRDTAYWRDRTEMPVPDTLAAKIELFRAQGLIFREHEELFTESGWLQVLVGQGVAPRAWHPLAEGIGADDLARYMAGVAAMVEAEVAQMASYDDFLAATSRAAVAA

SEQ ID NO: 87875 - protein, 536 aa, Pelomonas saccharophila
  REGION 1..536: note = tr|A0A4R3UF31|A0A4R3UF31_PELSC Tryptophan halogenase; OS = Pelomonas saccharophila OX=304 GN=EV671_10466 PE=4 SV=1
MSETATVFNQQLAARSAGGSTDAPPPVRHVCVVGGGTAGWMTALMLATTAYGPRLKVTVLESPQVGIIGVGEGSTPWLRGFFDGLGIEESEWMPACNATYKSGITFEGWSTKPGFQRYFHPFASMLDNMTMHQFVDNVHARLEGADVHAHPDRFFVAAALARQGRGPRARPNFPFDIWYGYHFDATLLGQFLAAKALERGVQHLQRHVTQVQLNEQGDIAHLQLDGGEPLAADFFVDCTGFASLLIGKALQTPFVSYAENLFNDAAIAMPTPLGGPIESQTVSTALRHGWAWKIPLSNRHGNGYVYSSAHCSADEAETELRRHLGLLDADVPARHLKMRVGRMENQWSRNCVAVGLSQGFIEPLEATALLFVQRTAAALVEALEQGDLGPAAQQRFNDSMRTRFENTRDYIVAHYKTNSRTDTDYWRANAENMRLSESLQGVLMTWLSRKPLAAGLKAGRFGGGYPIVSWYALLAGMGIFPDPRELQPPTSHQARHRLDAVDDFVARSATNFPDHRELLAAIPPRVGDKTLQLYLW

SEQ ID NO: 87876 - protein, 530 aa, Lentzea flaviverrucosa
  REGION 1..530: note = tr|A0A1H9SEW4|A0A1H9SEW4_9PSEU Tryptophan halogenase; OS = Lentzea flaviverrucosa OX=200379 GN=SAMN05216195_10737; PE = 4 SV=1
MDDNQIRKVLVLGGGTAGWMTASYLGRALGSAVEITVVEAPSIPRIGVGEATIPNLQKTFFDFLGLKEEEWMPECNASFKMGVRFLNWRTPGTGQSAARTLPEGRPDQFDHLFGLLPDHDNLPLSHYWVQQRLSGSTDVPFDHACYRQPPLLDAKLAPMLPDGTPYASYAWHFDANLVADFLRRFATQRQSAVHVEDVYIGPEFDSRGYLTAINTESGRRFEADLFIDCSGFRSLLMNGAMEEPFLDMSDHLLNDRAVATAVPHDDSQGIEPYTSAIAMSSGWTWKIPLLGRFGTGYVYSSRFTSEDEATAELCGMWGLDPEGQPLNHVKFRVGRNRQAWVRNVVGVGLSSCFVEPLESTGIYFIYATLYQLVKHFPDKRFEPVLRDRFNAEVETMFDDTRDFLQAHFTFAPRTDTEFWRACKELRFSDRFAEKVAMYKAGLTVDTPVTDESNYYGNFEAEFRNFWSNANYYCIFAGLGLLPDRPTPVLSFRSDSVESAEKLFAEVKQDQARLLETLPTTYDYLRRLHSR

SEQ ID NO: 87877 - protein, 500 aa, Asticcacaulis excentricus
  REGION 1..500: note = tr|A0A3G9GB13|A0A3G9GB13_9CAUL Tryptophan halogenase; OS = Asticcacaulis excentricus OX=78587 GN=EM6_2270 PE=4 SV=1
MIVGGGSAGWMAAAALAKTLGESLDIHLIESEEIGIVGVGEATIPPILKYNDLLGIDEATFVRETNATYKLGIEFVDWRAKGHSYFHPFGHSGREIESFPFHHYWLADWRRRGGEYDYTQFNLETVAAYKGRFGYLPAEGDKPGLNYAFQFDAVLYAKFLRNYSAERGVTRHEGRIVSVEQHPESGFVTAVVTADGRRLEGDLFIDCSGFRGLLIEGTLNCGYEDWSRWLPMNSAVAVPCERVADITPYTRATAREAGWTWRIPLQHRTGNGYVFSDQFLSVEDAKTRLLGCLDGAPLAEPRLLKFVTGHRKRVWDKNVVALGLASGFLEPLESTAIHLVQSGITRLLAFFPKTGIVPSVVAQYNRDVLFDYNNIKDFLIAHYKISERDDTPFWRWVQAMEMPDSLKERLDMFRETALLIAREPELFRETSWLAVMMGQGLLPKTSHPIVETIEAADLRLHMSRWRKMLESRADSLPGHEDYVRRFAPSADLKMRMASAG

SEQ ID NO: 87878 - protein, 504 aa, Pseudoalteromonas peptidolytica
  REGION 1..504: note = tr|A0A510UEG4|A0A510UEG4_9GAMM Tryptophan halogenase; OS = Pseudoalteromonas peptidolytica OX=61150 GN=PPE03_36240; PE = 4 SV=1
MKSQKIVILGGGTAGWMAANMMAKSWADKAIEITVVESSSIGIIGVGEGSTPQFKGFMDYLGISEAQWMPACNATYKNGIRFIDWSTKTGFSSYFHPFPAQPDDYSAPAFFHNSFVRRKAIDVEGHPDHFFLATHLANTNKSPIAAQNFPFEINYGYHFDSSLLGEFLAREAEKRNVKHIDATISDVRKHVNGDIAALVTSQGVEIAGDIFVDCSGFKSLLLQQALDVGFESFGNNLFNDAAVVLATKQGDIIRSETQSVARKYGWSWHIPLTNRTGNGYVYSQRYCDRDQAETELRAALGLLDSDVEARHIKMKVGQVKTHWKNNCIAVGLSQGFIEPLEATALHIVQETVQSFIECYQEAGFTDGNRDKHNHSIATRYQAIRDYIVAHYRVNSRTDTQYWLDNANNNNLSRSLFNVLQTWVSGNNLSDELARQNIDQYYPSVSWHCLLAGYGVYPDQAQLKPGNALAKQYNIEKIEDYLRRCGLNFKAHRLELDALASTFHK

SEQ ID NO: 87879 - protein, 531 aa, Streptomyces fradiae; identical to SEQ ID NO: 83175
  REGION 1..531: note = tr|A0A3B7R3Z2|A0A3B7R3Z2_STRFR Tryptophan 7-halogenase OS=Streptomyces fradiae OX=1906; GN = D3X13_32785 PE=4 SV=1

SEQ ID NO: 87880 - protein, 516 aa, unidentified
  source 1..516: note = Sphingomonas edaphi
  REGION 1..516: note = tr|A0A418PY96|A0A418PY96_9SPHN Tryptophan 7-halogenase OS=Sphingomonas edaphi OX=2315689; GN = D3M59_10755 PE=4 SV=1
MSVDVFPQHLVILGGGSAGWMAAAYLDRTFNLPGRRRLPIIVVESPAIGRVGVGEATIPTLLRFAQFLGIDEATLMKRTFATFKHGVRFLDWNGPGTDYFHPFEALDASSNFNPGPSWLARRAAGVAAPFDLESGIQRRVALAGRAPKRMTDPDYAGLMPYAYHLDAEEFGDLLADVARDRGVSHVSGRVAEVEKSETGDVQALVLDDGRRIDGDFFIDCSGFASVLLEKAMGVPFESFSDYLLCDRAVAMPKPYADGEQARPYTTAIAMDHGWSWRIGLQHREGTGYVYSSKFCDQEDAERALRIATGAGEEVAARHLKMRVGMPSETWRGNVVALGLAGGFIEPLESTGLHMVELGLEYLVRYFPLSGVNPAARSRFNHLMRSRYQELRDFVVAHYCLTKRADTPFWQAVRDPAQIPTGVAEKTELWSDRHPAAEDNEYSRLLFAHSNWAAVLYGMEAVGELAMANSARWCPNPGAHLPELNAAADRLINGLPEQSIWLEGLKTIPVRDQSWAA

SEQ ID NO: 87881 - protein, 482 aa, Brevundimonas sp.
  REGION 1..482: note = tr|A0A0S9NSG8|A0A0S9NSG8_9CAUL Tryptophan halogenase; OS = Brevundimonas sp. Leaf280 OX=1736320 GN=ASF31_02340; PE = 4 SV=1
MAAAALAHAFEGAGKIVTLVESEAIGIIGVGEATIPEILKFNARLGIDEADFLRETKATFKLGIEFDGWRREGERYFHPFGAFGLDMEGIAFHHFWLKACAEGGAEPLETYSMAWQAARRGRFFHPQGGPQSPLSSLGYAYHFDAALYAAFLRRFAEGLGVVRCEGRVVEVQQAADGDIAGVRLDDGRVVEGDFFIDCTGFVGLLIEQALASGYEDWSSWLPCDSAVAVPCEREGALSPYTRSTAREAGWQWRIPLQHRVGNGYVYSSAHISHQAAEDALMSRLEGTALAEPRRLRFATGRRKDCWKRNCVAVGLSSGFLEPLESTSIHLIQSAITKLITLFPSHKNSDGLRREFNVLMEEEFVTVRDFLILHYKVNQRAGSFWSQVRDMPIPDRLAAKIALFEDTGRIVRRDHDIFSESSWLAVAVGQGLTPHGRHPISDVIGHDANLGRLSAIRDSIWRTADALPTHEDVLATTMNRKAF

SEQ ID NO: 87882 - protein, 516 aa, Sphingomonas sp.
  REGION 1..516: note = tr|A0A2U0UYL2|A0A2U0UYL2_9SPHN Tryptophan halogenase; OS = Sphingomonas sp. CF311 OX=2135485 GN=C7501_3138 PE=4; SV = 1
MKDGGMGSGAIERVVIVGGGTAGWMAAAALGAHLAGTGTRITLIESSEIGTIGVGEATIPTIRRFYAALGMGDAEVMRACEATAKLGIRFVDWKPGTSFVHPFGRFGQDLRGIDFHHYWLKARQAGQAAPLEEYSLGAMLAREGHASVPVPNPPSQLSIFDWALHFDAALFAAHMRSFAERVGVQRIDAKITEVSLHGETGFIESVTLDRGGKVEGDLFIDCSGFRGLLIGEALGVGYQEWSHWLLCDGAFAVQSERAGPPPSCTTVTARTAGWQWRIPLRTREGNGIVFSSHFQSDEDARAELLANVSAKPTTEPRRLRFTPGRREVAWTKNCVSLGLASGFLEPLESTSIALIETGIERLKQLFPDKSFDPAVIQEYNIQCAEEMERVRDFIILHYNLSTREGPFWRACREMALPDSLNAKLDLWRARGAFVRYRWEMFHPASWLAIYGGFEHLPDRIDPALAAVDPEELAGALAQMRASIARTVSDTPTHTEFLATVDGATVEPSNQPLRTRA

SEQ ID NO: 87883 - protein, 507 aa, Asticcacaulis excentricus
  REGION 1..507: note = tr|A0A3G9FYV4|A0A3G9FYV4_9CAUL Tryptophan halogenase; OS = Asticcacaulis excentricus OX=78587 GN=EM6_0093 PE=4 SV=1
MSDAIRRIIIAGGGTAGWMCAAALRKGLGRTVELVLIESEDIGTVGVGEATIPPIRKFLEHVGVNELDFIRATEASFKLGIEFAGWGAPDSRYFHGFGDFGAVHEAVRPYQLWRLLHEAGDETPLEAWSLPAALAKAGKFFPPNPDPRSPMHDYAYAYHFDAGLFARFLRRHCEAQGVQRINAKIDAVQVRPADGFIAGLRLDNGTSEAADFFIDCTGFRGLLIEGALKAGFEDWSHWLPADRAWAVPTARHAGAGITPYTTSTAHAAGWQWRIPLQHRTGNGHVFASAFMDEETARDVLLRHLEGPALKDPMLIRFTTGRRPQPWTKNCVAVGLSSGFLEPLESTSINLIQSGIAQFLELFPSRQAEAVLRREYNHQMGLSYERVRDFIILHYKLNTRSEPLWRYCADMPIPDTLAHKIELFSARGDVVSYDWDHFAEPSWIAVMNGQGLRSRFADPLARRLPLEGVRALMAQRRDAIAQVVRQLPAHADFIAQHCASAPASAAEV

SEQ ID NO: 87884 - protein, 515 aa, Lentzea flaviverrucosa
  REGION 1..515: note = tr|A0A1H9BNY5|A0A1H9BNY5_9PSEU Tryptophan halogenase; OS = Lentzea flaviverrucosa OX=200379 GN=SAMN05216195_101539; PE = 4 SV=1
MLKNVVVVGGGTAGWMTASYLTAAFGDRVGVTLVESKRVGAIGVGEATFSTVRHFFEYLGLEEKEWMPACNATYKLAIRFENWREPGHHFYHPFERQRVVDGFPLTDWWLREPRSDRFDKDCFLVGTLCDDLKSPRQLNGELFEGGLGGRSAYRTTLTEQTTQFPYAYHFDAALVANYLRDYAVARGVKHVLDDVQDVALDDRGWISHVVTKESGNLTGDLFIDCTGFRSLLLGKALAEPFQSYQDSLPNDSAVALRVPQDMENRGLRPCTTATAQEAGWIWTIPLFDRIGTGYVYAGDYISPEEAERTLRAFVGPAAEHADANHIKMRIGRSNRHWVNNCVAVGLSSGFVEPLESTGIFFIQHAIEQLVKHFPDERWDDGLRTAYNKLVNNVMDGVREFLVVHYYAAKRQDNQYWKDTKTRALPDGLAERLERWQTRLPDNESVFPHYHGFESYSYVCMLLGLGGLDLKSSPALGLMDAAPAQHEFKLVGEQAAELARTLPTQYEYFAQLHRAR

SEQ ID NO: 87885 - protein, 491 aa, Asticcacaulis excentricus
  REGION 1..491: note = tr|A0A3G9G3B9|A0A3G9G3B9_9CAUL Tryptophan halogenase; OS = Asticcacaulis excentricus OX=78587 GN=EM6_0007 PE=4 SV=1
MRPVKKVVIAGGGTAGWCAAAALSKLLGTLIDITLIESEEIGIVGVGEATIPTARTFHHFLGIDERAFLKATNATYKLGIAFENWARDGDRYIHSFGEIGKSNWMAPFHHVWMAARDKGFGGDLGDYCFELRAAEEGKFFTSDTARINYAYHFDAVLYGRFLRQFSEAHGARRIEGRICEVRQDADTGFITALALESGEVIDGDLFIDCTGFKGLLIEETLKTGFEDWSHWLPTDRALAVQTARSGRLDPYTRAIAHGEGWRWRIPLQNRVGNGLVYASGHLTDEAARERLLSLVDGEPLTEPRLIRYRTGRRKKIWNKNCLTVGLSSGFIEPLESTSIHLFQIAVTRLIQMFPFGGITEAVSDHYNEIARREIEKVRDFVILHYKLTQRDDTAFWRERRDMSVPDSLTERLEMFREHGHAWQAADDLFRVDSWVQVLLGQRLEPQSHHAIGQLMSEAQLRQALDGLKTHIARTVEAMPTHEAFLKSYLAA

SEQ ID NO: 87886 - protein, 518 aa, Novosphingobium sp.
  REGION 1..518: note = tr|A0A4R1VYF7|A0A4R1VYF7_9SPHN Tryptophan halogenase; OS = Novosphingobium sp. ST904 OX=1684385 GN=EDF59_11649; PE = 4 SV=1
MTTDYPSSGRVVILGGGTAGWLSAAYLSRTLKMADVTLVESGEIGIIGVGEGTFPTIRTTLAGLGIGEAEFLARADATFKQGVLFDGWATGSDSYFHPFNLPVGGEDEALLPHWIGDDSAARPSWADAVTVQEQVIRAGRAPKRAEDPDFSGPMNYAYHFDAARFAAYLRDISVAAGVTRIEGTVAAVERKDGSGDITALMLADGRRIEGDFFLDCSGFSALLIGRTLGSPFTSCAGSLFNDRALAMQVPYAEPGAPVRPYTLATAHEAGWTWDIGLSERRGVGYVYSSNHCSDDEAETTLRRYLGSEGAALTPRQLRFETGYRETQWIGNCVAVGLSAGFFEPLESTGIMLIEAALKMIGEFLVPGDRGARAAAARSFNRLMAARFERIVHFLKLHYCITRRTDTAYWRDNADPASIPEALQDMLAQWRHRPPSRFDFVVDLETFLPPSYHYILYGMGFETRLSAGIRRYPGAQEARDVFARVRAAHAGARAALPDHRTLLERYHARSVPRFSKVSR

SEQ ID NO: 87887 - protein, 527 aa, Amycolatopsis keratiniphila
  REGION 1..527: note = tr|R4SX80|R4SX80_9PSEU FADH2 O2-dependent halogenase I OS=Amycolatopsis keratiniphila OX=129921 GN=prnA PE=4; SV = 1
MDNRIENVLVLGGGTAGWMTAAYLGKALGETVTVTVLEAPGIPRIGVGEATVPNLQRVFFDFLGIDEDDWMRECNASFKTAVRFVNWRTPGRGEAEARDLEGRPDHFFHPFGLLPTHDGVPLSHYWARDRLRGVTEEPFDYACFREPPMMDALRAPKWFDGTPATRYAWHFDAQLVAEYLRRFAIERLGVRHVEDEMTEAEIDERGFITRLRTRSGRTLAADLFVDCSGFRGLLINKALDEPFLDMSDQLLCDSAVATAIPHDDEARGVEPYTSAIAMSSGWSWKIPMPGRFGTGYVYSARHTDKDDATEEFSRMWGLDPERTAFNHIRFRVGRNRRAWVNNCVSVGLSSCFLEPLESTGIYFITAALYQLAKHFPDRRFDPVLVDRFNREIELMFDDTRDFIQAHFYLSPRVDTEFWADNKKLTLPENIQEKIAMFRSGLPINEPVTDEATYYGNFDAEFRNFWTNGSYYAIFAGLGHTPDRVLPALNYRPETDAGHLFDEVRKRQRDIVETLPSNHEFLVKLHGR

SEQ ID NO: 87888 - protein, 548 aa, Streptomyces sp.
  REGION 1..548: note = tr|F3ZBX7|F3ZBX7_9ACTN Putative tryptophan halogenase OS=Streptomyces sp. Tu6071 OX=355249; GN = STTU_4817 PE=4 SV=1
MPVRDDPTSETRRTPMPETDNRIRKVVILGGGTAGWMTASYLGKALQGTVDIQVLEAPAIPRIGVGEATVPNLHRVLFDYLGIPEEEWMRECNASFKMAVKFVNWRTPGRGEPDSRTRPDGKPDHFYHPFGILPDHDNTPLSHYWFKNKYEGVTDKAFDYSCFREPPVMDAKKSPKWMDGESSTRYAWHFDAALVADFLRRFATDKQGVEHIQDEMVRAEQDERGYVTALHTKSGRVLDADLFVDCSGFRGLLINKALGEPFIDMSDHLMCDRAVATAVPHDDDANGIEPYTSAIAMSSGWAWKIPMLGRFGSGYVYSSRFTTQEEATREFCELWNLDPETTKFNHVRFRVGRNRRAWVNNVVSIGLSSCFLEPLESTGIYFITAAIHQLAKHFPDRTFPQALVDSFNEEIEVMFDDTRDFIQAHFYYAPRDDSEFWRAQKTLKLPENIQRKIAAYKAGLPINSPITDESTYYGNFEAEFRNFWTNGSYYCVFAGLGLEPDAPLPALAHKPESVAGAQPLFTKVAQEQRHLLDTLPSAHDYLRRLHAK

SEQ ID NO: 87889 - protein, 454 aa, Amycolatopsis keratiniphila
  REGION 1..454: note = tr|R4TAV3|R4TAV3_9PSEU Tryptophan halogenase; OS = Amycolatopsis keratiniphila OX=129921 GN=AORI_5364 PE=4; SV = 1
MDDYDVIVVGGGPGGSTVAGLTAAEGHRVLLLDKDRFPRYQIGESLLPATIHGICAMLGVRDEIERAGFVRKRGGTFKWGSGAEPWTFSFAASDRMAGPTSYAYQVERTRFDALLLDGARRLGAEIRQGHRALGTLRAGERIGGVRYLDDTGNERHATARFVVDASGHGSRLHHDVGGIREYSPHFRNLALFGYFEDGRRMPAPDAGNILCVSFPDGWFWYIPLSDTLTSVGAVVKQEAADRVQGDPDAAYAALIEDCPLVKDFLRDARRATEPPYDRLRVRKDYSYDRTVLWAPGMVLVGDAACFIDPVFSSGVHLATYSALLAARSINSTLAGFSDEKRCFAEFEARYRREFALFRDFLITFYRLDSGEDDYFRQARRLTGHHGTADEAFAELVGGVSSQDFSRAMFGDVLAEGVQLQLRGLLGEAAGDEPPMFPGGLVPTADGRRWRVPDA

SEQ ID NO: 87890 - protein, 486 aa, Asticcacaulis excentricus
  REGION 1..486: note = tr|A0A3G9G2I1|A0A3G9G2I1_9CAUL Tryptophan halogenase; OS = Asticcacaulis excentricus OX=78587 GN=EM6_0528 PE=4 SV=1
MTAALLARLTEGKLGQIHLIESEDIGTIGVGEATIPPIQDFNRLLGIDETTFLRETKATFKLGIEFRNWHQKDDSYIHPFGVIGAQIGRAAFHHYYIRAALSGDTTPFEAYSLASVAARQGRFAPAPRHDTGVHSTLGYAYHFDAGLFAQFLRRYAEARGVVRHEGRITQVNQRAEDGFITGVQTERGDTLDGDLFLDCSGMHALLLQKTLETGFEDWSHWLPANRAWAVPCANISEPLPYTRATAHSAGWQWRIPLQHRTGNGHVFSADFMSEDEAQRILLDNLDAPPLADPRLIRFRTGRARQFWHKNVVAIGLSGGFLEPLESTSIHLIHSGLIKFMDLFPDPDFNPLLSQQYNQAVGMDYDTIRDFLIAHYKLTKRDDSDFWRYCREMSIPASLQYKLDQFNESGRVIMSRGDLFQIPSWLAVLFGQGLRPRRYDPLADLIEPQDLSAILHQMQDTITDYANTMPPQARYLEKLGLTIVAGE

SEQ ID NO: 87891 - protein, 496 aa, Rheinheimera pacifica
  REGION 1..496: note = tr|A0A1H6JVB4|A0A1H6JVB4_9GAMM Tryptophan halogenase; OS = Rheinheimera pacifica OX=173990 GN=SAMN05660691_00631; PE = 4 SV=1
MTNNAVKQVLIVGGGTAGWMTAAMLSKLMGPQLSIRLIESDAIGTVGVGEATIPAIQHFNAALGINEAEFLQSTQGTIKLGIQFENWGNAGDSYMHAFGPVGRPLGFTAFHHYWLAAQARGDNSSFWDYSLNYQAAHTGKYAPLPQIPNTPLQGLVHAYHFDASLYAAFLRRYSEQRGVVRTEGTIGAVVKTPAGDLASVILKDGQSFSADLFIDCSGLRALLIGGELGGGYEDWRHWLPCDSALAVPTAATLPVMPYTRAIAHSGGWQWRIPLQHRTGNGLVYSSRFLDDNAARQTLMSNLDAEALAEPRKISFVTGRRNQQWLQNCVAIGLSSGFLEPLESTSIHLIQSAVVRLVQCFPQQTDMAALRLEYNRQSQQEFEAIRDFIILHYHLNQRNDNGLWQYCRTMALPDSLAQRIELFRQSGAVFRQQDELFTEVAWQQVMLGQHLRPQHYHPLADSLTDDQLSGFLADLKAIISRTAAQLPAHQQFLQQGR

SEQ ID NO: 87892 - protein, 477 aa, Cellvibrio mixtus
  REGION 1..477: note = tr|A0A266QDP1|A0A266QDP1_9GAMM Tryptophan halogenase; OS = Cellvibrio mixtus OX=39650 GN=CBP51_10090 PE=4 SV=1
MAAAAFAKKFGELLEITLVESDEIGTVGVGEATIPPMRVFHKLLGIDEQEFMRATKATFKLGISFENWARQGDKYIHSFGKTGKETWLGDFHHFWLRSRELGMDFEFGDFCLEFQAAQANKFFTGPGADINYAYHLDASRYATFLRAMSEKYGAKRIEGKVIEVKQDHDTGFISALVLASGVVVEGDFFIDCSGFRGLLIEQTLRTGYEDWSQWLPCDTALAVQTESVGPAVPYTRAIAHHAGWQWQIPLQHRVGNGLVYCSNFMTDEEARATLLQNINGPRVNEPRLIKFRTGRRRKSWNKNCVALGLASGFIEPLESTSIHLFIMAITRLMRFFPFSGVEPVLVDEYNRETLAEIEPIRDFVIMHYKATERDDSPFWRYCRNMEVPATLAHRMELFKKTGHAYQAQGELFRIDSWTQVLFGQRVMPEQYHHIAQLMSEQELRQFLMRMKESIRDSTEKLPLHEEFVRQYCRAQME

SEQ ID NO: 87893 - protein, 500 aa, unidentified
  source 1..500: note = Nostoc linckia
  REGION 1..500: note = tr|A0A1Z4LA92|A0A1Z4LA92_NOSLI Tryptophan halogenase; OS = Nostoc linckia NIES-25 OX=1091006 GN=NIES25_46520 PE=4; SV = 1
MEKTIHNVVVLGGGSAGFLSALALKVKIPWLNVVVVHSTTVPVIGVGEATTAWIPWFLHKYLGLNREQFYEETQPIWKLGIKFIWGDSTQSHFNYPFVTHLADKLSVLSKSTAYYCLDSTTESSIYSLLMEQNKSPCFQRENGDFVVDERFGYHIENTSFVAYLERRAAELNIKIIDKAVVNIEVGENGYIRQLLFNDSTTLAGDLFVDCSGFRSTLLGETLQEPFCSFSSSLFCDSAITGTWMRDEGIQPFTTAQTMQSGWCWQIDLQDKVNRGYVYSSAFISDDDALQEMKLQNPLMSDEHNLIRFKSGRHQRFWVKNVVAVGNASGFVEPLESTGLHMIGETIKCVCDVLIDSDQQPTPGLINLANRAIAEKWDDIRDFLSIHFKFNRRVESEFWRQCWQKTDIGDAEAVVDFFQNNGPSPIGQILLRKNSVFGYNGYLNLLMGQQVATKYQSNNDSLDLDNWRQVKNYFIKNCANALPIPQAIQVVKERKCQWLTS

SEQ ID NO: 87894 - protein, 498 aa, Pseudoalteromonas lipolytica
  REGION 1..498: note = tr|A0A1I6X7R9|A0A1I6X7R9_9GAMM Tryptophan halogenase; OS = Pseudoalteromonas lipolytica OX=570156; GN = SAMN04487854_101215 PE=4 SV=1
MEAKKITKVVIAGGGTAGWITAALLNKVLGKSLDITLVESAEIGTVGVGEASIPPILHLNGALGISEKEFIKATGATIKLGIEFENWRSQGHSYMHAFGEIGKDFPFCAFYHFWLKANQTQNAPDFWDFSLNYQAAKAHKFAHLKNIPNTQLAGLHYAYHFDATRYGEFLKELAQSRGVNRIEGKIETISQCDQTGSINALKLEDGSLIEGDLFIDCTGLRALLIEQTLNTGFEDWSHWLPCDSAVAVQSESASNAIPYTRSIARESGWQWQIPLQHRVGNGLVYSSRYLSDENAKQQLLNNLPAKPLTEPRIIKFKTGRRLKQWHKNVVSVGLSSGFLEPLESTSIHLIQSAAIRLIKFFPHQGIKQNLVDEFNKQSKTEFERIRDFIILHYKLTERDDSPFWRLCKGMDIPSSLAKKIALFKTSGKLVREDDELFAEVAWQQVLIGQGLIAEDYHPLTNALTDNQLNELFSNLKTLINSTVEQLPSHSEFLEKIQN

SEQ ID NO: 87895 - protein, 497 aa, unidentified
  source 1..497: note = Mycobacteroides chelonae
  REGION 1..497: note = tr|A0A1S1M731|A0A1S1M731_MYCCH Tryptophan halogenase; OS = Mycobacteroides chelonae OX=1774 GN=BKG84_18855 PE=4; SV = 1
MTASYLKVAFGDRIAVTVVESARIGAIGVGEATFSTIRHFFEYLGLEEHEWMPSCCATYKLGIRFQDWRKPGHHFYHPFERQRVVDGFGLTDWWLDNPRSDSFDRDCFLIGTLCDNDKSPRRLDGSLFMGTDGENTAYRTTLSEQDTQFPYAYHFDASLLADFLRDFAVRRGTRHVVDDVVDVLQDDRGWISQVRTRAHGSIGGDLFIDCTGFSGLLLGRAMGEPFESYQGSLLNDRAVALRVPTDRDRGHLPPYTTATAQDAGWIWSIPLFDRIGTGYVYAEDYCSPEDAERALRDFVGPEAEGLEASHIRMRIGRSRRSWVGNCVAIGLASGFVEPLESTGIFFIQHGIEQLVKHFPDANWEESLRDSYNRVINRCMDGVREFLVLHYYLAARVDTQYWRDSKSVQLPAALAERIEHWRSKLPDTGSVYPHYHGFEPYSYVCMFVGLGGIPARPSTVVRYLDATRAQREFDLLAQQASRLRHSLPTHREYLAQMY

SEQ ID NO: 87896 - protein, 516 aa, Sphingopyxis sp.
  REGION 1..516: note = tr|A0A0M8JI02|A0A0M8JI02_9SPHN Tryptophan halogenase; OS = Sphingopyxis sp. C-1 OX=262667 GN=SC1_02736 PE=4 SV=1
MAAHAPYRIVILGGGTAGWMCASGLSGLLAAADYDITLIESDEIATVGVGEATLPHIKTFNDMIGIDEAEFMRETAGTIKLGIEFVDWLRPGVRYIHPFGTFGDRWTNADFQHHWARARLAGTDSRSLQDYSFAVAAALANGFEHPNGDPKSIRSTYSYAYHFDAGLYAAYLRKWATARGIRRMEGKVVDVVRDAESGDVASLTLASGAEISGDLFVDCSGFRSLLLGQTMGVPWIDWSEWLPCDRAFAVPCTGVEPLTPYTRATAQRAGWTWRIPLQHRIGNGYVFSSRFCSEEEARQTVLGAIDGDALDEPRLLRFQAGRRQVGWAGNCIAVGLASGFLEPLESTSIFLIQAATIDLAGLIPRRGEKIDPRMVREFNRLFAVHYDRTRDFLVLHYTANERVGEPLWDHVRNMPLPDSLAHKMALFRESAAAPEYRLGLFSRDSWLSVLEGQGVLPSAANPLTHRLSAADLQARLDDLAERIAVNAADMTPHAEFLATYCASEAKARPGIPANAA

SEQ ID NO: 87897 - protein, 495 aa, Pseudoalteromonas lipolytica
  REGION 1..495: note = tr|A0A1I7BDJ2|A0A1I7BDJ2_9GAMM Tryptophan halogenase; OS = Pseudoalteromonas lipolytica OX=570156; GN = SAMN04487854_11216 PE=4 SV=1
MTNHFTKHVVIAGGGTAGWMAAAALAKLLGNEITITLIESDEIGTVGVGEATIPPIRTFHKLLGIDEQRFMTQTQATFKLGISFENWHKPKSDYIHSFGMTGKECWAGEFHHFWLHAQNQGVKDDFGDYCYELQAAKHGKFGFNKQNPINYAFHLDANRYALFLRDFAEQHSVKRIEGKIEHINKSATNGFIESVTLKNGTTVSGDFFIDCTGFKGLLIEQALHTGFEDWSHLLPCDSAVALQTTGSDEILPYTRSIAHQSGWQWQIPLQNRTGNGLVYCSRYLTDADATHLLLNNISGEILTDPKVIKFKTGRRLKGWNKNCLALGLASGFLEPLESTSIHLIMTGIIRFIRLFPFTHISQHAIDEYNKQLKSELESIRDFIVLHYRVTDRDDSEFWRHCKTMEITQTLSHKIALFKQTGRVFLDDGDIFRVDSWVQVMLGQGIKPQQYHHVASLMSEQELMQFLHGIKQQIAHRLAQLPNHKEFVSKYCSQNN

SEQ ID NO: 87898 - protein, 493 aa, unidentified
  source 1..493: note = Verrucomicrobia bacterium
  REGION 1..493: note = tr|A0A2V6PM23|A0A2V6PM23_9BACT Uncharacterized protein OS=Verrucomicrobia bacterium OX=2026799; GN = DME18_08710 PE=4 SV=1
MKISSIVVLGAGSAGLMTALTLKRKVPQLAIRVVRSPDIGIIGVGEGTTVVFPRHFFEYLKMKPRDFYAEADPTWKMGLRFLWGPRKEFYYTFSFEFEKRLPELSRNNGFYYSDDCPWLGHASAFMAHNKVFPRQPDGLPQFHNNHAFHIENKKLVGWLENRCRDHGVGILDATVRAEKGGEGIDSLVTETGERITAELFVDASGFRSELLGRALGEPFRGYQDALFCDRAVIGGWPRADEPILPYTTAETMDAGWCWQIEHEHFINRGYVYSAGFISDDDALAEFKRKNPKLATAPRVVKFRSGRYQRSWVGNVVGVGNAVGFVEPLEATALQVIAVEASTLADSLLDSLCEPTPSLIRLYNRYNGDQWDDIRNFLAIHYKFNTRIDTPFWSACRADTALHGAQDIVDWYRENGPSVLAGVALVHPSNSFRMDGYLALLAGQKVPHNKPYHPPPAEQNFWRQHCRSLAAEAQRGLDVKQALQAIRSPDLKWA

SEQ ID NO: 87899 - protein, 497 aa, unidentified; identical to SEQ ID NO: 83022
  source 1..497: note = Mycobacteroides chelonae
  REGION 1..497: note = tr|A0A1S1LM64|A0A1S1LM64_MYCCH Tryptophan halogenase; OS = Mycobacteroides chelonae OX=1774 GN=BKG82_25075 PE=4; SV = 1

SEQ ID NO: 87900 - protein, 350 aa, unidentified
  source 1..350: note = Streptomyces leeuwenhoekii
  REGION 1..350: note = tr|A0A0F7VR95|A0A0F7VR95_9ACTN Tryptophan 2-halogenase OS=Streptomyces leeuwenhoekii OX=1437453; GN = sle_35630 PE=4 SV=1
MSSALFGVPDEYDVIVIGGGPAGATTAGLLAQRGRRVLVLDRERFPRYHVGESLIPAFMRPMQEMGITERMDARGFERKYGGTLVWGNKQVPWNFSFIEGGAHEYAFHTRRADLDALILDRARELGAFVIEDATVKEPVLVDGRVTGVRFALRGLDGLHEVRARLVVDASGQARVLGRRLTDVEWHEELRNVAVWTYFDNCERLPGDEYTNILIEGLDGGWFWAIPIDKGTISVGYVTRSTTAGENGQSLEDLFHAERQRTTKLAKMLAGARQSAGFRTARDWSYHSNRFYGDGWVLVGDSAAFVDPLFSTGVALATLAGSTLAKILDRIVENPQIEEKALDRFQHVGAA

SEQ ID NO: 87901 - protein, 496 aa, Colwellia sp.
  REGION 1..496: note = tr|A0A2N1HP13|A0A2N1HP13_9GAMM Tryptophan halogenase; OS = Colwellia sp. Bg11-28 OX=2058305 GN=CXF79_01405 PE=4; SV = 1
MNSPIKKVVVLGGGTSGWISAALLKKILGSAIQLELVESDAIGTIGVGEATIPPIKHLNNVLGINEAEFLRETKATIKLGINFENWKSQGHSYLHSFGAAGKSLAFCHFHHLLKRANQLEDDSHLWQYDLNYLCAKAGKFAQIKSKDPIIELPYAYHFDAGLYAKFLRKFSEKIGVIRTEGLVEHVEQCPNSGHITSLKLKSGQTVTGDLFIDCSGFKGVLIQEKLRTGYEDWSHLLQCDRAIAVPSERLEKTLPYTRSIAHAAGWQWRIPLQHRNGNGLVYSSSHCSEQQAMDTIMGNLDSKAIADPKVIKFQTGRRYQQWNKNVIAIGLSSGFLEPLESTSIHLVQSAVVRLAHLFPHQGINSSLVDEFNKQSATEFEQIRDFLVLHYHATERTDSDFWQDMRHMKIPDSLAHKIEIFKQSGRLFREQNDLFTDSSWLQVMLGQGVVPQDYHPIANIMSDEKLAEMLRKVKEIKQAPIDKLPSHDEFLRIFCQQ

SEQ ID NO: 87902 - protein, 546 aa, Mycobacterium marinum
  REGION 1..546: note = tr|B2HL71|B2HL71_MYCMM Tryptophan halogenase; OS = Mycobacterium marinum (strain ATCC BAA-535 / M); OX = 216594 GN=MMAR_3632 PE=4 SV=1
MDDNLIKKVVVLGGGTAGWMTAAYLGKALQGNVEITVLEAPSVPRIGVGEATVPNLQRVVFDFLGIPEDEWMRECNASFKTAVKFINWRTPGEGSPVARHWQGRPDHFYHPFGLLPSPQHIPLSHFWARNQLKGGTSEPFDYACFREPAIMDAMKAPRYLDGTQATYYAWHFDAALVADFLRRFATKNLGVVHVQEKMTLAEKDSNGYITALRTEEGRRLDGDLFVDCSGFRGLLINEAMNEPFIDMNDHLLCDSAVATPIRHDDAANGIEPYTSAIAMKSGWTWRTPLLGRFGSGYVYSSQFASQDEAIRDFCNLWQLDPEDTPLNKIRFRVGRNRRSWVKNVVSVGLSSCFLEPLESTGIFLIYAALYQLAKHFPDRRFDPVLIDRFNRKIDTLFDETRDFLQAHFYFSPRTDTEFWRANKELTLTDSIKEKVAMYKAGVPVNPPIATESSYYSNFDAEFENFWTNGSYYCIFAGLGVLPDHTLPAINYQSEAIHEADALFLDVKQKQRHLVETLPSNYEYLLKLHGKDMEPNDPMEPEVTFVA

SEQ ID NO: 87903 - protein, 494 aa, Colwellia sp.
  REGION 1..494: note = tr|A0A2N1HG44|A0A2N1HG44_9GAMM Tryptophan halogenase; OS = Colwellia sp. Bg11-28 OX=2058305 GN=CXF79_07945 PE=4; SV = 1
MKDKIENIVIAGGGTAGWMAAAAFSKLLGKNLNITLVESDDIASVGVGEATIPPIKTFHKLLGINEQEVMRATHATFKLGIGFENWGQQGDHYIHSFGVTGKECWAGEFHHFWLHGLRKGIKADFGDYCYELQAAKANKFALSKNTPINYAYHLDATRYAKYLQEFSKKLGVIRVEGKIQQVNKGNKTGEINSLTLASGQVIEGDFFIDCTGFQGLLIEQALHTGFDDWSHWLPCDRAVAVQTKAVAAPLPYTRSIARKSGWQWRIPLQNRVGNGLVFCSKYCSDEEAISTLTANIEGELLTEPRIIKFNTGRRRKGWNKNCVALGLSSGFIEPLESTSIHLIMSGIIRLLRLFPFDGIHQSAINEYNNKLDSELNAVRDFIILHYKATQREDSNFWLHCKNMEIPPSLVHKMQLFKDTGRVFLDDGDIFRVDSWTQVMLGQGIMPTQYHKIAEIMNDKELENFMSNLKASITNAVEQLPSHTEFIQSYCKSDY

SEQ ID NO: 87904 - protein, 503 aa, Sphingobium yanoikuyae
  REGION 1..503: note = tr|A0A0J9FVN8|A0A0J9FVN8_SPHYA Tryptophan halogenase; OS = Sphingobium yanoikuyae OX=13690 GN=BV87_02395 PE=4 SV=1
MHADFPTSDRVVKRVVVAGGGTAGWVTATALVRHLGPLIDIILVESDAIGTIGVGESTVPTFRGFHQLMKIREDRFMAEAQATVKLGIEFKNWGQVGDRYIHPFGTIGLQWSWMADFHHFWLHARAQGFGGELGEYCLEWMAGEANRMSLSSSVAPSYAYHIDAARYARFLRSLAEPAGVKRVEGKIRNVELTPESGHIAALVLESGTRIEGDLFIDCTGFRSLLLSEALGVGFEDWGQWIRTDRAVAVQSTSDGPAQPYTSAIAHEAGWRWRIPLQHRDGNGFVFASDFMSDDEAHARLLAEIEGEPIVDPWLVRFKTGTRTRAWHKNCVGLGLAGGFIEPLESTSIHLMMAAVTRLIEDFPFHGFDDALLDHFNRKSRLEFENIRDFIILHYHVTQRDDSPFWDHCRTMEIPDSLKERLALWQENGRAYQLGHELFRVDSWSSVLLGQRMHPRGYHHVAAMMPEPQLREELARMRKDIAGVVAEMPSHREFLRRYCPAELA

SEQ ID NO: 87905 - protein, 505 aa, Pseudoxanthomonas dokdonensis
  REGION 1..505: note = tr|A0A0R0CKR1|A0A0R0CKR1_9GAMM Tryptophan halogenase; OS = Pseudoxanthomonas dokdonensis OX=344882 GN=ABB29_05770; PE = 4 SV=1
MTASGNPIGSIVVVGGGSAGWMAATALATYLGRQASVRLVESEEIGIVGVGEASVPYMKQFNAGVLGIDEFDFVARTQGTFKLGIQFNDWGQIGDSYLHGFGRIGQGIGPLPFHQFWLKLFLAGRARPIGEYSLPTLAAPLGKFMSSPGNVPQDSPLADIAYAYHFDAGLYARYLRELAERRGVQRIEGKISHALQRGEDGFIEAVVLESGEQVAGDLFIDCSGFRGLLIEQTLDTGYIDWTHWLPCNRAMAVPCATAGAPTPYTRATARTAGWQWRIPLQNRIGNGYVYSSEHISDDEAAATLLANLDGPALADPRPLRFTTGMRRKLWNRNVVALGLASGFMEPLESTSIYLVQSGIQRLLGLFPDRGFDPILERQFNEESAFEYESTRDFLILHYCATRRSDSAFWDYCRTMSIPDTLRRKIDMFRSGGRYFRTGDEFFALPSWVQVMLGQGIIPEGYHPIVDDMPEPALIEHVARVHRSIADGAAAMPAHQAYIDRYCRAS

SEQ ID NO: 87906 - protein, 568 aa, Variovorax paradoxus
  REGION 1..568: note = tr|A0A0H2M4H5|A0A0H2M4H5_VARPD Tryptophan halogenase; OS = Variovorax paradoxus OX=34073 GN=VPARA_16580 PE=4 SV=1
MTGTAQRCDAVIMGGGLAGLTLALQLKQRFQDIDVLVLERRTHPVPHAAHKVGESSVEIGAHYFDTVLGLKPHMDGAQLRKFGFRFFFSEGRRDIDQVTEIGASRYLAVPSYQIDRGIFENYLAEEAVRRGVRFDDAALVRRVDLAPDAEAPHRLEWTRGNETHSAEARWLIDACGRAGLLKRKLGLAQANAHDVNAVWFRIGERIAIDEWSDNATWRERCDPQARWLSTNHLVGAGYWAWLIPLASGSHSVGIVADPKLHPLDTIDTFEKAMQWFATYQPRLYDALDGKRHLLQDFAFLKHFSHGCKQVFSGRRWALTGEAGLFLDPFYSPGSDFIAISNTYITDLVAHDRAGRSVEARAQLYDQIYHSFYESTLALYQDQYPLFGDPEVLPVKVIWDYAYYWGVLSQIFFQQRLTDLMLLGSLKEELQHCQRLNLAVQQLLRSWSAASARRNAPVMLDQAAMPWFAELNRSLKDPRLGDAEFRARIRASVAQLRQLAGEILGRARADNADLSGCALPSVLEEDIAALPAGAQAGAMLFAALPDDSRKPRLPNFTERSSPVAPRARP

SEQ ID NO: 87907 - protein, 498 aa, Novosphingobium sp.
  REGION 1..498: note = tr|A0A258HZZ4|A0A258HZZ4_9SPHN Tryptophan halogenase; OS = Novosphingobium sp. 32-60-15 OX=1970410 GN=B7Y89_11455; PE = 4 SV=1
MPTLPRRIVIAGGGTSGWMAAAAIARTLGPVVEVTLVESDAIGTIGVGESTIPPLVAYNRLLGIGEAEFMKATQATFKLGIMFENWKDVGERYFHSFGGTGKDHWSAGFQHFWMHGKTQGHTEPYDDYCLELKAAEAGKFAHLPDDRINYAYQLDSSLYGAFLRTMAEADGCKRVEGRIAHVELDGATGDIAALLLDGGRRIEGDLFVDCTGFRALLIEGALHAGYDDWSHWLPCDGAVAIQTASVRPPVPYTRAIAHEAGWQWRIPLQHRAGNGIVYCSRYMDRDAALERLLGTIEGKTLTEPNFISFKTGARRKQWHRNCIAVGLSGGFMEPLESTSIHLIQRAVLRLLRMLPAGRPSERDIAEFNDQQFTDMEQIRDFLILHYKATERTDSPFWRHCASLEVPDSLEQKIELFRETGRVFRRNEELFAENSWVQVMMGQGIMPQSYHPVAAKLSNDELAYLLASLRDNVARTVAGMPEHFAYVSHYCGVREAQVA

SEQ ID NO: 87908 - protein, 510 aa, Pseudoxanthomonas dokdonensis
  REGION 1..510: note = tr|A0A0R0CJA6|A0A0R0CJA6_9GAMM Tryptophan halogenase; OS = Pseudoxanthomonas dokdonensis OX=344882 GN=ABB29_09385; PE = 4 SV=1
MANGRIRKVVIAGGGTAGWLAATALSHQFRDLLEITLVESEQIGTVGVGESTVPPIRTFHRFLQIDEQEFLRAVAGTFKLSISFENWRRPGERYIHPFGITGQSTRACGFHHFWLDSVRRGMASELGDFCLETLASREDRFTLSSQPQVNYAYHFDAGLYARFLRGIAEGYGLKRVEGKIREVRQDPQDGFVQALVLEDGQVLEGDLFIDCTGFRGLLIEQTLQSGYEDWHQWLPSDRAVAVQTESVGPPVPYTRAIAHEAGWRWHIALQDRVGCGWVYSSRHMSDDEATQKLLDAVGARPIREPWRVPFRSGRRLKAWNKNVVSLGLASGFIEPLESTSIHLSMSAVMRLVQLFPLDGIPQSLVGVYNEVGRAEMEHVRDFIILHYHANQRDEPMWRECRDMQLPPSLQIRLDAWRERAHAWQGADELFRVDSWTHVMLGQGIMPSQHHPLARALSDQDMQRLLHSIQQPMRQAVQQMPTQQAFIDSYCRSDPRVWATLSPVTPQATPA

SEQ ID NO: 87909 - protein, 509 aa, Sphingomonas melonis
  REGION 1..509: note = tr|A0A0D1MCP2|A0A0D1MCP2_9SPHN Tryptophan halogenase; OS = Sphingomonas melonis OX=152682 GN=SR41_01425 PE=4 SV=1
MTDAHPNPPLKTITIVGGGTAGWMAAALLSRLTLGAYTIRLIESEEIGTIGVGEATIPAIRTFNGLAGIDEFEMVRATQATFKLGIEFRNWGAPGDSYIHGFGKIGQDLYWLHCHQFWLKERAAGRAKHLDHYALNTLAARMNRFAMPDPSNPQSPIADIDYAYHFDASLFARFLRRRAEAAGVERIEGRIVAANRRGTDGFLDHVMLADGRRVDGDLFVDCSGMRGLLIGDAMGVGYEDWSEWLLCDRALAVPSARGTGPLAPYTRATAHGAGWQWRIPLQHRTGNGHVYASRFVSDEAAATTLLEHLDTPALGDPRPVRFRPGKRHRAWEKNVVALGLAGGFLEPLESTSIHLIQTGILRLIALFPGRGFNAADTDEYNRQTDFEYRDVRDFIIAHYKVTAREDTEFWRYLKHMAVPDSLTERLELFRSSARFFMHAKAELFREESWVQVLLGQGLQAHHDPMVDMIPAEQTTAFLKDVEDVVADVAAGLPTHEAFIARHCQAPKVG

SEQ ID NO: 87910 - protein, 544 aa, unidentified
  source 1..544: note = Idiomarina halophila
  REGION 1..544: note = tr|A0A432XZQ6|A0A432XZQ6_9GAMM Tryptophan 7-halogenase OS=Idiomarina halophila OX=1449799; GN = CWI69_01350 PE=4 SV=1
MRKRKILIVGGGSAGWMTAAYLNGALNQRGEAPRVEIELLESPDTPRISVGEATIPSMRHLLAVVGVDEMEFMRVTEATFKQSIKYVNWVHNDNSFYHHPFSSMRTQPIDYAGQNWLMSDRSIPFMETCSIQPLVCEWGRAPQMFGQWQMGARLNYAYQMNAQKFADYLCDFSVARGVQHTLANLSAVQKHPNGYIKSVLTDQGQTLEADVFVDATGFRALLLEKEMGVDFEDFGKYLLCDRAVTMHLPYDKYYPGSVRPYTTATASSNGWIWDIPMQTRRSIGYVHASAFIDEAAAEQELRAYQGPGCEDEPCRFIPFKAGRRHQQWAGNCVAIGLSGGFIEPLESTGLYLSDLGAVLLAEHFPWRDEDMPRLAARYNRLMTNRYYEILDFINMHYCMTKRTDTDFWRTVQENEHITDRLLAKLNFWRTKPPSAHDFQDQWFAGMASQDTTATGSFADSRTPIDTGGLWNHESYECILYGMEFLQAECDRWFGEQRPPTKVHPMIMQRLQMARQMLPPHEMWLQRALGMADYPTATRPKGWVV

SEQ ID NO: 87911 - protein, 491 aa, Sphingomonas melonis
  REGION 1..491: note = tr|A0A0D1L0D3|A0A0D1L0D3_9SPHN Tryptophan halogenase; OS = Sphingomonas melonis OX=152682 GN=SR41_01720 PE=4 SV=1
MTPPPPSIAILGGGTAGWMAACLMAKAWPQARITVIESPDIGIVGVGEGSTPQLKALFDTLGLAEADWMPAADATYKAGIAFHGWADDTPAYFHPFAGQIDLHTQGAFFASTRARRHGADVPAHPDRFFLNARLAEAGRAPIAPAHFPFRIGYGYHFDAHKVGHVLRDAALARGVVHLPRRVHDVVVDAAGQVAALTLDEGDAVHAALFVDASGFASVIAQQALGVPFRSFANTLFADRAVVMPTPRQGALPVQTKATALSAGWAWDIPLTSRTGNGYVYASRYLSPDAAETELRRHLGLLDADVAARHLSMKVGRVETSWTANCLAIGLAQGFIEPLEATALHIVQATIEGFIGAYQAGSRDAFNAAIARRYDGIRDYIVAHYRLNRRSGVFWRDVAANDDLSDDLKAIMTAWFTGGDVAAVVEGRGLAGYYAPMSWEVLLAGYGTFPDATRLRTAPPVADIAAIDTLLSGCLLNFPDQQAALDGHRRMP

SEQ ID NO: 87912 - protein, 505 aa, Caulobacter sp.; identical to SEQ ID NO: 84094
  REGION 1..505: note = tr|A0A0Q6V759|A0A0Q6V759_9CAUL Tryptophan halogenase; OS = Caulobacter sp. Root343 OX=1736520 GN=ASC70_05220 PE=4; SV = 1

SEQ ID NO: 87913 - protein, 160 aa, Mycobacterium ulcerans
  REGION 1..160: note = tr|X8FF79|X8FF79_MYCUL Tryptophan halogenase family protein OS=Mycobacterium ulcerans str. Harvey OX=1299332; GN = I551_2012 PE=4 SV=1
MRRFATKNLGVVHVQEKMTLAEKDSNGYITALRTEEGRRLDGDLFVDCSGFRGLLINEAMNEPFIDMNDHLLCDSAVATPIRHDDAANGIEPYTSAIAMRYGWTWRTPLLGRFGSGYVYSSQFASQDEAIRDFCNLWQLDPEDTPLNKIRFRVDATAGRG

SEQ ID NO: 87914 - protein, 503 aa, Sphingobium yanoikuyae
  REGION 1..503: note = tr|A0A084ELW6|A0A084ELW6_SPHYA Tryptophan halogenase family protein OS=Sphingobium yanoikuyae OX=13690; GN = CP98_02339 PE=4 SV=1
MHADFLTSDRVVKRVVVAGGGTAGWVTATALVRHLGPLIDITLIESDAIGTIGVGESTVPTFRGFHQLMKIREDRFMAEAQATVKLGIEFKNWGRVGDRYIHPFGTIGLQWSWMADFHHFWLHARAQGFGGELGEYCLEWMAGEANRMSLSSSVAPSYAYHIDAARYARFLRSLAEPAGVKRVEGKIRNVELVPESGHIAALVLESGTRIEGDLFIDCTGFRSLLLGEALGVGFEDWGQWIRTDRAVAVQSTSDGPAQPYTSAIAHEAGWRWRIPLQHRDGNGFVFASDFMSDDEAHARLLAEIEGEPIVDPWLVRFKTGTRTRGWHKNCVGLGLAGGFIEPLESTSIHLMMAAVTRLIEDFPFHGFDDALLDHFNRKSRLEFENIRDFIILHYHVTQRDDSPFWDHCRTMEIPDSLKERLALWQENGRAYQLGHELFRVDSWSSVLLGQRMNPRGYHHVAAMMPEPQLRDELARMRKDIAGVVAEMPSHREFLRRYCPAELA

SEQ ID NO: 87915 - protein, 503 aa, unidentified
  source 1..503: note = Idiomarina halophila
  REGION 1..503: note = tr|A0A432XWR7|A0A432XWR7_9GAMM Tryptophan halogenase; OS = Idiomarina halophila OX=1449799 GN=CWI69_07250 PE=4 SV=1
MTHPYQIVILGGGSAGWMTAAALSKVLDQQKYRITLVESAAIGTVSVGEATIPGIREFNQLLEINEDEFLRETNGSFKLGIAFENWQNIGDFYMHPFGPYGVTLHGVHFHHYYLRHQREQGEADAMPLSDLNLEWRAAIEHKFTRPIADKRSPLGHIKYAYHFDALKYAQYLKKYATARGVVALDDRMVEAKQQVKHGPIDALMLEKNGELAGDFFIDCSGFKALLIGEALDVSYHDWRKWMPCDSAVALPGQHDNADILPYTRSIAHHEGWRWRIPLQHRTGEGWVYSSRFTDSEKAEREFRDTIGNHDSKANHLRWINGRRDQAWRHNCAAIGLSAGFIEPLESTGLQLTQSGIMRLISLLPGQGELSERAAAFNRFTAEEITNIRDFVMCHYKLTNRDDSEFWRYCRDMEIPDSLQQRLDLYQENASVFRNSNNELFNEISWFSMFQGQGLRPANVHPLAEQMPAATLQQHLQTIQRVFAQSVAQLPTHEQFIKEHCKAP

SEQ ID NO: 87916 - protein, 513 aa, Pseudoalteromonas lipolytica
  REGION 1..513: note = tr|A0A0P7ELN7|A0A0P7ELN7_9GAMM Tryptophan halogenase; OS = Pseudoalteromonas lipolytica OX=570156 GN=AOG27_08515; PE = 4 SV=1
MQKNEVKKVVILGGGTAGWLSAGLIAAQPHLTHNAQITLIESPDIATIGVGEGTWPTMRQTLKTIGISESEFIQRCDASFKQGSRFDGWCDDEGDAHYYHPFSLPVAYQQLNIAPYWFANKDAVSFSHAVASQTYLCDHHKAPKNHLHSAYHGEANYGYHLNAGKFAMLLQQHCTTKLNVEHIVSHVECINSDEDGYISSLQTRDHGTIAGDLFIDCSGTHAKLLHQHYGIELIEQHDVLFNDRAVAVQVPYLNPQQEILSYTKATAQDAGWIWDIGLQSRRGLGMVYSSRFANSEDAKQALSQYIAKTQPGTAQNELIFREISFTPGYRRRFWYKNCLAIGMSAGFIEPLEASALVMVELGLNNLLANFPTHRAAMPTLAKRFDEQCHYRWKRIIEFLKLHYVLSKRTSPYWQAHKEANSIPLQLQENLALWQYQSPWLNDFDRAQEVFSAASYQYVLYGMKQLPQFPVLAMPAAIIEHFSANQQQAKRGLQQLPTNRELLNHIQQFGIQPI

SEQ ID NO: 87917 - protein, 489 aa, Streptomyces sp.
  REGION 1..489: note = tr|A0A1Q5LS16|A0A1Q5LS16_9ACTN Tryptophan halogenase; OS = Streptomyces sp. CB03234 OX=1703937 GN=AMK26_15845 PE=4; SV = 1
MTATYLKAAFGERIQVTLVESEQVSTIGVGEATFSTVRHFFRFLGLAEHEWMPECHASYKLAIRFEDWRAEGHYFYHPFERPRTVNGFSLAEWWQHLRPGDRFDRDASVLAALCDARSSPKYLDGTLFEMAGEDPTQFPYAYHFDATLLARFLRGYGTRRGVRHVVDDVLDVRLDERGHIRNVLTKEHGELAGDLFVDCTGFRGMLLNKALGVPFLSYQDSLPNDSAVALRVPVDVARRGMRPCTTATAQAAGWIWTIPLLDRLGTGYVYASDYCSPEEAERTLREFVGPEADDVTANHIRMRIGRSAQSWAGNCVAIGLSSGFVEPLESTGIFFIQNGIEQLVRYFPDGRDDERLRQAYNRQVGHVMDGVREFLVLHYYAAARDDNQYWRDAKTRPMPDALAERIEQWHTSLPDADSVYPYFHGFEPYSYTAMLLGLGGIRTRPLPVLARLDGTDAVKEFHRIRQQADSLVDRLPSQYDYLAQLRGGA

SEQ ID NO: 87918 - protein, 514 aa, Pseudoalteromonas sp.
  REGION 1..514: note = tr|A0A3R8SDJ0|A0A3R8SDJ0_9GAMM Tryptophan 7-halogenase OS=Pseudoalteromonas sp. J010 OX=998465; GN = EAG18_18850 PE=4 SV=1
MVKKVLIVGGGTAGWLTAARLAKQFIDSGSDIEVSIVESANIPTIGVGEGTWPTIRDTLKTLDICETEFLNTCDATFKQGAKFVNWKKVSDENEDIYYRHLFTSLYDPWEFNLAPFWSSGVAGELPYSEAVSMQGDVCEQGKAPKNITTPQYEGLQGYAYHLDAAKFANLLKDKAVNKMKVRHIIADIGHVSVQSDGSIEYVETVTGEKLHADLFIDCTGFKCLLLGDAMKVPFVDLSHTLFVNRAVALQVPYENPNSPIACETISTAQSEGWIWDIGLQSRRGIGFVYSDKYISKDCAEQRIREYAGINTDGISAKHLEFQVGYREKFWHKNCVAIGLSAAFVEPLEASAIFLVEAAVNMLCDKFPHSQHEFEFIEKQFNRSFLFRWNKTIEFIKMHYVLSQRTDGQFWLDNKNINSIPDELRSKLAHWQNNPLSKYDFASAFEPFVMDSYQYVLYGMGFKTEVDSSRLSAEKTKKARAMFAEVNKYRTIVQENLPNHRELIEKLKEYKFPKV

SEQ ID NO: 87919 - protein, 515 aa, Sphingomonas melonis
  REGION 1..515: note = tr|A0A0D1K8D4|A0A0D1K8D4_9SPHN Tryptophan halogenase; OS = Sphingomonas melonis OX=152682 GN=SR41_02115 PE=4 SV=1
MTLPVPDHAIRNIVIVGGGTAGWMAAAAFSRLLNTGYTRVTLIESEEIGTVGVGEATIPPLLNFNGMLGIDENEFLAATAGTFKLGIEFRDWGAIGDRYIHPFGTFGQDLQGISFHQLWLRERSRRAIPDISAWSMSAQAAARGRFGRAREDARSPVRELFYAYHFDASLYARYLRGYAERGGVTRIEGRIADVRLRGEDGYVEALTLADGRQVAGDLFIDCSGFRGLLIEEALHTGYESYAQWLPCDRAVAVPCALPNAREPDPYTRATARAAGWQWRIPLQHRMGNGYVYCSDLLSDEAAEFDLLASLEGEPLGDPRRLRFTAGRRRQSWNRNVIALGLSSGFIEPLESTSIHLVQAGIQRIVAMFPDTRFDPAERDEFNRQLHDLYEDIRDFIILHYAQTRRTDTPFWDRVRTMPLPDSLTRKLELWRGKGRLFREGYDLFSVPSWVAVCLGQGLVPSTWEPAADALDETLVAEAMETMRRGYADTAERLPTHGDFLRMVAPSPLANWGQSR

SEQ ID NO: 87920 - protein, 537 aa, Colwellia sp.; identical to SEQ ID NO: 82612
  REGION 1..537: note = tr|A0A2N1HL50|A0A2N1HL50_9GAMM Tryptophan 7-halogenase OS=Colwellia sp. Bg11-28 OX=2058305; GN = CXF79_06530 PE=4 SV=1

SEQ ID NO: 87921 - protein, 517 aa, Cellvibrio mixtus
  REGION 1..517: note = tr|A0A266QC54|A0A266QC54_9GAMM Tryptophan halogenase; OS = Cellvibrio mixtus OX=39650 GN=CBP51_07995 PE=4 SV=1
MSKSVLIVGGGTAGWICAAYMARMLAADTPGGVTITLVESDEIGILGVGEGTFPIIRKTMSRIGLDESELIREADATFKQGIRFNNWKKNPADDPHDTYFHPFQVASQHTDMDLLPYWLLGVAGDVPWAEACTVQERVVDAKLAPKLITHPNYNAPLNYAYHFDAGKLAQVVCRQAMAMGVKRLIDTIDDVKVDEHGIASVQGRTHGELKADLYIDCTGFRARLIGEALGSGFTSYKDQLFCNRAVAMQVPYDRPDAPIPSCTYTSAQDAGWIWDIGLHNRRGVGYVYASDYCSDDEALATLKRYIGPAADNLQHRKLAFEAGFRKTQWHKNCIGVGLSVGFIEPLEATGISFAEVAALMLCNLFPWSGDYERSAQQFNQAMTKRFEHVIDFIKLHYYLSERTDTAFWRDNRAPASASDYLKGKLEQWRHRPPSFLDIDASHDIFDENSWQYILYGMGFKTDISARAGALRFYDDAKREFESIRQQSNKAMTAVPNHRDLINEVVARGFRNASGGQR

SEQ ID NO: 87922 - protein, 893 aa, unidentified
  source 1..893: note = Nostoc linckia
  REGION 1..893: note = tr|A0A1Z4LA69|A0A1Z4LA69_NOSLI Tryptophan halogenase; OS = Nostoc linckia NIES-25 OX=1091006 GN=NIES25_46510 PE=4; SV = 1
MADFIDNIPQVPRINPNAHLILSEAGEVCSWVGSEVFVLEGIQPNIIRQLLVLIDGVRPLEGIYAELADFGDVYDGLRLRNYLNEIVSALSKLNIIQEVVTQAAPQNHRWELPIVSKQVGQKAIALLGNHQLLDTLDRAFAAAGFENRRAFYLKNFASCQTPEFRAIGQERILVNGTSKYLSSLAPTAYQDSLDSVSISGLSQLFKEFDFVVCALEGIPFQALLDVNKSALASGTPCLFVTASQETALIGPTVIRGATACFGCRVIALEELPPVFEDIWPQLSTPIVAKADSGILFSVAQACLEEAISLLGPTLTPIRATNVLKITQQGKDTIKRLLPSSKCHECAPRLDEPLGVMERSAIAAAAEEIGRIWPNSPKAAIPPASDGYRTVGILGGGTAGYLTALAFRAFRPDIKVTLLESSAIPVIGVGEATTPELVKFLHSPRFLGLDIVDFYQRVRPTWKLGIKFQWGLPDDYEFTFPFQRGRLLESLIYDETLNNQSLGAMLMSGDRVPIFDRGDGTPLSLLHQIRWAYHLDNRRFVRYLQEEAMAAGIEHIDVQISDAQISADGETITHLITEDGQKLSYDLYIDCSGFRSLLLEKLGSKFVSYQDTLSTDRAIAATVPHNGTVKPYTLAETMNNGWCWNIPFEDADHRGYVFSSAFCSDDQALEEMRAKNPGMGDPWVVKFRSGRHEHFWKGNVVAIGNSYAFVEPLESTAIHTIVLELELLLTNFPASKRDEGIKSALNRKMSDRWDALRWFLGIHYKFNHRLSTPFWQAANRDTDISGAIERLALFTERAPLSYRNSLFYTLHPSDFFSDDHSYDTLLAGQQVPARFMEPVEDRATWQRQMAILKGLASTAMPQHEALWCLRDKRPDLLYDFAKRRDSWLHTWLPA

SEQ ID NO: 87923 - protein, 495 aa, Shewanella sp.
  REGION 1..495: note = tr|A0A2N7DV52|A0A2N7DV52_9GAMM Tryptophan halogenase; OS = Shewanella sp. 10N.286.48.B5 OX=1880834 GN=BCU57_00275; PE = 4 SV=1
MNKKITNVVIAGGGTAGWMAAAAFAKLLGKNINVTLVESDLIPTVGVGEATIPTLHIFHDLLKINEAEFMAATNATFKLGISFENWRDVNQDYMHSFGYIGQSCWAAGFQHFWLKGVKQGVASDIGDYCPEHVASRVGKFAVLANHDRNHAFHTDAGLYARFLRQFSEKYGAKRIEGTISKVNLNEQNGFIESLTLADGQQIAGDLFIDCTGFKGMLIEETLHTGYDDWRHWLPCDSAIAVQTKQTKPLVPYTRSIAHPCGWQWQIPLQNRMGNGLVFCSQYLSDDDAKSLLLENIEGELINEPRVIKFRTGTRRKHWNKNCVAIGLSSGFIEPLESTSIHLIQQSIVRLMQNLPTTAMESGVVDNFNQKMRIEIENIRDFIVLHYHVTERKDSEFWRYCKQMDIPESLQKRIDLFKQSGQVYKTDQELFGEASWLQVMLGQGLMPEQYHPIVDNMSDDELAQFLGTIKQSIARRVNSLPNHVDFINNYCKSTIS

SEQ ID NO: 87924 - protein, 528 aa, Sphingobium chinhatense
  REGION 1..528: note = tr|W1KP68|W1KP68_9SPHN Tryptophan halogenase; OS = Sphingobium chinhatense IP26 OX=1346790 GN=M527_26995; PE = 4 SV=1
MSVDIPSLFMGNFDMIHPVRNIVIVGGGTAGWLTAGVIAARHRSRIGNGFTVTLVESPNTPIIGVGEGTWPTLRTTLSRMGISETDLFRECDAAFKQGARFARWTTGTPDDGYYHPLMLPQNFGQVNLAPHWLAGDGDESFCDSVCSQGRICDDGLAPKTIATAEYDALANYAYHLDAGKFAPFLQRHCTEKLGVRHVQADVEQVLMKEDGDIRAIRTTQAGEIEGDLFVDCTGFKALLIEGAMKVPFRDCNDVLFCDTALAMQVPYDRPDSPMASHTISTAQSAGWIWDIGLPTRRGIGHVYSSNHISDEEAERELRAYIGPPAEGLSARKIPIRSGHRETFWKGNCVAVGLAAGFLEPLEASAIVLIELSAKIIAEQMPACREVMDIVASRFNATTHYRWGRIIDFLKLHYVLTKRTDSDFWRDNVREETIPDRLQELMLLWRYQSPWFLDEFDRVEEVFPAASYQYVLYGMGFRTEVDRPALARDAHLADRARRENAAMTAKLRAGLPRHRDLIDKIVTHGLQPV

SEQ ID NO: 87925 - protein, 533 aa, Streptomyces sp.
  REGION 1..533: note = tr|A0A429U9M3|A0A429U9M3_9ACTN Tryptophan 7-halogenase OS=Streptomyces sp. WAC05950 OX=2487419; GN = EF904_02430 PE=4 SV=1
MTSTDTRLQKVVILGGGTAGWMTAAYLGKALQGTVDITVLEAPTIPRIGVGEATVPNLQRSFFDYLGIAEDEWMRECNASFKMAVRFVNWRTDGQGESTARELPGGGPDHFYHPFGLLPDYDQTPLSHYWFKRKYEGRTTEPFDYACFREPPVMDAMKAPRWLDGRPATRYAWHFDAQLVADFLRRFATEKQGVNHVQDEMVRVEQDSRGYVTTLHTKGGLALDADLFVDCSGFRGLLINQALQEPFIDMSDHLLCDSAVATAVPHDDEANGVEPYTSAIAMSSGWAWKIPMLGRFGTGYVYSSKFADQDTATREFADMWGLDVEETKFNHIRFRVGRNRRAWVKNVVSIGLSSCFLEPLESTGIYFITAAIYQLAKHFPDKTFNEGLVNSFNHEIEVMFDDTRDFIQAHFFYAPRNDTPFWQANKKLVLPENIKQKISAYKAGLPINSPITDESTYYGNFEAEFRNFWTNGSYYCIFAGLGLEPDAPLPTLAHRPESVAGAEPLFDTVKRQQQNLLETLPSAYDYLRQLHGA

SEQ ID NO: 87926 - protein, 504 aa, Pseudoxanthomonas dokdonensis
  REGION 1..504: note = tr|A0A0R0CN88|A0A0R0CN88_9GAMM Tryptophan halogenase; OS = Pseudoxanthomonas dokdonensis OX=344882 GN=ABB29_01525; PE = 4 SV=1
MPETTDSNACNRPIRRVVIAGGGTAGWMAAAALSRTLGKVLDIKLIESDEISTVGVGEATIPTLVTFHRLLDINEQEFMAATQATFKLGISFENWRDVGQDYIHSFGITGKDHWSAGFQHFWLKGRERQLASDYGDYCLELKASQQNRFAHLPKGGMNYAFHMDAGLYARYLRRFSEGFGAQRIEGKIVEVCKDDASGHIRSLMMDSGEEIEGDLFIDCTGFRGLLIGQTLGAHYQDWSQWLHCDSAIALQTRSVGEAIPLTRSIAREAGWQWRIPLQHRVGNGIVFSSQHWDDEQALRTLRDNIEGEVLTEPRVIRFKPGQRSETWIGNCVALGLSSGFLEPIESTSIHLIQRGIVRLLQMFPASGISPADVAEYNQQTRNEIEHIRDFIILHYHVTQRRDSAFWRGCREMEIPASLQHRIDLFRQTGRVFRVPNELFAENSWVQVMLGQGLVPEQRHPVADLMDDGELARFLDGIRDRVNKTVAQLPAHQTYVQTYCPGERI

SEQ ID NO: 87927 - protein, 512 aa, Pseudoxanthomonas dokdonensis
  REGION 1..512: note = tr|A0A0R0CN86|A0A0R0CN86_9GAMM Tryptophan halogenase; OS = Pseudoxanthomonas dokdonensis OX=344882 GN=ABB29_01510; PE = 4 SV=1
MDAVRSIVIVGGGTAGWLTAAVLAARHGPAGIGVTVVESPDVATIGVGEGTWPTMRDTLHSIGVSETDFLRQCDASFKQGSLFRGWVDGQPGDQYLHPFVLPHGHTETNLVDGWLASGGDVAFADLVSFQPHLCARGKAPKQASTPEFAAVANYAYHLDAGRFATFLRQHCTDKLGVSHVADHVLAIHAADNGDIDALQLKSGGALHGDLFIDCTGMQSLLLGQHYGVALIEQKHVLFNDRALAVQVPYRDPGQEIASQTISTARQSGWIWDIGLPSRRGIGHVYSSAHCDDAAAEQALLRYLHEHGAPDDLPTPRKLSFQPGYRQRFWHRNCVAIGLSAGFIEPLEASAIALVELSAAMLADRLPADRAEMDLLARRFNDCFEYRWQRVIEFLKLHYLLSRRQDSDFWRENRRPEGIPPRLQEQLLLWRHHPPSRHDFNQVEEVFPSASYQYILYGMGFMPQTKVDASSAAVRKAQDYFREAAALAARMIPALPGNRALLEHVQQQRLPRI

SEQ ID NO: 87928 - protein, 525 aa, Colwellia sp.
  REGION 1..525: note = tr|A0A2N1HP22|A0A2N1HP22_9GAMM Tryptophan halogenase; OS = Colwellia sp. Bg11-28 OX=2058305 GN=CXF79_01255 PE=4; SV = 1
MSVISSQPKKVIILGGGSAGWMAASLIHKAWAKKGTEILLIESDVISKIGVGEGSTPSLRLFFKHLGISEQEWMPECNATYKCGISFPGWTSIDNPAYADYPAYIHPFYSQADWKTGNAFMHNARLRREGIDVPAHPDDYWLQSYLAKNFKAPIAFQQLRDEMDYGYHFDSALVGNFLKKRLLSMGLSHLIDTVDDVNLSDSGQISSIITKDNGAHSADLFIDCTGFAARLIGQALKVDFIDYSDCLFNDRAVAIQTPIDCSKDIPSNTTSTALSSGWAWQIPLSNRYGNGYVYSSKYITDDEAEKELREHIGPSSKDQDARVIKMRLGRVSQHWHKNVLAVGLSQGFIEPLEATALMLIQHTVESFISSYEDMQGAKREVIAQQGIFNNQLNEVFESIKDYIVAHYRLNSRTDSQYWCDNRENKNNSARLTALLSAWHTPGEDFEAELHRHNAELTYFAPSWYCLFAGKGHFPTSLNKPSSNTKVAPVAEIIKYCHQVSQQFYNHNEQLAKVYDERWHKLEAHR

SEQ ID NO: 87929 - protein, 537 aa, Pseudomonas sp.; identical to SEQ ID NO: 82294
  REGION 1..537: note = tr|A0A1K1TG12|A0A1K1TG12_9PSED Tryptophan halogenase; OS = Pseudomonas sp. NFPP09 OX=1566211 GN=SAMN03159479_00172; PE = 4 SV=1

SEQ ID NO: 87930 - protein, 495 aa, Shewanella sp.
  REGION 1..495: note = tr|A0A2N7DSI0|A0A2N7DSI0_9GAMM Tryptophan halogenase; OS = Shewanella sp. 10N.286.48.B5 OX=1880834 GN=BCU57_06115; PE = 4 SV=1
MNNNKIKHIVIVGGGTSGWMTAAMLVKLFKQQLYITLIESEDIGTIGVGEATIPPLQIFNNVLGIKEADFIKQTQATFKLGIEFENWGNQQQSYMHAFGNVGKDIGFTQFHHYWNKSKPTDINHFWDFSLNYQAAKNNKFSIMDRVQGTPLAGITHAYHFDASLYAKLLRNYSEKLSVKRIEGLITSTTLANDGSIESVSLKDGQIISADFFIDCSGFAALLIEKQLDVGYENWQHWLPCDSAYAVPCERTEALTPYTRSIAHDASWQWRIPLQHRTGNGLVYCSQYLSDEQAKALLLENLDGKPLAEPRKINFKTGRREKQWHKNCVAIGLSSGFLEPLESTSLHLVQSAIIRLSKLFPHNGVQQANVDEFNRQSKLEFEQIRDFIILHYHLNQKETHNDLWQQCRDMAIPDSLKQKIELFKATGTVSRYQDELFTEAAWIQVMLGQGIMPNDYNPLANSVSDADLHDYLGNIKQIINRAVAAMPSHQQFIDKL

SEQ ID NO: 87931 - protein, 502 aa, Cellvibrio mixtus
  REGION 1..502: note = tr|A0A266QD72|A0A266QD72_9GAMM Tryptophan halogenase; OS = Cellvibrio mixtus OX=39650 GN=CBP51_13020 PE=4 SV=1
MTHESKKPQKILIVGGGTAGWMTANLLAARWGGIEIGLLESSDIGIIGVGEGSTPHLKFFFDEVGIEESEWMPRCNATYKNGISFVNWSSIPGFESYFHPFPAQTDDIFTVPAFLNSIHARMQGYNVNAHPDSYFLETYITQKNLGPIPTENFPFGVAYGYHFDSGLLGQYLAEKAVSRGVKRIFGTVTEVLMNESGELSSVRLDDDSQLAADFFIDCSGFKSLLLQSALKVTYKSFKENLFNNAAVVMPTAMAEIIPPETKSTALSNGWAWKIPLTNRFGNGYVYSADYITPDQAEAELRQHLGMLDSDVAARHLQMKIGRVEKHWAKNCVAVGLSQGFIEPLEATALALSFNTVSAFIKCYEKGAYTNQYEDEFNKEMNARFDGVRDYIVCHYKANQRKDTDYWKDNAANTHLSDVLKQLLHFWQAGGDFAKNMYANNLIGSYQPKSWACLLAGYGVFPPLRASENNDHYKSPHDMAQLADFIRRCGLNFKKHNELLRLT

SEQ ID NO: 87932 - protein, 515 aa, Novosphingobium sp.
  REGION 1..515: note = tr|A0A258HY24|A0A258HY24_9SPHN Tryptophan halogenase; OS = Novosphingobium sp. 32-60-15 OX=1970410 GN=B7Y89_11440; PE = 4 SV=1
MNAEIQRVIIVGGGTAGWLSACQLAAKRPELSVTLVEAPDIPTIGVGEGTWPTMRGTLASIGIDEAEFISCCDASFKQGSRFDGWVTGGADDSYLHPFTPPPPYATEALVAAWAARNTECALPYADAMTAQAAAVARNLAPRQAAMPGYAGALNYAYHLDAGKFAALLMRHATRRLGVTHIATRVTDVTKSANGNLAVLVTDDAGTIPGDLFIDCTGLAGLLIGKHCGVDWIDRSDVLFNDTALAVQVPVLPDSAIASATIATAHEAGWIWDIGLPGRRGIGCIYASRFMDENGARAVLADYIAKAVPGADIAGLSPRKISFPTGHREQFWRGNCVAVGLSAGFLEPLEASAIVMIELSLQALCANFPQSRAVLPIHAERFNALFRYRWDRIIEFLKLHYLPSQRSEPYWLAQRDPAHVPPRLAALMELWRDQPPSDWDFPQAHEIFPAESHAYVLYGMGFSPPPFAGANAGNIAEARQRLDEVAHRSRALASALPTNSALLPKACVEPVLESLP

SEQ ID NO: 87933 - protein, 538 aa, unidentified
  source 1..538: note = Burkholderia dabaoshanensis
  REGION 1..538: note = tr|A0A2N7VMZ2|A0A2N7VMZ2_9BURK Tryptophan halogenase; OS = Burkholderia dabaoshanensis OX=564714 GN=C0Z18_16445; PE = 4 SV=1
MSKPIKNIVIVGGGTAGWMSASYLVRALEQQANITLIESAAIPRIGVGEATIPSLQKVFFDFLGIPEREWMPHVNGAFKAAIKFVNWRKAPDGSRDDHFYHLFGNVPNCDGVPLTHYWLRKREHGFKQPMEYACYPQPDALDRNLAPCLPDGTRQMSHAWHFDAHLVADFLKRWATERGVTRVVDEVVQVHLDDRGFISSLSTKEGRTLEADLFIDCSGMRGLLINQALKEPFIDMSDYLLCDSAVASAVPNDDAHVGVEPYTSSIAMNSGWTWKIPMLGRFGSGYVFSSKFTSRDQATADFLDLWGLSDKQPLNQIKFRVGRNGRAWVNNCVAIGLSSCFLEPLESTGIYFIYAALYQLVKHFPDTSFDARLTDAFNAEIVHMFDDCRDFVQAHYFMTPREDTPFWRANRHDLRLSDAIKEKVERYKAGLPLTTTSFDDSTYYETFDYEFKNFWLNGNYYCIFAGLGMLPDRSLPLLRHRPESIDKAEAMFARIRREAERLRTSLPTNYDYLRSLRDGGAGLARNQPGPTLAAPEIL

SEQ ID NO: 87934 - protein, 496 aa, Colwellia sp.; identical to SEQ ID NO: 82639
  REGION 1..496: note = tr|A0A2N1HG27|A0A2N1HG27_9GAMM Tryptophan 7-halogenase OS=Colwellia sp. Bg11-28 OX=2058305; GN = CXF79_07810 PE=4 SV=1

SEQ ID NO: 87935 - protein, 505 aa, Erythrobacter longus
  REGION 1..505: note = tr|A0A074N2F7|A0A074N2F7_ERYLO Tryptophan halogenase; OS = Erythrobacter longus OX=1044 GN=EH31_05330 PE=4 SV=1
MGEPRPLQKIVIVGGGSAGWMTAAALSDALGTACNITLVESEAIGTVGVGEATIPPIRTFNQRIGIDEATFVKETAGSYKLGIQFVDWSRKGHSYFHPFGQYGAEFDKVPFYHYWMRESLAGRMEGPIDDFSMCWAMAKAGKFAHPVPDRRKIQSTFDYAYHFDAGLYAAYLRRLSEARGVTRIEGRVTDVTQRAEDGFIQSVTLDSGEVVSGELFIDCSGFRGLLIEGTLKAGYENWQHWLPCDRAVAVPCSKGEEITPYTRSTAKEAGWQWRIPLQHRTGNGYVHCSEFISEDEATATLMGSLDGEPQADPRTLRFVTGMRRKFWDKNCVAIGLSAGFMEPLESTSLHLIQYGILRLLALLPDNAMSPLLAREYNRQTASEYERIRDFLILHYKATTRDDTELWRYCSAMEIPDSLQYKVDHFREYGLLVSDERELFANPSWIAVYLGQDITPKRAPAITQMREGVPVSERMGMVAAAMEGAVAEMPAHADFLRQFCPSPLAV

SEQ ID NO: 87936 - protein, 498 aa, Shewanella sp.
  REGION 1..498: note = tr|A0A2N7DMI0|A0A2N7DMI0_9GAMM Tryptophan halogenase; OS = Shewanella sp. 10N.286.48.B5 OX=1880834 GN=BCU57_13815; PE = 4 SV=1
MNIPNKPIKKVVIAGGGTAGWMTAAALTKLLGKNLEVVLVESDEIGTVGVGEATIPTLHIFHRLLGIKEQDVMAATNATFKLGISFENWHDVGKDYIHSFGFLGKDCWACGFQHFWLKGQQRGLVSEIGDYCTEHLAAREGRFAVLPNQDYNHAYHMDASLYAKFLRVIAEQHGIKRIEGKISAVQQHHDNGHISALTLMSGEVIEGDLFIDCTGFKALLIEQTLNAGFDDWSHWLPCDSAIAVQTKTTSKPIPYTRSIARESGWQWRIPLQSRTGNGIVFCSKYISDDEAKATLMENIEGEPLTEPRVIKFRTGSRRKTWDKNCVAIGLSSGFLEPLESTSIHLIQRGIVRLLQMFPSQGIVEEDINEFNQQTRTETENIRDFIILHYKVTDRVDTRFWRHCKSMDVPASLQHRIDMFDASGKVYKHGNELFGESSWIQVMMGQGLAPKQYHPIVDMMEDAELESFLGNIKAKVKHKVANLPDHYEFVQHYCKSKML

SEQ ID NO: 87937 - protein, 509 aa, Colwellia sp.
  REGION 1..509: note = tr|A0A2N1HP54|A0A2N1HP54_9GAMM Tryptophan 7-halogenase OS=Colwellia sp. Bg11-28 OX=2058305; GN = CXF79_01260 PE=4 SV=1
MSMKKIVVVGGGTAGWLAANHLGKKFKDNAEITVTLIESPDIPPIGVGEGTVPKIRQTLSSFGISETQFIRECDVTFKQSIKFVNWMDKQKHGSDNFFHHLFDAPDKFSEDLTPYWLKHGQGIQYADMLSPQHSACEYNKAPKSITTPEYEGTLGYAYHLNAAKFANLLCKNAVDKFAVEHLKANVVDVELNNDGAIAALITKELGKLEYDFYLDCTGFESLLLGKALNVPFIEKSKELLVNSALVVQVPTKEEDEIPPYTVATAHQAGWIWDIALTNRRGVGFVYSNNHMSDDEAKTKLDHYLKGNPSELTYRKLPMKVGHREKFWHKNCVSLGLAQGFLEPLEATSILLTDFAASFLADRFPESDEQMIMLEQRFNHVMGYAWDRVVDFIKLHYCISDRTDSKFWLDNKKEETIPPMLRKRLQLWQQFNPQKEDFFSKFEIFDYDNYLYLLYGMCYQTKLPPLSSHYHDKAKAKAEGIKVIAAQLSLQLPNHRVLINKIKQYGLQNI

SEQ ID NO: 87938 - protein, 546 aa, Shewanella sp.
  REGION 1..546: note = tr|A0A2N7DUU2|A0A2N7DUU2_9GAMM Tryptophan halogenase; OS = Shewanella sp. 10N.286.48.B5 OX=1880834 GN=BCU57_18815; PE = 4 SV=1
MSKSLANNPIDEQHQQQNKTIENIVIVGGGTAGWITAGTLAAKLNKQHEKNFSITLVESANVAPIGVGEGTWPTMRRTLKNMGIRETDFIRQCHVSFKQGAKFCQWVTGKQDDYYYHPLMLPEGGEHDNLAAHWFNIQFPYHQANEEWVPNQALSFSMCLSPQEAICQAGLAPKLITTAEYDAVANYAYHLDAGRFSKFLKQHCISQLNVNHIVDDVIAINNDDSGDIQCVTTAKSGDVYGELFIDCSGFKSLLLGEHYQVPFKSCKDILFVDNAIAVQVPYENEQSPIASQTISTAQTAGWIWDIGLSSRRGVGHVYSSKYISEQTAIAELKQYLAPSVSNIDELTFRKIPINPGYREQFWHRNCVAVGLSAGFLEPLEASALLLVEISANMIAQQLPANRACMDIVAKRFNQTFTYRWERNIDFLKLHYMLTQRDDSQFWIDNRHPDTIPQSLKTLLSLWKYHIPSDNDFIHATEVFPAASYQYVLYGMGFKTEASHRGLADTAQKDAALLFQKVASDTSQLSAHLMSNRELLKLINQYGLQRV

SEQ ID NO: 87939 - protein, 124 aa, Burkholderia sp.
  REGION 1..124: note = tr|U2FSG5|U2FSG5_9BURK Tryptophan halogenase PrnA; OS = Burkholderia sp. AU4i OX=1335308 GN=L810_5674 PE=4 SV=1
MANDTSAPTDPKDPKDPCNCKTCAVNAAITDAVTQTNVKVVGEAPAMATGSLYQAQSHSLSVLFENAVQQQSQAAVQLPTSTNVGTMQLYTLGPASAGAAATEIGSNGVLSVLADVLALGKALA

SEQ ID NO: 87940 - protein, 324 aa, Bradyrhizobium japonicum
  REGION 1..324: note = tr|A0A0A3XSS1|A0A0A3XSS1_BRAJP Tryptophan halogenase; OS = Bradyrhizobium japonicum OX=375 GN=MA20_29310 PE=4 SV=1
MSPLVQPVLRQLGLWPTFLAQGFAPSHRTLTSWDQAGLTSNELLLEARGPSWRVDRRAFDGWLTAAGCRAAERVDAKVCQLAREADGWSVVCDDGNSHSARLIIDATGRARALADGQGARPKAQDRLIAAYAEATTSGPAAPELLVEAFEDGWWYTMALDQGRRAFACMTDADLARGLGLNTPDGWCAALARTQFVSALGSRIIRLEQPRLIPAGSRYAATTAGFHFLCAGDSASAFDPISGHGVVKAMRSGVFAAYAACDCLARGDAAALDRYGAWIAREAAAYATTLSEHYGSVSRWSERPFWRRRRADAPSRNPSSSLLEQ

SEQ ID NO: 87941 - protein, 60 aa, Mycobacterium ulcerans
  REGION 1..60: note = tr|X8FHC6|X8FHC6_MYCUL Tryptophan halogenase family protein OS=Mycobacterium ulcerans str. Harvey OX=1299332; GN = I551_2011 PE=4 SV=1
MRECNASFKTAVKFINWRTPGEGSPVARHWRGRPDHFYHPFGLLPSPQHIPLSHFWAAIS

SEQ ID NO: 87942 - protein, 498 aa, Cellvibrio mixtus
  REGION 1..498: note = tr|A0A266QAT3|A0A266QAT3_9GAMM Tryptophan halogenase; OS = Cellvibrio mixtus OX=39650 GN=CBP51_08215 PE=4 SV=1
MNSIKKIVILGGGTSGWIAAAMLAAHVRRDLCSIELIESDDIGAVGVGESTIPPVVRLITSLGIDEEDFIRETQACYKLGIKFVDWRHRNQSYFHPYGAIGQRIGSQDFYQCWLKATMAGESYPLQDFSPCSVMAAQGRFFLPSQSMNTPIGGAGYAIHLDAKLVAAYLRRYAEARGVTRSEGNYVAVERRDNGFISALVLADGRKIEGDFFIDCSGFRALLIDGAMAAGFEDWSHYLPCDRAIVVKTEAAGSRMPYTTATARKAGWSWRIPLRNATGHGYVYSSRFCTDADAKTTLLSNLDAPRINDPRLISFTAGRRLEFWKNNCLALGLSGGFVEPLESTAIHLITRGMDYFLRFFPDLECDPSLRREYSRRMGADYEEVRDFILLHYCTSERSDSDFWRWCQTMPLPDSLRERIELFKAHGIVREEHDELFRSTSWQSVFEGMGIRPAKYSPRVDNIELAQITEKLALARSAILNMVKILPTHDEYLDHRFGER

SEQ ID NO: 87943 - protein, 503 aa, Sphingobium yanoikuyae
  REGION 1..503: note = tr|A0A430BYS5|A0A430BYS5_SPHYA Tryptophan 7-halogenase OS=Sphingobium yanoikuyae OX=13690; GN = DAH51_08465 PE=4 SV=1
MYADFPTSDRVVKRVVVAGGGTAGWVTATALIRHLGPLIDITLVESDAIGTIGVGESTVPTFRGFHQLMKIREDRFMAEAQATVKLGIEFKNWGQIGDRYIHPFGTIGLQWSWMADFHHFWLHARAQGFGGELGEYCLEWVAGEANRMSLSSSVAPSYAYHIDAARYARFLRSLAEPAGVKRVEGKIRNVELAPESGHIAALMLESGTRIEGDLFIDCTGFRSLLLGEALGVGFEDWGQWIRTDRAVAVQSTSDGPAQPYTSAIAHEAGWRWRIPLQHRDGNGFVFASDFMSDDEAHARLLAETEGEPIVDPWLVRFKTGTRTRAWHKNCVGLGLAGGFIEPLESTSIHLMMAAVTRLIEDFPFHGFDDALLDHFNRKSRLEFENIRDFIILHYHVTQRDDSPFWDHCRTMEIPDSLKERLALWQENGRAYQLGHELFRVDSWSSVLLGQGMHPRGYHRVAAMMPEPQLREELARMRKDIAGVVAEMPSHREFLRRYCPAELV

SEQ ID NO: 87944 - protein, 504 aa, Erythrobacter sp.
  REGION 1..504: note = tr|A0A2Z4K500|A0A2Z4K500_9SPHN Tryptophan halogenase; OS = Erythrobacter sp. KY5 OX=2011159 GN=CD351_14295 PE=4; SV = 1
MTIQHIVIVGGGTAGWMAAAALSRLKSGRKLDISLIESEQIGTVGVGEATIPPFVGFNDLLGIPESELLSNVQGTFKLGIQFENWGKRGDSYIHPFGAYGYTMGGISFHHVWHKFAEEGDNRPIQVFNVETMAAYFGKFMRSEDYQKQRDDLPPINYAYHLDAGKYAAFLRQYAERRGVIRHEGKVSDVSLDGETGFVTGLTLDDGRSLEGDLFIDCSGFRGLLIEQALKTGYEDWTHWLPCNRAVALPCGRDDGSPPPPFTKATAHSAGWQWQVPLQHRNGNGHVYCSDFMEDQEALDILLGNIAGKPQADPNFLRFTTGRRKKFWNKNVVALGLSAGFMEPLESTSIHLINTGVDKLLSLLSLDGVTQTQEDTFNRLTGREYARIRDFLILHYNATSRDDSGFWNYVRTMDVPETLTEKVELFKANGQIFREEDELFTETSWAAVMMGQGIAMHGHNAMADSLDPVSTRKEIDEMEQSIRFLVQHMPGHGEYLSRYCPAKAA

SEQ ID NO: 87945 - protein, 514 aa, Sphingobium yanoikuyae
  REGION 1..514: note = tr|A0A291N0A7|A0A291N0A7_SPHYA Tryptophan halogenase; OS = Sphingobium yanoikuyae OX=13690 GN=A6768_12820 PE=4 SV=1
MASPVRNIVIVGGGTAGWLTAGVIAARHQNRMGRDLTVTLVESPNVPIVGVGEGTWPTLRTTLSRMGVSETDFFRECDASFKQGARFARWTTGAAGDSYYHPLMLPQNFGQVNLAPHWLAQEDDESFCDAVCSQGRICDDGLAPKTIATAEYDALANYAYHLDAGKFASFLQRHCCQKLGVRHVLADVETVSMKDDGDIRAVWTIQAGEIAGDLFVDCSGFKALLIERAMQVPFKDCSDTLFCDTALAMQVPYECPDSPIASHTISTAQSAGWIWDIGIQTRRGIGHVYSSNHISHDAAEQELRAYIGPAADGLTARKIAIRSGHRETFWKGNCVAVGLAAGFLEPLEASAIVLVELSAKIIAEQMPACREVMDIVAARFNATTRYRWGRIIDFLKLHYVLTQRTDSAFWRDNVRSETIPDRLKDLLLLWCYQSPGLLDEFDRVEEVFPAASYQYVLYGMGFKTQVNAHDLSYDRHLASRARRENAAMTAKLRAGLPRHRDLIDKIVAHGLQPV

SEQ ID NO: 87946 - protein, 513 aa, Caulobacter sp.; identical to SEQ ID NO: 84104
  REGION 1..513: note = tr|A0A0Q6UJS0|A0A0Q6UJS0_9CAUL Tryptophan halogenase; OS = Caulobacter sp. Root343 OX=1736520 GN=ASC70_13510 PE=4; SV = 1

SEQ ID NO: 87947 - protein, 501 aa, Pseudoalteromonas sp.
  REGION 1..501: note = tr|A0A3R8TLS3|A0A3R8TLS3_9GAMM Tryptophan 7-halogenase OS=Pseudoalteromonas sp. J010 OX=998465; GN = EAG18_02340 PE=4 SV=1
MKTHLPTKTIQSLTILGGGTAGWMCAAYLAKHQPTLSVTVIESPHIASIGVGEGSTPHLQHFMQSLGVKECDWMPACQASYKTGISFDNWNGDNSGYFHPFFSEMDAKTAEVYFVNANARRRGSEYIDKPEHYFLAAVLADKQQAPIPQQPLPRALEFGYHFDAQKLAQWLSAFSLARGVKHRQSTVTSVQHDSQTVIALMLESGEQIKSDFYVDASGFNALLIEKTLEVPFISFSDQLLNDSAIAIAGDKITPLPSSTAAIAMPSGWRWQIPLQGRTGHGYVYSSAHISAQQAELQLRQAAQLDTGPAKHLTMKVGMMARCVEGNVFAIGLAQSFIEPLEATALMVTGYSIELLHRLLSQQLEAQAINQQLSDLVLGIKEYVLAHYATSKRTDTQYWQDAKVAALNLHELDALLTHWRDGGDFDAWLHQHRSQSPYIRPSWYCLLGGMDHRDSCCQMPFEQAPTHIELAAKAYLTQLSDKHFIAHTKALQQLLLSDQRSA

SEQ ID NO: 87948 - protein, 125 aa, Mycobacterium ulcerans
  REGION 1..125: note = tr|X8FGT3|X8FGT3_MYCUL Tryptophan halogenase family protein OS=Mycobacterium ulcerans str. Harvey OX=1299332; GN = I551_2013 PE=4 SV=1
MTRCSSIGSTERSIPYSTRPAISCRLHFYFSPRTDTEFWRAKKEFTLTDSIKEKVAMYKAGVPVNPPIATESSYYSNFDAEFENFWTNGSYYCIFAGLGCCLITHCRRSTTSRRLSTKRMRCSSM

SEQ ID NO: 87949 - protein, 501 aa, Marinimicrobium koreense
  REGION 1..501: note = tr|A0A3N1P452|A0A3N1P452_9GAMM Tryptophan halogenase; OS = Marinimicrobium koreense OX=306545 GN=EDC38_2114 PE=4; SV = 1
MTDSIKRIVIAGGGTAGWMAAGLLSQTLGKNLDIKLVESDDIPTVGVGEATIPPLMTFHKMLDIDEREFLAEVNGTFKLGISFENWREKDHKYIHSFGYAGKDCWACSFLHFWLAGKAKGIDYPYGDYCAELLASHKNKFAVLPNGRMNYAYHMDAGRYAAFLRRRSEKLGVERVEGKIEKVNLNPDNGEIQSLTLASGKQVDGDFFIDCTGFRGLLIEQSLNAGFEDWSHWLPCDRALAVQTESVGEPIPYTRSIAHDAGWQWRIPLQNRVGNGLVYSSRYMSDEQARETLLGNLEGEPITDPKPIQFRTGTRRKHWVKNCLALGLSSGFLEPLESTSIHLIQRSLVRFVQLFPASGQMVQSDIDEFNQQTKLEVERIRDFIILHYKVTERDDTPFWRYCKNMEIPAPLRQRIDLFSDSARVFKIENELFGEESWIQVMMGQGITPKAYHPMADVMTEKELADFLKKLRQSTEQLVAKLPSHQAFIDYYCKMPMAQAANG

SEQ ID NO: 87950 - protein, 532 aa, Bradyrhizobium sp.
  REGION 1..532: note = tr|A0A1Q5RI44|A0A1Q5RI44_9BRAD Tryptophan halogenase; OS = Bradyrhizobium sp. NAS96.2 OX=1680160 GN=AC628_20285; PE = 4 SV=1
MTGESIVILGGGSAGWMTAAYLKKALSGVDIVLIESANVGTIGVGEASFSTIRLFFDYLGLDESEWMPQCNATYKLAIKFSNWTAGGGYFYHPFQRYQVVDGSNLGEWWLHLKPNETPFDTACFSTSSLCENNRSPRYLNGEVFDDKVKATFNSANKVPPNVFLSDHRLQYPYGYHFEASLLASFLRNYATALGVRCIKDDVEDVLLSTEGSIECLRTRRNGTVKGSLYVDCTGFRGLLINQALKEPFLSFQDVLLNDRAVALQVPYQADRSDIEPFTSATALQSGWAWNIPLYKRVGTGYVYCSQFISSEQAEFELRAHIGPRAKDCIANHIRMRIGRCRSSWVKNCVAIGLSSGFVEPLESTGLFFIQLGIEELLRHYSGPTTDPDVVADYNRIMADCIDGVRDFLVLHYRASDRVDTPYWQATKEISVPPSVDQRLQLWKKRLPNERSINPCYHGFEFYSYSVMLLGLNYRPVRSLPTLRHSNVSAALAAFQEVRDRTGELLRTLPSHLEYLQHLRRARNSSPAADAST

SEQ ID NO: 87951 - protein, 506 aa, Xanthomonas citri
  REGION 1..506: note = tr|A0A2H1SXZ8|A0A2H1SXZ8_XANCI Tryptophan halogenase; OS = Xanthomonas citri pv. fuscans OX=366649 GN=prnA PE=4; SV = 1
MIPAPLRNIVIVGGGTAGWMAAAAFARVLGPTFKVQLIESEQLGTVGVGEATVPHIKAFNNLLGIDEAEFVRQTQGSFKLGIEFVDWQRPGSTYMHGFGTQIGHPLGLLPFHQYWIKQHARGKAQPLGAYTLNTVAATRGKFMTSAGDVPANSPLANIAYAYHFDATQYAHFLRRYSQQRGVSRIEGLVEQVQLHPESGHVQSLQLASGQVVHGDLFIDCSGFGGLLIEQALHTGYHDFTHWLPCDRALAVPCEKVGPPTPCTRSTARAAGWQWRIPLQHRTGNGYVYCSAHISDDEAAATLLANLDGKPLADPRPLRFTTGRRKQCWNRNVVALGLASGFLEPLESTSIHLIQSGISKLLELFPREGISPVLVQRYNDRLAFEFDRIRDFLLLHYHATERDDSAFWRHCRHMPITPELQATLDLFRDSGRFYRNAEEMFAEISWVQVLVGQGILPQGYHPLVDQVPDRDAEGFLASVAQTISHCVDVMPSHQQFIDRYCKAATLP

SEQ ID NO: 87952 - protein, 514 aa, unidentified
  source 1..514: note = Mycobacteroides chelonae
  REGION 1..514: note = tr|A0A4Y6IRF1|A0A4Y6IRF1_MYCCH Tryptophan 7-halogenase OS=Mycobacteroides chelonae OX=1774; GN = FJK96_17490 PE=4 SV=1
MVVLEEVVIVGGGTAGWMTASYLKVAFGDRITVTVVESARIGAIGVGEATFSTIRHFFDYLGLEEHEWMPSCCATYKLGIRFQDWRRPGHHFYHPFERQRVVDGFGLTDWWLDNPRSDSFDRDCFLIGTLCDNDKSPRRLDGSLFMGTDGEDTAYRTTLSEQDTQFPYAYHFDASLLADFLRDFAVRRGVRHVVDDVVDVLQDDRGWISEVRTRAHGSIEGDLFIDCTGFSGLLLGRAMGEPFESYHGSLLNDRAVALRVPTDQNGGHLPPYTTATAQDAGWIWSIPLFDRIGTGYVYAEDYCSPEDAEHALRNFVGPAAEGLEANHIRMRIGRCRRSWVGNCVAIGLASGFVEPLESTGIFFIQHGIEQLVKHFPDENWEESLRDSYNRVINRCMDGVREFLVLHYYLAARVDTQYWRDTKSVQLPAALAERIEHWRSKLPDAGSVYPHYHGFEPYSYVCMFVGLGGIPARPSTVVRYLDATRAQREFDLLAQQASRLRHSLPTHREYLAQMY

SEQ ID NO: 87953 - protein, 500 aa, Asticcacaulis excentricus
  REGION 1..500: note = tr|E8RU44|E8RU44_ASTEC Tryptophan halogenase superfamily protein OS=Asticcacaulis excentricus (strain ATCC 15261 / DSM 4724 / VKM B-1370 / CB 48) OX=573065; GN = Astex_ 3382 PE=4 SV=1
MIVGGGSAGWMAAAALAKTLGDTLEIDLIESEEIGIVGVGEATIPPILKYNDFLGIDEATFVRETNATYKLGIEFVDWRAKGHSYFHPFGHSGRDIESFPFHHYWLADWRRRGGDYDYTQFNLETVAAYKGRFGHLSAEGDRPGLNYAFQFDAVLYAKFLRNYSAERGVIRHEGRIVSVEQHPESGFVKAVVTADGRRLEGDLFIDCSGFRGLLIEGTLNCGYEDWSRWLPMNSAVAVPCERVADITPYTRATAREAGWTWRIPLQHRTGNGYVFSDQFLSVEDAKTRLLGCLDDAPLADPRLLKFVTGHRKRVWDKNVVALGLASGFLEPLESTAIHLVQSGITRLLALFPRTGIVPSVVTQYNRDVLFDYNNIKDFLIAHYKISERDDTPFWRWVQAMEMPDSLKERLEMFRETALLVTREPELFRETSWLAVMMGQGLLPKTSHPIVETIEAADLRLHMSRWRKMLESRADSLPAHEDYVRRFAPSADLKMRMASAG

SEQ ID NO: 87954 - protein, 524 aa, Sphingobium amiense
  REGION 1..524: note = tr|A0A494W9Q3|A0A494W9Q3_9SPHN Tryptophan 7-halogenase OS=Sphingobium amiense OX=135719; GN = SAMIE_1033990 PE=4 SV=1
MTSPPFSWVNPHMATPVRNIVIVGGGTAGWLTAGVIAARHQGRRDFTVTLVESPNTPIIGVGEGTWPTLRTTLSRMGVSETDFFRECDAAFKQGARFARWTTGAPHDGYYHPLVLPQAFGQVNLAPHWLAEDGDESFCDRVCPQGRICDDGLAPKTIATAEYDALANYAYHLDAGKFAPFLQRHCCEKLGVRHILADVEDVLMRANGDIRAIRTQQAGEIEGDLFVDCTGFRALLIEKAMGVPFRDCNDILFCDTALAMQVPYDAPNSPIASHTISTAQSAGWIWDIGVQSRRGTGHVYSSSHISDEEAERELRAYIGPAAEGLTARKIKIRSGHREIFWKRNCVAVGLAAGFLEPLEASAIVLIELSARIISEQMPAVREVMDIVSARFNATTHYRWGRIIDFLKLHYVLTQRTDSDFWRDNVREETIPERLRELLLLWRYQPPGFHDEFDRVEEVFPAASYQYVLYGMGFKTEVDRGALARDASAAGRAVRENVALTAKLRAGLPRHRDLINKIVAHGLQPV

SEQ ID NO: 87955 - protein, 561 aa, Ruegeria sp.
  REGION 1..561: note = tr|A0A0C1GJV1|A0A0C1GJV1_9RHOB Tryptophan halogenase; OS = Ruegeria sp. ANG-R OX=1577903 GN=RA27_03265 PE=4 SV=1
MSNRLRKITIVGGGTAGWMTALILDMVFSRTSATKDRPQICLIESPNIATVGVGEATVPRMPVTIRQAGISERDFFRETNASFKLGVKFCNWNKDAKGNRIDYVNPFAHGQMLQGLDAAEYFLRFGNGDRDFTQSISPHDHLGRLCKGARQLGQPEFEQRFGYAYHLDAVKFAGMLTKVCTKRGVEHIQDEVQSVELDEQGNVSHLMLERKGRHDIEMVVDCTGFRGLIINQALGEPFMDYSDYLPNDRAMALQIEHPNPDKIESLTRSTALGAGWTWRVPLYNRVGTGYVFSSAHRTDDQAADEYLEWLGDSGKGATPRIIPMRVGRVRNAWVKNCVAIGLSGGFIEPLESTAIHMIDHAVRWFAEHLPTRDIEPPLRARYNRQMDKLYNEVLEFICLHYRLGNRTDDQYWIDARTEMKLPDRLAENLELWQHRLPLNHDTEFTTLFDHRVYQTVLLGKQVYDTGYGTGIRDRLRPLKKPIWFQGMKTAKADLARIIKSMPDHKTLLRDIRGELEQPAFGMAAAMKPTVALPGGAPAPVAVQNMPNLAEIQSGEKDLQLF

SEQ ID NO: 87956 - protein, 506 aa, Altererythrobacter ishigakiensis
  REGION 1..506: note = tr|A0A562UT47|A0A562UT47_9SPHN Tryptophan halogenase; OS = Altererythrobacter ishigakiensis OX=476157 GN=JN10_0387; PE = 4 SV=1
MNYGNPIKRIVIVGGGTAGWMAAAVLSRLKKGRDLDIVLVESEAIGTVGVGEATIPPFVEFNQMLEIDEREMLAEAQGSFKLGIQFENWGEVGDSYIHPFGAYGYHMGGIAFHQVWRRMREAGEKRPIQAFNLETMAAYFGKFARTQDYAQDDLPPVNYAYHLDAGRYAAFLRKYAEKRGVIRKEGRIGDYTLDRESGFVMSVVLESGESISGDLFVDCSGFRGLLIEQALETGYEDWTHWLPCNRAVALPCNRDDGSPPPPFTKATAHSAGWQWQVPLQHRNGNGHVYCDAYMSADEAHDILVSNIAGKPTAEPNHLRFITGRRKKFWNKNVVALGLSAGFMEPLESTSIHLINTGVNKLVALLSLEGINPAQVDAFNRLTAKEYARIRDFLILHYNATERTDSEFWNYCRTMSVPDTLTEKVELFKTNGQIFREEDELFTETSWAAVMMGQRIVMGGHNPVADTFDLPATKSEMDEMEKSIRFVVQHMPGHEDYLKRYCPAPTI

SEQ ID NO: 87957 - protein, 501 aa, Mycobacterium sp.
  REGION 1..501: note = tr|A0A433AGJ9|A0A433AGJ9_9MYCO Uncharacterized protein OS=Mycobacterium sp. OX=1785 GN=EKK34_26500 PE=4; SV = 1
MIKSVLVVGGGTAGLLTALAVKKEIPEMQIRVVRSKAMGVIGVGESTTPQFPKLLFDYLKLPQKLFYSTVRPTWKTGIHFLWGPRQSFDYAFQFQLDAFYSDLKRYNGFYCADEFDSVNTNAALMAQGKAFEKHPSGQGPLITGDAAMHLFNPALVAALETACGARGIDIIDARITGVPVDERGVQSIVLDDGRAFTADLYVDATGFRSELLGRALGTPFVAYDRSLFCDRAIVGSWDRTDEFIYPYTVAETMEAGWCWQIDHEHAINRGYVYSSQFLSDDQARDEFLGKNPKATTWDHVVKFRSGRYEKGWAKNVFAIGNACGFVEPLEATALMVASSQIKAMVEMLVQSKLDPTPSIKALYNTLFVDWWDGIKDFLSIHYRFNTRIENEFWTACGNEVDVTPVQPLLDFYRENGPTGFCRHYLTSTIGQDNQFGLEGFLVMLVGQKVPYCDAHPPSEAELATFNRHRAENRARARSGLSVAEALQYVHRPDWRWNSDLQ

SEQ ID NO: 87958 - protein, 127 aa, Bacillus sp.
  REGION 1..127: note = tr|A0A1V2SIP3|A0A1V2SIP3_9BACI Tryptophan halogenase (Fragment) OS=Bacillus sp. VT-16-64 OX=1917019; GN = BLX87_05905 PE=4 SV=1
GVRHLKGLLTDVALAEDGSIAHVATREHGALEADLYIDCSGFRAELIGKALGAPFKSVRDQLFTDRALACKIGYDRADAPIESFTIATAHPAGWTWDIALEVARGIGCVYSSAHMTDDRAAEMLQRY

SEQ ID NO: 87959 - protein, 559 aa, unidentified
  source 1..559: note = Rhodospirillaceae bacterium
  REGION 1..559: note = tr|A0A2E4NJG0|A0A2E4NJG0_9PROT Tryptophan halogenase; OS = Rhodospirillaceae bacterium OX=1898112 GN=CMM76_16085; PE = 4 SV=1
MAEPISKVSIIGGGTAGWMAAVHLVTRLNSRAEKPVEVCLIESPDIPTVGVGEATVPTMKRWFQELELDESAFIERCNASFKLGVRFANWDHDINGNPLNYVHPFDGLGDDIAGYNPAYYFHKFNDPGGAGNYSIYHSPITAIVEGRKGPKPLDAENFEGVLNYAYHLDAGLFAKYLREIGIERGVTHILDSVNDVELDHDGFVSAVQLQDNGRHEVELVIDCTGFRSMILQQTLGVEFEPYDKYLLNDRALAVQLPHLEPTRLDPCTRSTALGAGWSWRVPLYSRIGTGYVFSSAHRTDDEATQEFLRHLGPVAKGAEPRAIPIRVGRAKQSWAKNCISVGLSGGFIEPLESTAIYIVDKALGWIVDFFPDKDFSPVLSNRYNKLSESLYTEIRDFIVMHYCTGTRNDSDYWKAAREDIIVPDSLQAKLDLYKHALPTEDELDSGFLFSGLSYLIVLFGKGYFKDVTFAADRAISAEDWERYQNVLHGVTAELITNLPDHHQLLTQIRSRNAPKDENQALRDAINQTVANQPVITLPGQLMAPDISFAGQPDNGGNIL

SEQ ID NO: 87960 - protein, 491 aa, Asticcacaulis excentricus
  REGION 1..491: note = tr|E8RRR9|E8RRR9_ASTEC Tryptophan halogenase; OS = Asticcacaulis excentricus (strain ATCC 15261 / DSM 4724 / VKM B-1370 / CB 48) OX=573065 GN=Astex_0704 PE=4 SV=1
MQPVKKVVIAGGGTAGWCAAAALSKLLGTLIDITLIESEEIGIVGVGEATIPTARTFHHFLGIDERAFLKATNATYKLGIAFENWARDGDRYIHSFGEIGKSNWMAPFHHVWMAARDKGFGGDLGDYCFELRAAEEGKFFTSDTARINYAYHFDAVLYGRFLRQLSESCGAKRIEGRIRQVRQDADTGFITALELESGEVIDGDLFIDCTGFKGLLIEETLKTGFEDWSHWLPTDRALAVQTAPSGRLDPYTRAIAHGEGWRWRIPLQNRVGNGLVYASGHLTDEAARERLLSLVDGEPLTEPRLIRYRTGRRRKIWNKNCLTVGLSSGFIEPLESTSIHLFQIAVTRLIQMFPFGGITEAVSDHYNEIARREIEKVRDFVILHYKLTQRDDTGFWRERREMSVPDSLTERLEMFREHGHAWQAADDLFRVDSWVQVLLGQRLEPQSHHAIGQLMSEAQLRQALDGLKTNIARTVEAMPTHEAFLKSYLAA

SEQ ID NO: 87961 - protein, 502 aa, Asticcacaulis excentricus
  REGION 1..502: note = tr|E8RTX0|E8RTX0_ASTEC Tryptophan halogenase; OS = Asticcacaulis excentricus (strain ATCC 15261 / DSM 4724 / VKM B-1370 / CB 48) OX=573065 GN=Astex_3307 PE=4 SV=1
MTSYLKEIVILGGGSAGWMTAAALSSLVDPQKVSVVLVESDQIGTIGVGEATIPDIINFNRMLGISEDAFMKATHATFKLGIEFVDWGRKGQAYIHPFGTHGVDMNGFDFHQYWLRARQGGNTHPIDHYSMSAVAARQARFDLPPAGENSPRAHIRYAYHFDATLYARFLRNYAEQRGVRRVEGKVERVVQNPGSGDIEALALDNGQTLTGELFFDCTGFSALLLGKTLGVGYHDWSHWLPCDAAQAVACTHAGPLLPYTRSTARPSGWQWRIPTQSRTGNGHIYSRAFMDDGDATEILLANLDGEVISTPRQIRFTAGHRHTFWKNNCIAIGLSAGFLEPLESTSIYLIQEGISRFIALFPDASLPVVVRDEYNRHMRTEFEQVRDFIILHYKATERDDTPFWDYCRNMTIPDSLTHKIELFRTAGRTFRYEDELFARTSWVAVFLGQGIVPHTCDPVVAHVPYDTVIGSLESMRAAMAAEAGRMPTHAAFLQSYCPAVRA

SEQ ID NO: 87962 - protein, 498 aa, Sphingopyxis sp.
  REGION 1..498: note = tr|A0A1G3KMP7|A0A1G3KMP7_9SPHN Tryptophan halogenase; OS = Sphingopyxis sp. RIFCSPHIGHO2_12_FULL_65_19 OX=1802172; GN = A3E77_03150 PE=4 SV=1
MSDKKPVRVVIAGGGTAGWMMAAAIARTMGPTVDLTLVESEAIGTIGVGESTIPPLVNFNRILGIPEPDFMRATQATFKLGILFDNWKHDGDSYFHSFGLSGKDHWSAGFQHFWLNARERGHEQPYADYCLELVAGMQGKFAHLPEDRMNYAYHVDATLYGRYLRKLAEADGCTRVEGKIAHVELDGTSGDIAALHLDGERRIEGDMFVDCTGFRGLLIDGALHAGFEDWSHWLPNDSAIAVQSKHLGPPMPYTQAIAHDAGWQWRIPLQHRMGAGIVYTSGYLSRDEAYDRLMSSVGEPLIEPFDIKFKGGVRRKQWYRNCVAVGLAGGFVEPLEATTVHLIQRAVLRFIRLMPNGRVSERDAMEFNDQQRLDIEQIRDFVVLHYKATNRRDSPFWRHVAAMPIPDSLQQKIELFRETGRVFRKYEELFAENSWVQVMMGQGIEPQSYHPIADKLRDDEVERLFQSIRDNIAQTVATLPEHHAYVARYCGAEAPKAA

SEQ ID NO: 87963 - protein, 511 aa, unidentified
  source 1..511: note = Thiotrichales bacterium
  REGION 1..511: note = tr|A0A2E2BCJ7|A0A2E2BCJ7_9GAMM Tryptophan halogenase; OS = Thiotrichales bacterium OX=2026796 GN=CMO23_06185 PE=4; SV = 1
  VARIANT 40: note = Xaa can be any naturally occurring amino acid
  VARIANT 114: note = Xaa can be any naturally occurring amino acid
  VARIANT 208: note = Xaa can be any naturally occurring amino acid
  VARIANT 216: note = Xaa can be any naturally occurring amino acid
  VARIANT 230: note = Xaa can be any naturally occurring amino acid
  VARIANT 247: note = Xaa can be any naturally occurring amino acid
  VARIANT 257: note = Xaa can be any naturally occurring amino acid
  VARIANT 264: note = Xaa can be any naturally occurring amino acid
  VARIANT 273: note = Xaa can be any naturally occurring amino acid
  VARIANT 285: note = Xaa can be any naturally occurring amino acid
  VARIANT 300: note = Xaa can be any naturally occurring amino acid
MKPMTSQPKNIPKNILIVGGGTSGWMVAATLARQWKDKDXSLKLIESESIGTIGVGEGSTPKMRRFFDSLNIDEREWMPKCNATYKCGIRFPSWATREGFKSYYHPFFSQKDDXSIRAFHQNATLRSKNFNVYAHPDSFFVSNFLASEKLAPTPDKKTDYHTDYAYHFDASLLGEFLRNFSVQNGVTHVSDTVSEVLRSENGDISGVXTDQHGTIXADFFIDCTGFSGLXINKTLGVEFLPYKKFLXNDSAVALPSXINLDKGXPAQTVSKAXKNGWMWNIPLTXRFGNGYVYSSDFTDXNSAEEELRKQLGLMDGAVEARHLKMRVGRSAVCWERNCIAIGLSQGFIEPLEATALMIVQDTAETFANKLESSGNTDKSRAEVNTKVNSIFDGVRNYVQMHYKLNTRSDTEYWLENRKNVHISDDMEKILRVWDKGGDLLSELRNQASRLVYSPTSWYCILAGMGRFRNKPKRPKANVQYYSKKQAEEHSRSFIQQFPSHLVAIQEHSKTP

SEQ ID NO: 87964 - protein, 484 aa, Ruegeria sp.
  REGION 1..484: note = tr|A0A0C1JED3|A0A0C1JED3_9RHOB Tryptophan halogenase; OS = Ruegeria sp. ANG-R OX=1577903 GN=RA27_00050 PE=4 SV=1
MPTDIETEICVIGAGPSGASTALRLAQLGRRVCLVERAAFPRQHVGESLPSSVWPILEVLGVAERVLQAGFLRAAGSILNWGGAFERRGADGNQPGLLVDRGQFDALLLKAALSAGVQVVQPARAYRPVRVESGWKIPVRSDMGTHQIRTQVLVDAAGRQAGLGRRFRPTSKPLLALYAYWQSPPGFGALTRVEAGSSHWYWGGSLPGGIVNAMVFVDPSVCTGLAPAARRDLYLNLLTQSTLLSPCLEQRRIGPVRHSDATSRSETTPPAFDFLRVGEAAFSVDALSSQGVQLAMAQAVQAAVVVNTLLMKPEYSDLALSFYADRQSERVQTHSALAADFYAQQQAVCPAPFWAERAEPVAWLPDLPRDHNPEELDGDQLLRLAPKARLAVSGVQTATLIEPRAVLMHPNLPRPVAVLDDVPLAPLLQRLGGWATADHITQQWSDTLDARRVARVLRWLWYHRVLVPVDEDDVIPVSSASRMA

SEQ ID NO: 87965 - protein, 510 aa, Asticcacaulis excentricus
  REGION 1..510: note = tr|E8RTW9|E8RTW9_ASTEC Tryptophan halogenase; OS = Asticcacaulis excentricus (strain ATCC 15261 / DSM 4724 / VKM B-1370 / CB 48) OX=573065 GN=Astex_3306 PE=4 SV=1
MPNPEETKQDLRIRKIVIVGGGTAGWMAAAGMSKLMPSREVAIRVIESDAIGTVGVGEATIPHIHYFNRLLGLDENEFIRKTNATFKLGIEFVNWGGLGQSYIHPFGAYGANMDGIHFHHFWLRYAKMGKAPSLDAYNLMVCAAKAHRFQRPDPTRLNAALNGISYAFHFDASLYARLMRELAEKRGVIRTEGRITRVVQDSHSGHIDSVVLESGETVEGDLFIDCSGFRGLLIAQTLEAGYDDWSHWLPCDRAVARACAKVADPIPYTRSTAKTAGWQWRIPLQSRTGNGHVYSSGYISDEAALESLNSDLDGAPLSEPNFLRFTAGVRRAPWTKNVVSIGLASGFLEPLESTSIHLIQTAIARLMANFPDKSFNQPDIDYYNARTRLEFEQVRDFIILHYKATERDDTPFWAYCRHMEIPDALRERLAIYQENARQYRHDNELFSEVSWLAVMHGQNVRPKRYHPIADMIPEEELIRRMTQLEDEVTRALALMPDHQAFIDRHCRAAV

SEQ ID NO: 87966 - protein, 538 aa, Pseudomonas sp.
  REGION 1..538: note = tr|U7A754|U7A754_9PSED Tryptophan halogenase; OS = Pseudomonas sp. CMAA1215 OX=1387231 GN=P308_19170 PE=4; SV = 1
MNKPIKNIVIVGGGTAGWMAASYLVRALQQQVDITLIESAAIPRIGVGEATIPSLQKVFFDFLGIPEREWMPQVNGAFKAAIKFVNWRKSPDPSRDDHFYHLFGNVPNCDGVPLTHYWLRKREQGFQQPMEYACYPQPGALDGKLAPCLPDGTRQMSHAWHFDAHLVADFLKRWAVERGVNRVVDEVVEVQLNDRGYISTLLTKGGRKLEADLFIDCSGMRGLLINQTLKEPFIDMSDYLLCDSAVASAVPNDDARDGVEPYTSAIAMNSGWTWKIPMLGRFGSGYVFSSKFTSRDQATADFLKLWDLSDNQSLNQIKFRVGRNKRAWVNNCVSIGLSSCFLEPLESTGIYFIYASLYQLVKHFPDTSFDSRLRDAFNAEIVYMFDDCRDFVQAHYFTTSREDTPFWLANRHELRLSDAIQEKVQRYKAGLPLTTTSFDDSTYYETFDYEFKNFWLNGNYYCIFAGLGMLPDRSLPLLQHRPESIEKAEAMFASIRREAERLRSSLPTNYDYLRSLRDGDAQVSGNQRGPTLATREGR

SEQ ID NO: 87967 - protein, 519 aa, unidentified
  source 1..519: note = Unknown
  REGION 1..519: note = tr|B8KI96|B8KI96_9GAMM Tryptophan halogenase; OS = gamma proteobacterium NOR5-3 OX=566466 GN=NOR53_1882; PE = 4 SV=1
MAKAIQTVVIVGGGSAGWLTAGLLAAELRRAGSPNRVRLVESPDVSPIGVGEGTWPTMRSSLIRMGISETEFLKSCDASFKQGTHFVGWLQGGSESYYHPFTPPRGFSDINLARHWQAVRKQVPFCDAVSPQAQVCKQALGPKQIVTPEYASNLNYGYHLDAGKFAVLLQQHCVNRLGVEHLLENVDSIENDETGDICALHTTTGRVVTGDLFVDCTGMRSLLLSEHYGIDFKDMSHLLFNDSALAVQVPRTDESEPVASATVSTAKEAGWIWDIALPTRRGTGYTYSSRYTSDERAEQVLRDYLAETSGLEFSQSCAPRKISFRPGYRERFWHRNCVAIGLSAGFVEPLEASALVMIELSAKMLAELMPPDREVMNIVADRFNVRFGAHWERIMEFLKLHYVLSEREDSPYWRDHRDPESIPARLRDSLVLWGYHCPWHGDQAQVDELFSTASYQYVLYGMNFHSEGAAGIAQADPAAHKRAQNLFAENARETQKMLAALPPNRELIDKINRYGLSRV

SEQ ID NO: 87968 - protein, 538 aa, Burkholderia sp.
  REGION 1..538: note = tr|A0A228HDY1|A0A228HDY1_9BURK Tryptophan halogenase; OS = Burkholderia sp. AU16741 OX=2015347 GN=CFB89_29560 PE=4; SV = 1
MTHPIKNIVIVGGGTAGWMSASYLVRALQQHANITLVESAAIPRIGVGEATIPSLQKVFFDFLGIPEREWMPQVNGAFKSAIRFVNWRKAPDGSRGDHFYHLFGNVPNCDGVPLTHYWLRKREQGFQQPMEYACYPQTEALDARLAPCLPDGTRQMSHAWHFDAHLVADFLKRWATERGVKRVVDEVEQVHLNDRGYIASLSTKEGRMLEADLFIDCSGMRGLLINQALKEPFIDMSDHLLCDSAVASAVPADDAREGIEPYTSAIAMNAGWTWKIPMLGRFGSGYVFSSKFTSRDQATADFLDLWGLSDKQPLNQIKFRVGRNRRAWVNNCVAIGLSSCFLEPLESTGIYFIYAALYQLVKHFPDTSFDPRLADAFNAEIVYMFDDCRDFVQAHYFTTSRDDTAFWRANRHDLRLSDAIQEKVERYKAGLPLTTTSFDDSTYYDTFDYEFKNFWLNGNYYCIFAGLGLLPDRSLPLLRHRPESIDKAEAMFARIRRDAEHLRASLPTNYDYLRSLREGDAAQSRSRPGPTLATPEIL

SEQ ID NO: 87969 - protein, 499 aa, Asticcacaulis excentricus
  REGION 1..499: note = tr|E8RL37|E8RL37_ASTEC Tryptophan halogenase superfamily protein OS=Asticcacaulis excentricus (strain ATCC 15261 / DSM 4724 / VKM B-1370 / CB 48) OX=573065; GN = Astex_ 1988 PE=4 SV=1
MVDTVQRIVIAGGGTAGWMTAAALSQIMGEQLSLTLIESEEIGSVGVGEATIPMIAHFNALLRLDENDFLRETKGTIKLGIAFEGWRHEGHSYMHAFGTLGRDLGSVPFHHYWLQAHLEGQDDDLWAYSLNERAAYANRFAPLNQIPNTPLPGIPYAYHFDASLYALYLRRLAEAKGARRIEGRIRDIALHAETGHVTRLSLEDGQQVEGDLFIDCSGFRGLLIEGALKTGFESWKHLLPCDRAYAVPCESVSPLTPYTRSIAREAGWQWRIPLQHRTGNGYVFCSDHISEDEAATRLLSRLDGQALADPRLIRFETGRRRLQWNGNVIALGLSSGFIEPLESTSIHLIQSGIARLITLFPHRGFDPAVVGEYNRQSALEFELIRDFIVLHYHANERHGEAFWDQVRHMPIPEALAHKMALFRACGLIQPNPNDLFQLPAWLQVMVGQNVCPAAAHPFVAAVPNAARQDYLANLRTIIGRTADGLPTHDAYIAQHCCAV

SEQ ID NO: 87970 - protein, 496 aa, Sphingopyxis sp.
  REGION 1..496: note = tr|A0A1G3KX44|A0A1G3KX44_9SPHN Tryptophan halogenase; OS = Sphingopyxis sp. RIFCSPHIGHO2_12_FULL_65_19 OX=1802172; GN = A3E77_06360 PE=4 SV=1
MSARQRPVRRIVIVGGGSAGWMAAAALGRALAGQSHTLTLVESEAIGTVGVGEATVPPIHEFNRYLGLDQAEFLRATHGTIKLGIQFDGWGGVGHRYFHPFGFFGVEMSGIHFHHYWLRHLAAGGDADGGPYNLETMAARAGRFAPMTRHGPVHHAVHFDAAAYAQYLRGYAEAKGVVRVEGRVADVRLDPEDGFITSIAMADGRVIEGDLFVDCSGFRGLLIEGALATGYAEWSHWLPCDSAVAMPCENDGDPAPYTCSTAREAGWQWRIPLQHRDGNGYVYSSAHLDHDEAERLLRSRLPGAALADANRLRFNAGHRKAIWNRNCVAVGLAGGFLEPLESTSIHLIQTTIIRLLALLPRDAIDPHVVARFNRDALHEYETIRDFVIAHYALSNRDDTSFWRDIAAAGLPDSLAERIEAFRATGNILFEPGDLFGPTNWYAVLTGQGVRPQSWHPIADGLANEELAARLATLRSRVSEQLAELPTHGEFLRRLGR

SEQ ID NO: 87971 - protein, 559 aa, unidentified
  source 1..559: note = Rhodospirillaceae bacterium
  REGION 1..559: note = tr|A0A2E7RF65|A0A2E7RF65_9PROT Tryptophan halogenase; OS = Rhodospirillaceae bacterium OX=1898112 GN=CMM28_12905; PE = 4 SV=1
MAEPISKVSIIGGGTAGWMAAVHLVTRLNSRAEKPVEVCLIESPEIPTVGVGEATVPTMKRWFQELELDESAFIERCNASFKLGVRFANWDHDINGNPLNYVHPFDGLGDDIAGYNPAYYFHKFNDPGGAGNYSIYHSPITAIVEGRKGPKPLDAENFEGVLNYAYHLDAGLFAKYLREIGIERGVTHILDSVNDVELDQDGFVSAVQLQDSGRHEVELVIDCTGFRSMILQQTLGVEFEPYDKYLLNDRALAVQLPHLEPTRLDPCTRSTALGAGWSWRVPLYSRIGTGYVFSSAHRTDDEATQEFLEHLGPMAKGAEPRAIPIRVGRAKQSWAKNCISVGLSGGFIEPLESTAIYIVDKALGWIVDFFPDKDFSPVLSNRYNKLSESLYTEIRDFIVMHYCTGTRNDSDYWKAAREDIIVPDSLQAKLDLYKHALPTEDELDSGFLFSGLSYLIVLFGKGYFKDVTFAADRAISAEDWERYQNVLHGVTAELITNLPDHHQLLTQIRSRHAPKDENQALRDAINKTVANQPVITLPGQLMAPDISFAGQPDNGGNIL

SEQ ID NO: 87972 - protein, 521 aa, Croceicoccus sp.
  REGION 1..521: note = tr|A0A2D6EEA0|A0A2D6EEA0_9SPHN Tryptophan halogenase; OS = Croceicoccus sp. OX=1927144 GN=CL820_00580 PE=4 SV=1
MTARKDIVTINAVDRVVIVGGGTAGWMTAAAMSRFFDNGRRKITLVESDAIGTVGVGEATIPPIRNFNGMLDIPENEFLRATHGTFKLGIEFVDWGRKGDRYIHPFGNFGRDLHGIPFHQLWLRENARGGGADISDYSMSSVAALMGRFGRPSPDARSPVSEMFYAFHFDASLYAAYLRQLAERQGTIRREGRIVKAHRDGESGYITSVELEGGIHIEGDLFIDCSGFRGLLIEDALETGYEDWSHWLPVDRALAMPTSNIASPAPFTRATAHGAGWQWRIPLQHRTGNGHVFCGAFMEDDEAERILRRHVEGEPIAEPRLIRFQTGMRRKAWNHNVVSLGLASGFIEPLESTSIHLIQNGIARLFSLFPEKEISPLERDEYNRGMREIYCDIRDFIILHYKATQRDDTEFWRYVRDMEVPESLARKMELWRLHGRVFRENAELFTVPSWVAVMLGQNMWPERYDPIADTLDEQRVAQAMEQMREAYRQTAQQLPTQEQFLRQAGAWAADHAPMATAGAMR

SEQ ID NO: 87973 - protein, 524 aa, unidentified
  source 1..524: note = Alteromonas aestuariivivens
  REGION 1..524: note = tr|A0A3D8M9Z1|A0A3D8M9Z1_9ALTE Tryptophan 7-halogenase OS=Alteromonas aestuariivivens OX=1938339; GN = DXV75_07350 PE=4 SV=1
MSVTAAQSVRSIVILGGGAAGWLTAGILAAEHNLPDNPNLTITVVESPDISILGVGEGTWPTMRDTLRKLGLNEKTFLKRCDASFKQGTCFNGWVNGQPGDRYYHPFSLPAGFFDTDLFAWWQLHRPAQPFAALFSTQTQLCEQHKAPKQPQTPDFAAVANYGYHLDANKFAEMLREHCLTQLGVGHILDHCDEVLTDNEGYITALSGRQQGQIAADLFVDCSGFAARLIGQHYGEILTPVGHTLMNDTAVAVQAPYKDEHTPIASATHSTADEAGWIWDIGLQHRKGVGYVFSSAFCSEQEAKQRLLNYLANDSSTSRVSEEQIRTIQFTPGYRKHLWVKNCVAIGTSAGFIEPLEASALVMIELSATMLARQLPLTQPAMHGAARHFNTVFSQRWQRIVDFLKLHYVLSQRRDTPYWRAMTDQAACSEQLADWLQQWATRSPSLSDFMFSEEIFPHASYLYILCGMGFPSDIDPMRYTPYKMADVSKIIEKNQQLTRQHLQGLPANRELLQSTFGLIVNHAS

SEQ ID NO: 87974 - protein, 496 aa, unidentified
  source 1..496: note = Alteromonas aestuariivivens
  REGION 1..496: note = tr|A0A3D8M7Q2|A0A3D8M7Q2_9ALTE Tryptophan 7-halogenase OS=Alteromonas aestuariivivens OX=1938339; GN = DXV75_09855 PE=4 SV=1
MTKENPSTNSRIVIAGGGTAGWIAAAALAKKMGPLLDITLVESAEIGTVGVGEATIPPLRVFHKLLRIDEQAFMQATSATFKLGIQFENWGQVGDSYIHSFGQTGQQSWLAEFVHFWLEARKRGLAGNYGDYCLELEAALQGKFATSPQSDINYAYHLDAGDYARFLANFCQALGVKRIEGKIEQVEQHENDFISALVLTDGTRIEGDLFIDCTGFRGLLIEQTLHTGYEDWSHWLPCDSAVAIQTESVAPAQPFTRSIAHHAGWQWQIPLQHRVGNGLVYSRQHMSDDEAREYLLSHVEGTPITEPRVIHYRTGRRLKAWNKNCVALGLASGFVEPLESTSIHLIIMGITRLMQLFPFNGWDSALIDEYNQQTIEELERIRDFIVLHYHVTERNDSPFWDYCRRMEIPETLLHRINLFATQGHAFQKHNELFRVDSWTQVMLGQRLLPKHHHPAPALMTDQQLSQALSQHREQILQLVNRLPDHQTFINQYCKRS

SEQ ID NO: 87975 - protein, 497 aa, Asticcacaulis excentricus
  REGION 1..497: note = tr|E8RU45|E8RU45_ASTEC Tryptophan halogenase; OS = Asticcacaulis excentricus (strain ATCC 15261 / DSM 4724 / VKM B-1370 / CB 48) OX=573065 GN=Astex_3383 PE=4 SV=1
MTDTPVRPVRKVVIVGRDEALWLTAAVLQRTFARSDLSFTAVELPSLLRPGEVLPTLGSQAGFHARLGLDEAVLMRALGATFTLGQQYVGWAKTAPPVFVGYSSTGVALQNVPFHHLWLRARASGMNVAFEDFAINAACAKQGRLLTPDADLSGFAEANSGFHLPAAPYAEMLRQVALKRGVRHLPTAHISPVVKGSQMTAVVLSDGQTVEGDLFIDTTGSDARLLSQMPDSGFTSWRHWLPFDRLLTTYAAPATPLPAFAQITAFRSGWAGLFPLRDYTAVQQVYTRDDLSDEEAFENAAMVVKMSLHPEATVTPFEAGRRPAWSGNVIGLGEAAAVLDPLGSARMPALLLGLSHLTALFPLDTSGLESAVYNRTVGQAYERLRDAQIWLYSLNKRRDQPVWDHLRSVSLPPELAYKREVFAACGHLPVYDDETFDEAWWTAAGLGHGLLPAAHDVRADQLAEPELIRHFQTVLGYVRKQVEAMPTPDSVLRARTA

SEQ ID NO: 87976 - protein, 501 aa, Alteromonas sp.
  REGION 1..501: note = tr|A0A3A9UKB8|A0A3A9UKB8_9ALTE Tryptophan 7-halogenase OS=Alteromonas sp. BL110 OX=1714845; GN = D7031_04710 PE=4 SV=1
MTVSGLDSSNNQTPVKNVVIAGGGTAGWMAATALSRLLGKSIKVTLVESKDIGIVGVGEATIPPIRTFHKLLGIDEKAFMRATQATFKLGIEFENWREQGHSYIHSFGITGRECWAGEFHHFWLRAKEYGFGGEFGDYCPELIAAKQNKFATSEAMPLNFAYHFDAVAYGRFLKSLACEAGVTHKIGDIEKVDVFPQSGNIQSLQLASGEVVDGDFFIDCTGFKGLLIEQALHTGYDDWQHYLFCDRAVAMQTELTAPPVPYTKSVAHQAGWRWQIPLQERMGNGLVFCSRFMSDGEAIDTLKSQVPGAPINEPRVIRFTPGKRRRGWNKNCVALGLSSGFIEPLESTSIHLIMTGLIRLMRLFPFDGITQSAIDEYNNKFDSEMSAILDFIVMHYKVTQREDSPFWQQCQRMDVPPSLTHKLALFAESGRVFLDDGDIFRVDSWTQVLMGQGMTPKQYHRVADEMSEQSLKQFMAGLKQQVDNHVAKLPAHEAFLTQYLK

SEQ ID NO: 87977 - protein, 501 aa, Croceicoccus sp.
  REGION 1..501: note = tr|A0A2D6EBP6|A0A2D6EBP6_9SPHN Tryptophan halogenase; OS = Croceicoccus sp. OX=1927144 GN=CL820_16795 PE=4 SV=1
MDDTQQPTILIAGGGTAGWMAAAALSRFAAGHRIVLVESDAIGTVGVGEATIPQIHLFNSAIGLDEAEFLRETRGSFKLGIEFDGWLRDGHSYMHAFGQIGRGIGLLPFQHYWLRARQLGFAKPLQRYSLNELAARTMRMQRGRTSAGAEMPYAYHFDAGLYAALLRRHAEARGVERHEGTMASVDRDGGSGDIASITLDDGRVLAADFFIDCTGFRGLLIEGALETGFDDWSNYLPCDRAMAVPCEGGGDFTPYTKSIARKAGWQWRIPLQHRIGNGLVYSSAHLPDDEAAEMLLANLDGATQADPRPIRFTTGKRRKHWNRNCLALGLAAGFMEPLESTSIHLIQSAISRFLALLPDGRPSEAAISHFNAQADFEWTRIRDFLILHYTANERHGEPFWDAVRTMPLPSTLTDKIALWRDTGFIHREHEELFTEVAWFQVFAGQGVEAQGHNPIADTLDEAQLRDLMQGTEAALVEQVRAMPRHIDFLQDFINGRAKEPA

SEQ ID NO: 87978 - protein, 498 aa, Burkholderia sp.
  REGION 1..498: note = tr|A0A1Q8ILT0|A0A1Q8ILT0_9BURK Uncharacterized protein OS=Burkholderia sp. SRS-W-2-2016 OX=1926878; GN = BTH42_30930 PE=4 SV=1
MLNFRAMRNFVVLGGGTAGWFAALELQRLFGTQASITVIESPRINVIGVGEGGILNLPGALARYGIEEAAFIEATGAVLKLGFEYAGWNSGRDDDVFYHLFHAAPNAADGSLVDGVPVDWAMLVANGVGVQYAESALPLIRNNASQTETLGVRAALGARLPTSMHFDAHRVAAYLKSVATGRGVRLLEATVQDLDIATDSGHVTALRIEDSEQPVPVDFLIDASGFARLTLGRRFQVPMRPFGEYLLHDRAIPFYLPHPRQNPHLVTRAVAMNAGWMWQIPVQERVGCGYVYSSAHLSDDAALQEIEARVGKVEAVRTIRFEAGHFEDVWIGNVMAVGLASGFIEPLEATSIGQMLGQVLTFGELVAGSAYIVPQTSITMFNERNRVDWMGIRDFLRMHYDVPRRDTAFWRDVNALKLPDTYATLKACWQHRLPRSADLQPYRQGNFMHFEATSWISVGQGTGVIPPQAAAADLARLPRESVVKSHQFLMGVKSRFAL

SEQ ID NO: 87979 - protein, 512 aa, unidentified
  source 1..512: note = Alteromonas aestuariivivens
  REGION 1..512: note = tr|A0A3D8M7B7|A0A3D8M7B7_9ALTE Tryptophan 7-halogenase OS=Alteromonas aestuariivivens OX=1938339; GN = DXV75_10240 PE=4 SV=1
MVKPVDIVILGGGTAGWMSAAALSRLLPASRYRITLVSAPELQTVGVGEATIPHIRYFNQTLGIDENEFIRSVGATYKLAIRFKGWGYEASDYCHGFGYSGERINDIEFHHYFLRAFGRSSEVDYDRFCLASLAARAHRFEYPKQGDSMAGRYGYAFHLDATRYADYLREFSLANGVKHILGKVESVQLSLSGDICSLRLLNGEIIEGDWFLDCSGFSARLIEQELNSGYESWQQWLPCDRAVAGASGAMDSPPTYTLSQTHCAGWRWQIPLQHRTGNGVVYASHEMSDDEAAVLLNRSVEGIDESRLKVLSFLPGKRRKSWQRNCVAIGLSSGFLEPLESTSLYLVQVAIEKFIEYLPADRNCHAERQAFNQFIDIEYERIRDFLILHYHQNGLNSSFWRYCATMALPDSLNLRLQLYDETGHFSGYRQGLFMPVSWVTVALGQGRYPQGIDGRMQKWPKHQIAQELTSYQAKLVSLVGQMSAHKYALGRAGEEGLRYPEASPSLYGFVSG

SEQ ID NO: 87980 - protein, 522 aa, unidentified
  source 1..522: note = Rhodospirillaceae bacterium
  REGION 1..522: note = tr|A0A2E6GT32|A0A2E6GT32_9PROT Tryptophan halogenase; OS = Rhodospirillaceae bacterium OX=1898112 GN=CMM52_16690; PE = 4 SV=1
MKLNDRITRFTIVGGGSAGWLAASLLTATLNRRNDGPDTEITVIESPNLPIIGVGEATTLSTFVTFAQLKIDEQDFLNHCDASFKGAVRFKGWNINPDGTDGDYYHPFDVPELIYGVLPAYHYHRRKAEGISQPSFAHSMSVLPTLMDANRAPKALDAQPFEGLANYSFHLDASLMGEYLKEYCTTLGVTYISDDVVDVTLDERGFVSALELKELGTHPVEFVIDCSGFRSLILQQALGEKFIPYKDHLLCDRALAVQIPHREGAPLEPYTTSSALGAGWSWNVPLYSRRGTGYVFSSQFRSDDDAIEEFLNFLGDDAKDAEPRVIPMSIGRARHSWVKNCLGVGLSAGFIEPLESTSIHLIQVAIRRFLDHLPDRNCDPALVDRYNHLVTDMYEDIRDFIAMHYAISNRDGEFWQTARSENAVPDRVRERLALWKHKLPTELDIGTTNPLFTEWSYLYVLFGKNYVDNVNYSLEAALSDEDYEAFAADMNQRRDQLLLQAPDHRQYLDSLRANGTEAWYRP

SEQ ID NO: 87981 - protein, 502 aa, Sphingopyxis sp.
  REGION 1..502: note = tr|A0A1G3KWI5|A0A1G3KWI5_9SPHN Tryptophan halogenase; OS = Sphingopyxis sp. RIFCSPHIGHO2_12_FULL_65_19 OX=1802172; GN = A3E77_11890 PE=4 SV=1
MNPMRLIIIGGGTAGWMAAACLRRFMPDGWSVQLIESDDIGTVGVGEATIPQIRLFNDALGIDEDEFLTATQGTIKLGIEFADWTRPGHRYMHAFGAIGRGLGLLEFQHYWLRARDLGAAQELGAYSLNEQAARARRMQRGSPRTSAYLHDMPYAFHFDAALYAAYLRRRAEASGVERIEGKVAGVRRDGETGDVAGVTLADGRAVDGDFFIDCSGFRGLLIEGALATGYDDWSGWLLNDRAVAVPCAHGAAPQLPWTGATARDAGWQWRIPLQHRIGNGYVYSSAHLSDDAAIDTLLAHLDGPVHAEPNRLRFTSGKRRRMWNHNVVALGLASGFMEPLESTSIHLVQSGISRLLKMLPAGVADPAVAAEFNRQSDFEWERIRDFIILHFKATERRDTPYWQDRAAMPIPDTLAAKIELFRAQGLIFREHEELFTESGWLQVLVGQGIEPRRWHPIADGIGDTEIAQYMAGIALMIEREVAAMQDYDAFLAATRPAAGVAA

SEQ ID NO: 87982 - protein, 566 aa, unidentified
  source 1..566: note = Colwelliaceae bacterium
  REGION 1..566: note = tr|A0A2D6RGR1|A0A2D6RGR1_9GAMM Tryptophan halogenase; OS = Colwelliaceae bacterium OX=2026726 GN=CL811_07735 PE=4; SV = 1
MSCSSNNAIKHIVIVGGGAAGWLTAGIIAAQHNGHLDSGIKVSLIESSAIPTIGVGEGTWPTMRDTLSTIGIEESEFIACCDASFKQGSKFIGWARDLTEETTNDADKSYQASIKGTHTYYHPFVAPHGFGQSDLVQHWLRQNQDTAATNPDSHSNTYDEPSFAHALGSQAHLCDYNKAPKQIQTPPYAAVANYGYHLDAGKFSALLKQHCCNKLGVNHIDDVVTGVSASEDESIEAVLTEQHGQIAGDLFIDCSGQHALLIGKHYQIPLREQSHVLFNDSAIAVQVPYPSDSHPISSQTNATAHDNGWIWDIGLPTRRGVGCVYASQYCDKATALNALKEYIAKTAPDIEFSTLEPRHIAFTPGYREKFWHKNCVAVGMAAGFIEPLEASALALIELSAKMIAKELPSVKSIMPITANRFNERFEYRWQRIIEFLKLHYVLSERTSDYWQANRERNSIPARLQELLTLWEHQEPSYNDFPQVEEIFPAASYQYVLYGMGFKSNLRHWQRQFDNPLLSEKLVQENKQLIDRYLGGLPTNRELINALVQQYQRQHDKEHELNKQQAI

SEQ ID NO: 87983 - protein, 246 aa, unidentified
  source 1..246: note = Colwelliaceae bacterium
  REGION 1..246: note = tr|A0A2D6RGG0|A0A2D6RGG0_9GAMM Tryptophan halogenase (Fragment) OS=Colwelliaceae bacterium OX=2026726; GN = CL811_07085 PE=4 SV=1
RGVGHVYSSNHTSHEQAELALRNYVESSNALGNRTDNVGAIKTQDINTRIIKMKVGYREKFWQNNCVALGLSQGFVEPLEATGLLVFDVTAKMLAEQFPTCRAEMPLIANLFNQRMRESWDKVIDFIKLHYCISKRDDSDFWFDNRTSTSIPDSLQERLERWRYQPPTKYDFFSGVEIFNLENYLYVLYGMHYPTASGLLSTKTNQVAQADAYRQWLEKQSEQALKHLPSNRELINKIKQHGFKKL

SEQ ID NO: 87984 - protein, 519 aa, Novosphingobium resinovorum
  REGION 1..519: note = tr|A0A031JPU1|A0A031JPU1_9SPHN Tryptophan halogenase; OS = Novosphingobium resinovorum OX=158500 GN=BV97_04678; PE = 4 SV=1
MTIDNPPSGRVVILGGGTAGWLAAAYLSRTLGMTGITLVESSEIGIIGVGEGTFPTIRSTLAGLGISEAEFLVRADATFKQGVLFEGWATGTDSYFHPFNMPIGGEDEALLPHWLADTSPQRAAWADAVTVQEQVIRAGRAPKRPEDPDFSGPMNYAYHFDAARFADYLRDISIAAGVVRIEGTVGNVQRKADGDIAALELTDGRIVEGDFFLDCSGFRALLIGQTLGADFTSCSDSLFNDRALAMQVPYDRPDAPVRPYTLATAHEAGWTWDIGLTERRGIGYVYSSRHCSDDEAEATLRRYVGPQGDALNPRQLRFETGYRQQQWIGNCVAVGLSAGFFEPLESTGIMLIEAALRMVGDFLGPDLLAGADRDARDAAARSFNRLMSARFERIVHFLKLHYCITRRTDTAYWRDNADPATIPEPLRDMLAQWRRRPPSRFDFVVDLETFLPPSYHYILYGMGFETTLAGARYPGAAQAREVFARVRAAHAGARGGLPDHRALLNHYHARTGVPSSKVS

SEQ ID NO: 87985 - protein, 507 aa, Asticcacaulis excentricus
  REGION 1..507: note = tr|E8RKM3|E8RKM3_ASTEC Tryptophan halogenase; OS = Asticcacaulis excentricus (strain ATCC 15261 / DSM 4724 / VKM B-1370 / CB 48) OX=573065 GN=Astex_1894 PE=4 SV=1
MSDAIRRIIIAGGGTAGWMCAAALRKGLGRTVELVLIESEDIGTVGVGEATIPPIRKFLEHVGIDELDFIRETEASFKLGIEFAGWGTPDSRYFHGFGDFGAVHEAVRPYQLWRLLREAGDETPLEAWSLPAALAKAGKFFPPNPDPRSPMHDYAYAYHFDAGLFARFLRRHCEAQGVKRINAKIDAVQLRPADGFIEALTLDNGTSEAADFFIDCTGFRGLLIEEALKAGFEDWSHWLPADRAWAVPTAHHTGAGITPFTTSTAHAAGWQWRIPLQHRTGNGHVFASAFMDEETARDVLLHHLEGKALKDPMLIRFTTGRRPHPWTKNCVAVGLSSGFLEPLESTSINLIQSGIAQFLELFPSRQAEAVLRREYNRQMSLSYERVRDFIILHYKLNTRSEPLWRYCADMPIPDTLAHKIELFSVRGDVVSYDWDHFAEPSWIAVMNGQGVVSRFTDPLAQRLPLESVRALMAQRRDVLAQVVRQLPAHADFIAHHCPSPDTLKASV

SEQ ID NO: 87986 - protein, 508 aa, unidentified
  source 1..508: note = Pseudoxanthomonas composti
  REGION 1..508: note = tr|A0A4Q1JRD9|A0A4Q1JRD9_9GAMM Tryptophan 7-halogenase OS=Pseudoxanthomonas composti OX=2137479; GN = EPA99_18440 PE=4 SV=1
MLDAVTSLPSTPVRRVVIAGGGTAGWMAAAALSKVLGKALQITLVESEEIGTVGVGEATIPSLATFHRLLEIDEREFLSATQGTIKLGISFENWRTEQHRYIHSFGTTGQDHWTAGFQHFWLKGRERGLAGSYDDYCIELQAALHDRFAHLQGYRMNYAYHLDASYYARYLRQLSERHGCRRIEGKIAQVHTDAATGFITGLQLERGELIEGDLFIDCTGFRALLIGQTLGVGFEDWSHWLLNDRAFATQTTAVRDAVPYTRAIAEPWGWQWRIPLQHRVGNGVVYSSKYVSDEEAKARFLATAEGEIIKAPFPISFRPGRRMECWNRNCVALGLAGSFIEPLESTTIHLIQRGITRLMQSFPAVITRVGIDQYNTQLADELQHVRDFVVLHYAATERRDSPYWEYVANMTLPATLQHRIDLFRQTGTVFHAPQELFAENSWIQVMMGQGIVPRHRHPAPDLMGDAELSAFLGSIAKRVRETAAQLPPHMDYLRRYSPAQPPARPAAA

SEQ ID NO: 87987 - protein, 513 aa, Devosia sp.
  REGION 1..513: note = tr|A0A2L1S2C9|A0A2L1S2C9_9RHIZ Uncharacterized protein OS=Devosia sp. I507 OX=2083786 GN=C4375_01815 PE=4; SV = 1
MDKPSHYVIVGGGTAGWIAAFIIQDEARRRGLDFRISVVESSKIPTVGVGEATTAAFRVLLKHFGIDELEFMRKTDASFKLGIRHEDWRRKGFTYYGPIDDPHQVVQPPAGAPSDYLNVYAVAAGRPVQDMHMFQPLLEQWKAPYARKPDGGLIPLGPFHHAYHFDQALVGKFFASKSKGVEKVDALVEGVERHAETGDITALVLADNQRLEGDFFIDATGFRKQLIVKELQAPWVSYAHELPVNRALPFWIDVEEGEELPTYTRAWAQNSGWMWQIPTRTRFGCGYVYSDAFSTPEQAKAEVEAALGQEIEVRGDIRFQIGRLENAWIGNCLAVGLSSSFLEPLESTSIHGTIVQMMLFAQRYMDRPERIEQKARDDYNARVGRQVDDFRTFVNTHYVTERDDTPFWREVRANRIHPETKERLTRWQTQMPRNEHFPNYLGGLPHIETQLHYPVLDGLGLLDQSLARREMEAAPKLRQFARETFDSLVREYRGAAQQALGHAEFLKIVQDMG

SEQ ID NO: 87988 - protein, 517 aa, Sphingomonas sp.
  REGION 1..517: note = tr|A0A0M2LS34|A0A0M2LS34_9SPHN Tryptophan halogenase; OS = Sphingomonas sp. Ag1 OX=1642949 GN=XM50_12310 PE=4 SV=1
MKRQVANIVIVGGGTAGWLAAATIAACADPTAQPPVQVTLIESPDVPTIGVGEGTWPTIRRTLARIGISEAEFLLACDASFKQGSRFDSWRNGAPDDSYLHPFSAPVEADPRALVAAWQAGEEEGFAAAVTPQARACALDLAPRQRAMPDYAGALNYAYHLDAVKLAALLRRHATQRLGVRHVRDHVLSVDRRHDGDIAAVRCRDHGAMEGDLFIDCTGHAALLIGGALGVHFIDRGHELFNDRALAVQVPVAAGSAIASTTNATAHEAGWIWDIGLPTRRGVGCVYSSAHLTDDAAEGILRAYLGRTTPAANLDALAPRKLTFRSGHRTRFWERNCLAIGLSSGFLEPLEASAIVTIELALDALVANFPATRASMDAHADRFNALFRYRWDRIVDFLKLHYVLSDRGQPYWRDNRDRSSIPHSLAGLLAIWREQPPSGHDLGMVDEVFPAASYQYVLYGMGMAPPPPGPMRIEGVPPASAALRQAAQRARALAASLPTNRAYLDVLRADRQNEIIA

SEQ ID NO: 87989 - protein, 511 aa, Croceicoccus sp.
  REGION 1..511: note = tr|A0A2D8D118|A0A2D8D118_9SPHN Tryptophan halogenase; OS = Croceicoccus sp. OX=1927144 GN=CL820_00585 PE=4 SV=1
MKGDPIQKIVIVGGGTAGWMAAAAISKILGDFPGLSIRLVESEAIGTVGVGEATIPQIISFNNLLGINEFEFMRETNATYKLGIEFVDWLRKGHSYIHPFGTYGVDMLGIEFHQFWLRGQALGHTARLDDFSISAMAGEAGRFAHPRKDQPNSPLSRMAYAFQFDAALYGRFLRKRAEAQGVERVEGRIVEVLQNGESGFVTGVKLEDGAIVEGDLFVDCSGFRSLLLGQTLGVPFMDWSKWLPCDRAVAAPCALAGPDKPLTRSTARPAGWQWRIPLQHRIGNGHVYSSSYMSDGDAEDLLLSSLDGEPLAQPNRLRFTAGHRERIWDRNVVALGLAGGFLEPLESTAIHLVQSGIARLMALFPTKAFSPAEIERYNRETVADYVEIRDFLVLHYRASERDDSEFWRYCRNIAPPPALADKLEMFHSSGRIFRENQELFTEASWLAVMVGQGIEPEAYHPAAGLLSQEETLRRLRHIRQVVIDTAQQLPPQDEYLAMHGAAIENSLRQPA

SEQ ID NO: 87990 - protein, 44 aa, Desulforhopalus sp.
  REGION 1..44: note = tr|A0A4U0ZY02|A0A4U0ZY02_9DELT Tryptophan 7-halogenase OS=Desulforhopalus sp. IMCC35007 OX=2569543; GN = FCL48_03250 PE=4 SV=1
MKKGEKLVIVGCSGSGGPAAMMSKKLMPEVDVTVIRKEDFFIVR

SEQ ID NO: 87991 - protein, 518 aa, unidentified; identical to SEQ ID NO: 86405
  source 1..518: note = Unknown
  REGION 1..518: note = tr|A0A061QHP3|A0A061QHP3_9PROT Flavin-dependent tryptophan halogenase RebH OS=alpha proteobacterium Q-1; OX = 1492281 GN=rebH PE=4 SV=1

SEQ ID NO: 87992 - protein, 560 aa, unidentified
  source 1..560: note = Rhodospirillaceae bacterium
  REGION 1..560: note = tr|A0A2E6Q9Y7|A0A2E6Q9Y7_9PROT Tryptophan halogenase; OS = Rhodospirillaceae bacterium OX=1898112 GN=CMM48_09490; PE = 4 SV=1
MGEPISKVTIVGGGTAGWMAATHLVTRLNSRAEIPIEVCLIESPNIPTVGVGEATVPTMKRWFESLDLDEAAFITHCNASFKLGVRFVNWDHDINGNPLNYIHPFDGFGDDIQGYNPAYYFHKFNDPGGGSNYSIYHSPITAVVEGRKGPKPLEAENFESVLNYAYHLDAGLFAQYLRQIAIERGVIHILDDVEEIELDEKGYVSSLQLKQQGRHEIELVIDCTGFKSMILQQTLGVEFENYGQYLLNDRALAVQLPHLEPTKLEPCTRSTALGAGWSWRVPLYSRIGTGYVFSSAHRNDEEATAEFLDHLGPLGKGAEPRAIGMKVGRARQTWAKNCIAIGLSGGFIEPLESTAIYLVDRALGWIVEYFPDKDFNPILSDRYNRLSESLYTEIRDFIVLHYCTNTREDSDYWKAAREDITIPDSLKEKLELFKHALPTEDELDSGFLFSGLSYLIVLFGKGFFKDVTFPADRAISASDWERYQNVLHGVTAELITNLPDHHQLLSSIRASRGGDSDTRELSEAIEKAAQNKPVVALPDQALEPEISFAGVADEAGGNIL

SEQ ID NO: 87993 - protein, 524 aa, Streptomyces brevispora
  REGION 1..524: note = tr|A0A561V5E7|A0A561V5E7_9ACTN Tryptophan halogenase; OS = Streptomyces brevispora OX=887462 GN=FHX80_115321 PE=4; SV = 1
MESRIRNIVVVGGTTAGWLSAAYLAGIFRGAVQVTVLEAPAGEQRADTGMTGGVQALPAEMQSEFFDPLGIQESDWMRACDASFRMAARYTNWRTGGSAQWVARELPNGIPDYFYDPVGGTGTGTGTGTGTENSEFALPYHWAWRRSAGETLEPLDRSCFRAPPLLDAKKSPRWLDGRAALPYGWHVDEGLFTAYLRRVATGAWDVRTAQGVLRGVDRDSQGYVRAVVTTGGLRIPGGFFLDCSGARAALLAGALGEPRIADAGRLLCDSTVTLTSPADPDAGIAPYTSLTAAPDGWLWRMPLPGRTGVGRAFSTVLARPEDAGRELAVLCGLDPEAADVRHHALSSGRIRRAWVKNCVAMGSSASVVEPIGTAGTDGVLHALRQFVRHFPSAVAREAPAPRFNREAERRYEADRDHVQLHYASAPRRDSPFWRAQSARPVPAALQDLRSAYRGGFPLSGADLRSLTVLASLDTGPPLAPPVLAHLDRERAEAAKQFAWIARQQRILAETLPPASEYLARLHGK

SEQ ID NO: 87994 - protein, 514 aa, unidentified
  source 1..514: note = Unknown
  REGION 1..514: note = tr|B8KI93|B8KI93_9GAMM Tryptophan halogenase; OS = gamma proteobacterium NOR5-3 OX=566466 GN=NOR53_1188; PE = 4 SV=1
MNNTIKKVVIAGGGTAGWMAAASLSKLIGKNLEITLIESDEIPTVGVGEATIPPLILLHQLLDMDEKEFMKAVHGTFKLGICFENWRDVNEDYIHSFGYTGKDCWAANFLHFWLKGLKEGISKDYGVYCTELIAAQQNKFAVLQSGALNYAYHIDAGRYAALLRKIAEKHGTTRQEGRIDSVATNEHTGYIESVTLASGQRIEGDLFIDCTGFRGLLIEQTLHTGYDDWSHWLPCDSAVAVQTRSVGPPIPYTRSIARDAGWQWRIPLQSRVGNGLVFCSRYLSDDEAIQTILNNVEGETITDPRVIKFRTGQRRKHWNKNCVAMGLASGFIEPLESTSIHLIQKAVTRLIQNFPFEGIHESEIKEFNTQMDADTENIRDFIILHYHVTNREDTRFWRHCKNMSIPDSLQHRIDLFKETGRVFKSPNDLFVENSWIQVMLGQGLMPKQYHTIVDEMSDEELRKFMQGAELSVQRTVSQLPSHQAFIDHYCKADLGTAGEHAMPLNPQSGVRAAS

SEQ ID NO: 87995 - protein, 502 aa, Asticcacaulis excentricus
  REGION 1..502: note = tr|E8RU46|E8RU46_ASTEC Tryptophan halogenase; OS = Asticcacaulis excentricus (strain ATCC 15261 / DSM 4724 / VKM B-1370 / CB 48) OX=573065 GN=Astex_3384 PE=4 SV=1
MTPIRNITILGGGTSGWMAAAVLSRAFAPEACTIRLIESEEIGIVGVGEATLPQVRDFNTYLGIDEAEFMRATNATFKLGIEFCGWGTSGSYHHPFGVHGQSAGGIPFHQLWLKARSFMDPGSIEDYAFPIRLARENRFDFPVADSKSIRSTYAYAYHFDAVLYARYLRQWCEARGVQRIEGQVTGVNQNAETGFVETLTLASGETVGGDLFIDCSGFRAVIVGQALNLGWEDWTSWLPCDRALAVPCERTDDLTPYTRATAREAGWTWRIPLQHRTGNGYVFSSRFSTEDRAREVLLGALDAPAQAEPRLLRFQAGRRTASWSKNVIALGLASGFLEPLESTSIYLSQIALTFLMRLMPDMRFDPTLAREFNRLIDIEYERVRDFLILHYHANSASEGPLWDYVRTMPVPDSLKEKMALFRHRGHVQQYKDGLFSPASWIAVFMGQDIMPQAYDRQADSMGEEVLTDYLKRLKRKIDSNLAVLPSHAEFVAAHCYDPNSGI

SEQ ID NO: 87996 - protein, 512 aa, Croceicoccus sp.
  REGION 1..512: note = tr|A0A2D8D644|A0A2D8D644_9SPHN Tryptophan halogenase; OS = Croceicoccus sp. OX=1927144 GN=CL820_09745 PE=4 SV=1
MDTVDNIVIVGGGTAGWLTAGVIAARHQGRRKHGFTVTLVESPNVPIVGVGEGTWPTLRTTLRKIGVSETDFFRECDAAFKQGARFNRWTTGEADEGYYHPLMLPQSFGRLNLVPHWLKDGDESFCDAVTPQGRICDEGLAPKTIATPEFEGQANYAYHLDAGKFSEFLKRHCCEKLGVRHVLADVTEVECAANGDVASLKTKDGPVIEGDLFIDCTGFKDLLIEGAMGVPFRDCNDVLFCDTALAVHVPYEDPSDPVASHTISTAQSAGWIWDIGLPTRRGVGHVFSSSHVDADHAERELRDYIGPAAKDLSVRRIPIRSGHREIFWKRNVVAVGLAAGFLEPLEASAIVLIELSAKMIAEQLPPNRAVMDVIARRYNDTTTYRWGRIIDFLKLHYSLTKRTDTDFWCDNARPETIPDRLLGLMELWKYQTPWLHDEFDRAEEVFPAASYQYVLYGMGYRTHVPPGDADADRELAQRAWRENRNLTAKLLAGLPGHRELLNKISQHAMMPV

SEQ ID NO: 87997 - protein, 506 aa, Rhodanobacter thiooxydans
  REGION 1..506: note = tr|A0A154QHP0|A0A154QHP0_9GAMM Tryptophan halogenase; OS = Rhodanobacter thiooxydans OX=416169 GN=RHOFW104T7_12475; PE = 4 SV=1
MTDPRIRNIVIVGGGTAGWMAAAAFAKVLDAGCSIRLVESEEIGTVGVGEGTVPHLKLFNNLLGIDDVEFVRNTQGTFKLGVQFNDWGRLGDSYVHGFGTIGHDVGLLPFHQYWIKARQAGKADEIGAYSLNTVAAPRGRFMPSASDAPPGSPLANVAYAYHFDAGRYARFLRGYAEQRGVRRTEGKVAQTVLRAADGFVEAIVLESGERIEGELFIDCSGFRGLLIEQALHTGYLDFSHWLPCDRALAVACEKVGPPTPYTRSSARPAGWQWRIPLQHRTGNGYVYSSAHVSDDEAATTLLGHLDGAPMGEPRLLRFTTGVRRQAWSRNVVALGLAGGFLEPLESTSIYMIQSGITRLLNLFPRHDFSPVLTERYNAQSRFEYEHIRDFLILHYHATERDDTPFWNQCRMMSIPPPLADNIRLFRDSGRFFRDGEEMFATPSWVQVMLGQRIAPKGYHPLVDQMPDAELAGFMASVSHVVASCVEVMPAHQAFIDRCCTAPAMVA

SEQ ID NO: 87998 - protein, 563 aa, Alteromonas sp.
  REGION 1..563: note = tr|A0A3A9ULW9|A0A3A9ULW9_9ALTE Tryptophan 7-halogenase OS=Alteromonas sp. BL110 OX=1714845; GN = D7031_04715 PE=4 SV=1
MSNSQNQCGLHRVVIVGGGTAGWLAAGVLAAKLSAKHSVTLVESPTISSIGVGEGSWPSLRDTLLDIGINETEFLTLCQGAFKQGSSFVNWRKGGHRYHHPFTIPTGYNELNIHACWQAFAPDMPYEDAFSLQSAMCALGKAPKQIATPDYAHVLNYGYHFDATKLADLLKKHCVEKLNVNHLIGHIASVTSHSNGDIEKVVTECGQEVFGDLFIDCSGSSGLLIDKHFNVPWVPVKHAMLNDRAIALQVPYADNDNEIKSTTMATAQTCGWTWDIALQHRRGTGLVYSSQFTNAEQAKQVLIDYVCERYPGANEHELAFRTLSFEPGYRSKFWVENCLSLGMSSGFVEPLEASAIAMVELGLRMLCEAFPQNKAHMEIVSKRYNTRFEYRWQRVIDFLKLHYVLSDREEPYWVAQRSDASIPDSLAELLKLWKFQSPSRLDLIENEEIFPSASYQYVLYGMGFTTLAPPLCLNEKEKRKSLHIRETLQQTKNTYFQGLPTNNALLKDIAKRYNDEQKHLHAHFQRQDYGHACASSESNSATDINNNTSLNKKDTSYDRIGFR

SEQ ID NO: 87999 - protein, 481 aa, Sphingomonas sp.
  REGION 1..481: note = tr|A0A0M2LSD4|A0A0M2LSD4_9SPHN Tryptophan halogenase; OS = Sphingomonas sp. Ag1 OX=1642949 GN=XM50_12325 PE=4 SV=1
MAAAAIARTMGRAAQVTLVESEAIGTIGVGESTIPPIVGFNRLLGINEAEFMAATNATFKLGIVFDGWRNGTDRYVHAFGLTGKDHWAAGFQHFWLAGRAKGHQAPFGDYSVELQAALAGKFAHLPDDRLNYAYQLDSGLYAKFLRGMAERDGAVRIEGKIATVQLDGDSGDIAALVLEDGTAIAGDLFLDCTGFRALLIEGALHAGFDDWTHWLPCDSAIAVQTASVGPAVPYTRAMAHDAGWQWRIPLQHRVGNGIVWCSRYLSREDALERLLGNVEGEVLTQPNHLRFTTGVRRRQWHRNCVAVGLSGGFMEPLESTSIHLIQRAVLRLIRMMPAAGPISPRDIAEFNDQQHADMVQVRDFLILHYKATDRRDSAFWRQCAAMPIPDSLEQKIELFRDTARVFRRNEELFAEHSWLQVLLGQGIEPHAWHPITGKLTDEELARLLQTLRAQVTRTVNGLPAHADYVARYCAGARQSAA

SEQ ID NO: 88000 - protein, 496 aa, unidentified
  source 1..496: note = Alteromonas aestuariivivens
  REGION 1..496: note = tr|A0A3D8M8P9|A0A3D8M8P9_9ALTE Tryptophan 7-halogenase OS=Alteromonas aestuariivivens OX=1938339; GN = DXV75_08240 PE=4 SV=1
MNKIQNVVVLGGGTAGWMSAALIKKVLGNSVGLTLVESDSIGTVGVGEATIPPIRLVNKVLGLNEGEFLRETKATIKLAIRFENWKQQGESYYHTFGAPGKSMAFCHFHHMWMKGREQGVARDLWDYDLNYLCAEAGKFAQIQSADPMLELPFAYHFDAGLYAQYLRKLSEKAGVKRIEGKVERVLRNERDGTVKALQLEGGQLVDGDLFIDCSGFSALLIEKALGTGYDDWSHLLPCDTAIAVPSERRETTRPFTRSMAHKAGWQWQIPLQHRNGNGHVFCSRYMSDDEAQSILLNNLETKPLADPKVIRFTTGRRRKQWVKNVVAIGLSSGFLEPLESTSIHLIQSGIVRLLQLFPHNGLHPASVNEYNEQSEREFLQIRDFLVLHYTLNERNDSQFWKDMRELELPPLLKHKMDLFRENGKLFRDQNDLFLESSWLQVMLGQGLIPGDYHPLVNTMSDEHIRNTLNRISEIKAQPIAELPYHDDYLAHVMRSA

SEQ ID NO: 88001 - protein, 501 aa, Sphingopyxis sp.
  REGION 1..501: note = tr|A0A1G3KX57|A0A1G3KX57_9SPHN Tryptophan halogenase; OS = Sphingopyxis sp. RIFCSPHIGHO2_12_FULL_65_19 OX=1802172; GN = A3E77_06370 PE=4 SV=1
MGDKFDLVIVGGGTAGWMCAAACAAKLDPARFRVRLVESEEIGTVGVGEATLPQMKDFNDFLGLDEVEFMKATQASFKLGIEFVNWGRRGDRYIHPFGTFGRPIGEADFFSYWIRAHRAGTAAPLFDYCFPIVTALQNRFMLPNGDGNDVRSAFAYAYHLDAFLYARYLRAWAEARGIERVEGRIVAVEKDGESGDIAAVTLASGAQVAGDLFVDCSGFRSLLLGTALGVELEDWSHWLPCDSAQAVPSARSDDFTPYTRSTRRKAGWQWCIPLQHRTGNGYVYSSADISDDEAAATLLANLDGEPLADPRVLRFKAGKRHQAWAKNCIAMGLAGGFLEPLESTSIYLVQMAIMHLLTLMPDGAAIDPALPAEFNRVMDVEYDRIRDFLILHYVANEADAPLWQRVTAIDLPDTLAGKIDRFRHRGHVQAYRDGLFGPPSWQAVFVGQGIVPRAADRLADALPADLLDERLAKLAATIADAAATVPSHADFIARYCPAPAP

SEQ ID NO: 88002 - protein, 499 aa, Asticcacaulis excentricus
  REGION 1..499: note = tr|E8RKM2|E8RKM2_ASTEC Tryptophan halogenase; OS = Asticcacaulis excentricus (strain ATCC 15261 / DSM 4724 / VKM B-1370 / CB 48) OX=573065 GN=Astex_1893 PE=4 SV=1
MDPLRIIIVGGGTAGWMTAAGLSYACRDRIAQVTLIESDEIGTIGVGEASIPSLVTFNQFLKIDEREFMAHTKATFKLGIEFRNWGALGDRYMHPFGPFGHDFGMAAFHHYWLRAQASGDLTPLSDYNLNSVLARRNAFAPPASDRNSPLSALVYAYHFDAGLYARYLRSYAENFGVTRIEGQVVKVGQDAESGYITGLTLSDGRRVEGDLFVDCSGFRALLIEETLKVGYEDWSGLLPCDRAVAVPSENQYPLTPYTRATARGAGWQWRIPLRHRTGNGLVYASDHLSDDQATESLLSHLDGKPLADPRLIRFRTGRRRTAWVKNCVAIGLSAGFLEPLESTAIHLTQRGVTKLITSLPRKGFDAVLAKRFNQETRFEYEDVRDFLVLHYALTRRHDTAFWNESRTRDISETLKARIALFETTGRIQIGSDELFKDASWLAVMTGQGLRPRDYDPLADMIDAEDLRRSLDFIRAAFARTAEQVPSHDQFLKAQFGPLG

SEQ ID NO: 88003 - protein, 509 aa, unidentified; identical to SEQ ID NO: 84382
  source 1..509: note = Cellvibrionales bacterium
  REGION 1..509: note = tr|A0A1Z8MZK1|A0A1Z8MZK1_9GAMM Tryptophan halogenase; OS = Cellvibrionales bacterium TMED21 OX=1986745; GN = CBB81_03340 PE=4 SV=1

SEQ ID NO: 88004 - protein, 517 aa, Caulobacter sp.
  REGION 1..517: note = tr|A0A0Q7WLW9|A0A0Q7WLW9_9CAUL Tryptophan halogenase; OS = Caulobacter sp. Root1472 OX=1736470 GN=ASD47_00070 PE=4; SV = 1
MENPGKISHLVIVGGGTAGWMSAAFFSKVFTPRQMRITLVESAEIGTVGVGEATIPPITFFNQVVGLDEGRMLTATEGSFKLGIEFVGWGDPAGRYMHPFGNYGTPMDGVSFHAYWLRARQRGYKAELFEFSLSDLAAKAGRFDWRAEDPRDPRAAMAHAYHFDASLYAKLLREVAEGRGVQRLERTIRGVNLDPLDGTIASLALDDGEILAGDFFIDCSGFRSLLIGEALKVGYDDWSQFLPADRAVAVPSARYEDPIPYTRAIADKAGWRWRIPLQHRTGNGYVYVSDHIGDDEAADVLLASLAREHPENKALADPRFLRFATGRRTRSRVKNCAAIGLSSGFLEPLESTSIHLIQHGLIKLAGSFPRAKDDPAAAGIYNRILGDEMEQIRDFLIYHYHANRRVGEPLWDRLRHMAVPDSLREKMELFRTRGATIFPNQTIFQEPNWLAIMMGQAGEPEGYDPLADLMDERLLAERLHHMRVACRQAADRMPTHASVLARFPADSQKRRADAPVA

SEQ ID NO: 88005 - protein, 485 aa, unidentified
  source 1..485: note = Colwelliaceae bacterium
  REGION 1..485: note = tr|A0A2D6RET4|A0A2D6RET4_9GAMM Tryptophan halogenase; OS = Colwelliaceae bacterium OX=2026726 GN=CL811_04135 PE=4; SV = 1
MAANLMVKRWGNRANIRLVESPDVGIIGVGEGSTPSLRRFFQLIDVEEHQWMPRCQATYKLNISFKDWSPASGIQAYSHPFPAQVDSFTKRAFMVNTRTRRMGLKTHTLPQDFLLNGLLANEYCGPKAPANFPFKLEYGYHFNSALLGEFLSELAQQRGVAYQQAHVTSVEQHPNGELAALVTDSSEKIAGDLFVDCTGFAALLMQKTLGVQFNSYKENLFNDSAVVAPTPMLSAEQGDIPVETTSTALSNGWCWKIPLTERFGNGYVYASDFISADQAETEFRQHLGLLDSDQAVNHLKMKVGSLSQHWSHNCIALGLSQGFIEPLEATALHLVQVSIELFMQQFEAGGFTAQNRAQFNQQMAERFAGVRDYIVAHYKLNTRDDSEYWRANRENMALSDSLKQLLHVWYSKGDLSEEIARQNISTHFDDVSWHCLLAGYGAFPDLHPNQPGKGDLYQEQGVQAFLSGCRLNFKSHRENLEALAL

SEQ ID NO: 88006 - protein, 505 aa, Rhodanobacter thiooxydans
  REGION 1..505: note = tr|A0A154QC90|A0A154QC90_9GAMM Tryptophan halogenase; OS = Rhodanobacter thiooxydans OX=416169 GN=RHOFW104T7_03715; PE = 4 SV=1
MNDPRIRRIVIVGGGTAGWLAAALLAQALGPQVQIQLVESAEIGTVGVGEATIPQIRHINRFLGIDEDAMLRFAHGTYKLGVQLNDFTRLGDSYLHAFGDLGLPLGLTPFHHYWLRAVQERGHADTPDLWAYSLNAAAAAENRFAPLEKIPDSPLGGLRYAYHFDASRYAQYLRERIAPGSVQRTEGKVVDARLREGDGFIESLQLDSGELVEGDFFIDCSGFRGLLIEGALNTGYENWQQWLPCDRALAVGSAPGGPMRPYTQASARTAGWQWRIPLRHRTGNGHVYCSRFISDDEAAAQLLANLETEALGDPRPLRFVTGMRKLAWNRNCLALGLAAGFMEPLESTSIHLVQSGVSRLLAMFPDRRCDSALVDEYNRQTRFEYEHVRDFLILHYKATERTDTPFWQQCGAMEVPPSLARRVELFRRTAMVFREGDELFAETGWVQVLLGQRIAPQRHHPLADALTDAQLDGFLADIRTLIGRAKNTLPPHHKFVARAGGSLAA

SEQ ID NO: 88007 - protein, 501 aa, Sphingomonas sp.
  REGION 1..501: note = tr|A0A0Q4J6A2|A0A0Q4J6A2_9SPHN Tryptophan halogenase; OS = Sphingomonas sp. Leaf230 OX=1735694 GN=ASE82_04070 PE=4; SV = 1
MAEQRIRKVVIAGGGTAGWLAAAALSRQLGQLLDITLVESEEIGTIGVGEATIPTMRAFHTILGLDEREFMRATQATFKLGISFENWARDGDRYIHSFGDIGKSTWMGDFHHFWLAAKADGDSSEIGDYCLELQAAKAERFALPSEGQINYAYHLDAGLYARFLRARSEANGLKRIEGRIASVERDGQTGFIRALVLDSGERVEGDLFIDCTGFRGLLIEGTYAAGYEDWSHWLSTNSALAVQTPATGPAHPYTRAIAHDAGWRWRIPLQHRVGNGLVYASDYLSDDEAHARLLATIDGAPLTEPRLIRFRTGRRRQVWMGNCVALSLASGFVEPLESTSIHLIMTGITRLMQTFPFGGIAPALVKRYNDQAQAELERVRDFIILHYHLNERTEPFWAARRDMPIPDTLVERIALFTEGAQAYQGGDDLFRVASWVQVMLGQRLTPRDHHRLGSIMGGPQLAGVLTNIRSTIADAVAGMPTHQQFLDRYLAAPVTASHGMR

SEQ ID NO: 88008 - protein, 524 aa, Streptomyces sp.
  REGION 1..524: note = tr|A0A1A9IQF9|A0A1A9IQF9_9ACTN Tryptophan halogenase; OS = Streptomyces sp. SAT1 OX=1849967 GN=A8713_00440 PE=4; SV = 1
MSTPEHATDTTTAGPAGSYDVVVVGGGPGGSTTAALVAMAGHRVLLLEKESFPRHQIGESLLPATIHGVCRFLGVTEELEKAGFMPKRGGTFRWGSNPEPWNFLFAYSPLMSGPTSTAYQVERMKFDKILLDNARRLGVEVRERCTAVATLSEGERITGLRWTDEDGRTHETAARYVVDASGSNSRLARTVGKRNYSDFFRNVALYGYYEGGKRLPGPDAGNILCCAWDDGWFWYIPLTDTLTSVGAVVNRSQVGTLSRDPEGAMAQFIEQAPMIKEFLQDAERVTEGPYGELRVRKDYSYAMERFWQPGMVLVGDAACFVDPVFSTGVHLATYGGLLAARSINSALGGGLDEERAFGEFERRYRREYGVFYEFLLAFYDMQHNEESYFWQARKVSRAEATDLRAFVELVGGVSSGESALTDLEGLKERFGGSSRELADAVTRTGPAQTESGERMGELFGTQVVTEVMQGMNEVQARASMGGATTLEKPLFSDGLVASSDGLGWAVPATADAGAAVPAQGGPAA

SEQ ID NO: 88009 - protein, 505 aa, Sphingomonas sp.; identical to SEQ ID NO: 85570
  REGION 1..505: note = tr|A0A0Q4ILK4|A0A0Q4ILK4_9SPHN Tryptophan halogenase; OS = Sphingomonas sp. Leaf230 OX=1735694 GN=ASE82_04910 PE=4; SV = 1

SEQ ID NO: 88010 - protein, 506 aa, Massilia sp.
  REGION 1..506: note = tr|A0A418XAT1|A0A418XAT1_9BURK Tryptophan 7-halogenase OS=Massilia sp. K1S02-61 OX=2320864; GN = D3872_22145 PE=4 SV=1
MNTHNRISNITIVGGGSAGWMAAAALATYLGKGAAIRLIESEEIGIVGVGEASVPHIRLFNGQWLGIDEAEFVKRTQATVKLGIEFKDWSRIGDSYIHGFGAIGRSLGPLPFHQFWLKLHLSGRADPIGGYSPQTVMAPQGKFAPGDRNAPAGSPLADIAYAYHFDATLYARYLRELAEQRGVQRIEGKIVGVNQRAGDGFVESLTLENGQVVGGELFIDCSGFRGLLIEQTLKTGYVDWSHWLPCDRAMAVPSERVDPITPYTRASARAAGWQWRIPLQHRTGNGYVYSSRHISDDEAAATLLANLDGKALADPRPLRFTAGMRKKFWNKNVVALGLASGFLEPLESTSIYLAQSGITRLLSLFPTRDANPLLAERYNRESVFEYERIRDFLILHYCATERGDTPFWNYCRTMDIPDSLREPIELFRRDGRYFRNGEDFFALPSWVQVMLGQRIVPQGYHPIVDEMPAERLVEYVEGMRTTLAQAVAMMPTHQEWIDRYWKASPP

SEQ ID NO: 88011 - protein, 508 aa, Altererythrobacter ishigakiensis
  REGION 1..508: note = tr|A0A562UMC0|A0A562UMC0_9SPHN Tryptophan halogenase; OS = Altererythrobacter ishigakiensis OX=476157 GN=JN10_2262; PE = 4 SV=1
MTDPRSDPLRKILIVGGGSAGWMAATFLSRILGRVAEIELLESDAIGVVGVGEATIPPIRKFNQFCGIDEAAFLRDTQGTFKVGIQFENWGKVGDRYLHAFGRVGQELDALVRMHHWWRLGQQAGAADYPRWESLFLGRAATDQSRFGFDPRNPGQLSDLLPHAYHFDAIAYGAHLRKVSETQGVTRIEGVAVGVERSPESGDVDAINLEDGRRIKADLFIDCSGFRSMLLGEAMDEPFDDWSHWLPADRAVVIQSKPNSSQIIPATRSIAHAVGWQWRIPLQRRVGNGHVYASSFSSDNDAEARLLTNLDGELIGDPRLLRFTTGRRQRAWVGNVVGLGLAAGFLEPLESTSIHLVQTALERLADLLPARDISPALRDRFNNQSSREWCQVRDLIIAHYKVNQRDDSEFWRYCAAMDVPESLAENLDLWEREGALTIDGGHLFQLGSWAAVLIGQNLLPQRVHSLTARVAASDIAPHIERLAKSLQQQAQSLPDHASFLERYGASSS

SEQ ID NO: 88012 - protein, 569 aa, unidentified
  source 1..569: note = Rhodobacteraceae bacterium
  REGION 1..569: note = tr|A0A2S8EY40|A0A2S8EY40_9RHOB Tryptophan 7-halogenase OS=Rhodobacteraceae bacterium WD3A24; OX = 2086263 GN=C2I36_00320 PE=4 SV=1
MAAPIGSVTIVGGGTAGWLTALLLSTYLAPKSAREAPAIRLIESPTVATVGVGEATVPAMPRTLRLAGIAESKFFRDCNASFKLGVRFDNWNVDQRGDPIDYVNPFSRGVTIDGVSVAEYFVRYGARGLSYSEVISYCDDLARAHKGPRPLGAKPYDQSVGFAYHLDAGRFAAMLQEVCTKRGVRHILDDVVDVERDEHGYIAALDLKEGGRHPVELVIDCTGFRGMIINEVLEEPFLSYARYLANDRALAVQLPHPDPNKLESLTRSTALGAGWVWRVPLYNRVGTGYVFSSAHRTDEEARAEFLAHLGPAGEGAEPRVIPMRIGRTRNPWVKNCVAVGLSAGFIEPLESTAIHMTEMAVRNLLTYFPDSDYAEPLRERYNAVANRLYDEVRDFICLHYALSNRTDSQYWIDAREALELPDGLAENIELWRHKLPTHDDIGYYSLFSRDTYIAVLLGKRVYQMEGFARSDTRAGVHTDPDKWRNYLRKARAHVGEVVAKSADHRALLDELRGASRARGAAATRKTPAGAKPTVPLPGQSAPLTAPIRPAAAPRPTRADSKTDDGHNLL

SEQ ID NO: 88013 - protein, 527 aa, unidentified
  source 1..527: note = Rhodospirillaceae bacterium
  REGION 1..527: note = tr|A0A2E6GKF0|A0A2E6GKF0_9PROT Tryptophan halogenase; OS = Rhodospirillaceae bacterium OX=1898112 GN=CMM52_03730; PE = 4 SV=1
MASTKASLNRIDKVTIVGGGTAGWLSAAMLGTFLNERHDGPQVEITLIESPRVPTIGVGEATVPGMRALLQRIGLDEGEFLQRCNASFKYAVRFANWNLDKNGSGIEFFHPFDAPEPIQGKNPTYHYHRYGPKNGPGGLIETLLPNAAMIAGQYAPRLFGGNNFEGVISYSYHLDAGLFANYVRDVTLARGINYIRDDVIDVTLDENGFVSELTLEEGGAHPVEMVVDCTGFRGLIIGDALGEPFHPWNKQLLCDRALAIQLPHIDAKNIEPCTTATALGAGWVWNLPLYNRVGTGYVFSSAFRTDEEARDEFIAHLEGKGFTVDEEPRAIQMHVGRRERTWVKNCVAIGLSGGFVEPLEATAIHTISATLRLFAANFPDRSISQPLADRFNRSVGELYDNIVDFIVMHYLTSNRQEPFWLAARNEIDVPASLQENMALWQHILPGDADISGINLFGPPSFLSVLYAKGRFDDVDFPLEGSIDQSDWQDYVAQMQKLKTNYAQHLPRHYEFLTELRNQAARKVLGVA

SEQ ID NO: 88014 - protein, 795 aa, unidentified
  source 1..795: note = Methylorubrum extorquens
  REGION 1..795: note = tr|A0A1P8QUC6|A0A1P8QUC6_METEX Tryptophan halogenase; OS = Methylorubrum extorquens OX=408 GN=BV511_21555 PE=4 SV=1
MFRSERSAPPRLVVAGGGPAGWMAALYLKRVLRRAGWTVTLVGSAPATGASAALATRPAFTRFLKGFGIDEAIFMRRCAATYRLASRYDDWFAEGQGHWHPFGACGPRIAGRDLFHYWMKFRGEGAEDEAGNYADYAPQALMAAEGRGPRPLADRSSLTESGDYGYHLDRTALVRFLRELALSEGVRGVTGRVREIERNLYGDVGALVLDGGQTIEGDIFLDCTGAAAQLIGAALGEAWVAGSGPGDRVARLSLERSSEVPPFTAYRGRAEGWTASLPLADRTEHLFVYDSRTTPPDAAAATLRRAFDGQAGIVDAELRHGRRAAPWQRNVVAMGAAAGAVEPLLGFDLDLVLAGFETFLAYLPRQGEGGDVLRRAYAARLNRFHDDAAEAVAAHYVLGRRSEPFWAAARAVMIPDRLADRLDLYELAGHVALSEEGPFSEGDHYLLFSGADFLPRRPFAPVDVADGREIARLLASIRAQSAQIAGAMAPHVRLMDALHGQAPAAAPAVRIAAASAPAGPAALRQTPEGARLADLVAGLGQPFGYERSVKASPAGLQTDRFLMSLHRASLGLTPEATLDRLAAGLGLPERERAEAAGLIGGADILHLGYEDGPSGALYKLYVEWSSRTDAAWTGADEAGAEPMLVHRAYKWKPGGTHPPVVTLYHWPRVRGPEEIEARLNRMAGAWGPAGAPARDTAHAILRLAQERGRGAVHYLEAREEPGLRLSYDLNLYACGLTVADAEPRLGQAFVDLGVPREAAAMVLRERLQETLGHVAGGVGRDGQPFVTVYSGVAGG

SEQ ID NO: 88015 - protein, 500 aa, Ideonella sp.
  REGION 1..500: note = tr|A0A437RCB9|A0A437RCB9_9BURK Tryptophan 7-halogenase OS=Ideonella sp. KYPY4 OX=1862385; GN = EOE66_17220 PE=4 SV=1
MSLEPVRNIVIVGGGTAGWMAAAALSKVLEGHHQIRLVESDEIGIIGVGEATIPHIGEFNSALGIDEDEFLRATQGTFKLGIEFVNWGAIGDRYVHGFGFVGQATQALPFHHFWLRMAQLGRALPLEAYSINTAAPRAGKFMRARKDMPGSPVADISHAFHFDAGLYARFLRRLAEGRGVRRTEGKIARVSQREPDGFIDAVVMESGERIEGDFFIDCSGMRGLLIEQTLKSGFEDWSHWLPVDRALAVPCASAGPLLPMTRSTAHPAGWQWRIPLQHRTGNGHIYCSSFMGQDEATDILLKHLDGEPLADPRPLKFTTGRRRQFWNRNCVAVGLSSGFLEPLESTSIHLIHTAISRIISFFPHAGFDAADIAEYNAQTHWEYERIRDFLVLHYKATERDDSEFWNYCRTMPVPETLQRKMDLFRSNGRVQRDGLELFAESSWLQVMVGQRLMPKAHHPFADLRSEDEVAAYVQHVAVVIDKCVKAMPTQAEFIAQHCRA

SEQ ID NO: 88016 - protein, 529 aa, Sphingomonas sp.
  REGION 1..529: note = tr|A0A0Q4IX13|A0A0Q4IX13_9SPHN Tryptophan halogenase; OS = Sphingomonas sp. Leaf230 OX=1735694 GN=ASE82_18350 PE=4; SV = 1
MATNTGPGITSDHPITHIVIVGGGTAGWLTACLIAARADRDTARPLSVTLVESPDVATIGVGEGTWPTMRRTLERIGITETDFLLACDAAFKQGSRFDGWRTGAADDSYLHPFTAPVDGDPRDLVSAWSEHGGRFADMVGAQGAICHHDLAPRQRAMPDYAGTLNYAYHLDAGKLAALLTRHATERLGVRHVRDHVVGIDGTEHGDIVAVRTRASGAIAGDLFVDCTGHAALLIGDHYGVATIDRDRELFNDRALAVQMPVAAGSPIASQTNATAHAAGWIWDIGLPTRRGIGCVYSSGHLSDDAAADTLTRHIRATAPDAPDAPLPTFRQLKFQSRHRAKFWERNCLAVGLSAGFLEPLEASAIVLIELSLDALLDNFPSHRGAMDIQATRFNTLFRYRWDRIVEFLKLHYVLSERDEPYWRDHRDAASIPPRLVELLTLWRHQPPSRADFPMIDEIFPAASYQYVLYGMGFPPPTRGPIATADRARTETLLAQIDQRRRMLAAGLPSNRAYLDALRHTTAPAMDLSA

SEQ ID NO: 88017 - protein, 497 aa, unidentified
  source 1..497: note = Mycobacteroides chelonae
  REGION 1..497: note = tr|A0A0E3XSY2|A0A0E3XSY2_MYCCH Tryptophan halogenase; OS = Mycobacteroides chelonae OX=1774 GN=GR01_16650 PE=4 SV=1
MTASYLKVAFGDRITVTVVESARIGAIGVGEATFSTIRHFFDYLGLEEHEWMPSCCATYKLGIRFQDWRKPGHHFYHPFERQRVVDGFGLTDWWLDNPRSDSFDRDCFLIGTLCDNDKSPRRLDGSLFMDTDGEHTAYRTTLSEQDTQFPYAYHFDASLLADFLRDFAVRRGVRHVVDDVVDVLQDDRGWISEVRTRAHGSIEGDLFIDCTGFSGLLLGRAMGEPFESYQGSLLNDRAVALRVPTDQNGGHLPPYTTATAQDAGWIWSIPLFDRIGTGYVYAEDYCSPEDAERALRDFVGPAAEGLEANHIRMRIGRSRRSWVGNCVAIGLASGFVEPLESTGIFFIQHGIEQLVKHFPDENWEERLRDSYNRVINRCMDGVREFLVLHYYLAARVDTQYWRDTKSVQLPTALAERIEHWRSKLPDAGSVYPHYHGFEPYSYVCMFVGLGGIPARPAAVVRYLDATRAQREFDLIAQQASRLRHSLPTHREYLAQMY

SEQ ID NO: 88018 - protein, 498 aa, unidentified
  source 1..498: note = Caulobacterales bacterium
  REGION 1..498: note = tr|A0A1F8HXU0|A0A1F8HXU0_9PROT Tryptophan halogenase; OS = Caulobacterales bacterium RIFCSPHIGHO2_01_FULL_70_19; OX = 1797585 GN=A2623_03275 PE=4 SV=1
MRQLKRILIVGGGTAGWMTAALLSKLFNGVYEIVLVESEAIGIIGVGEATIPAIKKYNELLGLDENEFLKRTQGSFKLGVQFVDWWKLGHSYIHGFGLIGRDLGWLRCHHYWLKARASGRVSDFADYSINTAAALENRFMRADPKMSESPLGHIAHAFHFDAALYSRYLRGLAEAAGVRRREGKVADVTLRSDDGFVQSVTMEDGEVITADLFIDCSGFRGLIIEQALKTGYEDWTRWLPCDRAIAVPCASTEPFTPYTRATARTAGWQWRIPLQHRTGNGHVYSSRFIDDAEAEAILLANLDGEQLAEPNRLRFTAGKRMKAWNRNCVAIGLAAGFLEPIESTSIHLIQSAIIRLVRLLPDAGFDPATIAEFNRQTDFEYERIRDFIILHYKATQRDDTPFWRYCREMEVPDTLQRKMDLFAANGRIFREDEELFAEESWIQVFLGQGVVPRGYDPLADLKTDAEVAAFLDNIETVIRKCVAVMPSHADYVARHCPA

SEQ ID NO: 88019 - protein, 500 aa, unidentified
  source 1..500: note = Izhakiella sp.
  REGION 1..500: note = tr|A0A4P8YKB5|A0A4P8YKB5_9ENTR Tryptophan 7-halogenase OS=Izhakiella sp. KSNA2 OX=2579935; GN = FEM41_13305 PE=4 SV=1
MLNLRSPAPQRIVVLGGGTAGWFAAIALRRLFSPKVDIQVIESSSIGIVGVGEGGLLNFINALQRYQIDIDEFVRETGAAWKWGFSYEGWRTGGEDDRFYHLFASQETPVSRWSERGFYPCLSAMIGQNIPLESYLAASPLIKANTPQDQASALLKANGGDIVPSFHFDSYKLATYLKKVALSRGVMHLDTVVEEVVFDQQGHARMLRCADNRTIDVDFLIDASGLSRKVLGKSMGGKWHSFSDYLLMDSAIPFYMPHPHENPMLVTRAITMDAGWMWQIPLIDRVGAGYVFSSKHISEQQAIAEIEQRLGYAITPHKTLRFDPGCFEEVWVGNVMALGLSSGFVEPLEATSIGQMLEQLYSFERVLVHSQGIISDKTIREFNQANFQSWLGIRDFLRMHYDNTRRDTPLWQAVSESPYPESYRALRECWQERTPRLLDVESYAINGWRGIFHAINWMFVAAPLGVVPSRAGQMDLLALPAEKRQQALNFAAERHQEINR

SEQ ID NO: 88020 - protein, 499 aa, Sphingopyxis sp.
  REGION 1..499: note = tr|A0A0W1G4G7|A0A0W1G4G7_9SPHN Tryptophan halogenase; OS = Sphingopyxis sp. H071 OX=1759078 GN=ATE69_19920 PE=4; SV = 1
MNQDNPLRRVVIAGGGTSGWMMAAAIARTLGHTVDLTLVESEQIGTIGVGESTIPPLVNFNRILGIAEPEFMRAAQATFKLGILFDNWKYDGHSYFHSFGLSGKDHWSAGFQHFWLAARAKGYPHSYDDYCLELVAGLQGKFAHLPEDRMNYAYHVDATLYGRYLRKLAEADGAKRVEGRIEKVELDGETGNIAALLLDGDRRIEGDMFVDCTGFRGLLIDGALHAGFEDWSHWLPNDSAIAVQSDHLGPPMPYTQAIAHDAGWQWRIPLQHRMGAGIVYSSGYLSRDEALNRLMSSVGTPRIEPFDIKFKGGVRRKQWYRNCVAVGLAGGFVEPLEATTVHLIQRAVLRFIRLMPNGRVSERDAIEFNEQQRQDIEQIRDFVILHYKATERRDSPFWRHVANMPVPDSLQQKIELFRETGRTFRKNEELFAENSWVQVMMGQGVEPQSWHPIAEKFGDDELEKFMAGLRENVARTAATLPDHHAYVARYCGAAEPQAA

SEQ ID NO: 88021 - protein, 508 aa, Sphingopyxis sp.
  REGION 1..508: note = tr|A0A0W1G664|A0A0W1G664_9SPHN Tryptophan halogenase; OS = Sphingopyxis sp. H071 OX=1759078 GN=ATE69_18315 PE=4; SV = 1
MSPSAEEPLHIVILGGGSAGWMTAALFAHLWRDSPIRISVVESPDIGIIGVGEGSTPQLKAFFDGLGIAEAEWMPACDATYKLGIAFEGWSAGGQESGYFHPFPGTLDVHTQAEFFRNAALRRTGVDVPANPDRFYLAGRVAARGGGPHGGESFPFDLAYGYHFDAYKLGAFLRDHAVSQGVTHLARKVVSVDVGADGNVRSLGLEGGEALAADFFVDCSGFGGLIAGQALGARFLPFAENLFNDRAVVMPTAHDERGPVVTATKSIAMTAGWRWAIPLTTRIGNGYVYSSRYLDRDQAERELRIALGLTDADGPARHLEMKVGRLEHSWTANCLAMGLAQGFIEPLEATALHIVIATAQEFITAFEGGGFTPRHRDIFNARIAARYEGVRDYIVAHYRMNQRDADRGYWRDAAGLETLSDNLKAMITAWFTGADIGEAIEDLRIGAFYPNISWHCLFAGYGVFPSNAAMRSPVTTDRPADLAAIDRFLSRAELNFVPPTFPVAARRP

SEQ ID NO: 88022 - protein, 516 aa, Sphingomonas sp.
  REGION 1..516: note = tr|A0A0Q4IT85|A0A0Q4IT85_9SPHN Tryptophan halogenase; OS = Sphingomonas sp. Leaf230 OX=1735694 GN=ASE82_00030 PE=4; SV = 1
MTKRILIVGGGTAGWLTAGYLAKRLGADLPGGVAITLVESQDIGILGVGEGTFPTIRRTLATIGIDEADLIRRCGATFKQGAKFVHWRHAPGQGATDHYSHPFQVADSSDGLDLLPYWLLGHGGPENWDEVSNPQKKASDRHRAPKLPTNPDYVGPLNYAFHFDAVALAGLLREQGVKNGVRHLTDTVSEVLLDAEGAIGGVRTERNGVLDADLYIDCTGFRAELIGKAMKVPYRSCRDVLFCDRAIAAQLPYARPDDPIASYTISTAQKNGWIWDIGLDRRRGIGHVYSSDHGDDETAERVLRGYLGAAGEKADVRHFKFDAGYREVNWYKNCVAVGLSSGFFEPLEATGIAFAEVSAGMIANLFPWGGDYETSARQFNANMLRRYERALDFIKLHYCISERRDTAFWRDNVADTSVPDSLLELLDRWRFRPPNELDIDGQVDIFTEASWQYVLYGMGWKTDLSAKAGALRYHEDARRAFAEVQRQARYAIANLPSNRDLVAYAQTHSFGARAAA

SEQ ID NO: 88023 - protein, 491 aa, Sphingomonas sp.
  REGION 1..491: note = tr|A0A0Q4IVM5|A0A0Q4IVM5_9SPHN Tryptophan halogenase; OS = Sphingomonas sp. Leaf230 OX=1735694 GN=ASE82_04445 PE=4; SV = 1
MTACLIAHRWRDRSVRVTLVESPEIGIVGVGEGSTPQLKHFFDTLGIAEAHWMPACDATYKLGIGFEGWSDRAGYERYFHPFPTALDGHTAPQFFYNTRARRTGRDVDAHPDQFLLPARLAATNCAPQPAANFPFEVSYGYHFDAYKVGAFLATHATEMLGVVHLQRRIASVERASTGEITALIDTDGERIAGDFFIDASGFRSTIFSALDVPFVSYADALFNDRAVVMPTARTPGTPIPSQTRATALSAGWAWHIPLTSRNGNGYVYSSRHLTEAQAEAELHTNISAEAGEARHLKMRVGRVRDSWSHNALAVGLSQGFLEPLEATALHLVIATVEAFLDGIDGGGATDAVRTAFNTRIAARYDGVRDYIVAHYRLNQRHDDPTGYWAEARGVDALSGDLKMLMSTWFTGADMVAAIDRAGLGRYYSAISWHCLFAGYGTFPDAARLIPPGADIDPIDLPKIDNFLTRCASNFGSHASRLRAAADHKDQI

SEQ ID NO: 88024 - protein, 500 aa, Sphingomonas sp.
  REGION 1..500: note = tr|A0A0Q4IWZ8|A0A0Q4IWZ8_9SPHN Tryptophan halogenase; OS = Sphingomonas sp. Leaf230 OX=1735694 GN=ASE82_04900 PE=4; SV = 1
MSARIQVVIVGGGTAGWMTAATLAMSFAGRLADVTLIESEDIGTVGVGEATVPHIRFFNQRLGIDEADFIRRTNATFKLGIEFRDWGRIGDSYIHPFGDFGHDIDGLPFHQYWAHATRGGADGLPKLEDCSLPIVAARDNRFTPPLEDPRSIGSTYSYAYQFDATLYAAYLRDYVEARGVVRIEGRVDAVEQKDDGIGAVRLADGRRIAGDLFIDCSGFRALLIDGALKVGHEDWSHWLPCDAAWAVPTANAGALTPYTRATAREAGWQWRIPLQHRTGNGHVFSTRFTDPETARSVLMDNLEGEALAEPRMLRFRTGRRHRQWVGNCVAIGLSAGFLEPLESTSIHLIQLAIGKLIELFPSGGVFDPADEAEFNRAMALEYDRVRDFLVLHYCATDRDDTPFWRYMRTMTLPSSLTEKIAEFRERGIVASYREGMFLPASWLAVYYGQRIMPDRLNPLIADIPMATSRDHVARVAAACASAAKAMPLHEDYIARIKAAA

SEQ ID NO: 88025 - protein, 524 aa, Streptomyces sp.
  REGION 1..524: note = tr|A0A022MEK3|A0A022MEK3_9ACTN Tryptophan halogenase; OS = Streptomyces sp. Tu 6176 OX=1470557 GN=CF54_29390 PE=4; SV = 1
MSTPEHATGTTPAGPAGSYDVVVVGGGPGGSTTAALVAMAGHRVLLLEKESFPRHQIGESLLPATIHGVCRFLGVTEELEKAGFMPKRGGTFRWGSNPEPWNFLFAYSPLMSGPTSTAYQVERMKFDKILLDNARRLGVEVRERCTAVATLSEGERITGLRWTDEDGRTHETAARYVVDASGSNSKLARTVGKRNYSDFFRNVALYGYYEGGKRLPGPDAGNILCCAWDDGWFWYIPLTDTLTSVGAVVNRSQVGTLSRDPEGAMAQFIEQAPMIKEFLQDAERVTEGPYGELRVRKDYSYAMERFWQPGMVLVGDAACFVDPVFSTGVHLATYGGLLAARSINSALDGELDEERAFGEFERRYRREYGVFYEFLLAFYDMQHNEESYFWQARKVSRAEATDLRAFVELVGGVSSGESALTDLETLKERFGGSSRELADAVTRTGPAQTESGERMGELFGTQVVTEVMQGMNEVQARASMGGATTLEKPLFEDGLVASNDGLGWAVPVTADAAAAVSAQEGPAA

SEQ ID NO: 88026 - protein, 510 aa, Sphingomonas sp.
  REGION 1..510: note = tr|A0A0Q4IT60|A0A0Q4IT60_9SPHN Tryptophan halogenase; OS = Sphingomonas sp. Leaf230 OX=1735694 GN=ASE82_00035 PE=4; SV = 1
MTSDGAARVTKVVIVGGGTAGWMTAAALSRLVPSGVSVTLVESEEIGTVGVGEATIPPLLDFNRMLGIDEDAFVRATGATFKLGIEFRDWVRLGDAYLHPFGTHGRDIGGVSFHQLWLRQAALGNPDPGPIGDYCLSAVAARRGRFTRPSANPESVLSTLFYAFHFDAALYAKLLRDMAEQDGVVRVEGRVVAVERDAGTGFIEAVRLEGDRRIDGELFIDCSGFRSLLLGDALDVPFTSWKHWLPCDRAWAVPSQRQGGLTPYTRATADTAGWRWRIPLQHRVGNGYVYSSAHIDDDDARRALLAGLEGEALGEPRQLRFEAGRRDRLWERNCVAIGLSGGFLEPLESTSIHLIQSGITRLMSLFPDLGFGVTEIDEYNRVMLREYEQVRDFIILHYHATERSDSPFWDRCRTMAIPASLSAKLALWSGKARVFREQGELFTPDGWIAVLLGQGIRPASFDPLASALPADESARFLAHVRDVIDKTAAAMPTHEAFIAQNCAARTHQAA

SEQ ID NO: 88027 - protein, 497 aa, Massilia sp.
  REGION 1..497: note = tr|A0A4R3V066|A0A4R3V066_9BURK Tryptophan halogenase; OS = Massilia sp. GV097 OX=2135674 GN=C8K02_103562 PE=4 SV=1
MEAAQHSAYKRIVVVGGGAAGWMAATALATALPASRVELVESEEIGIIGVGEATFPSIRAFHKILGIDEAEFLRATNGTYKLGIEFCDWRAQGERYFHTFGDLGALAGPQALWGQHRRLGSDSPGALGEQCLPSVMAGQGRFQVPPEREQFFNYAYHFDAVLYAGFLRALALKRGVRRTEGRIVEVARRADGGVAQLRLGDGRTVPGDLFIDCSGFASLLLGRTLDEPFVDFSHWLPVDRAWACPSERSGPDLAPYTRATALEAGWAWRIPLSNRTGHGHVFASRYIDEERARAQLLQQMDAPALGEPRLLRFTTGHRERFWVHNVVALGLSSGFLEPLESTSIFLVQSGLGRLIELLLPGAAPAAPAVADYNAAMVRQFERVRDFIILHYCLTGRRDSKLWRAMASMELPETLAFKIHAWRQAGALHQYSDEGFDATSWLAIHAGMGHWPERADPALRELAPDAVRQALRQRRDSIAAVVAAMPTHDAYLRSVLGR

SEQ ID NO: 88028 - protein, 520 aa, Xanthomonas campestris; identical to SEQ ID NO: 85115
  REGION 1..520: note = tr|Q8P3V3|Q8P3V3_XANCP Tryptophan halogenase; OS = Xanthomonas campestris pv. campestris (strain ATCC 33913 / DSM 3586 / NCPPB 528 / LMG 568 / P 25) OX=190485; GN = prnA P E=4 SV=1

SEQ ID NO: 88029 - protein, 502 aa, Sphingobium amiense
  REGION 1..502: note = tr|A0A494W975|A0A494W975_9SPHN Tryptophan 7-halogenase OS=Sphingobium amiense OX=135719; GN = SAMIE_1002500 PE=4 SV=1
MQASQTGAASGGTRVVIVGGGTAGWMTASALATLMGGAVDIHLVESEEIGIVGVGEATLPHLRAFLERIGADEAAFMAATHATYKLGIQFDGFGCEGQSYIHPFGTYGRPLAGVGFHHFWLRARAEGHAARIDEYSLAVMAAEARRFARPQPDAAQVDSFGYAYQFDATLFGPYLRGIAEPRGVTRTEGRVASVERDAETGDVRALLLADGQRIEGDLFIDCSGFRALLIGDEAWEDWSHWLPCDRAVAVPCRAADAGIEPFTRATAMPAGWRWHIPLRHRVGNGYVYSSAHCSDEEAASALLAAIEGEALAEPRLLRFRAGRRRRSWVGNVVSVGLASGLLEPLESTSIYLIQMAITGLVEHFPGRGIDPIERDAFNREVDYEYDRIRDFLILHYHATERRDSSFWNHVRTMDIPDTLAEKLELWRSAALVPQYRRGLFLEPSWISVLVGQGVLPEGWDVRAELPESGGLAAALRGLHTHIASRVAAMPPHHAALGARAAP

SEQ ID NO: 88030 - protein, 514 aa, Asticcacaulis excentricus
  REGION 1..514: note = tr|E8RTY9|E8RTY9_ASTEC Tryptophan halogenase; OS = Asticcacaulis excentricus (strain ATCC 15261 / DSM 4724 / VKM B-1370 / CB 48) OX=573065 GN=Astex_3326 PE=4 SV=1
MTGKRRLLILGGGTAGWLAAAYLARYFDLNRQPRLELVLVESPEINSVGVGEGTFPTIRQTLKFIGIDEARFMRRTTATFKQGIRFADWVKTPVNGQHSHYFHPFEAPYYTEGEGLVPYWLLQDEATRKPFAEAVTFQKRVAEARRAPKRPHEGDFAGPLNYAYHFDAYQLAEVLAERAVALGVLHKPARLDGVVLDHTGQIDHIVADGEVLRADLYIDCSGFRAELIGKALGSPFRSVRDTLFTNKALACKAPYERPDTPIESYTVATGHSAGWTWDIGLVGQRGIGYTYSTDHTSDDEAEATLHRYVGSKAPLNLREIAFEPGYRERPWIGNCVAVGLAGGFMEPLESTGIVMIEVAVAMIAELFPHAGPIDAPARRFNALMTARYEHIVNFLKLHYALSRRSEAFWRDNADPQTWPDRLRELLDQWRYRPPSRFDFLIDVETFAFFNYQYILYGMGYRTDLSGARDQFPHVEDANRTFAKIHNFGERATLDLPPHRTLIRQIYAEGFAESA

SEQ ID NO: 88031 - protein, 376 aa, Corallococcus sp.
  REGION 1..376: note = tr|A0A3A8LN07|A0A3A8LN07_9DELT Tryptophan halogenase; OS = Corallococcus sp. CA047B OX=2316729 GN=D7X74_01155 PE=4; SV = 1
MSDAHCDVAVLGGGPAGAGVALALRAQARLSVTLVERAPQAASRIGETLPPDARLPLAKLGVWGGFLRDGHLPSRGTASSWGSATVGYHDTLMSPWGSAWHLDRARFDASLRAHVVERGGTVKVGTTLVGCEALGEEGFRLHLSHPAEGPSTLSARFVVDATGWKADFATSQGARRQVVDRCFALYGDFRLREGAAFSTQALVEARPEGWWYSALLPGGRVVVALMGDGESLRGVRPSAPEAWLSLLGRTTATRERLDACDFTGEPLRAVPATVGLLDRPHARHWLAVGDAACTFDSLSSQGISKALGSALLAAEALEQHLRGVPDALDAYAARVRQGFVEHLRTRDFYYREERRWPDAPFWRNRREALASGALAA

SEQ ID NO: 88032 - protein, 513 aa, Asticcacaulis excentricus
  REGION 1..513: note = tr|E8RTX2|E8RTX2_ASTEC Tryptophan halogenase; OS = Asticcacaulis excentricus (strain ATCC 15261 / DSM 4724 / VKM B-1370 / CB 48) OX=573065 GN=Astex_3309 PE=4 SV=1
MRENPEAIKSICILGGGTAGWMAASALAHKLQSLPVSVTLIESEEIGTVGVGEATLPHIRSFNAALNIDEVTFMKATEATFKLGIEFCNWGRIGDRYIHPFGDYGTPIDGIPFYQYWLRLKQMGEAGRLDTYAYPIAIAEANRFRHPASDPAQIESTFGYAYQFDAGRYAAFLRRFAEGHGVIRREGKVVDCQLNPDNGHVAALTLDNGVVIEADLFVDCSGFRGLLIEQALKTGYDDWSQWLPCNRAVAVPTESRGGLTPFTRATALEAGWQWRIPLQHRTGNGHVYCSSFISDEAAHARLLGNLDAPTLADPRQLYFTTGRRRQFWNRNVVAIGLAAGFLEPLESTSIHLIQEGITELLQIFPDKHFRQSDIDEYNRRMGVNFERVRDFLLLHYVATQRDDTEMWRYFRNMTLPDSLEEKIQAWLTRAHLIRYEFGVFLPPSWVAVMLGQNLIPRHYDPRVDRLSSDEVRRAGDALKHRVSAAAAATPDHGAYIRKMGAASDTGPLLAKGA

SEQ ID NO: 88033 - protein, 501 aa, unidentified
  source 1..501: note = Chitinophagaceae bacterium
  REGION 1..501: note = tr|A0A4Q3TX78|A0A4Q3TX78_9BACT Tryptophan 7-halogenase OS=Chitinophagaceae bacterium OX=1869212; GN = EOO07_10325 PE=4 SV=1
MTTSVKKIVIVGGGTAGWMTAAGLKHHFKNIIDITLIDSSEIATVGVGEATIPTIRNFYRQLGMHDLDVMRATKATAKLGIQFNGWYKKGSSFIHPFGLFGQDLQGIEFHHFWLKLHRKNKAVDLGNYSLGAMLAQHNKFTTPISNPPSSLSVFDWALHFDAALFAAHMQQFSVGLGVHHIDSTILNVNIDDQSGFISSVDVQSGQKISADLFIDCSGFRGLLIEQALQTGYEAWSDWLLCDSAYAVQSKSMGEPNSYTKVTARTAGWQWQIPLQHRHGNGHVFSSRFISDEEACDTLIKNISAELTTSPKKLTFIPGRRKKAWNKNCVAIGLSAGFLEPLESTSIALIQTGIEKIKVLLQNAQFGDAIINEFNETTALEYERVRDFIILHYKATVRDDSEFWRYCKTMSVPDSLRHKMELFKANGHIVNYRWEMFHLPSWLAIFAGFNYLPETYNVLVDTIDEAMLEQSLEKMRGSIINIINDVPTHQEFISNCCAVVDE

SEQ ID NO: 88034 - protein, 504 aa, Massilia sp.
  REGION 1..504: note = tr|A0A1M5LLG8|A0A1M5LLG8_9BURK Tryptophan halogenase; OS = Massilia sp. CF038 OX=1881045 GN=SAMN05428948_1487 PE=4; SV = 1
MNGQLEDIVIVGGGTAGWMTAAALSRLLPAGHRIRLVESDAISTIGVGEATIPSIRAFNHLLGLDENEFMRQTQATFKLGIEFRNWGGEGDNYIHGFGQIGRDQVLAKFYQYWLKLYQLGEADDLGAYSINTLAPRHGKFMRPPDDMPNSPLADIAYAFHFDAGLYAKFLRGVSEAQGVKRIEGRIVNTELRGGDGFIEAVVMENGEKIKGDLFIDCSGLSGLLIEKTLQTGFEDWSALLPADSAIAVPCVSDGSLAPYTRSTAHRSGWQWRIPLQHRTGNGHVFSSKFMSADEAQAILMANLEGEALAEPRLIRFTTGKRKKAWNRNCVAIGLAGGFMEPLESTSIHMVQTAIMRLIALFPDRSFRQADVDMFNAQSDDEYERIRDFLIMHYHVNRRTDSPFWTYCRDMAVPDSVRERIALYQGHGRIFRKGDELFADASWLQIMHGQGLRAQSYHPLVDQRSKDDIAAFVGAVHKTIAACVEAMPSHAEYVAAMCPAPKMAA

SEQ ID NO: 88035 - protein, 509 aa, Stenotrophomonas rhizophila
  REGION 1..509: note = tr|A0A4U3GQ19|A0A4U3GQ19_9GAMM Tryptophan halogenase; OS = Stenotrophomonas rhizophila OX=216778; GN = SrhCFBP13529_05450 PE=4 SV=1
MNVADTTHGRIRKVVIAGGGTAGWLAGCALSHQFRDQLDITLVESEQIGTVGVGESTVPPIRTFHRFLQIDEQEFLRAVAGTFKLSISFENWRRPGDRFIHPFGTIGQGTWATPFHHFWLDSLRRGMPSDLGDFCLESVASRGDQFSLETQPTLNYAYHFDAGLYARFLRRKAEGHGLRRVEGKIREVRQHAHDGSVAALVLEDGQVIEGDLFIDCTGFRGLLTEQTLHTGYEDWHEWLPSDRAVAVQTEAVAPPVPYTRAIAHEAGWRWHIALQHRVGCGLVFSSRHMSDDEAQAKLLRDVDGPPLRDPWLVPFRSGRRLKAWNKNVVALGLASGFIEPLESTSIHLTISAVVRLIQLFPIDGISPALVALYNDVSRQEMEHVRDFIILHYHATQRDEPMWKACREMALPESLAIRLRAWRERAHAWQDPGELFRVDSWTSVLMGQGIQPGPPHPLAAAINDADLRTLLARIRQPVQQAVATMPSQAAFIERYCKAAADVWPRRSAVA

SEQ ID NO: 88036 - protein, 540 aa, Vibrio mangrovi
  REGION 1..540: note = tr|A0A1Y6IR30|A0A1Y6IR30_9VIBR Tryptophan halogenase; OS = Vibrio mangrovi OX=474394 GN=VIM7927_01327 PE=4 SV=1
MENRDVIIIGGSKAGACLARQLKLSNPELDITIIERKNQFNSWVGESTLESFWDYMNKDLQLGHYLDSKFIYKHGLRFFFDNNDHSLPVNQMSEVGRSWYHSIPAVQIDRQVFDNDMVTFNREIGVEVRMGESVSDLEIDGEQGHTVITSKGTYKCRYLVDASGFSSPLGKKLGLIEPQDIKYSVSSMWGRFKFTNAIDQLGGTSWHERTNFTTRQLSTNHFMYKNYWFWLIPLDEQTVSIGLTSKDSQPDLGIKNQAAFIEFLQSHQCMKEILGDQFEIQDFQLMKRLSRRATVSFSKDRWFLTGMSSGFLDPMISPGSAYLTDANRMIGEIIQADLANDTTTFEGKIKAYNGYLYRWYESFKRHITGNYHGSYEVHRTNINASLIHWYGSILPKSFAKKYGYTESINSMTQEEIYQQIDKEVMMSGIYRVHQLAQEFEDVIKGHEYRLNQGEFFDIVLKEDQMMHSFTRGKYFNMSCEEIIDHDMLRAVYRNFIYSIHDFNNTQLNASEEKLSHAIECAISDQLSLAETMKLLLKEAA

SEQ ID NO: 88037 - protein, 506 aa, Alteromonas sp.
  REGION 1..506: note = tr|A0A3A9USX9|A0A3A9USX9_9ALTE Tryptophan 7-halogenase OS=Alteromonas sp. BL110 OX=1714845; GN = D7031_11795 PE=4 SV=1
MFTPLKKSINRVVIAGGGTAGWLAASLLKKLLGQAIEITLVESEAIGTVGVGEATIPPIRLVNQVLGIDEAQFIHDTKATVKLAIRFENWKTKGESYFHTFGAPGRSMAFCHFHHYWVKARQQGLENDLWDYDLNYLAAEAGKFAQINAKDPVLELPFAYHFDASLYAQYLRKLSEQMGVVRVEGKIARVQRFTDSGYIQALHLESGEVIEGDLFIDCTGFKGLLIEGALGAGYDDWSHLLPCDSALAVPSERHKHTAPYTRSIAHKAGWQWRIPLQHRNGNGHVYSSRYISDDQACDTLLSNLDTKPLADPKLIKFTTGRRRKQWYKNVVAVGLSSGFLEPLESTSIHLIQSAIVRLIQLFPHNGVTKSLIDEYNKQSEVEFEQIRDFLVLHYAVNERTDSAFFNDMRNITLPDSLAHKIELFKENGVLQREQNDLFLESSWLQVLYGQGVMPKDYHGLVNSVPDAQLSQMLTKLLELKREPIAKLPSHDDYINGMVAKYKRSLR

SEQ ID NO: 88038 - protein, 517 aa, unidentified
  source 1..517: note = Pseudoxanthomonas composti
  REGION 1..517: note = tr|A0A4Q1JSM2|A0A4Q1JSM2_9GAMM Tryptophan 7-halogenase OS=Pseudoxanthomonas composti OX=2137479; GN = EPA99_18425 PE=4 SV=1
MERNISHVVIVGGGSAGWLTAGLIAAEHRDRHGPTLRVTLLESPDVPAIGVGEGTWPTMRDTLHRIGVSESDFVRACDATFKQGSRFVGWCDGSANDAYYHPFVLPQGYGETHLVSGWLARDGRVPFAHLASFQPHLCDAGLGPKQFGTPEFAAVANYAYHLDATSLGVFLRTHCVQRLGVQHVVGHMEGVDSHEDGDIAAIRIRDAAVLQGDLFVDCTGMRSLLLGGHYGIPITAVGEVLFNDRALALQVPYTRADAPIASYTRSTAQEAGWIWDIGLSARRGVGHVYASAHTSDDAAEAALRRYIAATGGPAEDSLPAARRIELNPGYRRTAWHRNCVAIGLAAGFVEPLEASSLVLVELAATRLAEEMPATRQDMTLLAERFNDTFAYRWQRVIEFLKLHYVLSRRQGDYWRRHRDPATVPASLQAMLQLWRHQPPSRSDFPRSEEIFPSASWQYILYGMGVRPQPRPARRADDPTAAESWFGEAAAMAQRMLPALPSHRALVEHIKAHGLPRI

SEQ ID NO: 88039 - protein, 512 aa, unidentified; identical to SEQ ID NO: 86406
  source 1..512: note = Unknown
  REGION 1..512: note = tr|A0A061QC63|A0A061QC63_9PROT Flavin-dependent tryptophan halogenase RebH OS=alpha proteobacterium Q-1; OX = 1492281 GN=rebH PE=4 SV=1

SEQ ID NO: 88040 - protein, 494 aa, Rhodanobacter sp.; identical to SEQ ID NO: 83932
  REGION 1..494: note = tr|A0A1E4NP26|A0A1E4NP26_9GAMM Tryptophan halogenase; OS = Rhodanobacter sp. SCN 66-43 OX=1660135 GN=ABT18_04025; PE = 4 SV=1

SEQ ID NO: 88041 - protein, 501 aa, unidentified
  source 1..501: note = Alteromonas aestuariivivens
  REGION 1..501: note = tr|A0A3D8M7W8|A0A3D8M7W8_9ALTE Tryptophan 7-halogenase OS=Alteromonas aestuariivivens OX=1938339; GN = DXV75_10250 PE=4 SV=1
MTQQLRKIIILGGGSAGWMTAAALGKILKNQFCEIQLIESQDIGTVGVGEATIPQILLYNDLIGLDENEFLRRTQGTFKLGIQFTDWDEIGSRYYHAFGEVGKNMEGVQFYHYWMKMRAQGKAAPLDEYTLSSLACNEKRFMRSVDAGNSPLSNIAYAFHFDAGLYALYLRELSEKCGVVRTEGKVTEVQQHPDGSIKSLRLADGSVHEADFFIDCSGFRAVLIEQTLQTGFDDWRHWLPCDRALTVASTLNEEPWPFTRAAAQKAGWQWRIPLQHRIGNGHVYCSEFMDEAEARQILLSNLDGKPLNEPRLIRFVTGKRKKFWNKNCLAIGLSSGFMEPLESTSLHLVQMAISKFFSFFPTRQPVGADIDEFNRQMTFEFERIRDFLILHYHVTQRSDAPFWEYCRTMPVPDSLTQKIEQFKASGRVFRFNNEMFSDLSWFEVMYGQGLRPESFHGLTGLFGEDELARRLDGIRNVVRRSADYMPSHQAFINEYCKAPVG

SEQ ID NO: 88042 - protein, 530 aa, Streptomyces sp.
  REGION 1..530: note = tr|A0A2N3UXJ6|A0A2N3UXJ6_9ACTN Tryptophan halogenase; OS = Streptomyces sp. GP55 OX=1798190 GN=AXZ45_7072 PE=4 SV=1
MSNRINKVVILGGGTAGWMTAAYLGKALQGTVDITVLEAPSIPRIGVGEATVPNLQRAFFDFLGIPEDEWMRECNASFKVAVKFLNWRTPGAGQATARSYQGRPDHFFHPFGLLPSHDNVPLSHYWEYRRLQGETDEPFDYACFTDIAVMDGNLAPRYPDGRKAVNYAWHFDAALVADYLRRFATDKQGVHHLSDEMTEVLKDGRGFITGLRTKAGRLVEGDLFVDCSGFRGLLINQAMAEPFLDMSDHLLCDSAVATAVPHDDEANGVEPYTSSIAMRHGWSWKIPMPGRFGSGYVYSSKFTEQGEATEEFCRMWGLDSDAKFNHIRFRVGRNRRAWVKNCVSVGLASCFLEPLESTGIYFTYAAIHQLAKHFPDRGFDQTLVDRFNREIQEMFDDTRDFLQAHFYLAPRTDSEFWRANKELALPDNIREKIAMFRAGVPINPPATDESNYYGNFDAEFRNFWTNGSYYCIFSGLGLRPDHPLPALTYRPESVQGSQRLFDQVKQRQRELTETLPTNLEYLKQLHGTRP

SEQ ID NO: 88043 - protein, 491 aa, unidentified
  source 1..491: note = Pseudoxanthomonas composti
  REGION 1..491: note = tr|A0A4Q1JY03|A0A4Q1JY03_9GAMM Tryptophan 7-halogenase OS=Pseudoxanthomonas composti OX=2137479; GN = EPA99_04665 PE=4 SV=1
MAAAAFAQVLGPSVAVTLIESEQIGTVGVGEATVPHIRAFNNLLRINEAEFVRKTQGTFKLGIQFVDWERLGKSYVHGFGSKIGQSAGLLAFQNYWFKARQQGWAKPLDAYTINTAAALAGKFMTSATDVPPESPLANIAYAYHFDAGLYARFLRHYSEQRGVTRLEGIVDAVELHPESGNVTTIRLQDGREVGGDLFIDCSGFRGLLIEQALKTGYHDFTHWLPCDRALAVPCEKVGPPTPYTRATARAAGWQWRIPLQHRTGNGYVYSSAHLSDDEAAATLLANLDGKPLGDPRPLRFTTGRRKLCWNRNVVALGLSSGFMEPLESTSIHLIQSGIAKLLELFPRDGFSPVLVQRYNDRLAFEFDRIRDFLVLHYHATERDDTAFWRECRNMTITPELQGNLDLFRDSGRFYRNGEEMFGEISWVQVMVGQGVMPRSYHPLVDQIPEQELRGFLSGVEQTIARCVDAMPGHQAFIDRFCAAAMTPAMRS

SEQ ID NO: 88044 - protein, 498 aa, unidentified
  source 1..498: note = Flammeovirgaceae bacterium
  REGION 1..498: note = tr|A0A2D7NTC7|A0A2D7NTC7_9BACT Tryptophan halogenase; OS = Flammeovirgaceae bacterium OX=2026740 GN=CMB82_01075; PE = 4 SV=1
MTDYKDRPINRVVIAGGGTAGWMTAAALSRLVGRKLHVTLVESEEIGTVGVGEATIPTLLTMNRLLQIPEPDFIKATSGTFKLGIRFENWLYEGHDYIHSFGDTGKGCWAGGFQHFWNKAQQKGLATEYGAYCTELRAALENKFGILSEHKLNYAYHLDATAYGQYLRRLAEASGTRRIEGQIDRVSLSETTGFIDYLQLKDGQQIAGDLFIDCTGFRALLIEDALKTGFDDWSHWLPCNRAWAVQTEPTDEPVPYTRAIAHDSGWRWRIPLQHRVGNGLVYCNHYLDDNAARERLLSSIDGTPIIEPRPIRFTTGQRKQYWHKNCIALGLSSGFIEPLESTSIHFIQNGIMWLLLMFPDSVMSQASVDEYNNKLRSEAERIRDFIVLHYYANQRTGEPFWDMCRDLPIPDSLSQRVALFKDAGRVFKPQEDVFSENSWVQVMMGQGIMPERYHNIVDSMSTEQLRQFLNDIQSDVERTVAALPNHGAFVDALVAQTK

SEQ ID NO: 88045 - protein, 491 aa, unidentified
  source 1..491: note = Alteromonas aestuariivivens
  REGION 1..491: note = tr|A0A3D8M9Z0|A0A3D8M9Z0_9ALTE Tryptophan 7-halogenase OS=Alteromonas aestuariivivens OX=1938339; GN = DXV75_07365 PE=4 SV=1
MQEQHKQKVVIAGGGTAGWMAAAALARTIGKTLDITLIESSDIGTVGVGEATIPTLVFFHKLLKVSEQEFMAATHATFKLGIQFENWRDVGEDYLHAFGVTGKDCWAAGFQHFWLKGLEKGFSQGFGDYCLERVAAEAGKFAHLPNNGLNYAYHIDASKYAQFLRQLSEKEGVKRIDAKIQHVNTRAKDGFIDHLVLDNGEKIAGDMFLDCTGFRGLLIEQALHTGYEDWSHWLPCDSAVAVQTEATGSPAPFTRSIAHESGWQWRIPLQHRVGNGLVYCSRYLKDEDAVTRLLDRIDGQPLNDPKVIHFRTGRRLKQWNKNCVALGLASGFLEPLESTSIHLIQQGIVRLLRMFPGREIQQTDIDEYNRQSDFDIEHIRDFIILHYHVTQRDDSPFWRHCRQMQVPKSLAHRIELFRQTGRVFREGSELFDDSWQQVMIGQGLMPKTYHPIVDAMSDQELQQFLSQILNNIRRTVERLPSHEQYLRQYCS

SEQ ID NO: 88046 - protein, 807 aa, Sulfitobacter delicatus
  REGION 1..807: note = tr|A0A1G7M368|A0A1G7M368_9RHOB Tryptophan halogenase; OS = Sulfitobacter delicatus OX=218672; GN = SAMN04489759_102455 PE=4 SV=1
MREVLIVGGGTAGWITALTLQKFVPEARTGPIKYTVVEPSDIGRIGVGEATIPSLKQTLARLGLSERKLLRRTGATFKHGIRFTDWRKGPDGGGDVYFHPFERNVSGKFERFSPYHPAKSTQAVFDVAVSEIATLVGSQQLPDIFSRFQGVQTDLCDRMLPPKTADMPEYDGVVQYAYHLDAEALGDWLKEEGIARGISVIDAAVVDVERTENGNIAQVLTRDKTWIKADFFVDCTGFRSVLMRGALEAEFKDYGRHLLCDRAVAARLPSRNQEPRPFTTASARRHGWTWDLDLSHRRGMGYVYSSGHISDDEAEAFLRAASGQGDAPLEVRQLKMETGRLQQFWIGNCAAVGLASGFLEPLESTGIGLIEIGAYQLASTLIFGDNGAAAREYSRRMRNVFDDAADFVVLHYILSERRDTDFWVEATADARLTDGLRDKLEQWQFREPNAEDDGSLPRIFGFESVRSVLYGMGRRPNLPRAQSIEAAQALKRLVRQGVGRAVSQLPRHSEVLADLVQEIAAPEHSSMVPSSEEVVAAGPGDGKTPIKFRPNDIERVSISKGSMSPSKEKREDYQAEALVPAGPWRELTSAEKDALAAPKDAPMGQLIDVLRFPAKSIVEEMRNLFSRPGANAIDLPSTAEYRTLLERLTAELAPYCTGEMRCLGVITHPPNMETVTRQGPAEPLIGLHVDSWSRTMLGERQSVPNRLCINIGSKPRYLLLAPITIDEMALETGLAEKELQRMNPTDVGRLYLRQRPQAPILRIRIEPGEAYIAPTENVVHDGASTGATDVSLTFLGRFRSIPTPQPA

SEQ ID NO: 88047 - protein, 524 aa, Novosphingobium resinovorum
  REGION 1..524: note = tr|A0A1D7ZZR7|A0A1D7ZZR7_9SPHN Tryptophan halogenase; OS = Novosphingobium resinovorum OX=158500 GN=BES08_00125; PE = 4 SV=1
MTIDNPPSGRVVIPRVVILGGGTAGWLAAAYLSRTLGMTGITLVESSEIGIIGVGEGTFPTIRSTLAGLGISEAEFLVRADATFKQGVLFEGWATGTDSYFHPFNMPIGGEDEALLPHWLADTSPQRAAWADAATVQEQVIRAGRAPKRPEDPDFSGPMNYAYHFDAARFADYLRDISIAAGVVRIEGTVGNVQRKADGDIAALELTDGRIVEGDFFLDCSGFRALLIGQTLGADFTSCSDSLFNDRALAMQVPYDRPDAPVRPYTLATAHEAGWTWDIGLTERRGIGYVYSSRHCSDDEAEATLRRYVGPQGAALNPRQLRFETGYRQQQWIGNCVAVGLSAGFFEPLESTGIMLIEAALRMVGDFLGPDLLAGADHDARDAAARSFNRLMSARFERIVHFLKLHYCITRRTDTAYWRDNADPATIPEPLRDMLAQWRRRPPSRFDFVVDLETFLPPSYHYILYGMGFETTLAGARYPGAAQAREVFARVRAAHAGARGGLPDHRALLNHYHARTGVPSSKVS

SEQ ID NO: 88048 - protein, 495 aa, unidentified; identical to SEQ ID NO: 84406
  source 1..495: note = Cellvibrionales bacterium
  REGION 1..495: note = tr|A0A1Z8MW44|A0A1Z8MW44_9GAMM Tryptophan halogenase; OS = Cellvibrionales bacterium TMED21 OX=1986745; GN = CBB81_06760 PE=4 SV=1

SEQ ID NO: 88049 - protein, 514 aa, unidentified
  source 1..514: note = Alteromonas aestuariivivens
  REGION 1..514: note = tr|A0A3D8MDT4|A0A3D8MDT4_9ALTE Tryptophan 7-halogenase OS=Alteromonas aestuariivivens OX=1938339; GN = DXV75_00700 PE=4 SV=1
MGNSVKHIVIVGGGTAGWLTACLLAAKHRGVKSAPQEMKITLIESDTVAPIGVGEGTWPTMRATLARIGISEQQLFSRANAAFKQASKFVDWHRNASGDSYYHPFSAPQGSARIDITPYWLSGYATGSYADDVCFQPHICELGLGPRPLQDNNGQSANYGYHLDAGLFVQLLRDHAVTQLGVQHIVDDVNHVVMSDNQGIEAVHTSKHGPISGQLFVDCSGFKGLLIGEALNVELQDCSDTLFADCALVCQQPYSDPHQPIKCYTQSTAQSAGWIWDIGLQNRRGVGHVFSTHYLSTDQATAQLLNYLGDETGNTSVREIRFSTGYRKRFWHKNCVAIGLSAGFLEPLEASALMLIERSATLLTDQLPATIQVMNKVARRFNQILEYQWQQTIAFLKLHYVLSNRDEAFWRANRNEDTIPAPLLDLLDEWRYRPPLDSDFSHVAEVFPAQSYRYILYGMQASTDPTFLARTLQDTEQAQRQFSLNRVLSEQLSRNLPSHRTLIEFITKNNNKNM

SEQ ID NO: 88050 - protein, 501 aa, Sphingomonas sp.
  REGION 1..501: note = tr|A0A1H7D0C7|A0A1H7D0C7_9SPHN Tryptophan halogenase; OS = Sphingomonas sp. OV641 OX=1881068 GN=SAMN05428950_10565; PE = 4 SV=1
MEAPDRVRRVVILGGGTAGWMTAAALSRSLGPGVAITLLESDAIGTVGVGEATIPTIHWFNELVGIDEAAFLRVTQATFKLGIEFVDWTAPGHRYFHPFGQFGAALPGVAFHHRWLKAQAEGLDVPLSALSLAAALAAQGRFAKPAGDARSILSTLGYAYHFDAGLYAAYLRRLSEGAGVTRIEGTLHHVERDAATGFVTALTTERGERIEGELFIDCSGFRALLIAGEMGEGYEDWSHWLPCDRAVAVPCARVAPTTPYTRSTARAAGWQWRIPLQHRTGNGYVYASAYLSDDAAAATLLGSLDGEPLAEPRFLRFTAGTRRRPWRGNVVAIGLSSGFLEPLESTSIHLIQSGIAKLLTLFPNRDFDPALSDRFNAVFARDMDGIKDFLILHYHATSGRDDPLWRHCRTMPLPDSLRAREEQYRRSGRIILESDELFREASWLAVLNGQGIVAGGYNPLADAIDGATNRAQVRQIAEVVARAAPTLPMHDAALAAILAAA

SEQ ID NO: 88051 - protein, 511 aa, unidentified; identical to SEQ ID NO: 87865
  source 1..511: note = Thiotrichales bacterium
  REGION 1..511: note = tr|A0A2D7KQD0|A0A2D7KQD0_9GAMM Tryptophan halogenase; OS = Thiotrichales bacterium OX=2026796 GN=CMO22_08425 PE=4; SV = 1
  VARIANT 30: note = Xaa can be any naturally occurring amino acid
  VARIANT 33: note = Xaa can be any naturally occurring amino acid
  VARIANT 42: note = Xaa can be any naturally occurring amino acid
  VARIANT 177: note = Xaa can be any naturally occurring amino acid

SEQ ID NO: 88052 - protein, 526 aa, Novosphingobium sp.
  REGION 1..526: note = tr|A0A4R3TAX9|A0A4R3TAX9_9SPHN Tryptophan halogenase; OS = Novosphingobium sp. PhB57 OX=2485107 GN=EDF58_104403; PE = 4 SV=1
MRAEAKQVLIVGGGTAGWLTAGYLARTLGADLPGGARITLVESPEIGIIGVGEGTFPTIRRTLARIGVPEKELLRRCEATFKQGVKFVDWLHPAGQGTQANYLHGFQEADDRKGGPEYLPYWLLGEAGDTPWDEASTPQKRTVDALRGPKLASHPEYAGVMNYAFHFDAGALAELLRDQSVANGVRHISDTVVDVFCTEEGAISGVLTQNHGVQEADLYIDCTGFRAELIGKALGQKWKSCTDVLFCDSAIAAQVPYGAPDTPIQSATLSTARDAGWIWDIGLQTRRGTGYVYSSAHCEPEEAERTLRSYLGAQGEAVTTRRLRFDAGYREVNWHKNCVAVGLSSGFFEPLEATGIVFSEIAAGAIANLFPWAGDYETSARQFNAIMLQRYERARDFLKLHYSLTRRVDSDFWIDNVRQETIPDSLLELLDRWRHRPPNEKDFNPNIDVFPATSWQCVLYGMGWKTDLSAQAGVMRLRAEAREAFEQVRRQSGFAVENLPDNRALLRQMLAEPAGSTVQAFAGAAG

SEQ ID NO: 88053 - protein, 506 aa, Massilia sp.
  REGION 1..506: note = tr|A0A1M5LLE2|A0A1M5LLE2_9BURK Tryptophan halogenase; OS = Massilia sp. CF038 OX=1881045 GN=SAMN05428948_1482 PE=4; SV = 1
MEDKKVRKIVIVGGGTAGWMAASALSQLLPAGHSYQLIESDQISTIGVGEATIPSIRNFNLHLGIDENDFIRATQGTFKLGIEFVNWGKKGDNYIHGFGSVGRDQPTANFYQYWLKMNQMGHAPTMEPFSINTVAARMGRFSRGRPDLPNSPLSDLSYAFHFDAGLYARYLRTYSEARGVQRIEGKIVGTVLREGDGFIEAVVMENGQRIEADFFIDCSGLVGLLIEQALHTGYEDWSHWLPCDRAIAVPCETAGSMQALTRSTAHSAGWQWRIPLQHRTGNGHVFSSRFMEPAEAEKILMNNLEGKPLAEPRLLKFVTGKRKQTWNKNCVAIGLSGGFMEPLESTSIHMVKTALMRLITFFPDCGFDQVDIDTFNRLCDNEYAQIRDFLICHYKVNARDDSDFWRYVQEMEVPAALQRKLDLFASHGRILRENEELFPEDSWLQVMHGQGMRPRSYNPVVDQRSPEEIADFLHNTAAVIRKCVDAMPGHLDFIRANCQAPVKKAA

SEQ ID NO: 88054 - protein, 510 aa, Alteromonas sp.
  REGION 1..510: note = tr|A0A3A9UN47|A0A3A9UN47_9ALTE Tryptophan 7-halogenase OS=Alteromonas sp. BL110 OX=1714845; GN = D7031_02515 PE=4 SV=1
MNHSSYRSQKQRLVIVGGGTAGWLTAAIVAAKHKVAMGECGLDITLVESSDIPTVGVGEGTWPTMRNTLKDIGLSEKEVFRRCSAAFKQGGKFVNWVNGDGDFYYHPFTVPLGYGRVEMAPYVGDIANFANATNFQQHVCERNMAPRTLSEQEYSSAQSNYAYHLDAGAFADMLRDFSKTELGVKHIVATVESVAATSNEHIESVTLNNGMVLHADLFVDCSGFRSLLLGETLGESVVSTDDVLFNNSALALHVPHEEDFEIKPYTQATAQEAGWIWDIGLSSRRGVGHVYSTDFTTDERAEEVLRQYVGDEQGDLKARTIRFNSGYKKRIWKGNCIGVGLSAGFVEPLEATALMLIEISARYIAEQMPLPATAMPIVSQRFNKQMNYRWQRIIDFLKLHYIFNQRSEPYWVANRDASSIPDSLKEDLEIWKYRGPQIADFSAAIELFPAASYQYVLYGMGFSPDFSLQSHFYNERDLADKVIQQNQLITQQKLSSLPNHRDYIEQWLAS

SEQ ID NO: 88055 - protein, 507 aa, Croceicoccus sp.
  REGION 1..507: note = tr|A0A2D6EIT7|A0A2D6EIT7_9SPHN Tryptophan halogenase; OS = Croceicoccus sp. OX=1927144 GN=CL820_00600 PE=4 SV=1
MSNSSLRPVRVVVLGGGTAGWMAAAALARLLPGRASVDLVESEDIGIVGVGEATLPHIRGFVERLGIDEAAFIKATHATYKLGIDFRDFGQIGESYIHPFGSFGEPAADVGFHHWWLELQRQGLAGELGDYSLAVRAAQANRFRPPSHDDSLSSTYGYAYQFDATLFGPFMRDFAVGLGVTRHEGLVTSVERDGESGDVRALVLKDGRRIEGDLFIDCSGFRSLLLGGELGAEWEDWTHWLPCDRAAAMPCTHETTQLRPYTTATAMPAGWRWAIPLQHRMGNGYVFSSAHLSEDEACEAIRAAADGKPLDDPRILRFRPGRRRQSWSHNVVAIGLASGFLEPLESTSIYLAQMAITNLVELFPQGGQIDPRDRSEFNRQVDIEYDRIRDFLILHYNATRRDDSEFWNHVRTMTVPDSLAGKMELWRRTGQVESYADGLFFDQSWIAVYLGQGYFPEKHDTRVAQVDPAKVKMALDRLRQAIDAEVATMPAHDEYLRRESARLADAA

SEQ ID NO: 88056 - protein, 517 aa, Novosphingobium sp.
  REGION 1..517: note = tr|A0A4R3T2R1|A0A4R3T2R1_9SPHN Tryptophan halogenase; OS = Novosphingobium sp. PhB57 OX=2485107 GN=EDF58_10750; PE = 4 SV=1
MTTDYPSSGRVVILGGGTAGWLAAAYLSRTLKLPNVTLVESSEIGIIGVGEGTFPTIRTTLAGLGISEAEFLVRADATFKQGVLFDGWATGTDSYFHPFNLPVGGEDEALLPHWIADDSGQRLPWADAVTVQEQVIRAGRGPKRVEDPDFSGPMNYAYHFDAARFADYLRDISVAAGVDRIEGTVATVERADDGDIAALVLADGRRVEGDFFLDCSGFRSLLIGQTLGAGFTSCAGSLFNDRALAMQVPYAEPGAPVRPYTLATAHEAGWTWDIGLSERRGIGYVYSSRHCSDEEAEATLRRYVGNEGDSLTPRQLRFETGYRETQWIGNCVAVGLSAGFFEPLESTGIMLIEAALKMIGEFLVPGGRAARDAAARSFNRLMAARFERIVHFLKLHYCITRRTDTAYWRDNADPASIPEALQDMLAQWRHRPPSRFDFVVDLETFLPPSYHYILYGMGFETSLSGGAARYPGGAAARDVFSRVRSAHAGARGALPDHRALLDHYHARSAPQPIKVFR

SEQ ID NO: 88057 - protein, 478 aa, Croceicoccus sp.
  REGION 1..478: note = tr|A0A2D8D151|A0A2D8D151_9SPHN Tryptophan halogenase; OS = Croceicoccus sp. OX=1927144 GN=CL820_00610 PE=4 SV=1
MALARQLGRLVDVTLVESDEIATVGVGEATIPTARTFHEFLRVDERAFVEATGATFKLGIQFEGWARPDDSYFHSFGTFPLRNWVADFQHFWLEGQEEGIDAPIGSYCLEHEAALAGRFATGGAPPLSYAYHLDAGRYAAFLRAVAERDGARRIEGKIAQVRRDPQTGDITALQLEDGRSVEGDLFIDCTGFRALLIGQALESGYDDWSEWLPTDGAWAVQTDLQDPPPPFTRAIAHEAGWQWRIPLQHRGGNGIVFAGDFLDPDNARETLEATITGTPRGEPRLIRYKTGKRREMWRANCIALGLSSGFVEPLESTSIHLIMIGVTRLIQMFPFAGSTPALRDRWNEMADDELERVRDFIILHYKLTERTDSAFWRHCRDMAIPDSLQHRIDSFAADAQAWQAPGDLFRAESWLQVMLGQRLMPSSWHRIGALMSHERLKDELARQREAIAARVASLPSHGRFLDRLLARQDTGAGA

SEQ ID NO: 88058 - protein, 502 aa, Alteromonas sp.
  REGION 1..502: note = tr|A0A3A9UZK4|A0A3A9UZK4_9ALTE Tryptophan 7-halogenase OS=Alteromonas sp. BL110 OX=1714845; GN = D7031_01780 PE=4 SV=1
MRKPDNAIKKVIIVGGGTAGWMSASALANSLKKNSVDITLVESDQIGTIGVGEASIPHIKTFNRHVGITEKDFMSRTQATFKLGIEFVDWKQKGHQYFHPFGPYGVDMDGVSFHAFWQRLQTCGHSDTLDQYNIMAMAAKQHRFRHPVQQKNTPLSEIGYAYHFDSALYASYLRGIAENKGVRRIEGKVVNTTLRNDNGFLKSITLENGQTLEADLFIDCSGFYGLLIDKVFKVPFVDWSHYLPNNSAWAVGSEKLTSQPPFTRSTAVEAGWQWRIPLQSRTGNGIVYSNVHTDDQSAQDTLLQNIEGKLVGEPRKISFKTGHRAQFWVKNCVAIGLSSGFLEPLESTSIHLIQSGISRLIRLFPDLDFEQIDIDHFNEQSVTEFQQIRDFLICHYKVTERTDSSYWQFCKNMEIPDSLSRKLSLFESRGRIFRENEELFNRYSWLAVMVGQGLTSRGYDANADIYSEQELKKRMSDIKHIIDVNAKSMPEHGAYVENYCKM

SEQ ID NO: 88059 - protein, 501 aa, Caulobacter sp.
  REGION 1..501: note = tr|A0A0Q7W6Z9|A0A0Q7W6Z9_9CAUL Tryptophan halogenase; OS = Caulobacter sp. Root1472 OX=1736470 GN=ASD47_18970 PE=4; SV = 1
MSDRSIRSIAIVGGGTAGWMAACLLSQTLRGTGCAITLVESPDIGTVGVGEATIPPIFDFLKLIEVDLDAFIPAAQATFKLGIKFDDWRAIGDSYWHPFGTFGVSIDRRPFHHVFHKARVQGLDPTVSQFSLAAALGDAGRLAHPDPRVPGPLAGLRQALHFDAVLVARFLRDHAERRGVRRLEREVAEAKLRDDGFIEALALKGGGELAADLYIDCSGFRGLLIEQALGAGYEDWTRWLPCDRALAAPTAHAGPPPPYTQAVAMDAGWRWRIPLQHRVGNGYVYSSAFIDDGAAQDELLSAIGQPLAEPRKLSFTAGRRKTMWSRNCVALGLASGFLEPLESTSIHLVCSGLYKLLDHFPDRDFASVNIAAYNRALADEYETYRDFILLHYCVTARDDTAFWRDRTAAPLPDRLAERLELYRACGRVDAKPGELFTDLSWFYIFEGMGVTPKAYDPLVDASNFQQVRAVLPELTARIAAVVAQSPTHEAALAAIVRRSAA

SEQ ID NO: 88060 - protein, 517 aa, Novosphingobium sp.
  REGION 1..517: note = tr|A0A4R3TA70|A0A4R3TA70_9SPHN Tryptophan halogenase; OS = Novosphingobium sp. PhB57 OX=2485107 GN=EDF58_103287; PE = 4 SV=1
MTDNAIRSILIVGGGTAGWMTANLLATRLRRLPVQITLVESPDIRTVGVGEATVPAIRDYFRAIGVNEFDVMRATHGTVKLGIEFRDWSRPGTNFFHPFGRYGVDAFSVPFHQFWLKRRIAGDDTPLSAYCLATEAAMRNLVVLPPEQPANDLGVFDWAIHFDAGLFARFLSQRAREELGVAHVEGTIAGVHRGGDDGRIASVTLTGGDTLEADLFIDCSGFRSLLLGQALEVPYDDWTHLLPCDRAVAVPCTHGDALTPYTRSTALSAGWQWRIPLQHRVGNGYVYSSRHISDDEATATLLSRLEGEQLAEPNMLRFRTGHRTRVWEKNCVAIGLAAGFLEPLESTSITLIQSGVERLLAHFPDRDFEPSLADEFNRITSLEYARIRDFLLLHYWGNRRHGEPMWDACRALELPETLASRVRAFAGGGKLPRYEWDSFQPPSWLSMYAGLDILPPRHDPLADQLSAEELGASFAKMREAIGRATALGIPHDEFIAEHCAMQTDIARSAQPAPVSII

SEQ ID NO: 88061 - protein, 206 aa, unidentified
  source 1..206: note = Chitinophagaceae bacterium
  REGION 1..206: note = tr|A0A4Q3TX83|A0A4Q3TX83_9BACT Tryptophan halogenase (Fragment) OS=Chitinophagaceae bacterium OX=1869212; GN = EOO07_10335 PE=4 SV=1
VGKQIDQLDVRHIKYTPGHREKFWIKNCVAVGLAAGFVEPLEASSILLVEIAAYWIAEKLPHQKSGFAKCEKQFNETFSYRWDTIIEFLKLHYCISKRTDTDFWRDNTHPNSIPASLLEKLELWKEQCPSVVDFLSRADVFPFESYCYILYGMNFKTATYAVGDAHLNMLEKKIANQQRNMAALVNSLPKNRQLINKILEHGLQKI

SEQ ID NO: 88062 - protein, 497 aa, Sphingomonas sp.; identical to SEQ ID NO: 83469
  REGION 1..497: note = tr|A0A0Q4K329|A0A0Q4K329_9SPHN Tryptophan halogenase; OS = Sphingomonas sp. Leaf32 OX=1736214 GN=ASE83_16465 PE=4; SV = 1

SEQ ID NO: 88063 - protein, 513 aa, Sphingomonas sp.
  REGION 1..513: note = tr|A0A0W1QMD6|A0A0W1QMD6_9SPHN Tryptophan halogenase; OS = Sphingomonas sp. WG OX=1592629 GN=ATB93_08090 PE=4 SV=1
MKRVRNIVIVGGGTAGWLAAGVIAARHQSRMPGGFTVTLVESPNTPIIGVGEGTWPTLRTTLAKIGVSETDFFRECDAAFKQGALFARWTTGAEDDAYYHPLMLPQGFHQLSLVPHWIANAQGRSFCDTVTPQGRICDAGLAPKTIATPEYDGQANYAYHLDAGKFAPFLTRHCTTKLGVRHVLADVRSVEQAENGDIVAIDTEQAGRIEGDLFVDCTGFRSLLLGQTMGVPFKDCGDVLFCDAALAAQVPYPEENAPIATHTLSTAQDSGWIWDIGLPTRRGTGYVYSTRHTSDDQAEATLRAYLGPAGADASVRRIPIRSGHREIFWKNNVVAVGLAAGFLEPLEASAIVLIELSAKLIAEQMPAVREVMDVVAKRFNATTLYRWGRIIDFLKLHYVLTQRTDSAFWRDNLLPETIPERLQELLTLWRYQPPWFHDEFDRVEEVFPPASYQYVLYGMGFRSEVEPESLSSDQRLAERAMRENAAQTERLCAGLPRHRDLIRKIHKHGLQSV

SEQ ID NO: 88064 - protein, 502 aa, Rhodanobacter sp.; identical to SEQ ID NO: 85749
  REGION 1..502: note = tr|A0A1E4NN85|A0A1E4NN85_9GAMM Tryptophan halogenase; OS = Rhodanobacter sp. SCN 66-43 OX=1660135 GN=ABT18_03790; PE = 4 SV=1

SEQ ID NO: 88065 - protein, 511 aa, Massilia sp.
  REGION 1..511: note = tr|A0A0Q6WGJ8|A0A0Q6WGJ8_9BURK Tryptophan halogenase; OS = Massilia sp. Root351 OX=1736522 GN=ASD15_23270 PE=4 SV=1
MNDRHGRAIRKIVIAGGGTAGWMTAAPLALRLGKACEIVLVESPEIGTVGVGEATLPTIAYYNRALGLDVADFARMTMATFKLGIDFKDWGHLGNRFFHGFGDFGPAIEKRSPYLYWLRLAREFKDMPSYEDWSVATVMGRANRFMEPYGDQPAVTNAFSYAYHFDAGLYAAYLRDYAVQRGVTRIEGMITAVEQHPGTGFITAVKLRDGSRVEGDLFIDCSGFRGLLIEGVYQAGYDDWSAMLPCNSAQAVPCARVEPLTPYTRSTAQSAGWTWRIPLQHRTGNGHVYCNGFTSDEDASRVLLAGLDGRALDDPRQLRFTTGRRLKSWIKNCVAIGLSSGFLEPLESTSINIIENSVGWLLQHFPDRDFRPALADEFNRLVSQRYEFVRDFIVMHYKITKRDDSEFWRYCANMPVPDTLRHQIELFRETGRVAIYDPEGFQVSSHISIMAGLGITPKTHDPLIDLMDLQALRTHFDRVRETIVRAVQAMPDHGAYVSRLAGTPAVPPLAA

SEQ ID NO: 88066 - protein, 529 aa, unidentified
  source 1..529: note = Sphingomonas elodea
  REGION 1..529: note = tr|A0A495EZR1|A0A495EZR1_SPHEL Tryptophan halogenase; OS = Sphingomonas elodea OX=179878 GN=C8E52_0923 PE=4 SV=1
MSVSSGIPFFFHGSARVKRVQNIVIVGGGTAGWLTAGVIAARHQSRMPGGFTVTLVESPNTPIIGVGEGTWPTLRTTLAKIGVSETDFFRECDAAFKQGALFARWTTGAEDDAYYHPLMLPQGFHQLSLVPHWITDSKGRSFCDTVTPQGRICDAGLAPKTIATPEYDGQANYAYHLDAGKFAPFLTRHCTTKLGVRHVLADVRSVELAENGDIAAIDTEQAGRIEGDLFVDCTGFRSLLLGEAMGVKFKDCGDVLFCDAALAAQVPYAEENAPIATHTLSTAQDAGWIWDIGLPTRRGTGYVYSTAHTSDDQAEATLRAYLGRAGADVAVRRIPIRSGHREIFWKNNVVAVGLAAGFLEPLEASAIVLIELSAKLIAEQMPAVREVMDVVAKRFNATTLYRWGRIIDFLKLHYVLTKRTDTAFWRDNLLPETIPERLQELLTLWRYQPPWFHDEFDRVEEVFPPASYQYVLYGMGFRSEVEPEALSGDQRLAERAMRENAAQTERLCAGLPRHRDLIRKIHEHGLQPV

SEQ ID NO: 88067 - protein, 502 aa, Sphingomonas sp.; identical to SEQ ID NO: 84313
  REGION 1..502: note = tr|A0A0Q4KGA9|A0A0Q4KGA9_9SPHN Tryptophan halogenase; OS = Sphingomonas sp. Leaf32 OX=1736214 GN=ASE83_02880 PE=4; SV = 1

SEQ ID NO: 88068 - protein, 516 aa, Pseudoalteromonas espejiana
  REGION 1..516: note = tr|A0A510XSB6|A0A510XSB6_9GAMM Tryptophan halogenase; OS = Pseudoalteromonas espejiana OX=28107 GN=PES01_07400; PE = 4 SV=1
MTKPIKKIVILGGGTAGWLSAGLLAAEHPHLSVTLIESANVPILGVGEGTWPSMRNTLQRIGIKEIDFITQCDASFKQGSKFINWRNLNEGENYYHPFMNPQGYEHTNLHASWQRIAPTQKFADVVNMQSFVCQAALAPKQLQTPEYAAVTNYGYHLDAGKFAEFLKKHCVKHLNVTHITNDVTEVINDDKDYIASLKTNNNGNITGDLFLDCSGSRARLIGEHFKSEFIAQDHILFNNSAIAAQSPNSHPTQNIASATLSTAQSNGWIWDIALPTRRGTGYVFSSKYQSDESATDTLKSYIAKSTSEQQAEQLNYRVLKFSPGYRQKFWIKNCVAVGMSAGFLEPLEASALAMVELSISMISEQLPQNRTHMSQLETRFNDRFSTRWERVVEFLKLHYVLSERDDTPYWQNIRDLTTTPERLQNLLKLWQFQPPSRFDFIENEEVFSSSSYQYVLYGMGFNTQTPQAQNAFTSAQAGDYFYQQNREKIAQYLKGLPSNRELLNYLLSNNRQPHND

SEQ ID NO: 88069 - protein, 498 aa, unidentified
  source 1..498: note = Streptomyces uncialis
  REGION 1..498: note = tr|A0A1Q4V953|A0A1Q4V953_9ACTN Tryptophan halogenase; OS = Streptomyces uncialis OX=1048205 GN=AB852_16710 PE=4; SV = 1
MTASYLSAAFGERISVTVVESARVGTIGVGEATFSTVRHFFEYLGLSEETWMPACNATYKLGIRFENWRAPGHHFYHPFERQRVVDGFTLPDWWLADGGATERFDKECFLVGTLCDTMRSPRHMDGALFEGDLTDRPAGRSTLAEQGTQFPYAYHFDAALLADFLRDYAVARGVLHVVDDVVHVARDERGWISHVATRGSGDLAGDLFVDCTGFRGLLINDALDEPFESYQDTLPNDSAVALRVPVDMEREGLRPCTTSTAQAAGWIWTIPLFGRVGTGYVYARDYCTPEEAERTLRRFVGPAADDLEANHIRMRIGRSRRSWVNNCVAVGLSSGFVEPLESTGIFFIQHAIEQLVKHFPDADWDPALRSAYNTLVNRCMDGVREFLVLHYYGAARADNEYWRDTKTRKIPDSLAERVEQWRTKLPHPESVYPHYHGFEAYSYVCMVLGLGGIPLKPSPALRMLDPSAAQREFRLLATQAEDLRRTLPSQYAYFAQFR

SEQ ID NO: 88070 - protein, 496 aa, unidentified
  source 1..496: note = Sphingomonas elodea
  REGION 1..496: note = tr|A0A495ER10|A0A495ER10_SPHEL Tryptophan halogenase; OS = Sphingomonas elodea OX=179878 GN=C8E52_4295 PE=4 SV=1
MDGQKFRVVIAGGGTAGWVAAAALVRHLGQNLDITLVESDAISTVGVGESTIPTAWTFHKLLGINEQVFLRETNATFKLGISFENWLRDSDRYFHPFGSVGRAMPLCDFQHFWLEARRRGFGGDLGDYSLETQAALAEKFATGDPMPLAYAYHLDATAYAAFLRGLAEPAGVRRVEGRIIEVEQAQDGDIAALVLEGGLRIEGDLFIDCTGFRALLIEETLKTGFDDWSHWLPTNRAFAVQSETTEAPVPYTRAIAHGAGWRWRIPLQHRMGNGFVYASDYLSDDEAKAQLLAAVPGRALFDPRLIRFTTGMRKKAWNRNCIALGLSSGFIEPLESTSIHLVMIAVTRLLQNFPFRRDMAALSARFNAQSRAESEHIRDFIILHYKCNDRPEPFWRDHAARAVPDSLAARIALFEEGASTYQEGTDLFRIDSWNAVMLGQGVRPRDHHHMPAQIPSEDLERALGDLRAGIAAQLAKLPGHAEFIARYAAAKVPAAA

SEQ ID NO: 88071 - protein, 506 aa, Brevundimonas sp.
  REGION 1..506: note = tr|A0A0P0DK51|A0A0P0DK51_9CAUL Tryptophan halogenase; OS = Brevundimonas sp. DS20 OX=1532555 GN=JL11_06745 PE=4; SV = 1
MDDPRIRSVVIVGGGTAGWMTAAALVQHFRSTPLKITVVESSDIGTIGVGEATIPTIRRFYGQLGLHDEDVMRATQATCKLGIRFIDWSGPGSDFIHPFGLYGQDVKGIGFHHYWLKQKRAGDPAPLAAYSLGASLAAGGKFIQPSPNPPSQLSVFDWALHLDAGLFAQHLRAYAEAGGCARIDARIRSVELRPEDGFVRALTLDDGREVEGDLFVDCSGFKGLVIGEALGVGFEDWSRWLPCDAAYAVQSQNRPDDAPAPFTCVTARSAGWQWGIPLRHRAGNGLVFSSAHLSDDQALAELMPHLLGDALTEPRRIPFRPGRRSQAWAKNCVAIGLSSGFLEPLESTSIALIETGIERLKALFPDRRFAQPILDEFNDQTAREMERVRDFIILHYKLNRRTDTDFWRDCREMAVPETLERKLALWTARGQFVRYRWEMFHPASWLAIYDGFGLYPDHYDPAVDAMDPAYLARSLSEMRTNIADFVARTPDHAQFLAGLDPAASAA

SEQ ID NO: 88072 - protein, 502 aa, Pseudoalteromonas rubra
  REGION 1..502: note = tr|A0A4Q7EJ07|A0A4Q7EJ07_9GAMM Tryptophan halogenase; OS = Pseudoalteromonas rubra OX=43658 GN=C3B51_07255 PE=4; SV = 1
MKKKRIVILGGGTAGWMAANLMAKSWQDQPIEIALVESPDIGIIGVGEGSTPQFKGFMDFMGISEAQWMPACNATYKNGIRFIDWSTRPGFSSYFHPFPSQPDDYSAPAFFHNSFVRRKAIDVAGHPDPFFLTTYLAEQAKAPIAAHHFPFEINYGYHFDAGKLGLFLAQTARDLGVEHIQANVSDVRKHPDGDIAALICEAGMEVTGDVFIDCSGFRSLLMQQHLKVGFDSFANNLFNDAAVVLPTEQGEVISSETQSIARKFGWSWHIPLTNRIGNGYVYSRRYCDADKAETELRTALGLLDSEVEARHLTMKVGQVKKHWHKNCLAIGLSQGFIEPLEATALHIVQETVQSFIECYQEGEFTDKLKARHNQSLDARYQAIRDYIVAHYRVNSRTDTQYWRDNANNNQLSRSLYDVLQTWVSGKNLSDELHRQDIDKYYPSVSWHCLLAGYGIYPEQSQLIAGNEEANKYDLSQVQDYIARCGLNFEDHRAQLERLARMR

SEQ ID NO: 88073 - protein, 508 aa, unidentified
  source 1..508: note = Colwellia marinimaniae
  REGION 1..508: note = tr|A0A1Z5I1H1|A0A1Z5I1H1_9GAMM Tryptophan halogenase; OS = Colwellia marinimaniae OX=1513592 GN=MTCD1_01023 PE=4; SV = 1
MQQEQAKQQNKINNIVIVGGGTAGWMTAATLAKILGKNYCAIRLIESDQIGSVSVGEATIPQISLFNKILGIDENDFVKKTSATFKLGIEFIDWTKNGGAYMHPFGEHGTNMDAIQFHHYWLKMHQQGKSPDLEEYSLAAVAARQGKFIRPQNMGNSPLSKINYAFHFDATLYADYLRDYAIERGVNRTEAKVVDVSLRDSDGFIDSLLLEDGERVTADLFIDCSGFKALLIEGALKTGFDDWSDVLPCNRAVAIPCLAKETEVLHPFTQAKAQKAGWIWRIPLQHRVGNGYVYPSKFVSDEAAVKILIAQMEGEPIGEPNFLRWTTGVRKKAWHKNCIAIGLSAGFVEPLESTGLHLIQSSIAKLMALFPHQGFNQIDIDTFNAQSKTELEYIRDFIVLHYKATDRDDSEFWRDCQKLQVSERLQAKMALYQANGRIYRQDNELFNETSWLAVMHGQGLTPSGYHPLVDALPEDEIERRLKHIHSVIQKSVATMPMQKDFIAKYCKA

SEQ ID NO: 88074 - protein, 519 aa, Escarpia laminata
  REGION 1..519: note = tr|A0A497THG1|A0A497THG1_9BACT Tryptophan 7-halogenase OS=bacterium endosymbiont of Escarpia laminata OX=1221601 GN=DJ031_13870 PE=4 SV=1
MLNKSGDREMNERIDDITIVGGGAAGWLMGLFLTTMLNKGESKVKVTLIESPNIPTIGVGEGTVTGFPRMLQQLGIKESEFLRKSDATFKCAGKFVGWNLDAQGKPITFYNPFNVGGYVGGFETGYYYQKYGNAPGASSFVDSIMPTQMVVENRLGPKLIGAKDYESPVPYTYHLHAHDFSKQIANIAKKRGVVHILDEMVDAEQDENGYITALNLKEKGRVPVKLVIDCTGFSGRILQQVLKEPYNEFGNHLLCDRAIPIPHPHEDPKRLTPCTTATAMKAGWTFDVPLYSRMGTGYVYSSRFISDDEALDELIRHIGDESLRERTPPVIKMRVGRVRNTWVKNVIATGLSAGFVEPLEASAIYTIEMTARMLLTYYPEQGIEQKTVDRFNEVMNRMYNEILSFIVMTYYTSNRTEPFWVAAREDIDLPDRLRENLEMWQSFMPSPHDVEGKFLFSHWNYIYVLLGKGYFEGRHFPAERFLVKSDWTRFSNHIAEVKRQLKQKLPSHYDLLKAIRSGR

SEQ ID NO: 88075 - protein, 508 aa, unidentified
  source 1..508: note = Colwellia marinimaniae
  REGION 1..508: note = tr|A0A1Z5I1F1|A0A1Z5I1F1_9GAMM Tryptophan halogenase; OS = Colwellia marinimaniae OX=1513592 GN=MTCD1_01209 PE=4; SV = 1
MSSTDKINNIVIVGGGSAGWMTAAMLSKQLECNAKGSKVNITLVESDNIGTVGVGEATIPPIKTFNRMLGIDENDFLKHCNGSIKLGISFENWPKKNHQYFHPFGRFAVDFDYIPFSYFWNKHRASGDNKPLHDYASAWHLAKNNKFSPPSPDKKSLFSGFDYAYHFDASLYANYLRSYSEKRGVKRQEGKITKVDTHESNGFISSVTLASGQNIAGDFFIDCSGTTALLINKTLGIKFIDWSENLLCNRAIAVQTCHTKVISPYTRSIAKQSGWQWRIPLQTRMGNGSVHCSEFIDEQSAMDELISDIDGEILSEPRVIHFNVGRREKFWHKNCVAIGLSAGFLEPLESTSLHLIQRAVMRLIAHFPNKKCDEVNTKQFNNLTVTEYEHIRNFIILHYKATKRDDSEFWRYCQHMDIPDSLQHQIDLFSSHGHLNVDANDLFKQDNWLAVLTGQNIHPTTVAPIMAYKQKIDLPRTMNSFYDIMTKTVQKLPNHEDYLKEKCPFLIK

SEQ ID NO: 88076 - protein, 501 aa, Brevundimonas sp.
  REGION 1..501: note = tr|A0A0P0CZL0|A0A0P0CZL0_9CAUL Tryptophan halogenase; OS = Brevundimonas sp. DS20 OX=1532555 GN=JL11_08895 PE=4; SV = 1
MRQLKKILIVGGGSAGWMAAALFSRLFRGLYDITLIESEAIGTVGVGEATIPAIKTFNALIGLDEVDFMRRTQASFKLGIQFIDWDRIGSSYIHGFGVIGRDLEWLRCHQYWLKMRAAGRASDFAAYSINTAAALQNRFMRADPQRNGSPLGHIAHAFHFDAGLYAKYLRGLSEAAGVRRREGKIASVQLRPDDGFVQSVTMEDGAVEAADLFIDCSGFRGLIIEEAMKTGYEDWTHWLPCDRALAVPCARTEPFTPYTRATARPAGWQWRIPLQHRTGNGHVYSSRYMDEAEAERILLSNLDGDQLAEPNRIRFVAGKRRQVWNKNCVAAGLASGFLEPLESTSLHLIQSVLTRLVRLMPDGGFDPTTIAEFNRQMDFEYERIRDFVILHYKATYRDDTPFWRDCRDMAVPDTLQRKMDLFRANGRVFREDDELFTEESWIQVFLGQGVIPAGYDPLVDVTPEAEIERFLNDVETVIGKCVAVMPSHADYVARVCSAVAA

SEQ ID NO: 88077 - protein, 524 aa, unidentified
  source 1..524: note = Verrucomicrobiales bacterium
  REGION 1..524: note = tr|A0A2D5MRW3|A0A2D5MRW3_9BACT Uncharacterized protein OS=Verrucomicrobiales bacterium OX=2026801; GN = CMO44_12115 PE=4 SV=1
MKIKSIMVVGGGSSGWMTAAALSKKFGKDIKISVLEGENSNPVGVGESTITKFNAYLNLLELEDKEWMPHCNATYKTSIRFTNFRDGKGEVFEYPFAGAHTEESFGKWSIVRAKYKLGPDSFCEFLNDAYWLAKHNRMTDGSNFDMSFSLKNDTAYHFDASLFGKFLKTKFCKKANHYIDDVVTVKKDDDGYITSLVGNSGTEYSADLYVDCTGFKSLLLEKEMGSEFISFKPWLDNNRAIATHLSYKDKTTEISNVTNCTALSSGWSWNIPLWNRMGSGYVYSSDFISDDDAEKEFKQHVGNEDIEIRKINIRHGVRKRGWVKNVVGVGLAFGFIEPLESTGLVSTHEMIDQLVETLDRRECNITGFDRDSYNYTCQLLVSGYMHFVSLHYKLSQRSDTPYWKYQTELKDWFELSDPRLFSDKKMHCSYENGSTSFYENVHQMHSLAHRWDPEKHGIAYIMAGMGHVPYADHLYDYLRNGSEDNFEHDIDKIYQEYQKYAKLMEENILKLPTSYEFLKENIYS

SEQ ID NO: 88078 - protein, 511 aa, unidentified
  source 1..511: note = Sphingomonas elodea
  REGION 1..511: note = tr|A0A495F818|A0A495F818_SPHEL Flavin-dependent dehydrogenase OS=Sphingomonas elodea OX=179878; GN = C8E52_3978 PE=4 SV=1
MSRHIQSVCIVGGGSAGWLTAALIAARHGPDLQVTLVESVRLGIIGVGEGTWPTMRNTLRKIGISETDFLRTCKASFKQGAKFAGWRTGAADDFYYHPLVLPEGFPTVDLAPFWNAQAADAGTPSFSDAVCFQEFLCEHHLAPKQITSPEYGGVANYAYHLDAVRLGEMLREHCVGKLGVRHVDDDIVEVEQAENGDVTAVIGQRHGGIAADLFVDCSGFSSLLLGQTLGVPFIDCSDVLFIDRALAVQVPYETDDAPIVSHTVSTAQDHGWIWDIGLQNRRGVGYVYSSRHAGADRVAEALAAYVGPAFADLTPREITIRSGHRETFWKNNVVAVGLAAGFLEPLEASALVLIELSADYIASAMPATRSAMDIVARRFNDMTRYRWDRIIEFLKLHYMLSEREDTAFWRDNRDPATIPQPLQDLLELWRHTPPGEHDFASAHEMFPAASYQYVLYGMGFRTAPRAHALAARHAAEDAFERVAAMKQRLGAAMPTNRALLDKLAQYRFQPV

SEQ ID NO: 88079 - protein, 519 aa, unidentified
  source 1..519: note = Colwellia marinimaniae
  REGION 1..519: note = tr|A0A1Z5I1P5|A0A1Z5I1P5_9GAMM Tryptophan halogenase; OS = Colwellia marinimaniae OX=1513592 GN=MTCD1_01032 PE=4; SV = 1
MSKVIKNIVIVGGGTAGWLTAGVIAAEHNSKSASGLQVTLIESPEVNTVGVGEGTWPTMRETLDKIGISETELFRECEASFKQGAKFSKWVTGAEDDYYYHPLVLPQGYTKTDLVFPWQKHRGEISFADAVSYQGYLCEQGRAPKLISTPEYAGIANYAYHLNAVKLAQLLQKHCIEKLGVKHVVDHVTAINSADNGDIASVATKEHGDIAGDLFIDCSGFSSILLGKHFDVPFISKKHILFNDTALAVQVPYPDENSAIASHTISTAQSSGWIWDIGLPSRRGVGYVYSSEHTNDKDAESELRAYIESSIGKAETDKLKVRKISFNPGHREKFWHKNCVAIGMASGFLEPLEASALVLVELAAAKISREMPATRETMDIVAKRYNKQFLYRWQRIIEFLKLHYILTKRTDSAYWRDNCNAETIPESLQELLTLWKHQPPGPQDFHHVEEVFPSSSWQYVLYGMGFETQENEVSRKFVNEEMAHQFFSENVQLTKKYLSALPSNRELIDKIKQYGLQKI

SEQ ID NO: 88080 - protein, 606 aa, Nostoc sp.
  REGION 1..606: note = tr|A0A235HTP2|A0A235HTP2_9NOSO Tryptophan halogenase; OS = Nostoc sp. 'Peltigera membranacea cyanobiont' 213; OX = 2014530 GN=CDG77_19810 PE=4 SV=1
MSVNNTTQSQAYDVVIMGAGIAGVCQARHLLLNIPNIKIALIDPRPEERTEKDLKIGESTVEVSTLFFGKELGLYDYLIENHPPKFGLNYHWPKDPKNTQTIDDYYHVWSIKQPPLASVLMNRAKFERDVLKMNKEMGVDFYNGRVVNVDLGSGDIPNNVKVKVGNDYLELTTKHLIDAAGRKFIIGQKTDNLLFGPEKLAGLNNGSAWVRVKNVDRTIFHSGYDPTGATCSHYYATNHMMGHGHWIWVIPTDTQTMELSVGVSHHHEVIPAQSVNTKEKFYAFLESNHNILYQLVKSGEDIDFHYLPRVAHKSKTLFSPDNWYVIGDAAAIFDPFYSLGMVMMTFQMESVTEIIRAKLAGEPDAEKKRAVYNAYNLGYVESCNHLLHDHAKQLGHASIMSWRVYLENMWWFGMIVPLYVGKWHLDLKFLRRFSQQSRQVIRTLMSHVYEQFNELIEKDANIGMMYVHRGQQLPFGYYMTQEFDSYLQNTKYEAQRCNVFAYMKNIYFFVALWYLKFLWKGFGLKGVLSPRNLKHVFALLNASAQSSWDDLIYRRKTKGMAANSEIARVTEEFKSYRHQPELEPWIKSKSAESQKLQEQELVTSEL

SEQ ID NO: 88081 - protein, 506 aa, Caulobacter sp.
  REGION 1..506: note = tr|A0A258ILB9|A0A258ILB9_9CAUL Tryptophan halogenase; OS = Caulobacter sp. 32-67-35 OX=1970330 GN=B7Y81_14210 PE=4; SV = 1
MDKRDLAIRRIVIVGGGTAGWMTAAGLSAVLGDSAVSIELVESAEIGTVGVGEATVPHIRNFNAKLGLDEADFMRKTQATYKLGIEFRDWGKKGESYIHPFGAFGQAIGGVAFHQHWLRARARGQADDIQAYSLPIVAARLNRFAPPSSDQRSLGSTFSYAYQFDAGLYAQYLRAYSEARGVTRTEGKIQDVALRGEDGFVEAVTLESGQRIEADLFIDCSGFRGLLIEQALKTGYEDWTQWLPCDRAAAVPCDSIEPPTPYTRATSDEAGWRWRIPLQHRVGNGYVYCSSYISDDEAARVLVSKLDGKAQADPRFLRFTTGRRKKQWNRNVVAIGLASGFLEPLESTSIHLIQVAITTLLELFPERGCAGADQDEYNRVMDLEFERIRDFLVLHYHATQRDDSPFWRDKAAAPIPDSLAYKMELFRDRGMVVKYRDGFFLEPSWLAVYLGQNILPRGYDPMADSIDPDEAARKLAELKAAVRRTAEAMPGHQAFIERFCGARGAA

SEQ ID NO: 88082 - protein, 501 aa, unidentified; identical to SEQ ID NO: 83450
  source 1..501: note = Alteromonas australica
  REGION 1..501: note = tr|A0A350NYN7|A0A350NYN7_9ALTE Tryptophan halogenase; OS = Alteromonas australica OX=589873 GN=DCW74_00280 PE=4; SV = 1

SEQ ID NO: 88083 - protein, 537 aa, Streptomyces puniciscabiei
  REGION 1..537: note = tr|A0A542UCI3|A0A542UCI3_9ACTN Tryptophan halogenase; OS = Streptomyces puniciscabiei OX=164348 GN=FB563_1741 PE=4; SV = 1
MGEPIRNIVIIGGGTAGWMAASYLGKALSGQAGITVVEAPAIPRIGVGEATVPNLQRVFFDYLGLPEEEWMTKCNASFKMAVKFINWRTPGQGEPTSRHDGTWSDHFYHPFGLLPSPDGVPLSHYWTRKHLAGTAGEPFDYASFVEPPVMDAKLSPRFLDGTRSTNYAWHFDAALVAGFLRDFATSKQGVRHIEGTVSNVRVDPRGHIESVTLESGQAVEGDLFVDCSGLRGLLINKALGEPFIDMNDHLLNNSAVATQVPHDDEANGIEPYTSSIAMPAGWTWKIPMLGRFGTGYVYCDTFASKDQATLDFCRLWGLDPEKVPLNHIKFRVGRNRRAWVGNCVSIGLSSCFVEPLESTGIYFITASLYQLVKHFPERDVDPVLRDRFNREIVDMFDDTRDFLQAHYSLSPRTDTPFWQATKELTLADQIKEKIEMFRSGVPINPPATDERTYYGNFEAEFRNFWTNGSYYSVFAGLGVRPRNALPILSYRPDSVASAEQTFADVKARQRRLVSELPSTYAYLRQLHREESSQDTAA

SEQ ID NO: 88084 - protein, 510 aa, unidentified
  source 1..510: note = Sphingomonas elodea
  REGION 1..510: note = tr|A0A495EQT5|A0A495EQT5_SPHEL Tryptophan halogenase; OS = Sphingomonas elodea OX=179878 GN=C8E52_4338 PE=4 SV=1
MRDDQIRRIVIVGGGTAGWMAAAALGKLLGALPGLQIELVESDAIGTVGVGEATIPHINLFNRMLGIDEAAFVRETSATYKLGIEFVDWQRIGTRYVHPFGVYGIDMLGVEFHHFWLKARALGHTTPLDTYSIGIAAARRGRFAHPTPGQPNSPLARLGYAFQFDAGLYAGFLRRLAEGLGVRRSEGRIVEVRRDGETGHVTAVGLESGAQIAGDLFVDCSGFRGLLIEQTMGARFCDWTHWLPCDRAVAVPCAPGGDRLPLTRATARAAGWQWRIPLQHRTGNGYVYAGDHLSDDEATATLLTNLDGPALSEPRALRFRAGHRDRAWIGNVVALGLAGGFLEPLESTSIHLIQSGIGRLMALFPSRGFDAPEIDRFNRETAQEYADIRDFLILHYKATERDDTAFWRRCRDMTPPDSLAERIALFRRNGRILREQHELFQDASWLAVMNGQGIVPAGYHPVADLLSDAETLERLNHIAQVIDETANAMPLQDDYLRRIGCALPPLRQAS

SEQ ID NO: 88085 - protein, 487 aa, Caulobacter sp.
  REGION 1..487: note = tr|A0A258IWD4|A0A258IWD4_9CAUL Tryptophan halogenase; OS = Caulobacter sp. 32-67-35 OX=1970330 GN=B7Y81_03255 PE=4; SV = 1
MAAASLQRHFQGSPLKITLIESSEIGTIGVGEATIPTIRNFYQNLGLSDLDVMRATGATCKLGIRFNDWLKPGSSFLHPFGLFGQDLRGVPFHHYWLRLKALGDESEIGEYSLGASLAKGGKFTQPSRNPPSSLSVFDWALHLDASLFAKLMRQVAENAGVKRIDARITRVNLRPEDGFIASVDLDTGATVEGELFIDCSGFRGLLIEEALHTGYEDWSPWLLCDRALAVQSEGSGEPPPYTDVSAQTAGWRWRIPLQHRYGNGYVYSSRHISDDDAMAELKGAVPDPLLHEPRQIRFTPGRRLKAWNKNCVALGLAAGFLEPLESTSIALIETGIEKIKQLFPDRTFNQGVLDEFNDMSKLEMERVRDFIILHYKANQRNDTAFWRDCQAVEIPDTLKHKIELFRERGHFIRYRWEMFQPASWLAIYTGFDILPRTWDPSIEGLDIESLRRGMTEMRKAVKAAVDAAPTHGDFLDKYARPAPLAAQ

SEQ ID NO: 88086 - protein, 497 aa, Sphingomonas sp.
  REGION 1..497: note = tr|A0A0W1QHL0|A0A0W1QHL0_9SPHN Tryptophan halogenase; OS = Sphingomonas sp. WG OX=1592629 GN=ATB93_15425 PE=4 SV=1
MAEQNKFRVVIAGGGTAGWVAAAALVRHLGARIDITLVESDAIGTVGVGESTIPTARSFHALLGIREPVFMRETNASFKLGISFEHWLREGVRYFHPFGTIGRSLPLADFQHFWLEARARGFGGDYGDYSLETQAALSNRFATGDPAPLGYAYHLDATAYAAFLRGLAEPAGVRRVEGQITRIDRDGESGNIAALLLESGERVAGDLFIDCTGFRALLIEGALETGYDDWRHWLPTDRAFAVQSETTEPPVPYTRAIAHGAGWRWRIPLQHRMGNGFVYASDYLDDDSAREQLLAAVPGRALFDPRLIRFTTGMRKKSWNRNCVALGLASGFIEPLESTSIHLVMIAVTRLLQNFPLRHDMTAAAQRFNAQARAEAEHIRDFIILHYKLNDRPEPFWRDHAARAIPDSLAARIALFEEGANAYQGSEDLFRVDSWNAVMLGQGVVPRAHHPMPGEIPTADLERALADLRAGIAAQFAKLPAHGAFLHQYCGREKVAA

SEQ ID NO: 88087 - protein, 418 aa, unidentified
  source 1..418: note = Chitinophagaceae bacterium
  REGION 1..418: note = tr|A0A4Q3T1C9|A0A4Q3T1C9_9BACT Tryptophan halogenase (Fragment) OS=Chitinophagaceae bacterium OX=1869212; GN = EOO07_29980 PE=4 SV=1
DFYYHPLMLPQGFNKVDLAPYWQHTNSGNSFSDSVCFQERICENNLAPKLITTPEFASVANYAYHLNAGKFADFLKNHCVKKLGVTHILADVTQVNAAENGDIKSVTTAQNGDIFGDLFIDCTGFSSLLLGKHFEIPFVDRSDVLFIDTAIAVQVPYESEDAPIASHTISTAQEAGWIWDIGLVQRRGIGYVYSSNHTSHDNAEKVLRDYVGPAIDNLSVRKIPITSGHRKLFWKNNCVAVGLSAGFLEPLEASAIVLVELSAEMIAEQLPACRDVMDITAKRFNETFLYRWDRIIDFLKLHYILSKRTDNSFWTDNRNPDTIPESLQDLMKLWRYRSPGNSDFTSNNEVFPAASYQYVLYGMGFKMDSSFIQHTLVDHQLANEQFNQNINAIKKAIGMLPTNRELVKKIHEYGLSTI

SEQ ID NO: 88088 - protein, 503 aa, Sphingomonas sp.
  REGION 1..503: note = tr|A0A0W1QN91|A0A0W1QN91_9SPHN Tryptophan halogenase; OS = Sphingomonas sp. WG OX=1592629 GN=ATB93_07585 PE=4 SV=1
MQDKPVTSVVIAGGGTAGWMAAATLSRNFGPDALKVTLVESAEIGTVGVGEATIPPILQLNAQLGIDEDDLLRRTQGTYKLGIEFVDWGRQGSRYFHPFGSYGADLGGVAFHHHWLRTREGALADYSLNTGAALAGKFDRPTEDPRSVLSKLSYALHFDATLYAALLRERSLEQGVEAVEGRIARVVLDQLSGHVDRLDLADGRTLRADLYIDCTGFRGLLIEQALNTGYEDWSHWLPMDRALAVPTAPAGPPLPYTRSTADAAGWRWRIPLQHRVGNGHVYSSAFTDEAAATEALVAGLDGQMLAAPRALSFTTGRRRKMWNRNVVALGLAGGFVEPLESTSIHLIQRGVVTLMSLFPAGGFVQAEIDCYNRLMQAEMEEVRDFVILHYKQSLRDDTPFWRAVQAMSVPDSLAERMAIFAHCGRLLLGPGELFREPSWVAVMLGQGLVPQGYDPLANGIPESDLRPALQRMRAVIGRGVEALPSHAAFLRERSSAEPGERAG

SEQ ID NO: 88089 - protein, 518 aa, unidentified
  source 1..518: note = Unknown
  REGION 1..518: note = tr|B7RZT2|B7RZT2_9GAMM Tryptophan halogenase superfamily protein OS=marine gamma proteobacterium HTCC2148 OX=247634 GN=GPB2148_2742 PE=4 SV=1
MVNRIEKVVVVGGGSAGWLTAATLAAEFKSGPGGISVTLIESAETKSIGVGEGTWPSMRTTLQKIGISETEFFRECDASFKQGSKFTSWLDGGNESYYHPFSLPEGYQEINLADFWAPHRDKVSFANAVCPQLRVCESHKAPKQISAPDYAGSLNYGYHLDAIKFARLLRKHAVEKLGVTHVIDHVEKIHSAPNGDIASLQGKAHGQINGDLFIDCTGFASLLIGRHYSIPLIGKKDVLFNDRAIAVQVPYADESAPIASATLSTARSAGWIWDIGLPSRRGTGYVFSSKYIDEQQAVDELKAYVGNSAGIPFEELAPRTIDINPGYRQKFWHKNCVAIGLSAGFVEPLEASALVLIELSARMIAEQMPADRQVMDIVAEKFNDKFATRWQQIIGFLKLHYVLSRRNDSQYWLDNRSAESIPSDLAAQLKLWRTRSPWYCDETHVDQMFPSASYQYVLYGMEYPSQPMTARKRSGDSDQQRARQIFASNDSMAGKLLTNLPTNRDLTDQVKHQGFGHI

SEQ ID NO: 88090 - protein, 510 aa, Ideonella sp.
  REGION 1..510: note = tr|A0A523Q8X3|A0A523Q8X3_9BURK Tryptophan halogenase; OS = Ideonella sp. MAG2 OX=2083017 GN=C4K60_06005 PE=4 SV=1
MTLPTAHAPLAAGPAAPKPIRKVVIAGGGTAGWMAAAALSKTLGKRLDICLIESDEIGTVGVGEATIPTLLTFHQLLGIPEQSFMAATQATFKLGIQFESWRQRDEDYIHSFGLTGKDHWTAGFQHFWHKGRERGLASDYGDYCLELRAAQENKFAHLPNAGMNYAFHLDATRYARFLRSFSEGFGVKRREGKIQAVLQHPGSDHIAALRLADGTLIEGDLFIDCTGFRGLLIGETLGVPCEDWSQWLFCDRALAVQTSSVGEPVPYTRSMAHSAGWQWRIPLQHRVGNGLVWSSRFMSDEQAQQTLLSRISGEVLTPLRPISFKPCQREKTWVGNCVALGLASGFLEPLESTSIHLIQRGIVRLMQMFPSAGINPSDVAEYNAQARDEIEHIRDFIILHYKVTQRDDTPFWQACRDMSVPASLQHRMDLFQETGRVFRKGNELFAENSWIQVMLGQGIWPQQHHPSADLMGDEELQHFLQSIRHNVEGTLAQLPTHQAYVKRYCPAMAP

SEQ ID NO: 88091 - protein, 506 aa, unidentified
  source 1..506: note = Alteromonas australica
  REGION 1..506: note = tr|A0A358E0A7|A0A358E0A7_9ALTE Tryptophan 7-halogenase OS=Alteromonas australica OX=589873; GN = DEB45_11860 PE=4 SV=1
MNKLPQEIVIVGGGTAGWMTACYLARTAELMANNNNVPAPAPKITLLESAVISTVGVGEGSTPYLRHFFEFLGINESEWMLKCSATYKMGISFERWTTTAESKTTRPAFTDSDSYFHPFFSSLDIPTADMYFSAVNEYRKGASHDINPSHYFTAAHMVEKSITPDAICSSANIDYAYHFDAGLLGDFLKEYALNKGVSHQIGTVANVESHEHTINSLKLDDGNTLSADFFIDCSGFRGLLGKQALLRKFTSYADTLFNDAAVAIASDATASPETALQTRSIALSHGWQWHIPLTSRTGNGYVYSSQFCTEAQAEEELRLALEPDQSHQQARHLKMTVGRLEEHWKGNCLCIGLSQGFIEPLEATALMLVQYALHHFIDCWQSNNPRREVRYNSEINRMFDGIRDYIAAHYYLNTRDDSAYWVACREDLKVPDTLSYLLNAWDKGASFEQALNEVDNKLVYLRPSWYCIFAGMKRFSNNSTPLAQPNTLARRTMQQSVDGAYRAKQP

SEQ ID NO: 88092 - protein, 493 aa, Massilia sp.
  REGION 1..493: note = tr|A0A0Q6WGH4|A0A0Q6WGH4_9BURK Uncharacterized protein OS=Massilia sp. Root351 OX=1736522 GN=ASD15_23245; PE = 4 SV=1
METAYKRIVVVGGGAAGWMAATALASALPGSTVELVESEEIGIIGVGEATFPSIRAFHKILGIDEAEFLRATNGTYKLGIEFRDWRVQGEGYFHTFGDFGALAGPQALWGQLRRVGEAGLGTLGEQCLPSVMASQGRFQAPPEREEYFNYAYHFDAVLYAGFLRTLALQRGVRRTEGRIVEVLRRACGAVDRIKLADGRAVAGDLFIDCSGFASLLLGRALDEPFVDFSHWLPVDRAWACPSERSGTELAPYTRATALEAGWAWRIPLRNRTGHGHVFASRYIDEDRAREQLMRQMDGPALAAPRLLRFATGHRERFWVHNVVALGLSSGFLEPLESTSIFLVQSGLGRLIEQLLPGAEPSAEAVAGYNSAMVRQFARVRDFIILHYRLTARRDSELWRAMASMALPETLAFKIHAWRQTGALHQYGDEGFDATSWLAIHAGMGHWPERPDPALADLAPGLALQALRQRRDSIAAAVAAMPSHDSYLRSVLAR

SEQ ID NO: 88093 - protein, 508 aa, unidentified
  source 1..508: note = Colwellia marinimaniae
  REGION 1..508: note = tr|A0A1Z5I6J5|A0A1Z5I6J5_9GAMM Tryptophan halogenase; OS = Colwellia marinimaniae OX=1513592 GN=MTCD1_03001 PE=4; SV = 1
MKIKRIAIVGAGTSGWLAANHLGCELSADAEIEITVIESKDVPTIGVGEGTVPYIMKGLKRFGISEAELLNSCDATFKQGVKFVNWLDPIKHGENYYYHSFDDPYPNGFNVTPYWNSYEGSKSFDDIGVQARISELGLSPKMKNSGEYEGELSYAYHFNAAKFANLLASNAQKRFKVKHQFATIEGIKRCNEGNISHLITADGDELAFDFYIDCSGFSAVLIGKGLAVPFESKAKELLVDTALVQPMPLKSDEDINPYTTATAHKAGWIWDIPLTTRRGTGFVYSSKYMSESEALALYAEYLGVNEKDLSPKKLPMAVGYRKEFWCKNCVPLGLAQGFLEPLEATSILLSDFSAELLAKNFPRDSTNIETIAPYFNKVVTYVWERTVDFIKLHYCLSDRTDSDFWLDNQDETFLSAELKERLQKFKLCPPQQSDFFSRFDLFNEKNFLYVLYGMKFETQKTILSDKEIEMSRTILKNNDRLVEQADQHLLKHKDWLMGLKSAMEKSKS

SEQ ID NO: 88094 - protein, 476 aa, unidentified
  source 1..476: note = Unknown
  REGION 1..476: note = tr|B7RZT5|B7RZT5_9GAMM Tryptophan halogenase superfamily protein OS=marine gamma proteobacterium HTCC2148 OX=247634 GN=GPB2148_2659 PE=4 SV=1
MAAAALSKLIGKQLDIALVESDDIPTVGVGEATIPTILTINRLLQIPEPEFLQATQGTFKLGIEFENWRKQGHRYIHSFGDTGQGCWAAGFHHFWLKGMEQGISSDYGEYCPELKAAEQSKFAIQSQKKLNYAYHLDAGLYGRFLRKIAEQHGVRRIEGKISDVQCNTDDGYIQSLRLESGQVVEGDLFIDCTGFRALLIEQALESGFDDWSHWLPCDSALAVQTESVGEAVPYTRSIARCSGWQWRIPLQHRVGNGFVYSSKYLSDDKAEQILLDNVEGAPITKPRPIKFRTGQRKQYWNKNCIALGLSSGFIEPLESTSIHLIQNGIMWLLLMFPFQGITKSVVNEYNEKLRREADCIRDFIILHYHVTERDDTDFWNYCREMSIPDSLQHRIDLFRETGRVFKPQDDVFAENSWVQVMMGQGITPEQYHPIVDMMSDVELKSFLQTIENNAKSLVSQLPSHADFVAHYCKAVG

SEQ ID NO: 88095 - protein, 498 aa, Sphingomonas sp.
  REGION 1..498: note = tr|A0A0W1QJ07|A0A0W1QJ07_9SPHN Tryptophan halogenase; OS = Sphingomonas sp. WG OX=1592629 GN=ATB93_13555 PE=4 SV=1
MPQHIIIAGGGSAGWMAAALFARLRPAPLTRITLVESDAIGTIGVGEATVPILQDFNRLLGVHEPEFVAATQGSFKLGIEFVDWGHLGNRHFHGFGDFGAPIEGTAPHHHWHRLRTAGREQDPIDAWSMPAILARQDRFAPPEASRGEAAEYRYAYHFDAGLYACLLRSYAQSRGVAHMEGRIVDVERDPHSGDVAALRLDGDRRLDGDIFIDCTGFASRLLGAELGVALVDWSGWLPANRAIAQGSARAGRFTPFTRSTALTAGWQWRIPLQHRTGNGLVYSSRYLSDDEAAHILTSNLDGDAIGEPRLLRFTTGRREQFWAHNVIAIGLAAGFMEPLESTSLQLVQTGLARLAELLPHGRVAPPIRTEYNRETIAEYERIRDFLIAHYCISQRPEPFWRDSANMALPDTLTHKLALWDAMGRVPMYDLESHAEPSWAAILLGQGRIPQGHDPAADRMSLESMAALVAARRDTLQAAAARLPQHDHFVRRTCHAQAA

SEQ ID NO: 88096 - protein, 505 aa, unidentified
  source 1..505: note = Sphingomonas elodea
  REGION 1..505: note = tr|A0A495EQW0|A0A495EQW0_SPHEL Tryptophan halogenase; OS = Sphingomonas elodea OX=179878 GN=C8E52_4245 PE=4 SV=1
MRRILILGGGTAGWLTSAYLARYLDIAHQQRFAITLLESPALGIVGVGEGGFPTIRETLQFLGIDERSFVRRASATFKQGIRFDDWLYAPRSDGTRHRFLHPFEAPFHTEGAGLVPYWLLQPEAKRAPFAEAMTIQNRVAAQGRAPKRAEEAGFGGPLTYAYHFDAVRLAQLLRDRAIELGVTHLEGEVFSAHTDAEGAIDRIETREHGSLTADLYIDCSGFEAALIGKALRTPFTSVRHQLFTDRALACKLPYADPEAPIATTTVAAAHEGGWTWDIGLQHARGLGCVYSSAHLSDERAAEILDKHLAGALHEARLIRFEPGYRRTPWVKNCVAVGLSGGFLEPLEATGVVLIEAAAAMIAELFPHAGPVDAPAARFNALMTARYERIVDFLKLHYCLSRREEPFWRDNRDPASIPETLQALLAQWRHRPPSRFDFLLDVESFAFFNYQYILYGMDFRTDLSGAREGFPHAEAAARHFARIRGFGEQAVADLPAHRELIRQLAG

SEQ ID NO: 88097 - protein, 508 aa, Sphingomonas sp.
  REGION 1..508: note = tr|A0A0W1QPX5|A0A0W1QPX5_9SPHN Tryptophan halogenase; OS = Sphingomonas sp. WG OX=1592629 GN=ATB93_04495 PE=4 SV=1
MQGKRRILIVGGGTAGWLTAAYLARYLDLAQQAAFEITVLESPELGIIGVGEGAFPTLRATLAFIGIEERDFVRATSATFKQGIRFDDWLHAPLPDGTRHHFLHPFEAPLDAEGPGLVPYWLLQPEATRPAFAAAMTIQNRVVEQGRAPKRAEEDAFGGPLPYAYHFDATRLAVLLQARAIELGVGHLEGRLIGVEPDGKGGIAHVLTREHGALEADLYVDCSGFDAALIGRALGSPFRSARDVLFTDRALACKIAADAPEGPVQPVTIAAAHGAGWTWDIGLQATRGIGCVYSSAHMSDEAAAAVLRAHIGHDRYTARLIPFEPGFRPAQWAGNCVAVGLSAGFLEPLEATGVLLIETAVAMIAELFPFAGPMDLAAHRFNARMTARYERIVDFLKLHYCLSRREEPFWRDNADPASIPASLAGLLDAWRHRPPSRFDFVIDHESFAYFNYQYILYGMDFVTDLSPARGAFPNDAVAMRRFAQIRRFGEQAVADLPGHRELIGQLRG

SEQ ID NO: 88098 - protein, 501 aa, unidentified
  source 1..501: note = Alteromonas australica
  REGION 1..501: note = tr|A0A075PB88|A0A075PB88_9ALTE Tryptophan halogenase; OS = Alteromonas australica OX=589873 GN=EP13_19055 PE=4 SV=1
MSTFDSAALPPVKNVVIAGGGTAGWMAAIALVKLLGKSLNITLVESKDIGIIGVGEATIPPIRTFHKLLNIDEKAFMKATQATFKLGIEFEGWCEENHSYIHSFGVTGRECWAGEFHHFWLRAQKLGLGGEFGDYCPELQAAKANKFFTNESMPLNFAYHFDAVAYGRFLRTLATEAGVHHIVGNITNVSKCSQTGNITSLEVDESQEVNGDFFIDCTGFQGLLIEQALHTGYDNWSHYLPCDSAVAMQTETVAAPVPYTKSSAHKAGWRWQIPLQHRVGNGLVYCSKYMNDDEAKSTLVQQVEGEPVNDARFIKFTPGKRRLGWNKNCVALGLASGFIEPLESTSIHLIMTGIVRLMRLFPFDGITQSAIDEYNTKYDSEMAAILDFIVMHYKVTNREDSPFWQHCKNMPIPPSLTHKLNLFKDTGRVFLDDGDIFRVDSWTQVMLGQGLTPNQYHKVADEMSEAELERFMMGLKQQVDNQVSRLPSHEAFLDKYLAVNS

SEQ ID NO: 88099 - protein, 94 aa, unidentified
  source 1..94: note = Comamonadaceae bacterium
  REGION 1..94: note = tr|A0A4Q3N540|A0A4Q3N540_9BURK Tryptophan halogenase (Fragment) OS=Comamonadaceae bacterium OX=1871071; GN = EOO27_50405 PE=4 SV=1
PESLAQKIELFRETGRVFRKNEELFAENSWVQVMMGQGIMPRAHHPVADKLSDAELDRLLSSIRENVAQTAKGLPTHEAYLQGYCPAPKPAYAV

SEQ ID NO: 88100 - protein, 390 aa, Corallococcus exiguus
  REGION 1..390: note = tr|A0A5C5DYJ1|A0A5C5DYJ1_9DELT Tryptophan halogenase; OS = Corallococcus exiguus OX=83462 GN=FH620_12385 PE=4 SV=1
MSEDSCDVAVIGGGPAGAAMAVALRRKAPSLSVTLVERTTYDAPRLGETLPPDVRLSLSRLGVWESFLRDGHLASRGTASCWGRAEPGFNDTMMSPWGSAWHLDRTRFDERLSVEAARQGARVLRATTLVDSESLGRHGYRLRLSHGGADPSTLRARFVVDATGGKATFASARGARRLVSDRCFAVYGAFQLQGGAAFPTHALVESCPEGWWYSALLPRGRVVVALVGDGDSLRGLRWATPEPWMNLLKQAPVTWARLDACDFAGEALIAVPVLVGQLDRPRGEQWLAVGDAACTYDPLSSQGITKALDSALLAADALERCLSGDADALQAYESTLNARFQDHQRTRGVYYRQEQRWPQAAFWMNRWEALPAPAASPAQFRRSHSTEVNP

SEQ ID NO: 88101 - protein, 509 aa, unidentified
  source 1..509: note = Alteromonas australica
  REGION 1..509: note = tr|A0A075NWB8|A0A075NWB8_9ALTE Tryptophan halogenase; OS = Alteromonas australica OX=589873 GN=EP13_09590 PE=4 SV=1
MQNPKKNPIKRVVIAGGGTAGWLTASLMKKVLGEAVNITLVESEVIGTVGVGEATIPPIRLVNQVLGIDEAQFLYETKATIKLAIKFENWKTKGQSYYHTFGAPGKAMAFCHFHHYWLKGQQLGKTQDLWDYDLNYHAAEAGKFAPINAKDPVLELPFAYHFDASLYAKYLRKLSESMGVVRIEGKISSVERDNVNGYIKALRLDNKNRIEGDLFIDCTGFKGLLIQETLGTGYDDWSHLLPCDSAIAVPSERHESTRPFTRSIAHDAGWQWRIPLQHRNGNGHVFCSRYVSEDHALDTLMGNLDTKPLADPKLIKFTTGRRRKQWNKNVVSVGLSSGFLEPLESTSIHLIQSAIVRLIQLFPHNGITPSLEAEYNKQSALEFEQIRDFLILHYSVNERTDSAFFNDMRNLDLPDTLRHKIALFKENGSLFRDQNDLFLESSWLQVMYGQGITPNDYHGLVNTFSDEKLKEMLTRLLKIKREPLSQLPSHDEYLNGMVKRAKQDMSANA

SEQ ID NO: 88102 - protein, 476 aa, unidentified
  source 1..476: note = Sphingomonas elodea
  REGION 1..476: note = tr|A0A495EQD7|A0A495EQD7_SPHEL Tryptophan halogenase; OS = Sphingomonas elodea OX=179878 GN=C8E52_4340 PE=4 SV=1
MSIAQVLVVGGGLTGWSTAAALKRRVPALAVSILPLAPPGDALADRIATTLPSILGFHADLGIGLGDGVVRTGSIYRLGTLYRDWVEGLPDYVHAHGPHGEPVDGVSFHHLWARAARGDVVAPFDAFSAAAAMAREGRFVLPAEGGILGEHSFGLALDVPRYLGMLQAFARHVGVRTLDGGLAEVERAADGSIAGVVLTDGLRVTADLYCDCSGPAARVHGVTGSARESWQRWLPCDRLLLEEPTPAEDAAPMECVTATARGWRWTSATQQGAVYSAAHSHHEDAAIRFEAGATLEPWRHNVVAIGDAAVTIEPLEWGNLHLAHSAIDRLISMLPAGSPHPLEAAEYNRQALAEARRVRDFVLLHYVTARRAGAFWHDVTSTEPPDSLAHTLRLFRERGRLPFYEEETFDRDGWLAVLFGQGVLPRRIDPLADAVPPARAADAMARHRDRIAQAVRPLPTLAAYRAAQSRHLHERA

SEQ ID NO: 88103 - protein, 509 aa, Caulobacter sp.
  REGION 1..509: note = tr|A0A258IW80|A0A258IW80_9CAUL Tryptophan halogenase; OS = Caulobacter sp. 32-67-35 OX=1970330 GN=B7Y81_03260 PE=4; SV = 1
MQDANQNGIRKIVIVGGGSAGWICAAMASHYFHKSGVEVELIESEEIGTIGVGESTIPPFLQLIRSLGIDEQDFIQKTQASFKLAIRFENWRKKGETYYHPFGQIGGPIGRHEFYQCWLRAKANGHPSNLQDFAPATVMADQWKFTPPFRAQKTLLSGASYALHIDAKLVAQYLRDFAETRGVKRTEGIVTDVVSRPDGFVEKVIMQNGSEVSGDIFIDCSGFRALLIGKTLDEEYLDWSDVLMCDRAVVAQTENVKDPHPYTLSQAQDAGWRWRIPLQHRAGNGYVFCSKYISEDEATATLLSQIEGDVLLGPNIIPFKTGMRKRLFRNNVVAIGLAGGFIEPLESTALHLIYRGMDFLLRYFPDKDFDPGLAAEYNRRMAMDYEEIRDFIVLHYYTTQRDDTPFWRDYQKVAPPESLRERVELFKSSAVLRDGVDDMFRAPSWQSVMEGMGIRPGRYQQLVDAAPYSVIQQTLDQSAPILKAQVAGLPSHGEFLAQHCPAAPFRRSA

SEQ ID NO: 88104 - protein, 506 aa, unidentified
  source 1..506: note = Thalassotalea sp.
  REGION 1..506: note = tr|A0A516HEL0|A0A516HEL0_9GAMM Tryptophan 7-halogenase OS=Thalassotalea sp. PS06 OX=2594005; GN = FNC98_12865 PE=4 SV=1
MEKAHLIVLGGGTAGWMSALLMAKKLGVHANITLVESPDIPVIGVGEGTTPYIKQFFKQLDIAEQDWMPACQATYKCGIRFPDWSTKNQYQSYFHPFFSPLDKQVGEAFFHNANCRRAGIDVDANPNHYFVTSYLAKQGLSPHCQQPLPFELDYAYHFDAGLLGTFLQSIGTKMGVTHQQCNIIDVERHLNGDIAAIISDQGERLTADYFIDCSGFRGQLIEQTLDVPFYSYASSLKNNAAVAIQVEHQQPSKLPDKLPTETRSSALANGWMWNIPLTQRWGNGYVYSRDYLNQEQAERELRTALGISDEISARHLSMKVGRRQEHWRNNVFAIGLSQGFVEPLEATALMLVQYTIEHACEAIAGQLGGEVARLNDSKQKFNDTINDMFDGVRDYILVHYLTNSRNDSQYWLDSRNELYVPDAVQHLLEVWQSDADIDKELEHYFQTSMYSRASWYCLLAGMGVFPKVKQRSVQVSAQIAPLQPVVKYNQNCTQHFRAQQDVLAGY

SEQ ID NO: 88105 - protein, 445 aa, unidentified
  source 1..445: note = Alteromonas australica
  REGION 1..445: note = tr|A0A358DUM4|A0A358DUM4_9ALTE Tryptophan halogenase (Fragment) OS=Alteromonas australica OX=589873; GN = DEB45_01500 PE=4 SV=1
MSTFDSATLPPVKNVVIAGGGTAGWMAAIALVKLLGKSLNITLVESKDIGIIGVGEATIPPIRTFHKLLNIDEKAFMKATQATFKLGIEFEGWREENHSYIHSFGVTGRECWAGEFHHFWLRAQKLGLGGEFGDYCPELQAAKANKFFTNESMPLNFAYHFDAVAYGRYLRTLATEAGVHHIVGNITNVSKCSQTGNITSLEVDESQEVNGDFFIDCTGFKGLLIEQALHTGYDNWSHYLPCDSAVAMQTETVAAPVPYTKSSAHKAGWRWQIPLQHRVGNGLVYCSKYMSDDEAKSTLVQQVEGEPVNDARFIKFTPGKRRLGWNKNCVALGLASGFIEPLESTSIHLIMTGIVRLMRLFPFDGVTQSAIDEYNTKYDSEMAAILDFIVMHYKVTNREDSPFWQHCKNMPIPPSLTHKLNLFKDTGRVFLDDGDIFRVDSWTQV

SEQ ID NO: 88106 - protein, 493 aa, unidentified
  source 1..493: note = Sphingomonas elodea
  REGION 1..493: note = tr|A0A495F2L4|A0A495F2L4_SPHEL Tryptophan halogenase; OS = Sphingomonas elodea OX=179878 GN=C8E52_1986 PE=4 SV=1
MTDNRIRRIVILGGGTAGWMSAAALSRVLAGQRVAITLVESDTIGTIGVGEATIPTIHWFNQIIGLDERQFLAETKATVKLGIEFVGWNGEGSRYFHPFGTFGPPGDGAMFLHRLIRGRADGDTAPTEAYSLTAQAARSGRFARPVPDRRSLLSTLGYAYHFDAGLYARYLRGLAEQAGVTRIEGRVGSVQRDGESGFVRSLMLDDGRIVEGDLFLDCSGMRGLLIEETLGVGYDDWSHWLPCDRAWAAPSAAEAHLTPFTRATAAEAGWRWRIPLQHRVGNGYVFASRFQDEAAARASLLAAMEGPPLSDPRLIRFMPGMRREAWRANVVAIGLSSGFLEPLESTSIHLIQSGIAKLLSLFPAADCSPLLARQFNRIFGQEMLDIRDFLIFHYHATAGREEPMWRERQAMAIPETLTERLAHFRSSGRIVLSSDELFRDASWFAVLDGQGARPGDYNPLIEGIDVHDNLRQLAALRSNIACAAEALPALCRP

SEQ ID NO: 88107 - protein, 576 aa, unidentified
  source 1..576: note = Metarhizium majus
  REGION 1..576: note = tr|A0A0B4HMZ6|A0A0B4HMZ6_METMF Tryptophan halogenase (Fragment) OS=Metarhizium majus (strain ARSEF 297); OX = 1276143 GN=MAJ_10282 PE=4 SV=1
MAVPPSCTVLVIGGGPAGSYAAAALAREGIETVVLEADKFPRYHIGESTLPSLRHFFKFIDFYDTFDAYGFYHKNGAVFRLAQAQPDACKSPSPAYTDFLEAGGPNGYAWNLIRSEFDDLLFKHAGICGAQIFSETRVDTIQFEPVANGLKPDLNRNLEDNLNPGRPASATWVRKDGTSGSITYKYLVDASGRHGILSTKYLKNRKFNNNFKNAAIWAYWKSDNVYGPGTHMEGSPYFEALDDGSGWAWFMPLHDGTRSVGIVQDQKMATEKKHELGRPPTLDFYKQCLEMAPRISKLLSQAELIPHVRAASDWSYTASTYHLPNARICGDAGSFIDPLFSSGVHLAITGGLSAAATISASIRGDCNEAAAGSWHSKKTVESYTRFFLAVSSATKQIRTQHEPIIKDMDEEGFQRAFDLFRPSTADADAAGKVSQLEISKILQFCFKAFTYVPPEKKDALFDKLRKLDSKALQDDAKQTPTLDAIEKHLTADELQILEILRSRRMIREDPFEMDSFTLDTIDGMAPKLVRGSLGLVNYEQAKIDKAHFYSQDFLDGNYPGIREGSVHLPASRVQLG

SEQ ID NO: 88108 - protein, 542 aa, unidentified
  source 1..542: note = Metarhizium robertsii
  REGION 1..542: note = tr|A0A014MW34|A0A014MW34_9HYPO Tryptophan halogenase domain protein OS=Metarhizium robertsii OX=568076; GN = X797_011455 PE=4 SV=1
MAVPPSCTVLVIGGGPAGSYAAAALAREGIETVVLEADKFPRYHIGESTLPSLRHFFKFIDFYDTVDAYGFYHKNGAVFRLAQAQPDACKSPSPAYTDFLEAGGPNGYAWNLIRSEFDDLLFKHAGTCGAQIFSETKVDTIQFEPVANGLKPDMNRNLEDNLNPGRNRKFNNNFKNAAIWAYWKSDNVYGPGTHMEGSPYFEALDDASGWAWFMPLHDGTRSVGIVQDQKMATEKKHELGRPSTLDFYKQCLDMAPGIRELLSEAELIPHVRAACDWSYTASTYHLPNARICGDAGSFIDPLFSSGVHLAITGGLSAAATISASIRGDCSEAAAGSWHSKKTVESYTRFFLAVSSATKQIRTQHEPIIKDMDEEGFQRAFDLFRPIIQGTADADAAGKVSQLEISKILQFCFKAFTYVPPEKKDALFDKLRKLDSKALQDDAKQGQTLDGIEKHLTADELQILEILRSRRMIREDPFEMDSFTLDTIDGMAPRLVRGSLGLVNYEQAKIDKAHFYSQDFLDGNYPGIREGSVHLPTSRVQLG

SEQ ID NO: 88109 - protein, 404 aa, unidentified
  source 1..404: note = Tolypocladium ophioglossoides
  REGION 1..404: note = tr|A0A0L0N8A0|A0A0L0N8A0_9HYPO Tryptophan 2-halogenase (Fragment) OS=Tolypocladium ophioglossoides CBS 100239 OX=1163406 GN=TOPH_05395 PE=4 SV=1
HPLESAVVAIDNTPSPQRPTLLQLVAKTATLGRLSHRKLMSCFSNTSATAASKTFGATKVREIQFVPDKTPHGASDPPSPGRPVSATWCHKDGSTRAIRFEYLVDESGSSGLVSTKYLKNRRYNQGLNIANWGYWKGSDVYGVGTFSEGRPCFEALKGKATNDDWVWFIPLHDVTHYAGIVQMRDMAVAKRQSDSPSSKEFCTQSLNLVPGIKNLLSNAEPVSDVKSASDWSYSTSSHAFPYMHIAGDAGASIDPFFSSDDDHLAFAGGLSPAVTIATGIRGEYAEATAASWHNKKTPESYTPFLLVFVSALKQIRSQDKPVPSDVDEESFDRAFDLFRPGRDLQNRRALFPWLRSGFLGTEGGAHPKLKKRGLDADANNEHTQKPSQSFNRVLLRKNAKFWTP

SEQ ID NO: 88110 - protein, 520 aa, unidentified
  source 1..520: note = Talaromyces islandicus
  REGION 1..520: note = tr|A0A0U1LSX1|A0A0U1LSX1_TALIS Tryptophan 2-halogenase OS=Talaromyces islandicus OX=28573; GN = PISL3812_03494 PE=4 SV=1
MEIPEKCTVLVIGGGPGGSFAASALAREGIDTVLLEGDKFPRYHIGESMLASMRHLLRIVDLDSVFDNYGFTKKVGAAFKLNPKKRPGYTDFLAAGGPENYAWNVIRSEADNLMFKHAADSGAKTFDGVQIKAIKFDDIPYKGSVELPHEYPGRPVSATWTRKEDGTSGEIKFDFVVDASGRVGLLSTKYLKNRRYNQGLKNVANWGYWKGCGTYAAGTPRANSPFFEALQDESGWAWAIPLHNGTTSVGIVMNQQMSTDRKVQSGSPDSKTFYLDCLKQLAPDITELLGEGELTSNIKSASDYSYSASGYAIPGARIVGDAGCFIDPYFSSGVHLALVGGLSAATTISASIKGQCTEEAAADWHSKKIADSYTRFLLVVLSAYKQIRSQNAPVLSDFDEDNFDRAFAFFRPVIQGTADVSNKLTQEELNETLEFCSNAFTPVTPEDRNSALEKMGKDITSKEFQVDLSPQEQKVVGHIRARQMMRTEDTINIASFGTDSINGMVPSLQRGSLGLVKSTA

SEQ ID NO: 88111 - protein, 654 aa, unidentified
  source 1..654: note = Grifola frondosa
  REGION 1..654: note = tr|A0A1C7LYE4|A0A1C7LYE4_GRIFR Tryptophan 2-halogenase OS=Grifola frondosa OX=5627 GN=cmdE_0 PE=4; SV = 1
MPSVNPPNHTQVLVIGGGPAGSYAAAALAREGISVVLLEMAKFPRYHIGESLIPSVRHYLRFIGAEEKVIAHGFARKVVVFSDILQTVFLDADVCHLSSLVLRSNSINICVKATAIYHFPEEPPAHPPHLFADTDFVALGAENAAWNVVRSEFDQLLLQHAASCGARVFDQTRVTALSFSYDGPRPSSEMRPTLGRRQSMVEFAGDALGEGEELGRPISAAYETAFGGKGDIKFDYLIDASGRAGIMSTKYMKNRKFNESLKNVAVWGYWRGTGMYGKGTDRQNAPFFEALSDESGWAWFIPLHNGLTSVGVVMGQKQLGIRSRASSSAGGSPTLPTFAARRPSLSTRVSSTLAERYLSFLPLAPGVVSLIGEGELVTVKTDEGEEPPVARSASDYSYSASDYAGPGFRFGDAGAFIDPFFSSGVHLAMTSALSAAATVCASTRGDCTEMEAAQWHSGRVALSYTRFLVVVLSAYKQIRAQSSNVLADIEEDNFDKAFAFLRPVIQGGADMGKRLSEDEVQRALTSVKLEIISGLPALPSEDETAEAENDNKPNQEHQEALQLMDVRAPVVDPAKLEKLLRRQLRIQTATTSQTPSHTLDEQAEVKMVLEKVNARRVIHAEHGNGLSSLEEEAFGGLVMRLHRGSLGLHRAEEA

SEQ ID NO: 88112 - protein, 345 aa, unidentified
  source 1..345: note = Grifola frondosa
  REGION 1..345: note = tr|A0A1C7LQJ0|A0A1C7LQJ0_GRIFR Tryptophan 2-halogenase OS=Grifola frondosa OX=5627 GN=cmdE_2 PE=4; SV = 1
MPSIPTCVQILVIGGGPSGSYAASALAREGFSVVLLEADKFPRYHIGESLLPSVRPFLKFIDAENLVATHGFTTKPGAAVKLNQYKHEGYTDFIALDSNNNSWNVIRSEFDELLLQHACKSGALVFEETKVINIEFGAKPGSQERPVAATWKTSTGEEGCIRFDYLVDASGRNGIMSTKYLNNRRHNKSLKNIACWGYWEGTDKYMPGTTRENAIWVEALQDESGWAWFIPLHDGSTSVGVVMDQDTSIAKKKAVRQCVDGDIDTLKKHYLEELDRAPGLIRLLGDAKLRTSYGTDTIKSASDYSYSATKYAGDHYRLIGDAAAFIDPFFSSGVHLALTGVYRLH

SEQ ID NO: 88113 - protein, 534 aa, unidentified
  source 1..534: note = Penicillium patulum
  REGION 1..534: note = tr|A0A135LM30|A0A135LM30_PENPA Tryptophan halogenase; OS = Penicillium patulum OX=5078 GN=PGRI_059860 PE=4 SV=1
MAIPQSCTVLVAGGGPGGSYTAAALAREGVDVVLFEADSHPRYHIGESLLPSMRYLLRFIDLEDTFEQHGFQKKLGAFFKLNAKSAGYTDFIRANGPNGYSWNVVRSESDEILFRHATKSGAKTFENVSLKSVNFESYENDMFTSQHKLANPGRPVSAEWKTKDGCSGTISFDYLVDATGRVGILSTKYLKNRKFNESFRNIAMWGYFKGNIPPSPGTDRENQPISEGMRDGSGWVWMLPLHNGTVSIGAVVRRDIFLAKKKALPEGTTEAQALASLVALCPTISSYLEPAELASGIRQATDYSYSASAYAGPNFRIVGDAGCFIDPFFSSGHHLALSSALAAATSINACIRGDCNELDASRWYAKKVDEGYTLFLVVVMAALKQIRMQEEPILSDLDEEGFDRAFAVLRPVIQGAADKETAPKAKGESITETINLCLNALNDLHDTELQKKLTNIVEAKGTPEQDQLLGKLSPDEMAALQRLRAMHSILPMGELKDFENSNIDGLKARLEHGSLGLSRDHAGFCRDGEGDLEV

SEQ ID NO: 88114 - protein, 518 aa, Pseudoalteromonas marina
  REGION 1..518: note = tr|U1K0D7|U1K0D7_9GAMM Tryptophan halogenase; OS = Pseudoalteromonas marina DSM 17587 OX=1117316; GN = PMAN_08982 PE=4 SV=1
MNQQNKKIKTVVVVGGGIAGWLTAGRLAAHHKSNTPDGLNVVLVESPNVPIIGVGEGTWPTMRSTLIALGISETDFIRECEASFKQGAKFAKWVDGSNDDFYYHPLVLPQGFSKTDMAGHWLNNAAESTSFSNAVCYQEAICEQGLAPKTIHTPEYAAIANYAYHLDSAKFAVFLQKHCTQQLGVKHILADVTQVNSADNGDIASVITKQQGEISGDLFVDCTGFSSLLLGEHYKVPFKPCDDVLFIDTALAVQVPYENEDERIASHTISTAQEAGWIWDIGLQHRRGVGYVYSSKYSSEAEAREKLNAYVGDKIESLTIRKIPIKSGHRSHFWQNNCVAVGLSAGFLEPLEASALVLVEMSAQMISEQLPQTRDIMDITAKRFNETFTYRWEKIIDFLKLHYILSNRDDNAFWRDNRDPKTIPQSLLDLMKLWQYRAPADHDFTSNNEVFPAASYQYVLYGMGFKSDYSTTAYMLKDTVFAKSQFDKNKSMINQAVTNLPSNRELLNKIKHHGFSAI

SEQ ID NO: 88115 - protein, 521 aa, Sphingopyxis macrogoltabida
  REGION 1..521: note = tr|A0A0P0D4J2|A0A0P0D4J2_SPHMC Tryptophan halogenase; OS = Sphingopyxis macrogoltabida OX=33050 GN=LH19_14990 PE=4; SV = 1
MNDLVERVVIVGGGTAGWLAASLIANSRRAKAAPLSITLVEAPDVPIVGVGEGTWPTMRTTLATIGLDESEFLAACDGAFKQASRFDGWRDGSAGDSYLHPFTTPPALPTGELLAAWQEASPDQPFAAAMSAQAAVCNLHLAPRQRSMPDYQGATNYAYHFATEKFGALLARHAKQSPLITHILDHVTGVRHADNGDIAALTTRSGREIAGDLFIDCSGFKGLLIGDALGVDWIDRSDHAFNDRAIASQVPVPPGSPIASQTIATAHEAGWIWDIGLPSRRGIGCVYSSRFMDAERAETVLRDYIARELPGAVPETKAFGVPFKHISFRTGHRARFWEKNCLSIGLAAGFIEPLEASAIVLIELSLRALTDNFPADRAAMDIHAGRFNKLFRYRWDRIVEFLKLHYVLSRRDEPYWRAHRDPAHIPPHLAEMLELWRSQPPSAWDFPYVDEIFSAQSHQYILYGMGFPAPAGWPASDRALAALAEMRQRARTLAAGLPTNRLYLDALADDRAAAEQKEAAE

SEQ ID NO: 88116 - protein, 503 aa, Massilia sp.
  REGION 1..503: note = tr|A0A098UE18|A0A098UE18_9BURK Tryptophan halogenase; OS = Massilia sp. JS1662 OX=1519190 GN=IA69_03440 PE=4 SV=1
MENNNQHDRGRPIRRVVIAGGGTAGWMAAAALSRTLGKVLDIKLVESDDIGTVGVGEATIPSLVHFHRLLDIGEQEFMAATQATFKLGISFEGWRARGEDYIHSFGMTGTDHWTAGFQHFWLKGRDRGLASDYGDYCLELVASQEKRFGHLPNQGINYAYHLDATRYARYLRRFSEHFGAQRIEAKIAGVDTDPATGHITALVLDSGTRIEGDLFIDCTGFRSLLLGQTMGVEYEDWSQWLFNDCAIAVQTESTGPAVPLTRSMAHDWGWQWRIPLQHRTGNGIVFSSRHTDEATARATLLGNIEGKVLTEPRVIRFTPGQRKKVWAGNCIGLGLASGFLEPIESTSIHLIQRGIVRLLQIFPSHGIQQSDVDEFNAQAEEDIRTIRDFIILHYKVTNRRDTPYWHDAATMQVPDSLQHRIDLFRDGARVFREGNELFAENSWVQVMLGQGLTPERWHPSADLMGDDELRGFLDGIRNGVRRTVSQLPPHQQYVERYCPAGKP

SEQ ID NO: 88117 - protein, 501 aa, Pseudoalteromonas marina
  REGION 1..501: note = tr|U1L1P9|U1L1P9_9GAMM Tryptophan halogenase; OS = Pseudoalteromonas marina DSM 17587 OX=1117316; GN = PMAN_10991 PE=4 SV=1
MNDSNNIKSIVIVGGGSAGWMTASALAKVIGCDNCQITLVESADIGTVSVGEATIPQIQLFNTILDIDEAEFIRFTNATFKLGIEFIDWKEKGHRYFHPFGNYGTNMEALPFHHFWLKMQNDPEFSDLSSYSLASVGAYANKFMHPSTQQNSALAGINYAYHFDATLYAKFLRNYATSRGVCRIEGKVDEVNLNPVSGEIESLVLNDNTVLDGDLFIDCSGFKGLLIEQALKTGYEDWTHLLPCNKAIATPCLSKKALNPYTQSTAQSAGWTWRIPLQNRVGNGYVYSSEFMSDDKAQALLLNTIESEALADINQLQWVTGMRKKSWNKNCIAIGLSAGFVEPLESTGLHLIQSAIAKLMTLFPSKDFTQCDIDLFNQQTETEYHRIRDFIILHYKLTNRDDSEFWRYCKNIEMPDSLKQKIEMFSENGRIFRHDNELFNETSWLAVMHGQGIKPKSYHPLVDRLSRDEIKRRLKNIESVISRSADVMPDHEAYILKNYTR

SEQ ID NO: 88118 - protein, 468 aa, Brevundimonas sp.
  REGION 1..468: note = tr|A0A1H1GK52|A0A1H1GK52_9CAUL Tryptophan halogenase; OS = Brevundimonas sp. 374 OX=1150400 GN=SAMN02787020_2743; PE = 4 SV=1
MSGTEKIWVIQGAGLAAWAAAALLARHLPSGNSVLIEDAVSPALGEESEVVVAEPDGVLVQLSDGADLLAHGHGGFFLGSLLRNWCDGRDIAVVEQEPLPGIDGVALTDVVLRAARQSPAAPDYAALMAPLQFQARVMAAGRYAHPSPDRQSPRSLLRPRLMLDARVLTARLRDIALRAGVRETPDDVREVEAFMTLETRANGVFSGDGDWTGRLGYDRCLTMRYVGGDHPPRLDMANLVEGLVSSSPLPGGGFASLAYAADRTTVDVAKAALAAWLGDVDVATQSDVVLAPGLNTHPWSGRRLALGPAAARFGDALSLDSAALERQLTQLVASLPGTSEQISACAEAYNEAVVRDIAHRADQLHLILLNGSQGERLAPAGDDLARRIAQFTSRNAGVGLDGDPYDAQHWIMLMASLGLMPRRYDIQADRLDIKAAMASLGRMVIAFDQTLAALPAHSQFIDRLREGG

SEQ ID NO: 88119 - protein, 503 aa, Brevundimonas sp.
  REGION 1..503: note = tr|A0A1H1CJE7|A0A1H1CJE7_9CAUL Tryptophan halogenase; OS = Brevundimonas sp. 374 OX=1150400 GN=SAMN02787020_1518; PE = 4 SV=1
MSEQPEPVRHIAIVGGGTAGWMAAAALGRAFTRAQGLALMITLLESESIGTVGVGEATIPPIRQCVQTIGLSEEDFIRSTAATAKLGIAFKDWTAPGSEYFHGFGDYGPIVAGQAWRQYLFRLKAAGRIDSLDPWSMPTAMARAGKFAPPVEDSRSVLSHYSYAYQFDAGLFARRLRTLAETMGVVRREGRITGVDRNGETGLVRAVTLEDGGEVEADLFIDCSGFRGLLIEQTMRAGYEEWTHWLPCNRAVAVPCSSTLAPEPITTARAREAGWQWRIPLQHRVGNGYVYSSDHVDDQTALDDLLDQIESEPLAEPNRLRFVTGRRREAWKGNVVSLGLASGFVEPLESTSINLIQTGIGRLLEMFPDRSFDPALIREYNRRSAQEFERIRDFIILHYHLAGRAGAMWDRCRETAPPDTLMEKIELFHARGEVGLLEDESFREDSWAAVFTGLGTWPKQPSPLVCIDDLETVDRQARQFAQLIARAAAALPDHSTTFTGYAR

SEQ ID NO: 88120 - protein, 508 aa, Brevundimonas sp.
  REGION 1..508: note = tr|A0A1H1GK22|A0A1H1GK22_9CAUL Tryptophan halogenase; OS = Brevundimonas sp. 374 OX=1150400 GN=SAMN02787020_2742; PE = 4 SV=1
MMTQNDAGPIRKIVILGGGTAGWMTAAALSHRLAGSPVSIELVESAEIGIVGVGEATLPHIRAFNTAMGIDEQTLIDQTQATFKLGIQFVDWGRPGDSYIHPFGAYGEPIEGIDFHHVWAARRAMGDAADISDYSYPVRAAEANRFQRPVSDPGSMLSTFSYAFQFDASLYAAFLRQVSCGRGVVRTEGKVVDHVLNGATGDVDAIVLSDGRRIAGDLFIDCSGFRGRLINQALETTFEDWSHWLPCDSAFAVPCQTAAPVGPYTRATARAAGWQWRIPLQHRTGNGHVFSSAHISDEDAVATLMSNLEGPALAEPRRLSFRTGRRHKLWNRNVVAIGLSGGFLEPLESTSIYLIQLGITTLLDLFPDRVGMEADAEEYNRIMALEFDRIRDFLVLHYVANQRDEPFWREMRTMAWPDSLSAKVEAFKSRGLLPDYDIGVFLPPSWLAVLVGQNIVPNGWDPRVDRLEPHVLSDKLAALRDDVRSTVDRTPDHMTFISDAAARAGSLR

SEQ ID NO: 88121 - protein, 603 aa, Streptomyces sp.
  REGION 1..603: note = tr|A0A2N0IV36|A0A2N0IV36_9ACTN Tryptophan halogenase; OS = Streptomyces sp. 69 OX=1827605 GN=CLW08_3371 PE=4 SV=1
MIAGGGVAGSMAAAYLTAAFGDRISVTLIDSPVDGPAHEATLGDIGRFFEFLGLAEEDWMPACGATYKLAVRLQDWNRPGHHFYLPFEPVREAHGFPLTAWWLQQGQGRRFDRDCFVSAWLCDAGRGPRQVAGAPSAAAEPAVPYGYHLQAGRLAALLTGYAQERGVRRLTGRVTDVRLDARGWVESLVTEDHGEIHGDLFVDCTGERSLLLRRALRVPQVSYRDTLPNDRVVTLEVPADMEARGMPPYTTVTARGAGWMWTVPLFDRIGAGYAYATEYCTPEEAEEALREYVGPEAAGVPAGHAGLSGGRSTVGWKHNCVAVGDAAGRVEPLGGPGVASFAHHALELLVRHFPGADWDARLRDGYNAGVARALDEARDFLALHYQGSGRDDSQYWRDVKTRTLPEGVAARLRQWGCGLRTARGRWAGRGSGRGSGCRGMCVRRCSSARLPCRRARLPRWRCWTAPPRGGSSWGFGSGGGSWWVCCRRRMRCWWGWRGEGAREGAGGLWVGTRPSAGFGFPPAPPVTVSSSGAGGPGGRIRRRRVRVGLVGPCRRWWVRVALVGRIRRRRVRVAWWGRRRWVLVGGRYVGSVPLGRGPVQAGV

SEQ ID NO: 88122 - protein, 368 aa, Sphingomonas sp.
  REGION 1..368: note = tr|A0A518RGP0|A0A518RGP0_9SPHN Tryptophan 7-halogenase OS=Sphingomonas sp. XS-10 OX=2599297; GN = FPZ54_11715 PE=4 SV=1
MSAVARVAVLGSGVIALSAAIAFRRALPAARITLVERPVSPNALLDRIGAATLTIDGFHRAIGLDQALFIRRTGAVAIRRVELDGVQLAPPGAIPHVDGVALHQLWLRSERERTGRTMPWPTLAARDAEPFGVRFDMAAYSALLAEMAAALDIARASDVPEADLLLDCAAPGDDWTDWSAHLPSLVAQPISSGAPEGETIATGAGAVEWRSPPWGWRLSRGAGLPPGRHPAPRAGNRIALGEATLVAEPFDGHALSAAHGDILRAIEFMPHAEPSPREAAEYNRRTAIAHGRLLDWATERWNGLATPDLANLRTGFAARGRMPYRDWDPVTPGEWIGWWLAQGVRPERIDPTARAVAETKIIRMMEGI

SEQ ID NO: 88123 - protein, 491 aa, Massilia sp.
  REGION 1..491: note = tr|A0A098UFQ1|A0A098UFQ1_9BURK Uncharacterized protein OS=Massilia sp. JS1662 OX=1519190 GN=IA69_00235; PE = 4 SV=1
MTYERIVVLGGGTAGWMAATALATGLKGTTVELVESEDIGTVGVGEATFPSIRNYHQILGIPEADFLRATNGTYKLGIRFRDWRVKGEDYYHTFGDFGMLNGPESLWGQYRRHPRASLSTFGEQCLPTVMAMNDRFCAPGKDAANFNYAYHFDAILYARFLRDIALKRGVRRTEGKVVDVARRPDGGVASLKLDDGRTVSADLFVDCSGFSSLLLGRTLGEPFVDFSHWLPVDRAWAVPSARVGDNLTPYTRATALDAGWAWRIPLQDRTGNGHVFSTRFIDEDKAREQLLQQLDGEALAEPRLLRFTTGHRAKFWSHNVVGIGLATGFLEPLESTSIYLVQVGVGRLMTLLQRGGPVAPDLVDAYNLGLTRQFERIRDFILMHYCLTARRDTPFWQYMAAADLPETLAYKLHAWRETGVLHQYDEEGFDGHSWLAIHAGMQNWPARSDPTLKLIPEEQSLEWVRERASQLAAAVATVPTHQEYLARVLGR

SEQ ID NO: 88124 - protein, 521 aa, unidentified
  source 1..521: note = Xanthomonas prunicola
  REGION 1..521: note = tr|A0A2N3RG45|A0A2N3RG45_9XANT Tryptophan halogenase; OS = Xanthomonas prunicola OX=2053930 GN=XpruCFBP8353_18255; PE = 4 SV=1
MPDTMPSDPQQRPVRRVVIAGGGTAGWMAAAALSKLLGRHLQITLVESDEIGTVGVGEATIPSLVTFHRLLEIDEAAFMVATQATIKLGIAFEHWRDVDRHYIHSFGHAGTDHWSAGFQHFWLKGRQRGVARDFGDYCLELRAAQEGRFAHLPNGGMNYAYHLDAGLYARFLRRFSEGFGVTRIEGRIGQVETDAESGFLTALTLQDGTRVEGDLFLDCTGFAGLLIGKTLGVGRDDWSHWLFADSALAVQTESVGPPVTYTRSRADQAGWMWRIPLQHRVGNGIVYSSRYMDQDSARAVLERNLTGRALTEPRPLRFTPNQRHRVWEKNCVALGLASGFLEPLESTNIHLIQRGIIRLLQTFPQVINAVDSAEYNRQAAQEITHIRDFVILHYHATDRRDTPFWRDCAAMDIPDSLRHRVELFRQSGRVFHQANELFAENSWVQVMLGQGVVPHQHHPVADLMGDAELSRFLETIRTRVEGALVRLPAHADFLHRYCPAPPPPEPAARVPAPTVMATPAE

SEQ ID NO: 88125 - protein, 513 aa, Streptomyces sp.
  REGION 1..513: note = tr|A0A1V2RV65|A0A1V2RV65_9ACTN Flavin-dependent tryptophan halogenase RebH OS=Streptomyces sp. MP131-18; OX = 1857892 GN=STBA_70250 PE=4 SV=1
MIRKVAIVGGGTAGWMTAAYLKAAFADRLDVTLVESESVGRIGVGEATFSTVRHFFDYLGLDESEWLPKCEGGYKLAIRFENWAKKGHHFYHPFERLRKVDGFSLAEWWLKLGDHTQPFDRQCFVTSALCEAKRSPRMLDGSLFASGLDGTLGRSSLSEQRAQFPYAYHFDADKVAAFLAAYGKERGVRHVVDDVVHSALDDRGWISHLQTRGGLRLDADLFVDCTGFRGALINQLLGEPFESFQDVLPNNRAVATRVSRQDITEMKPYTTATAMDAGWMWTIPLFHRDGVGYVYSDEFATPDEAERTLRERVGDAKAELDVNHITMRVGRCRDSWVRNCVAIGLSSAFVEPLESTGIFFIQNGIEQLVKHFPDERWDPELTRNYNARIAQAVDGVKEFLVLHYRGAARNDNEYWRAAKTRKVPGRLAERMEQALPHLIDEEAIYPYYHGFEPYSWNTMLLGLGNQPARARPALDHMDPGRARAEFDLLRAEANAVIEKLPSCYEYLERIHTP

SEQ ID NO: 88126 - protein, 513 aa, Novosphingobium sp.
  REGION 1..513: note = tr|F6ICQ6|F6ICQ6_9SPHN Tryptophan halogenase; OS = Novosphingobium sp. PP1Y OX=702113 GN=PP1Y_Mpl911 PE=4; SV = 1
MQRPTKKIVIVGGGTAGWLTAGVIAARHLSRMPGGFSVTLVESPNTPIIGVGEGTWPTLRTTLAKIGVSETDFFRECDAAFKQGAKFARWTTGAHDDAYYHPLMLPQSFAQLNLAPHWLANGESSFCDAVCPQGRICDDGLAPKTIATPEFEALANYAYHLDAGKFAPFLQRHCTQKLDVRHVLADVQRVEMTEDGDIKSVVTEQAGEIEGDLFIDCTGFKALLIGEALGVPFKDCSDVLFCDTALAVQLPYESETSAIASHTISTAQSAGWIWDIGLPTRRGIGYVYSSDHTSGDDAERELRTYLGAAGKDLPIRKIPIRSGHRETFWKRNCVAVGLAAGFLEPLEASAIVLIELSAKLIAEQMPACREVMDPIARRFNATTDYRWGRIIDFLKLHYVLTQRRDSAFWQDNLRPESIPERLQELLLLWKYQGPWFHDEFDRVEEVFPPASYQYVLYGMGFRTEVEHEALAGDAGLAARAMRENAAQTQRLRAGLPRHRDLIRKIVDHGLQPV

SEQ ID NO: 88127 - protein, 503 aa, unidentified
  source 1..503: note = Planctomycetes bacterium
  REGION 1..503: note = tr|A0A517Z4G3|A0A517Z4G3_9BACT Tryptophan halogenase; OS = Planctomycetes bacterium Mal4 OX=2528026 GN=Mal4_16350; PE = 4 SV=1
MTRLEADVAVLGAGFGGSITSLLLQRSGLRPVLIDRSRHPRFAIGESSTPIADFILKDLAARYDLPALAPLAKFGTWREQRPELVCGLKRGFSYFRHRPGEPFRVDPGHSNELLVAASFDDRRADTHWLRADVDRFFAEQVQAEGIPYFDETDVSIETVDGGWRLDGNRNGEPVGIDAAFLIDATGGAESVLRALGISSTAEGMATCSRAIYGHFEKVAVWQESLAGAGADLSDHPFPCDAAAVHHLLEEGWMWQLRFINGITSAGFVLTGEQAADAGLTAEDEWETLLRRYPSLGEQFAEARLVAPESGLVRTGRMQRRAGQSAGENWAALPNTAGFVGPMHSTGIGHTLCGIERLVPMLAEHWRKPSLGRELQRYQQTLAQELRLIDRLVWGCERTVDQFELFTAYAMLYFAAATTYEDRRLNGRLAPGAAFLCADDERFVTVVERCRIRLLELLAAGPVTAERAAAYFDFVAEAIRSFNIAGLCDRGVRNMYRYTAVPAD

SEQ ID NO: 88128 - protein, 516 aa, Sphingomonas sp.
  REGION 1..516: note = tr|A0A518RGR1|A0A518RGR1_9SPHN Tryptophan 7-halogenase OS=Sphingomonas sp. XS-10 OX=2599297; GN = FPZ54_11795 PE=4 SV=1
MLLQHEEGERRVAERVRSIVIAGGGTAGWMTAAALARVLGRDYATITLVESDAIGTVGVGEATIPQIGTFNRLLGIDENDFLRRTKGSFKLGIEFVDWGGLGRRYFHPFGKYGIDMEGVSFHAYWQRLAGDPQFAPEFGDVDTFSLMASAARANRFMPPIDAGNSPLSSIAYAYHFDAGLYALYLREIAEAMGVNRVEGRIVDVERNGESGHIDAVALDSGQRIEGELFVDCSGFIGLLIGKTLGVPYIDWSAHLPCNRAVAVPCASAPGPLTPYTRSTAHRAGWQWRIPLQHRTGNGMVYCSDYISDDEAAATLLANLDGEALADPRFLRFTTGHRQRFWEANCVSIGLSSGFMEPLESTSIWMIQTGIARLLSNFPDSSFAEADRARYNRLMIEESELIRDFLILHYHLTDRTDSPFWDYCRTMEIPERLAEKMRVFATSGRCFREHEELFNDTSWFAVMVGQGMRWARHDPVAELLSLAETRDRLAHIAGAVRASVDYMPDHADYIRQNCAAA

SEQ ID NO: 88129 - protein, 415 aa, Burkholderia ambifaria
  REGION 1..415: note = tr|B1FKN0|B1FKN0_9BURK Tryptophan halogenase; OS = Burkholderia ambifaria IOP40-10 OX=396596; GN = BamIOP4010DRAFT_4591 PE=4 SV=1
MSEMKSNSVDVAIIGAGPSGAVAAALLRRAGRSVLVLERQHFPRFSIGESLLPQSMQYLEEAGMLQAVVEAGFQFKNGAYFVYRDRMSSFDFREKFSDGWGTAYQVERAAFDDLLIRCAAEQGADVRFGHTVQAFHPGDTQRLDVVDEAGCEYFVHASFVLDASGFGRVLPRLLDLEAPTGMPTRAAIFSHVEDSLPAGSTDRDKICIAVHPERRDVWFWMIPLTNGRSSVGCVADAGFLDVPQAQQESLLRELMQSEPTLSRLVGSKPFVMPVRRIAGYASNVEHLHGRGYALLGNAGEFLDPIFSSGVTIAMRSAQLAVAVLERQLRGETVDWTRDYDIALRKGIDTFRAFVERWYSGALQDIVFHEDKASDVKRMVCSILAGYAWDESNPFVREPARGLDVLAEFCRAGGLG

SEQ ID NO: 88130 - protein, 512 aa, Sphingomonas sp.
  REGION 1..512: note = tr|A0A518RAW4|A0A518RAW4_9SPHN Tryptophan 7-halogenase OS=Sphingomonas sp. XS-10 OX=2599297; GN = FPZ54_00195 PE=4 SV=1
MKQVQNIVIVGGGTAGWLTAGVIAARHQGRRNHGFSVTLVESPNVPIIGVGEGTWPTLRTTLRKIGVSETEFFRQCDGAFKQGARFNRWTTGAADDGYYHPLMLPQGFARVNLAPHWLAEGEGSFCDAVTPQGQLCDAGLAPKTIATPEYEALANYAYHLDAGKFSAFLQRHCCETLGVNHVLADVTQARMADNGDVAALETAQGPVVEGDLFIDCTGFRALLIEGAMGVPFRSCADVLFCDTALAVQVPYDDPADTVACHTISTAQSAGWVWDIGLPTRRGVGHVYSSSHISDDQAERELRAYIGPAADGLSVRKIPIRAGHRDTFWKGNVVAVGLAAGFLEPLEASAIVLIELSAKMIAEQLPPNRAVMDVLARRYNATTQYRWGRIIDFLKLHYALTKRTDTGFWRDNCRAETIPDRLRDLMELWKYQAPWLHDEFDRAEEVFPAASYQYVLYGMGHRTHAPPGEGDAEVELARRAWRENRVQTARMMEGLPRHRDLLEKIVQHGMQPV

SEQ ID NO: 88131 - protein, 502 aa, Thalassomonas actiniarum
  REGION 1..502: note = tr|A0A0D8CQ87|A0A0D8CQ87_9GAMM Tryptophan halogenase; OS = Thalassomonas actiniarum OX=485447 GN=SG35_24580 PE=4; SV = 1
MQTTSQEDNKNKKIQRVVIAGGGSAGWMTAASLSKLLGKSLDITLIESEEIGRIGVGEATIPPLRTFNELLGINEQHFMKTVRGTFKLGIEFKNWGRQNDSYIHSFGDTGRICWAGEFQHFYLAGLKKGIKDEFGAYCPEHAAAKAGKFLGSRDGNLDYAYHLDAGLYADYLKQLALGKGVKRLEGKIEDVSIQAETGYIQALTLDNGTRVEGDLFIDCTGFAARLIEGALNTGFESYSHLIPCDSAVAVQTEKAGEPRPYTQAIAHNWGWQWRIPLQHRVGNGLVFCSRYTSDEEAIATLMDNLESPAITEPKVFRYNTGRRVKGWNKNCIAIGLASGFVEPVESTAIHLIMASILRLMKLFPHNEISQANIDEYNNQTREEMERIRDFIILHYKATERDDSPFWRYCQNMEVPQTLAHRMELFKKTARVCITQSELFRLDSWTQVMMGQGIMPENYHQIVDQMSDAELAKFLKGIKGQVDARVADMPGHQEFINYYCKAL

SEQ ID NO: 88132 - protein, 500 aa, Sphingomonas sp.
  REGION 1..500: note = tr|A0A518RII7|A0A518RII7_9SPHN Tryptophan 7-halogenase OS=Sphingomonas sp. XS-10 OX=2599297; GN = FPZ54_15595 PE=4 SV=1
MEFNIVIVGGGTAGWMTAALLSKLFFRGHSVTLVESEEIGTIGVGEATIPGIKDYNRLAGIDLTEMIRATQATFKLGIEFVDWRAPGSSYIHGFGKIGTDLMWLHPHQLWLKLKAMGKARHFDDYALNCLAARQNKFCFPDPRNPGSPIGHIDYAYHFDASLYARFLRSRAEAQGVARIEGRIVAVKQRPEDGFVDHVVLADGRTIAGDLFVDCSGMRALLLGQTLGVGYEDWSRWLLCDRALAVPCERVAPLTPYTRSTAHDAGWQWRIPLQHRTGNGHVYASALIDDDTAARTLIDNLDGRPLGDPRPVSFRPGKRHKAWEKNVVGIGLSSGFLEPLESTSIHLIQTAILRLVALFPGRGFDDADIAEYNRQHHFEFDDVRDFIIAHYKVTQRSGTPFWDHVRTMDVPDSLAERLELFRASARFFVHGKAELFREESWVQVLLGQGMDMTYDPMVDMFPEEDVVEFMNDIAETNAEVAAAMPTHEAFIERHCRAPSLA

SEQ ID NO: 88133 - protein, 516 aa, Pseudoalteromonas marina
  REGION 1..516: note = tr|U1KXM3|U1KXM3_9GAMM Tryptophan halogenase; OS = Pseudoalteromonas marina DSM 17587 OX=1117316; GN = PMAN_14154 PE=4 SV=1
MTKPIKKIVILGGGTAGWLSAGLLAAEHPHLSVTLIESANVPILGVGEGTWPSMRNTLQRIGIKEIDFITQCDATFKQGSKFINWRNLNKGENYYHPFMDPQGYEQTNLHANWQRIAPNQKFADVVNMQSFVCQAALAPKQLQTPEYAAVTNYGYHLEAGKFAEFLKNHGVKNLNVTHITDDVTHVINDEHGYIASLKTNKNGDITGDLFIDCSGSRARLIGEHFNSEFIAQDHILFNNSAVAAQVPNAHINQPIASATLSTAQSNGWIWDIALPTRRGTGYVFSSQYQSDESATDTLKSYIAKSTSEQQTEQLNYRVLKFSPGYRQKFWIKNCVAVGMSAGFLEPLEASALAMVELSISMLSEQLPQNRTHMSQLANRFNDRFSTRWQRVVEFLRLHYVLSERDDTPYWQNIRDLTTAPERLQNLLKLWQFQPPSRFDFIENEEVFSSSSYQYILYGMGFNTQTPQAHNAFTSAQAGDYFYQQNREKIAQYLKGLPSNRALLNDLLSNNRQPHND

SEQ ID NO: 88134 - protein, 494 aa, Sphingomonas sp.
  REGION 1..494: note = tr|A0A518RGP8|A0A518RGP8_9SPHN Tryptophan 7-halogenase OS=Sphingomonas sp. XS-10 OX=2599297; GN = FPZ54_11705 PE=4 SV=1
MNAPVASIVIVGGGTAGWMAAAAAARFLNDGRRTVTLIESDAIGTVGVGEATIPPIREFNHRLGIGERDFIRETGATIKLGIEFVNWARQGDHYLHPFGDVGHDFEGVAFHQFWLKHRIGALEDYWMSAQMARRDRFTHPAADPRSPLGGLAYAYHFDAGLYAAFLRRRAEAGGVRRVEGRIASVERDGESGHVTAVVLDDGRCVAGDFFIDCSGFRSLLLGDALGVGYCDWSHWLPCDRAIAVPCERVDPLTPLTRSTAHGFGWQWRIPLQHRTGNGIVYASAFGSEDDTRETLLANLDAPATDAPRSLSFTAGVRERQWEGNVVSLGLSAGFIEPLESTSIHLIQTGIAKLMWLFPDRDMGPRGRDEYNRLMHEAYEYVRDFIVLHYKATERRDTAFWRHVGEMAIPDSLAGKLELWRERGRVRRFDHDLFGVPSWVAVLLGQRIEPQGHDPLVDSMDDGRVTSAMRHIAATYAEVAGELPGHADQIAAMIR

SEQ ID NO: 88135 - protein, 516 aa, Pseudoalteromonas sp.
  REGION 1..516: note = tr|A0A2N5LQS9|A0A2N5LQS9_9GAMM Tryptophan halogenase; OS = Pseudoalteromonas sp. MelDa3 OX=888435 GN=CXF89_15645; PE = 4 SV=1
MTKPITKIVVLGGGTAGWLSAGLLAAEHPHLNVTLVESANVPILGVGEGTWPSMRNTLQRIGIKESDFITQCDASFKQGSKFINWRNLSEGENYYHPFMNPQGYEHTNLHASWQRIAPNQKFADVVNMQSFVSQAALAPKQLQTPEYAAVTNYGYHLDAGKFAEFLKNHCVKNLNVTHIIDDVTEVINDDHGYIASLKTNNNGDITGDLFIDCSGSCARLIGEHFNSQFIAQDHILFNNSAVAAQIPNAHADQPVASATLSTAQSNGWIWDIALPTRRGTGYVFSSKYQSDESATNTLKSYIAKSTSEQQAEQLTYRVLKFSPGYRQQFWIKNCVAVGMSAGFLEPLEASALAMVELSISMISEQLPQNRTHMSQLKTRFNDRFSTRWQRVIEFLKLHYVLSERDDTPYWQDISNLNTAPERLQNLLKLWQFQPPSRFDFIENEEVFSSSSYQYVLYGMGFNTQTVSAQNTFNDPRAGDYYYQQNREKIAQCLNGLPSNRALLNHLLLNNGQPHND

SEQ ID NO: 88136 - protein, 508 aa, Pseudoalteromonas sp.
  REGION 1..508: note = tr|A0A2N5LXI9|A0A2N5LXI9_9GAMM Tryptophan halogenase; OS = Pseudoalteromonas sp. MelDa3 OX=888435 GN=CXF89_03465; PE = 4 SV=1
MNKAIKTVAVVGGGTAGWLSAAIIASYHQGQNGDGLKVMLVESSDIPTIGVGEGTWPTMKNTLQQIGLREVDVFKACNATFKQGGKFVNWTHGNNDFYYHPFTVPLGYGRIDLAPYLDNVEDFAQQTNFQHDICEASLAPRVIAQGEYQGNCNYAYHLDAGAFAEMLKQHCKSKLGVEHIIGTVDQVKLDDDGAINVLTLKDQTRTINADLFIDCTGFSSLLLGQALNVPFKKMDHVLFNDSALAMQVPYDENDTSLASHTIATAQNAGWIWDIGLTHRRGVGHVYSSKFLSDDEAEQNLRDYLGDAANGLTARKISFESGYREKFWHKNCVAIGMSAGFVEPLEATAIMLVEISARFVAEHMPADTQVMPIVAKRFNEQMDYRWQRIIDFLKLHYMLTKRPEPYWQAHVQPNTIPQTLQEDLLLWGSRGPLIQDFHGALELFPAASYQYVLYGMGFKPDFTKQAYLYSQHVQAKQIIERNSQLTQQMLQTLPPHRAFIEQWLAANPV

SEQ ID NO: 88137 - protein, 501 aa, Sphingomonas sp.
  REGION 1..501: note = tr|A0A518RJA9|A0A518RJA9_9SPHN Tryptophan 7-halogenase OS=Sphingomonas sp. XS-10 OX=2599297; GN = FPZ54_17065 PE=4 SV=1
MSGRLDIVIVGGGTAGWMCAAACAAKLDPRRYRVRLLESEEIGTVGVGEATLPQMKDFNDFLGLDEREFMAATQASFKLGIEFVNWGRQGDRYIHPFGTFGRPVGEADFFSYWARANIAGTAAPLFDYCFPIVMAKADRFMLPNGNPDDVRNAFSYAYHLDAFLYARFLRRWAEARGIERVEGRIVDVERDGEDGRIAAVTMASGARVAGDLFIDCSGFRSLLLGQTLDVGLEDWSHWLPCDSAVAVPSARSDAFTPYTRATRRSAGWQWRIPLQHRTGNGYVYASRHISDDAAAAALLANLDGEALADPRVLRFKAGKRHQGWSHNCIAMGLAGGFLEPLESTSIYLVQVAIMHMLTLLPAEPAIDPALPAEFNRVLDIEYDRIRDFLILHYVANAADAPLWEQVTSMKLPDTLRDRIDRFRHRGHVPAYRDGLFGPTSWQAVFVGQGIVPQAADRLADILPDAVLAERLDALSATIAYGVQSARDHAAFVSDYCPAPAP

SEQ ID NO: 88138 - protein, 494 aa, Sphingomonas sp.
  REGION 1..494: note = tr|A0A518RJB1|A0A518RJB1_9SPHN Tryptophan 7-halogenase OS=Sphingomonas sp. XS-10 OX=2599297; GN = FPZ54_17075 PE=4 SV=1
MSARTRPIRRIVILGGGSAGWMTAAALGRALGGQRHSITLVESEAIGTVGVGEATVPPIHEFNRYLRIDPAEFLRATSGTIKLGIQFDGWGGPANAYFHPFGYLGVEMGGIHFHHYWLRHLAQGGDPDHAPYNLETLAARAERFAPATRMGPVHHAVHFDATGYARFLRGHAETSGVVRVEGKVAEVRLDPEDGFIDSLLLDDGRVIEGDLFVDCSGFRGVLVEGALKTGYVDWRQWLPCDSAVAMPAAREGDPPPFTRSIAREAGWQWRIPLQHRDGNGYVYSSAHLEHDAAARLLTERLPGAPLAEPNRLRFAAGHRKLIWNRNCVAIGLAGGFLEPLESTSIHLIQTAIVRLLAMLPRDGFDPGVAARFNRDTIREVENIRDFVIAHYALAGRDDTPFWRDVAAAGIPDSLAERIDVFRATGNILFEPGDLFGPTNWYCVLAGQGVRPASWHPIADGLSPEELARRLATLRGRVAEQLAELPPHTEFLRAL

SEQ ID NO: 88139 - protein, 503 aa, Duganella sp.
  REGION 1..503: note = tr|A0A1E7WXF4|A0A1E7WXF4_9BURK Flavin-dependent tryptophan halogenase PrnA OS=Duganella sp. HH101; OX = 1781066 GN=prnA_1 PE=4 SV=1
MSLGLVKNIVIVGGGTAGWMTAAAMSALISNGCKIRLVESDEISTIGVGEATIPVIRGFNQLIGVDENEFLRQTQGTFKLGIEFVNWSKQGESYIHGFGVIGRDQLLAKFYQYWLKLYQAGKAPGVEHYSINTMAASMNKFMRAASDSGDSPLSDISHAFHFDAGLYAKYLRGLSEGRGVRRTEGRIVDTVLRADDGFVEAIVMESGERIEGDLFVDCSGFRGLLIEGALKTGYEDWSHWLPCDRAIAVPCESVSPLLPYTRATAHDAGWQWRIPLQHRIGNGHVYSSKFMEPEQAESILMNNLDGKPLAQPRHLKFTTGKRKRAWNKNVVAIGLAGGFMEPLESTSIHLVQTGITRLLMMFPHLGYDQADIDSFNEATDNEYAAIRDFLILHYKLNAREGKPFWDYCRNMEIPATLQRRMDLYRSNGRIVRASDELFTETSWLQVMHGQGLRAKGYHPLVDQRSEADIAAFLANVKDVVLRCAEHMPTHEEYIASCCAAPKM

SEQ ID NO: 88140 - protein, 510 aa, Massilia sp.
  REGION 1..510: note = tr|A0A098UII9|A0A098UII9_9BURK Tryptophan halogenase; OS = Massilia sp. JS1662 OX=1519190 GN=IA69_03455 PE=4 SV=1
MSKPIEHVVLVGGGSAGWLAAAVLAAEHPRLAVTLVESPGVPPIGVGEGTWPSMRETLQRIGVSEAAFFRECDAAFKQGSRFDRWVDGSDGDTYFHPFSLPQGYGEANLVAAWQRTHRDVPFADLVSYQPHLCVQGRAPKQPQTPEFAGVANYGYHLDAGKFGVFLQKHCVEKLRVRHVLAHVVDILSTDDGDIAALRTREAGLVEGDLFIDCTGMASLLLGGHYGVPLVSQRNVLFNDRALAVQVPYPADDTPIASQTTSTAQSHGWTWDIGLPTRRGVGYVYSSAHVDDDAAETTLRAYLASTGIAGDITPPRKIAFDPGYRARFWEKNVVAIGLSAGFIEPLEASALALVELSAAWLADDMPATRAQMDTISARFNEAFTYRWERIIDFLKLHYVLSKRTDTAYWLDHRAPRTQSPRLRELLALWRTRAPSRRDFPRIEEIFPSASWQYILYGMGFRPELTERASDLPARADQYFRESARLTARMLPQLPANREMLHHIRQFGMPPG

SEQ ID NO: 88141 - protein, 521 aa, Sphingopyxis macrogoltabida
  REGION 1..521: note = tr|A0A0N9U6D4|A0A0N9U6D4_SPHMC Tryptophan halogenase; OS = Sphingopyxis macrogoltabida OX=33050 GN=AN936_10615; PE = 4 SV=1
MSDLVERVVIVGGGTAGWLAAALIAGSRRAKAAPLSITLVEAPDVPIVGVGEGTWPTIRTTLATIGLDESEFLAACDGAFKQASRFDGWVDGSAGDSYLHPFTTPPALPTGELLAAWQVSASDQPFAAAMSAQAAVCNLHLAPRQRSMPDYQGATNYAYHFATEKFGALLARHAKQSPLITHILDHVTGVRHSDNGDIAALTTRSGREIAGDLFIDCSGFKGLLIGDALGVDWIDRSDHAFNDRAIASQVPVPPGSPIASQTIATAHEAGWIWDIGLPSRRGIGCVYSSRFMDAERAEAVLRDYIARELPGAVPETKAFGVPFKHISFRTGHRARFWERNCLSIGLAAGFIEPLEASAIVLIELSLRALTDNFPADRAAMDIHAGRFNKLFRYRWDRIVEFLKLHYVLSRRDEPYWRAHRDPAHIPPHLAELLELWRGQPPSAWDFPYVDEIFSAQSHQYILYGMGFPAPAGWPASDRALAALAEMRQRARTLAAGLPTNRLYLDTLADDRAAAEQKEAAE

SEQ ID NO: 88142 - protein, 513 aa, Massilia sp.
  REGION 1..513: note = tr|A0A4Y9SHR2|A0A4Y9SHR2_9BURK Tryptophan 7-halogenase OS=Massilia sp. MC02 OX=2561931; GN = E4L96_09210 PE=4 SV=1
MTAVRSVLIVGGGTAGWLTACFLAKRLGAHAADGVRITLVESPEVGPIGVGEGTFPSIKGTLAAIGIDEAHFIRECSATFKQGVSFRHWVREPGQPGADHYFHPFSHPSQRDGLPELLPYWLRGAAGEGVAFAQAVTLQKAIADASRGPKRLGDRDFVGPMNYAYHFDAGQFAQLLATHGKSLGVEHVLGHVERVDTDGQDMIAAVHTREHGVLKADLYVDCTGFRSRLIGEALGSPWRSLSDVLFVDRALAVQVPYAAADTPIPSYTISTAHEAGWTWDIGLQQRRGIGYVYSSRHTSDARAEEVLRRYVGSAMDGKEPRQLVLNVGYRDTQWVGNCVAVGLSSGFLEPLESSGIGLIETAAYLLGYLFPFGGEFAPAARLFNDLMRQRYERIVNFIKLHYCLTQRGSAFWRDNADPGSIPLPLQDQLAMWRSRPPTRLDFVTDLEMYPPSSWQYVLYGMEFATRLHPSAAPLDQWDDVRREFATLAQVARRAVADLPDHRRLVEHYLSRSS

SEQ ID NO: 88143 - protein, 517 aa, Sphingomonas sp.
  REGION 1..517: note = tr|A0A518RK26|A0A518RK26_9SPHN Tryptophan 7-halogenase OS=Sphingomonas sp. XS-10 OX=2599297; GN = FPZ54_18510 PE=4 SV=1
MTGVGETVQRIVIVGGGTAGWLSACLIAAQANRSAERPLSVTLIESPDIPTIGVGEGTWPTMRRTLRRIGIAESEFLTSCDAAFKQGSRFIGWANGSPGDAYYHPFGAPVDGSAREIVGAWRDAAGNQPFAAAVSPQPGVCALHLAPRQRAMPDYGGALNYAYHLDAAKLAALLARHGVERLGVRRVRGHVTGVDAREDGDIAAVRVREGGAVEGDLFIDCTGHGSMLIGGHFGVPFVDRSDVLFNDRALAVQVPVEPDSPIASQTDATAHEAGWIWDIGLPTRRGVGCVYSSAHIDDDGAAAALGAYLGRDPADLGARKLAFRSGHRERFWERNCLAIGLSAGFLEPLEASAIVLIELSLDALIGDFPVTRDTMDIHARRFNALFRYRWDRIVEFLKLHYVLSARTEPYWRAHRDPTTIPERLAELLALWRHQPPSASDFPAMDEIFPAASHQYVLYGMGYPPPPSGPIATDTQAAARAMAQTVQRGRTLTASLPTNRAYLDALRAAAPRSALETL

SEQ ID NO: 88144 - protein, 522 aa, Massilia sp.
  REGION 1..522: note = tr|A0A4Y9SFZ3|A0A4Y9SFZ3_9BURK Tryptophan 7-halogenase OS=Massilia sp. MC02 OX=2561931; GN = E4L96_10370 PE=4 SV=1
MVDRSDQTIRHIVIVGGGSAGWLTAGVLAADHRAAAPDGLRITLIESPDVPPIGVGEGTWPSMRDTLRRIGVSESAFFRSCDAAFKQGSLFRGWRDGSAQDYYFHPFSLPQGFGDAPLAERWLQRFTDTPFADLASHQPHLCAQGRAPKQMATPEFASVANYGYHLDAGKFGLFLRQHCVERLGVRWVPDHVVGIEAHDNGDVRAVRTREHGAIEADLFVDCTGMQSLLLGKHYEVPFVSQKQVLFNDSALAVQVPYAHEDAPIASQTTSTAQGSGWIWDIGLPARRGIGHVYSSAHTTDDKAEHELRAYVHASGGPAPDDQPRPRKLTFQPGYRERFWHRNVVAIGLSSGFIEPLEASALAMVELSAAMLSDNMPATRADMDIVARRFNDAFRYRWERVIDFLKLHYVLSDRTDSAYWQDNRAEASVPERVRELLALWRHRPPSRLDFHRLDEVFPAASYQYVLYGMGFRTAPTTHAAWRDAETADEHFRQAAALTTRMLGALPGNRDLINHICRHGLTRI

SEQ ID NO: 88145 - protein, 505 aa, Massilia sp.
  REGION 1..505: note = tr|A0A4Y9SHY4|A0A4Y9SHY4_9BURK Tryptophan 7-halogenase OS=Massilia sp. MC02 OX=2561931; GN = E4L96_06035 PE=4 SV=1
MDSQRISSITVIGGGSAGWMAAAAIATYLGRSCTVRLVESEEIGIVGVGEASVPHIRLFNGQWLGIDEAEFVKRTQATVKLGIQFNDWSRIGDSYIHGFGAIGRSLGPLPFHQFWLKLFLSGRAGPIGAYSPQTVMAPLGKFAPRDRNAAPGTPLADIAYAYHFDATLYARYLRELGEQRGVQRIEGKIVSVQQRADDGFIESVTLESGQVIGGELFIDCSGFRGLLIEQTLKTGYHDWSHWLPCDRAMAVPSARVDPITPYTQSSARPAGWQWRIPLQHRVGNGYVYSSQHISDDEAAATLLSHLDGEALAEPRALRFTTGVRRKCWNKNVVALGLASGFLEPLESTSIYLAQSGVTRLLSLFPGRDFNPLLVDRFNRESEFEYERIRDFLILHYHATERDDTPFWDYCRTMSIPDSLRETMDLFRADGRYFRNGEDFFALPSWVQVMLGQRIVPRGYHPIVDEMPEERLVEHVEGMRRSLADAVATMPSHQEWIDRYWKAPAP

SEQ ID NO: 88146 - protein, 506 aa, Massilia sp.
  REGION 1..506: note = tr|A0A4Y9S6S9|A0A4Y9S6S9_9BURK Tryptophan 7-halogenase OS=Massilia sp. MC02 OX=2561931; GN = E4L96_17685 PE=4 SV=1
MSPSALPKRILIVGGGSAGWMTALMYGDALIKKGVEITVVESPNVGTIGVGEGSTALLKRYFDELGIVESEWMPECHATYKAGISFPNWSTRPGYESYMHPFWSMLDHVTLPAYIQNVHARQRGVDIDANPDRYFIASKLARQGLAPLPPESFPFHPGYGYHFDAGLLGKYLQKKAMACGVRHKSCHVTEANLDVAGRVASISTMEGETLEADFFIDCSGFSALLIEKALKTPFVSYADVLFNDSAVALPTPIGETIPTVTVSAALSHGWGWKIPLTDRFGNGYVYSSSFISSDAAERELREHAGVGDADVQARHLKMKLGRVAQHWNRNVLAVGLSQGFLEPLEATALYLTQTTAGLFLVYLEKGELGEQAQAAYNREVNGYFDGHRDYIVAHYKTNTRTDTDYWRANAMGLDKISDSLKRIFQTWIEGKDLGAEIRHQGIEHYYPVGSWYALLAGMGTFPQLGADARQPAESLAQIDDFTRRCVLNFRDHRTVLNEQVRMREAA

SEQ ID NO: 88147 - protein, 500 aa, Alteromonas sp.
  REGION 1..500: note = tr|A0A136I1F2|A0A136I1F2_9ALTE Tryptophan halogenase; OS = Alteromonas sp. Nap_26 OX=1795869 GN=AXW14_08755 PE=4; SV = 1
MTQPLRIVIAGGGTAGWMAANLFANSWKNSPVEISLIESEDIGTIGVGEGSTPTLKRFFQTLSIAEHEWMPQCQATYKVNIKFNGWNGDVHASYSHPFISQLDVFSERAFHINALTRRLGLNVETRPEKFLMAGYLAKKQLAPIPSHNFPFAIEYGYHFDSMKLGQFLRNFGKKLGVKHIIGNIESVETHANDEISALTCTDGGRIEGDLFVDCTGFNSLLLQKTLGVKFNAFSKNLFNDAAVVLPTATLQSMPVETESTAMSNGWCWQIPLRNRTGNGYVYSQQYQSKEDAERELRQRLHLLDCDIEAKHLKMRVGQCEKHWYKNCLALGLAQGFIEPLEATALHLVQVSIEMFIDTFTKGQFSAQYQDTYNKDISERFERIRDYIVCHYKLNGRRDSQYWVDNRDNMHLSESLLSLLDVWYRKGDIVEEIKRQGIGKHFSTTSWHCLLAGYGVFPPIALQQPDSLKEKGDLFEENKLASFFSRCSLNFEKQKLLFQIA

SEQ ID NO: 88148 - protein, 527 aa, Streptomyces sp.
  REGION 1..527: note = tr|A0A285QCR5|A0A285QCR5_9ACTN Tryptophan halogenase; OS = Streptomyces sp. 1331.2 OX=1938835 GN=SAMN06272789_0585; PE = 4 SV=1
MANSVVIVGGGTSGWMTATYLKVAFGDRVDVTLVESKNVPAIGVGEATFSTIRHFFNYLGLDEREWMPECHATYKLAVRFEDWREPGHVFYHPFERNRVVDGFALTDWWVQKQPTGRFDRDSFLIANMCDTERSPRYYDGSLFDSTFERGEEYRTTLTEQNTQFPYAYHFDATLLSKFLTRFGTERGVKHVLDDVVDVALNDRGEIDHVRTREQGDLHGDLFVDCTGFRSLLVAQALKEPFISFQNHLPNDSAVALRVPVDMAEYGLRPATTATAKDAGWIWTIPLFERLGTGYVYASEYSTPEEAERTLREFVGPAAENATANHIKMRIGRSERAWVKNCVAIGLSNGFVEPLESTGIFIIQNGIEQLVKNFPVGNEDTDQHLRNAYNRQAANIMDGLREFMVLHWYASKRTDNQYWKDTKTREIPDGLAERLEQWKVKLPDQESIYPHYHGFESYSYRAIILGLGGLPVQPLPVLSKLDSTAADREFQLVAEQTAALHEKLPSQYEYFAHLHGLPPAQRKAGSAR

SEQ ID NO: 88149 - protein, 522 aa, Alteromonas marina
  REGION 1..522: note = tr|A0A0B3Y5E7|A0A0B3Y5E7_9ALTE Tryptophan halogenase; OS = Alteromonas marina OX=203795 GN=RJ41_13235 PE=4 SV=1
MTTATPITHIVVVGGGSAGWLTAGRIAAQHQCAIRKDIKVTLVESPNVPIIGVGEGTWPTMRSTLIALGISETTFIKECDATFKQGAKFAKWTTGEEHDFYYHPLMLPQGFSQTNLGPYWQSVAPELNESFSHAVCVQEAICEAGCAPKSIRHAEFAGTANYAYHLDAGKFTAFLTKHCTEKLGVHHVLADVNRVESSDNGDIKALHTEQGVIVEGDLFVDCTGFKSMLLGEHYKVPFIPCDDVLFIDRALAVHVPYDTPQSPIASHTISTAQDAGWIWDIGLQSRRGVGHVYSSRHQSKDEAYARLDSYVRQTSTLNGIDGINVKDITIQSGHRQHFWQNNCVAVGLAAGFLEPLEASALVLVELSASMIAEQLPANRAVMDIVAKRFNDTFSYRWQRIIDFLKLHYMLSKREDSAFWRDNRDSHSIPDSLKELLALWQYHPPSDKDFTSNNEVFPAASYQYVLYGMGFTSDLATHQQWVNADFAKQQLMQNRKARAMAVEKLPKHRELINKIHQFGLQAV

SEQ ID NO: 88150 - protein, 380 aa, unidentified
  source 1..380: note = Gammaproteobacteria bacterium
  REGION 1..380: note = tr|A0A424NGW3|A0A424NGW3_9GAMM Tryptophan 7-halogenase (Fragment) OS=Gammaproteobacteria bacterium TMED182 OX=1986741 GN=CBD42_004380 PE=4 SV=1
LKGQQLQISKAYGDYSPELVAAKAGKFGFPKPQALNYAYHIDAARYAKYLRTLAQQNGVHRVEGKVEAVKQTLSGDIESVQLASGQSISGDLFIDCSGFTGLLIDKTLHSPFEDWSQWLPCDRAVAVQTSSTEPPIPYTRSIAQDFGWQWRIPLQSRTGNGFVFSSQHASDDEATHTLLSNVSGDVLIEPRVIPFQTGQRSAQWKNNCIALGLAAGFLEPLESTSIHLIQRGIIRLMQMFPYGGVTQADQDEFNAQMNQEYHFIRDFIIMHYHLTERTDTEFWKHCQTMRIPESLKHRLDLFKETGRVFQAEGDVFGENSWTQVMLGQGLKPRSYHPIVDMMDEEELAQFLAHQENKVTHLVGQLHNHEDFLARYCPMKP

SEQ ID NO: 88151 - protein, 505 aa, Sphingomonas sp.
  REGION 1..505: note = tr|A0A518RC44|A0A518RC44_9SPHN Tryptophan 7-halogenase OS=Sphingomonas sp. XS-10 OX=2599297; GN = FPZ54_02590 PE=4 SV=1
MSSQAPRDDRPRTRVVIVGGGTAGWMAAAALIRRLPHACSVRLVESEDIGIVGVGEATLPHLRAFVSMLGIDEAEFMRVTQATYKLGIEFRDFGRIGDSYLHPFGTFGMPLNGVPFHHLWLRMQAEGRHDTLFDYSVCNRMAAQGRFAPPTHEAGSLRSTYGYAYQFDATLFAPYLRDYAVARGVERTEGRVVDVTLDPLSGDVAALTLASGERVEGDLFIDCSGFRALLIGEAIGSPWEDWSHWLPCDRAVAAPCASPEGPIEPFTRAIAMAAGWRWRIPLRHRVGNGYVFSAAHLDEEAATAALIEAFENPPLADPRVLRFRAGRRARSWDRNVVSVGLASGFLEPLESTSIYLAQGAVEQLIALFPIDGRIADADRDEFNRTVDLEYDRIRDFLILHYHATTRDDSPFWNDMRTMRIPDSLAEKMELFRQSGRVVRYSQGLFFEPSWLAVYLGQGIVPRHWDQRADAFDPAHLGPALDKLRAQIAATVGAMPSHDAALGIGA

SEQ ID NO: 88152 - protein, 492 aa, Streptomyces globisporus
  REGION 1..492: note = tr|A0A0U2TBQ3|A0A0U2TBQ3_STRGL Tryptophan halogenase; OS = Streptomyces globisporus C-1027 OX=1172567 GN=WQO_33760; PE = 4 SV=1
MSAQYDVIVVGGGPAGSTVSTLVRKRGHRVLQLEKETFPRYQIGESLLPSTVHGIAHLLGVSDELKKAAFTIKHGGTFKWGANPEPWTFDFAVSRRMPGATGYAYQVERMKFDQILLDNARRHGVEVRENSDVLDVLKAEDGRVRGVRYRDSEGREHEVGSRFVVDASGNTGGLYKKSGAKREYSPFFRNLALFGYFNGGKRLPKPNSGNIFTCTFEHGWFWYIPLSPELTSVGAVVNRDSASLVQGDPEKAMESFIAACPLIAEKLSEATRVTEGPYGELRVRKDWSYSNTKFWAPGMALVGDAACFVDPVFSSGVHLATYSGLLAARSLNSCLDGSVDETSAFEEFEARYRLEYGRFYEFLVGFYDMHHSEDSYFWQARKISNTADSDLQSFVELIGGVSSDEFADTARARQRFSEASDEMAGMTHTAAGDADGPHGAVPGKVVGRLMEQSAALQARALLGDEAGAERPVRQGGLAASTDGLGWVPGARS

SEQ ID NO: 88153 - protein, 508 aa, Duganella sp.
  REGION 1..508: note = tr|A0A1E7WN01|A0A1E7WN01_9BURK Flavin-dependent tryptophan halogenase RebH OS=Duganella sp. HH101; OX = 1781066 GN=rebH_3 PE=4 SV=1
MNPGTRDPNNRRPVRRVVIAGGGTAGWMAAAGIAKVLGKRLDIKLIESDEIGTVGVGEATIPTLMNFHHLLEINEQEFMAETQATFKLGISFESWRNVRQDYIHSFGVTGTDHWTAGFQHFWHKGVERGLAGDYGDYCLELKASLENRFAHLPDNGMNYAYHLDASRYAKYLRRLSEPRGVQRIEGKIVRYTTHEDNGDVRSVVLESGQEIEGDLFIDCTGFRGLLIGDAMQEPMEDWSQWLFCDRAIAVQTESVGDAVPLTRSMAHQAGWQWRIPLQHRVGNGIVFSSRHLDEDAAMRQLMGNVEGKALIAPRVIKFKPCQRKHTWKGNVVAIGLSSGFLEPIESTSIHLIQRSVVRLMQTFPTDGISQADIDEYNNQCNSEIEHIRDFVILHYHVNNRTDSPFWVEAREMSIPASLQHRIALFRETGRVFRVPNELFAENSWIQVMLGQGIMPRSHHQSADLMGDEELRHFLGGIKSRVDRIVVQLPSHQAYVERYCGRAESAKAA

SEQ ID NO: 88154 - protein, 499 aa, Sphingopyxis macrogoltabida
  REGION 1..499: note = tr|A0A0N9UBX3|A0A0N9UBX3_SPHMC Tryptophan halogenase; OS = Sphingopyxis macrogoltabida OX=33050 GN=AN936_10600; PE = 4 SV=1
MNEDKPVRRIVIAGGGTAGWMMAAAIARTMGPTVDLTLVESEAIGTIGVGESTIPPLVNFNRILGIPEPEFMRAAQATFKLGILFDNWKHDGHSYFHSFGLSGKDHWSAGFQHFWLHGKARGHEQSYDDYCVELVAGLQGKFAHLPEERMNYAYHVDATLYGRFLRKLAEADGARRVEGKIARVELDSESGDIAALLLDGDRRIEGDMFVDCTGFRGLLIDGALHAGFEDWGHWLPNDSAIAVQSDHLGPPMPYTQAIAHDAGWQWRIPLQHRMGAGIVYSSGYLSRDAAYERLMSSVGTPRIEPFDIKFRGGVRRKQWFRNCVAVGLAGGFVEPLEATTVHLIQRAVLRFIRMMPNGRVSERDAAEFNDQQRLDIEQIRDFVILHYKATNRRDSPFWRHVANMPIPASLEQKIELFRETGRVFRKNEELFAENSWVQVMMGQGIEPQSYHPIAEKLRDDELDRLLRMLRENVTNTVATLPEHHAYVARYCGAEAPATE

SEQ ID NO: 88155 - protein, 513 aa, Pseudoalteromonas marina
  REGION 1..513: note = tr|U1L1D2|U1L1D2_9GAMM Tryptophan halogenase; OS = Pseudoalteromonas marina DSM 17587 OX=1117316; GN = PMAN_07157 PE=4 SV=1
MSGVINRIIVLGGGTAGWITAGILAKKHASNLSNQGIKVTLIESPEISVVGVGEGTWPTMRKTLSQLGISETQFMRECGATFKQASKFVNWVNAKDDVYYHPFTEPQGFNKVDPAPYWQSVVEPTCSFSEAVSFQQYLCEQGLAPKTIANKEYEVIANYGYHLDAAKFIALLRKHCISELGVEHISDTVDRIEQAPCGDISCLQTKEHGAQLADLFVDCSGMRSLLLGETLKVPFIPCNDVFLADTAIATQVPYINENDPIACHTISTAQEAGWIWDIGLQERRGVGYVYSSKHCSEEQARKTLANYIGLEEVKTAKKINFKPGHRKIFWKNNCVAVGLAAGFLEPLEASALMLIEASANYIADQLPPNKELMPITAKRFNAIMLKKWRGVIDFLKLHYALSERTEPFWLEHRDTQSIPNSLQELLSIWRYSSPSEYDFTDNVEAFSAASYQYILYGVGFKSDFSQMKHIYNQGELAKKQLQMTKIRIDQLKYNLPTHRDLINKVNSLGFAKL

SEQ ID NO: 88156 - protein, 512 aa, Altererythrobacter dongtanensis
  REGION 1..512: note = tr|A0A1B2AGR8|A0A1B2AGR8_9SPHN Flavin-dependent tryptophan halogenase RebH OS=Altererythrobacter dongtanensis OX=692370 GN=rebH PE=4 SV=1
MIDGLTRDILIVGGGTSGWLCAAYMANTLGTVRQGGPRIRLMEASDIPTIGVGESTIPPIRSVIAGTGIDEVDFLRETNATFKMAIRFDGWRKPVAGCEHGFFHAFGPHGRIGSEPLAPYWLVSGAYKRTSFVDYSMNNGPAIAAGKAPKRMSDQPFKGPLDYAYHFDAGLLAELLKKRATSLDVEHIVATIDKAEVSGEEITAVVTADGRRLTADLFVDCTGFSARLIEQALGEPFVSASDTLFCDRAVACQVPYRDPECPIPPFTRSSARPNGWIWDVPLMHRRGTGFVYSSAHISDEDARDHLISYLGDDGAGAEPRLLRFRVGHRDRPWRGNCVAIGLSAGFIEPLESTGIYFSDIAIRWLTDFCLDRRQFPTAAKAFNERMQACYADVLDFIKLHYVLSDRDDTAFWVDNRAAETVPASLREKLEMWAYRMPSEYEFGQLPAVFGYSNYVQLLLSLGHHPELVMLKARYREVDRAARIANAIEQVAASGLAALPGHRDLLSRLARGA

SEQ ID NO: 88157 - protein, 505 aa, Massilia sp.
  REGION 1..505: note = tr|A0A098UJK9|A0A098UJK9_9BURK Tryptophan halogenase; OS = Massilia sp. JS1662 OX=1519190 GN=IA69_02915 PE=4 SV=1
MQQNNPENIGRKPVRRVVIAGGGTAGWMAAAVISRILGKTLDITLVESDEIGTVGVGEATIPSLIQFHQLLELNEADVMRATQATFKLGISFENWRAPGEDYIHSFGLTGVDHWTAGFQHFWHKGRQRGLASDFGDYCLELRSAQLGRFAHLPNDVMNYAYHLDATLYARFLRKYSEGFGAKRVEGKIDQVMLDAASGYVTGLKLGNGALIEGDLFIDCTGFRSLLLGQTMGVEYDDWSQWLFNDTAIAVQTELMGEPVPMTRAIARGAGWQWRIPLQHRVGNGHVFSSKYMDGEEAMQILLDNLQGEPLTQPRMIKFKPGQRKQSWKGNVVAIGLSSGFLEPIESTSIHLIQRNLIRLMQMFPADGICRSDIDEFNTQVQREIAHIRDFIILHYKVTSRADTPYWEAARNMEVPASLQHRIDLFRETGRVFRTEGELFTESSWLQVMLGQGMMPEQHHQSADLMGDAELSQFLGSIRQKIERTVQQLPSHQAYVQRFCRAERPS

SEQ ID NO: 88158 - protein, 502 aa, Massilia sp.
  REGION 1..502: note = tr|A0A4Y9SC04|A0A4Y9SC04_9BURK Tryptophan 7-halogenase OS=Massilia sp. MC02 OX=2561931; GN = E4L96_13835 PE=4 SV=1
MQQAIKDIVIVGGGTAGWMSAAALATILNGRYNIRVVESDDIGIVGVGEATIPMIQRFNTVVGIDENEFMRETMGTFKLGVEFVNWGRQGDRYMHGFGRLGQDLATVPFDQYWQKMRQLGKAAPLEQYSITRMAAKANKFMPPNFEVRNSPLGDIVYAYHFDASLYARYLRKLCEQRGVVRTEGKIVQVQQREGDGYVEAVVLENGTRIAGDLFIDCSGFRGLLIEQTLKTGFEDWSHWLPSDRALAVPCESVTPLTPYTRATSHKAGWQWRIPLQHRIGNGHVFCSKYISEDEAASVLLANLDGKPLADPRLIKFTTGRRKQAWNRNVVAVGLASGFLEPIESTSIHLIQSAIQRLIDFFPDRGFNEVDIAEYNRQSQFEYERIRDFIILHYHLNQRTDSEFWKACAAMEIPETLKHKLDLYRAHGRVVRIDNELFSEVGWIQVLEGQNAPIEGYHPLVDVQSEGDIHEYLESVRDVIGKCVEVIPDHAAYVAKHCMAPKR

SEQ ID NO: 88159 - protein, 415 aa, Pseudomonas fluorescens
  REGION 1..415: note = tr|I4L136|I4L136_PSEFL Putative tryptophan halogenase OS=Pseudomonas fluorescens Q8r1-96 OX=1038923; GN = PflQ8_0465 PE=4 SV=1
MPTVEMERRQVVIIGAGPSGAIAAALLKRKGHDVLVIERQHFPRFSIGESLLSHCLDFVEEAGMLDAVNAAGFQRKNGAAFAWGERYSAFDFGDTFSNGKPTTFQVQRADFDKLLADQAALQGVEIRYGQAITSADFSLAKPRLGVQREDGSEYCVEADFVLDASGYGRVLPRLLDLEAPSNFPVRQAVFTHIEDRIDAPAFDREKILITTHPSKRDVWFWTIPFSGGRCSVGVVAAAEHFAGRTDDLDACLRSFIDETPSLAGVLQNAVWDTPARTIGGYSANVKTLHGQGFALLGNAAEFLDPVFSSGVTIAMRSASMAAAVLHRQLQGESVDWQSEFAEPLKRGVDTFRCYVEGWYAGTFQDVIFYTEGSDDIRRMISSILAGYAWDQRNPFVSEPKRRLRMLSEICASPAP

SEQ ID NO: 88160 - protein, 507 aa, Massilia sp.
  REGION 1..507: note = tr|A0A098U4S3|A0A098U4S3_9BURK Tryptophan halogenase; OS = Massilia sp. JS1662 OX=1519190 GN=IA69_22530 PE=4 SV=1
MQQNPIRKIVIVGGGTAGWMTAAPLALRLGQRCEIVLVESPDIGTIGVGEATLPTIRFYNAALQLDHADFIRKTQASFKLGIEFKDWGHLGNRFFHGFGDFGPPINGIQPHHYWLRLARTFDHMPAMENWSMASVMARENKFTMPNDAQPGATDAFSFGYHFDAGLYAAFLRDYAMARGAKRVEGTITTIDQHPETGFVTAVRLADGRTLDGDLFIDCSGFRGLLIEGALKAGYDDWSEHLPCNSALAVPCARVEPLTPYTRSTAKGAGWLWRIPLQHRTGNGHVYSNAFTTDDKARQDLLDGLDGAALDEPRQLRFVTGKRKKSWVKNVVAIGLSAGFVEPLESTSISLIETAVGTLIEQFPDRDFRPELADEFNRIIGSRYESIRDFIVMHYKLTKRDDTEFWRYCANMAIPDSLAHQIELFRETGRVAILDRDSFLLPSFVSMLVGLGVEPKRYDPFADDVDMRQLHGHFAGLRDLIAQTVAKMPGHGAYLEKNAKAPPVGKAA

SEQ ID NO: 88161 - protein, 517 aa, Thalassomonas actiniarum
  REGION 1..517: note = tr|A0A0D8CT05|A0A0D8CT05_9GAMM Tryptophan halogenase; OS = Thalassomonas actiniarum OX=485447 GN=SG35_24550 PE=4; SV = 1
MVENKTDDIRDLVIVGGGTAGWLMASRLAAKYQTSPDCPVKITLVESPSVKPVGVGEGTWPGMRSTLKAIGLSESDFMRECDASFKQGSKFNGWRSGNMDDSYYHPFTLPLGYDDLDMMHFVQHSPRQGSFAKAVCPQVEICQQGLAPKQITTPEYAGVVNYGYHLNAGKFAALLKRHCLEKFNVSHVLDEVVKVNGAANGDIASVSTENHGDICGDFFIDCTGFACLLLGGFYQVPFIGQRHILFADTALAVQIPYPAADSPIACVTQSTATAAGWIWDIGLTNRRGIGHVYSSDYCSEVQAEQELAAYLGHDFKGVEIKKIPIKPGYRSHAWEKNCLAVGLSAGFLEPLEASAIVQVELAADWLCLQLPANRSGMDVIAKRYNQEFSYRWQRIIDFLKLHYVLSQRRDTDFWLDNRHRDSIPDSLQELLSLWSCHYPTKNEFPRHHEIFSLYSYQYILAGMDYRSEAAYALTALEEDVARQHIMKGEQLKAQYLQHLPGHRELLEKIARYGFKGV

SEQ ID NO: 88162 - protein, 500 aa, Alteromonas marina
  REGION 1..500: note = tr|A0A0B3YHR4|A0A0B3YHR4_9ALTE Tryptophan halogenase; OS = Alteromonas marina OX=203795 GN=RJ41_06220 PE=4 SV=1
MTTPHRIVIAGGGTAGWMAANLLAHRWANQAVTITLIESEDIGTIGVGEGSTPTLKRFFQTLNIPEYDWMEECQATYKVNIKFTGWSGNNSHSYSHPFISQLDIFSERAFHVNALTRRLGLDVETQPDKFLLAGYLAKKKLAPLPSHNFPFDIEYGYHFDSLKLGRFLRERAKSKGVSHVIGNIESVHTTSSGDISHLVCQDGQKFAGDLFIDCTGFSGLLLQKTLGVPFRDFSDNLFNDSAVVLPTPACANLPVETESVAMSNGWRWQIPLRNRTGNGYVYSKQYQEKDAAECELRRALGMENTNVEAKHLSMRVGQCERHWEKNCLALGLSQGFIEPLEATALHLVQTSIELFADNYSFGATSAQQRQIFNQEVSERFERVRDYIVCHYKLNGRNDSDYWRDNRANMKLSESLLSLLDVWYRKGDIVEEIKRQGIGQHFSTTSWHCLLSGYGIYPPPALNQPASLKESGDLFEEKKLAAFFNRCSLNFDKQSTLFRAG

SEQ ID NO: 88163 - protein, 506 aa, Massilia sp.
  REGION 1..506: note = tr|A0A098UC18|A0A098UC18_9BURK Tryptophan halogenase; OS = Massilia sp. JS1662 OX=1519190 GN=IA69_08420 PE=4 SV=1
MVKNRWIHKVVILGGGTAGWMTAAALSHTFGHAVEIVLVESDAIGTVGVGEATIPPIRAFHQMIGVDEAEFMRATGATFKLGIEFRGWRNESSTYFHPFGVYGVERDIGYFFQYWLRLKEKGQVADFSEFSLCTLAARSNLFAPASERPGDPLQHLQSAYHFDAGRYAKYLKGVCIARGVSHKIGDMLTAEHDSENGHITGLKLKSGELVTGDLFIDCSGMRAMLLGQALGVDYEDWSHWLPMNRACAVPCEQKLALTPYTISTARPFGWQWRIPLQHRVGNGVVYSNEFATDEAAERCLLDGLEGEPLAPINRIRFTAGRRKTPWHKNVVAIGLASGFLEPLESTSIQFIQSSIQRLIRYFPEAGFAPVCAQAFNREATREIENVRDFLILHYHATERDDSELWRYVKTMQIPDSLQERIELFRERGQLNLANEELFQSTSWHAVLLGQGIRPRTYMPTMALQDDAMLANAYSNLERNFKKIVSRLPDHAAYIKEHKLTSTMENR

SEQ ID NO: 88164 - protein, 517 aa, Thalassomonas actiniarum
  REGION 1..517: note = tr|A0A0D8D2B9|A0A0D8D2B9_9GAMM Tryptophan halogenase; OS = Thalassomonas actiniarum OX=485447 GN=SG35_08535 PE=4; SV = 1
MDKPTKTVVIVGGGNAGWLTAGRLAAKHKSNKAQGLEVILVESPSIPAIGVGEGTWPTMRATLMALGISESDFIRECDASFKQGAKFAKWVDGSEDDFYYHPLVLPQGFGKGDLAGHWLAQQAGEKRESFSQAVCFQEAICENSLAPKTIRTPEFADIANYAYHLDSGKFSRFLQKHCIEKLGVKHIVDDVTGVDSATNGDIAAVKTQNNGEITGDLFVDCSGFSSLLLGKHYQVPFKSCSDVLFIDTALAVQVPYEHEQEEIASHTISTAQEAGWIWDLGLQHRRGVGYVYSSKHSSEAQARAVLKQYVGDKFDELTVRKIPIVSGHRETFWKNNCVAVGLSAGFLEPLEASALVLVELSAQMISEQLPQTRAVMDIVAQRFNETFHYRWQKIIDFLKLHYILSKRSDNAFWCDNRDPSTIPESLQQVLALWKYRAPADHDFTSNNEVFPAASYQYILYGMGFESDYSLSLYALDDIDFAQSQFAQNKKKIAQVMANLPGNRELLNKIKRFGLGRI

SEQ ID NO: 88165 - protein, 495 aa, Pseudoalteromonas marina
  REGION 1..495: note = tr|U1JYU0|U1JYU0_9GAMM Tryptophan halogenase; OS = Pseudoalteromonas marina DSM 17587 OX=1117316; GN = PMAN_14159 PE=4 SV=1
MTKTNAVKNVVIAGGGTAGWMAAAALAKLIGENIHVTLVESDDIGTVGVGEATIPPIRTFHKLLGINEQAFMKATQASFKLGISFENWGDENTRYIHSFGATGKECWAGEFHHFWLQGKTLGINNPFGDYCYELQAAKAGKFAFNQQNPINYAYHMDATRYAQFLREFSEPLGVKRVEGKIQKVVKNAKTGHIESLLLNSGEQINGDFFIDCTGFRGLLIEQALHTGYEDWSHLLPCNSAIAVQTKSTSDTVLPLTRSIAHKSGWQWRIPLQSRVGNGLVYCSQYMDDEQAKALLLNNIEGEALTEPRVIKFKTGRRLKGWNKNCLALGLASGFVEPLESTSIHLIMSGIIRFMRLFPFNGITNHAIDEYNKQLKSEIENIRDFIVLHYKVTNRDDSEFWLHCSAMEVPKTLKHKIDLFKQTGRVFLDDGDIFRVDSWVQVMLGQGIVPEQHHLIASMMSDEELARFLHGIKQQIEQRVSQLPPHHEFLKHYCPA

SEQ ID NO: 88166 - protein, 483 aa, Nocardia sp.
  REGION 1..483: note = tr|A0A4P7HCQ2|A0A4P7HCQ2_9NOCA Tryptophan halogenase; OS = Nocardia sp. CS682 OX=1047172 GN=DMB37_37155 PE=4 SV=1
MTTTDWDVIVVGGGPAGSTASTVIALDGHRVLLLERDRLPRYQIGESLLPSTIHGILPLLGVHEEVEAAGFVRKNGGTFRWGASSEPWTFAFAASPDMIELGAYGYQVERMKFDGILLLNAQRKGVDVRQNHGVNGVLEDDGRVSGVTFTDDSGQRRTATAKFVIDASGNGSRIHRAVGGDREYSPFFRNLAVFSYFEGGERLPEPNSGNILSAAFDDGWFWYIPLSDKLTSVGAVVGADKAGPIQADPDAALRSYIAQCPLVDRYLRDAVRSTTAPYDTVRVRKDYSYDRPVLWRPGMAVVGDAAMFIDPVFSSGVHLSTYGALLAARAINTHLAGSADEATCFGEFEDRYRREFAIFRDFLVAFYKMNLTEESYYWEAKRAAHHDGSVLQAFLDVVGGMMARDIIPPGGLPPEARTMPIPPAMIGGFAKGMEMGIRDMRGAVDPGAPTPAGASKFVPSADGRRWQVRADQVEPEARHAVGR

SEQ ID NO: 88167 - protein, 503 aa, Brevundimonas sp.
  REGION 1..503: note = tr|A0A1H1CJS5|A0A1H1CJS5_9CAUL Tryptophan halogenase; OS = Brevundimonas sp. 374 OX=1150400 GN=SAMN02787020_1519; PE = 4 SV=1
MIPAPLKRILIVGGGTAGWMAAAALAHVTRGTVKVELVESEVIGTVGVGEATIPPILLFNQLLGIDENEFVRATQATYKLGIQFNDWFQKGRSYFHPFGTYGTRIDAASFHQYWLRLNKAGLDDDLDAYSVTTMAARMSRFTRPDADPRGAGSQMTYAFHFDAGLYARFLRRRAESQGVVRHEGKIADVRLRDGDGFIQSVRLDDGRELEADFFIDCSGFRGLLIEGALKTGYEDWTHWLPADRAVAMPCTRVGDPTPYTQSTALEAGWRWRIPLQHRTGNGYVYCSPFISDDEAQARLRASLDGEAMAEPNFLRFTTGRRKKTWNKNCLALGLASGFLEPLESTSIHLVQSGISKLLLHFPDTGFAQADIDNYNRMMRLETERIRDFIILHYHATARDDSPLWRHVRAMPIPETLKQKMDQFRSRGRIFRYEDELFQETSWIAVLLGQGVIPERHDPITETIPLEQVQQWLQKMKAMIQQGVARMPTHDAFITANCKAPPLR

SEQ ID NO: 88168 - protein, 487 aa, Altererythrobacter dongtanensis
  REGION 1..487: note = tr|A0A1B2AH03|A0A1B2AH03_9SPHN Flavin-dependent tryptophan halogenase PrnA OS=Altererythrobacter dongtanensis OX=692370 GN=prnA PE=4 SV=1
MAAAALSRLREGNALDITLIESEEIGTVGVGEATIPPFVEFNQLLEIDEREMMAATQASFKLGIQFVNWGKQGDSYIHPFGNYGLPINGVGFHQHWRRARVEGDRRPIQAFNLETMAAYFGKFARTPDYNRSGDYPPVNYAYHIDATRYARFLRGYAEKRGVVRSEGKVVDVTLDGESGFVTSVTKADGSVIEGDLFIDCSGFRGLLIEQALETGYEDWRHLLPCDRAVALPCQREDGSPPPPFTRATAHSAGWQWCVPLQHRNGNGHVYCSQFMSDDEAHDILVNNLAGKPQADPNFLRFVTGRRKKFWNRNVVALGLAAGFMEPLESTSIHLINTGVNKLIALLSLQGITQAQEDAFNRFTTKEYVRIRDFLVLHYNATARDDSEFWNYVRTMDVPDSLTEKVALFRLNGQIFREEDELFTETSWAAVMMGQGIAMEGHNPMADRISSPDLKTELDGIERSVRHVVDRMPGHHDYLKRYCPAPAA

SEQ ID NO: 88169 - protein, 506 aa, unidentified
  source 1..506: note = Xanthomonas prunicola
  REGION 1..506: note = tr|A0A2N3RDV9|A0A2N3RDV9_9XANT Tryptophan halogenase; OS = Xanthomonas prunicola OX=2053930 GN=XpruCFBP8353_22170; PE = 4 SV=1
MIPAPLRNIVIVGGGTAGWMAAAAFARVLGPTFKVQLIESEQLGTIGVGEATVPHIKAFNNLLGIDEAEFVRQTHGSFKLGIEFVDWQRPGSAYMHGFGTQIGHPLGLLPFHQYWLKQHARGRAQPLGAYTLNTVAATRGKFMTSAGDVPANSPLANIAYAYHFDATQYAHFLRRYSEQRGVTRIEGLVEQVQLHPESGHVQSLQLASGQVVHGDLFIDCSGFRGLLIEEALHTGYHDFTHWLPCDRALAVPCESAGPPTPYTRSTARAAGWQWRIPLQHRTGNGYVYCSAHISDDEAAATLLANLDGKPLADPRPLRFTTGRRKQCWNRNVVALGLASGFLEPLESTSIHLIQSGISKLLELFPREGISPVLVQRYNDRSAFEFDRIRDFLLLHYHATERDDSAFWRHCRSMPITPELQTTLDLFRDSGRFYRNAEEMFAEISWVQVMVGQGILPQGYHPLVDQVPDRDAEGFLASVAQTISHCVDVMPTHQQFIDRYCRAAALP

SEQ ID NO: 88170 - protein, 507 aa, Novosphingobium sp.
  REGION 1..507: note = tr|F6INE9|F6INE9_9SPHN Tryptophan halogenase, putative OS=Novosphingobium sp. PP1Y OX=702113; GN = PP1Y_AT20776 PE=4 SV=1
MTQTRFSIVIVGGGTAGWMSAAALARFAPPGYAVTLVESEAIGTVGVGEATIPAIRLFNKALGIDEAQFLRETSASYKLGIAFDGWLGEGHSYMHAFGTVGRPLGLLPFRHYWARAKAAGIAKPLAHYAANELAARTGRMATGVSGPGIPELPWAYHFDAGLYAAFLRRLAQSMGVTRHEGRIARVIRKDEGDIAAVQTEGGQTLAADFFIDCSGFKGLLIEEELQTGYEDWRHWLPCDRAVAAPCEAAGPFTPYTRSIARSAGWQWRIPLQHRIGNGLVYCSEYLSDDAATGLLLSHLEAPAQADPRLLRFTTGRRRKAWNRNVLAVGLASGFMEPLESTSIHLIQSTIMRFLTVLPCGPASPAIVSAFNRRTAEEFESIRDFLILHYKANARAGEPFWDRCRDMAVPDTLAARIAEFEEACQIQPAGDELFQEAAWLQVMAGQGIEPNGWNPIADALSEEDLAGFLGAVEQACLQTVGPMPRHMDFLAATCASALSSSPELETLP

SEQ ID NO: 88171 - protein, 506 aa, Pseudoalteromonas luteoviolacea
  REGION 1..506: note = tr|A0A0F6AI07|A0A0F6AI07_9GAMM Uncharacterized protein OS=Pseudoalteromonas luteoviolacea S4054; OX = 1129367 GN=N479_00255 PE=4 SV=1
MIKKIVIVGGGTAGWLAANHLGKRFFGSETEVKLIESANIPTIGVGEGTVPMMRQTLEYFGIDEGEFIKECNVAFKQGISFENWMAPSNGNIHQYYHPFDFFSSELGLVKAWLNQQSKTNFADFVGFQSTLCDHNLSPKLITQPQYDGAASYAYHLDAGAFSELLKNHALSQLGVFHQYSDLEEVVMCDDGEVAHLVTDAGIEKADLYIDCTGFKSLLLGKAMKVPFVPKGDVLFADKALAVQVPYGENEQIPSYTRSTAQSAGWIWDIGLYNRKGIGHVYSSHHTTQEQAYAELESYIGTDLDKLNVRTIDMHVGYRSKAWSKNCVALGLSQGFVEPLEATGLLVFDVTAKMLAETLPTSKVAFDVVSPHFNDTVTNMWNKVIDFIKLHYCISDREDSAFWLDNRNPDSIPDSLKEKLQLWLYKAPTHYDFSGKFDVFDVDNYLYVLYGMSYPTNVESNRISPAETQRMSDVISTIKYQQKQAMELACDNKTLLEKIRQFGVAKQ

SEQ ID NO: 88172 - protein, 503 aa, Brevundimonas sp.
  REGION 1..503: note = tr|A0A1H1GKE4|A0A1H1GKE4_9CAUL Tryptophan halogenase; OS = Brevundimonas sp. 374 OX=1150400 GN=SAMN02787020_2745; PE = 4 SV=1
MADSSLIIDRIVIVGGGTAGWMAAAALAQAFEGAGKTVTLVESEAIGVIGVGEATIPEILKFNARLGIDEADFLRETKATFKLGIEFDGWRREGERYFHPFGAFGLDMEGIAFHHFWLKASAEGESEPLETYSMAWQAARRGRFVHPQGGPQSPLSSLGYAYHFDAALYAGFLRRLAEGLGVVRHEGRVVEVQQAADGDIAGVRLDDGRIVEGDFFIDCTGFVGLLIEQALKSGYEDWSSWLPCDSAVAVPCERKESLSPYTRSTAREAGWQWRIPLQHRVGNGYVYSSAHLSHQAAEDALMSRLEGTALAEPRRLRFATGRRKDCWKRNCVAVGLSSGFLEPLESTSIHLIQSAITKLITLFPSHKDSEGLRREFNALMEEEFVTVRDFLILHYKVTQREGAFWQQVRDMPIPDRLAAKIALFEETGRIVRRDHDIFSESSWLAVAAGQGLTPHGRHPISDVISHDANLGRLSAIRDSIWRTADALPTHEDVLATTMNRKAF

SEQ ID NO: 88173 - protein, 497 aa, Pseudoalteromonas marina
  REGION 1..497: note = tr|U1K4X7|U1K4X7_9GAMM Uncharacterized protein; OS = Pseudoalteromonas marina DSM 17587 OX=1117316; GN = PMAN_03465 PE=4 SV=1
MKPIKNVVIAGGGTAGWIAAALLNKVLGKVINITLIESRSIGTIGVGEATIPPIIQLNNALGINEQDFINATNASIKLGIEFENWKTPSHSYMHAFGSFGKDFPFCDFYNFWVKGQISGSEDSLWDFSLNYQAAKKHKFAPLSAIPNTQLPGISYAFHFDATLYAEYLKKLAVSRGVKHIDAKIERVTQCPNTGQINSLTLDNNSQIEGDLFIDCTGQRALLIEQTLNTGFVDWSHYLPCDSAVAVQSTGSDELRPYTRSIAHNAGWQWQIPLQNRTGNGLVYCSRYLSDEGATALLLNNLPGEPTTDPRLIKFKTGRRLKQWHKNVVAVGLSSGFLEPLESTSIHLIQSAVIRLIKLFPHNGISDALVTEFNKQSVTEIEHIRDFIILHYKLTERVDSPFWRQCKQMDIPQSLAHKIDLFRQTGKVVRENDELFAEVAWQQVCIGQGLIPEDYNNIVDSLSSEQLNDLFSTLKTLITSTVDQLPTHKDFLAKIKKA

SEQ ID NO: 88174 - protein, 509 aa, Caulobacter sp.
  REGION 1..509: note = tr|A0A3R8M9F0|A0A3R8M9F0_9CAUL Tryptophan 7-halogenase OS=Caulobacter sp. 602-1 OX=2492472; GN = EIK80_09035 PE=4 SV=1
MQPLKKILIAGGGSAGWMTAALCSRLFQGLYEIVLIESEQIGTVGVGEATIPAIKKFNELLGLDEDDFLRKTQGSFKLGIEFRNWFRKGESYLHGFGVLGQDLGWLRVHQYWLRMRELGQAPDFNALSINNAMALQDKFMRARADMAESPIGHIAHAFHFDAGLYAKHLSTYAQARGVQRREGKIVDVTLRPEDGFVQSVTMDDGEVIAADLFVDCSGFRGLIIEQALKTGYEDWTRWLPADRAIAVPTERSAHFTPYTRSTAHDAGWQWRIPLQHRTGNGHVYSSQYIDDDEAERVLLANLDGAQRADPLRIRFTTGKRKKIWNKNCVSIGLASGFMEPLESTSLHLIQSAVIRMVRLLPDGGFDQANVDEFNRQSDFEYERIRDFIILHYKATERDDTPFWRHCRDMEVPATLQRKMDLFRANGRVFREDDELFTEESWIQVFLGQGVIPRGYDPLVRVHSDEAIATHLGNIQTVIGKCLNVMPSHAEFVARACQAPPLPATPVPVP

SEQ ID NO: 88175 - protein, 498 aa, Pseudoalteromonas luteoviolacea
  REGION 1..498: note = tr|A0A0F6A5A2|A0A0F6A5A2_9GAMM Uncharacterized protein OS=Pseudoalteromonas luteoviolacea S4054; OX = 1129367 GN=N479_22740 PE=4 SV=1
MAKRIQNVLIVGGGTAGWLSASLLKRVLKDQVNITLIESDDIGTVGVGEASIPPMVNFNAALGLDERTFIEQTQATYKLGIEFEGWGYQGSRHMHAFGEVGKSFPFCDFFQVWLKAKQQGLTDCLAEYSLNTQAAKVNRFAHLQHIPSTQLQGLTYAYHFDAGLYAKLLSKHSQNQGVRRVEGKITEVKTDPNTGHIAAVLLANGERYSADLYLDCSGLKALLIDQTMNVGFEDWSHWLPCDSAWAVPSEQLGGDIKPYTRSIAKHAGWQWQIPLQHRVGNGYVFSSKFISEQDAKEALLHSLPSRPMAEPKLIKFKTGMRRKQWQGNVFAVGLASGFLEPLESTSIHLIQTSILRLIRHFPFDAIKDSAIENVNMEFANEMAQVRDFIILHYKLTERDDSRFWQWCKNMSIPESLRSKITLFEETGHCAAKTDDLFQNVAWQQVMVGQGLVPKTYHPLAEQFDDEHLKSLLDSLKVLLQTTVNKLPSHQAFIDKMTK

SEQ ID NO: 88176 - protein, 505 aa, unidentified
  source 1..505: note = Xanthomonas prunicola
  REGION 1..505: note = tr|A0A2N3RN27|A0A2N3RN27_9XANT Tryptophan halogenase; OS = Xanthomonas prunicola OX=2053930 GN=XpruCFBP8353_01880; PE = 4 SV=1
MTQAQIRKVVIAGGGTAGWIAACALSHQFRDLLDITLVESEQIGTVGVGESTVPPIRTFHRFLQIDEQEFLRAVAGTFKLSISFEHWRRQGERYIHPFGITGQSTLVCAFHHLWLESQRRGMPGSFGDYCLETVASRVDRFALHGEPAVNYAYHLDAALYAKFLRARSEACGVKRMEGKIQQVTVQPHSGDVASLVLEDGQVIEGDLFIDCSGFRGLLIEQTLHTGYEDWSHWLPCDRAVAVQTEAVGPPVPYTRAIAHEAGWRWHIPLQHRVGNGLVFSSKHLSDDQAHAKLLRDVAAPAVKDPWMVPFRTGRRLKAWNKNVVSLGLASGFIEPLESTSIHLTISAVVRLLALFPAEGIAPSQVQLFNDVSRAEMEHVRDFVTLHYHATQRDEPLWQQCRQMELPESLALRLRAWRERAHAWQGADELFRVDSWTHVLMGQGIAPEQHHPLTRAFSDHDLRRLLDGIAQPIQHAVQRMPSQQAFIERYCKAGAQVWGMRSPVPA

SEQ ID NO: 88177 - protein, 513 aa, Devosia insulae
  REGION 1..513: note = tr|A0A1E5XQ35|A0A1E5XQ35_9RHIZ Uncharacterized protein OS=Devosia insulae DS-56 OX=1116389 GN=VW23_020345; PE = 4 SV=1
MAEQPHFVIVGGGTAGWIAAFIIQDSIKRLKLDAKLSVVESSKIPTVGVGEATTAAFHVFLTHFGIDIFEFFRKTEATYKLGIRHEDWRRKGFTYYGPIDDPHAVVRPPPGAPSDYLNVYAVSVNEPVQDMHLFGPLLKQKKAPWAQKADGSLIPLGPFLPAYHFDQSLVGKFLKEESEGVEIVDNVLTGVERNGETGDVTALVFEDGQKLEGDFFIDATGFRKRLIVGEMQATWISYQHELPVNRALPFWLPVEPGEEIANYTRAWAQEAGWMWQIPTQYRYGCGYVYSDEFRTPDEAHAEVERVLGRKIEVRGDIQFKIGRLEKAWINNVVAVGLSSSFLEPLESTSIHGTIVQMMMFAGQYLRDPAKMGQPLRDDYNRRVGRQVDDFRTFVNTHYMTERDDTPFWREVREHRIHPETKQRLERWKTEMPRREHFADYLFGLPHVETQLHYPVLDGLGLLDPAVAKAEMARDPKLRKFARETHAGLVKEYKQAASKALGHAEFLELVRGMG

SEQ ID NO: 88178 - protein, 497 aa, unidentified
  source 1..497: note = Pararheinheimera tangshanensis
  REGION 1..497: note = tr|A0A5C8LXA9|A0A5C8LXA9_9GAMM Tryptophan 7-halogenase OS=Pararheinheimera tangshanensis OX=400153; GN = FU839_12060 PE=4 SV=1
MNNQHNRIKKVVIAGGGTAGWMTAAGLTKLLGKNLEVVLVESDDIGTVGVGEATIPTMHIFHRLLNIKESEVMAATNATFKLGIQFENWKNLGEDYIHSFGFLGKDCWACGFQHFWVKAKQKGIATEIGDYCVEHLGARQGRFAVLPNQDLNHAYHMDASLYAKFLRRMSEQHGIRRIEGKIREVQQHMDGNISALLLESGELLEGDLFIDCTGFRALLIEQTLNTGFEDWSHWLPCDSAYAVQTKTTQEPVAYTRAIARQAGWQWKIPLQSRVGNGLVFCSKFITEAEAKQTLVDNLEGEMMFEPRLIKFKTGTRRQHWNKNCVAIGLSSGFLEPLESTSIHLIQRSIIRLLQMFPSNGINSADVAEFNRQTKIEMDNIRDFIILHYKATERTDTKFWRYCKDMEIPDSLAHRMELFKQSGKVYKFAQELFGESSWLQVLIGQGLMPEQYHPIVDLMPDSELNDFLMSIKQNVKRTVSQFPTHHEFIQHYCKSSLV

SEQ ID NO: 88179 - protein, 522 aa, Alteromonas sp.
  REGION 1..522: note = tr|A0A136HZQ9|A0A136HZQ9_9ALTE Tryptophan halogenase; OS = Alteromonas sp. Nap_26 OX=1795869 GN=AXW14_10195 PE=4; SV = 1
MQQANSSIRRIVVVGGGAAGWLTASIIAVTHKHDDNISITLVESPDISILGVGEGTWPTMRSTLLKIGISEEVFLTQCNASFKQGTSFYNWQSDKGENQYYHPFSLPFRYFESDIAAWWQGHAAEQDFAHAVCSQAALCDNHLAPKQRQTPPYAGIANYGYHLDANKFATLLQQHATTKLGVQHIVDHVDDVVGSPSTPITSIVGRQYGAIEGDLFIDCTGFAARLIGQHYGVPLTPCSHVLANDSAVAIQAPYVDSSVDIASTTHSTAQDNGWIWDIGLPSRKGVGYVYSSAHCSEDEARATLDNYLKHDKKTTDVDVSEARKITFTPGYRKTLWVENCVAIGTSAGFLEPLEASALVMIELSATHIAKQLPRTLCECKAAGRQFNNAFEKKWERIVDFLKLHYVLSEREASAYWRDMRDQRGCSTQLQDWLTLWKSRSPISSDFELREELFPAASYLFVLYGMGFRSHYNDTYQANLHTAEQRQAYAKHVQSIQQQLNGLPTNRQFLNQLAQSNCTQMHF

SEQ ID NO: 88180 - protein, 507 aa, Alteromonas sp.
  REGION 1..507: note = tr|A0A136I056|A0A136I056_9ALTE Tryptophan halogenase (Fragment) OS=Alteromonas sp. Nap_26 OX=1795869; GN = AXW14_10160 PE=4 SV=1
GSAGWLTAGRIAAQHQCATRKDIKVTLVESPNVPIIGVGEGTWPTMRSTLIALGISETTFIKECDATFKQGAKFAKWTTGGEDDFYYHPLMLPQGFSQGNLGPYWQTVAPDLNESFSQAICVQEAICEAGLAPKSIRHAEFAGTANYAYHLDAGKFTTFLTRHCTENLGVNHVLADVSQVQSADNGDIEALHTQQGVVIEGDLFVDCTGFKSLLLGEHYKVPFIPCDDVLFIDRALAVHVPYENAQSPIASHTISTAQDAGWVWDIGLQSRRGVGHVYSSRHQSKDDAYTRLDTYVRQTSALDGIDDLNVKDITIQSGHRQRFWQNNCVAVGLAAGFLEPLEASALVLVELSASMIAEQLPANRAVMDIVAKRFNDTFSYRWARIIDFLKLHYMLSKRDDSAFWRDNRDSQTIPDSLKELLALWQYHPPSDKDFTSNNEVFPAASYQYVLYGMGFTSELGAHQQWVNADFARQQLTQNRKARAMAVEKLPQHRELINKIHQFGLQAV

SEQ ID NO: 88181 - protein, 557 aa, Alteromonas sp.
  REGION 1..557: note = tr|A0A2V3V3T2|A0A2V3V3T2_9ALTE Glycine/D-amino acid oxidase-like deaminating enzyme OS=Alteromonas sp. I10; OX = 1938740 GN=BZA03_11277 PE=4 SV=1
MSDNESHSSMHRVVIVGGGTAGWLAAGILAAKLSANHTVTLIESPNIPSLGVGEGSWPSLRDTLLDIGISETEFLTLCHGAFKQGSSFVNWRKGGHCYYHPFTVPTGYNELDIYTCWKSIAPNTSYEDVFSLQAAMCAAGKAPKQIATPDYAHVLNYGYHFDATKLAELLKNHCVDKLNVAHVVGHVDSVHSHQNGDIESVSTKDGEKIVGDLFIDCSGSRGLLIKEHFTIPWVPVKRTMLNDRAVALQVPYSNEDAEIKSTTVATAQTCGWTWDIALQHRRGVGLVYSSQFTDEDQAKQVLIDYVRERYPSAQDAELSFRTLSFEPGYRSQFWVKNCLSLGMSSGFVEPLEASAIAMVELGLRMLCEAFPQNKAHMEIVSKRYNSRFAYRWQRVIDFLKLHYALSDREEPYWLAQRDKASIPDSLAELLELWKYQSPSRLDLIENEEIFPSASYQYVLYGMGFSSSTSPLRLNEEHKRKAVHIRETLQQTKNAYLQGLPSNRVLLNDIAKRYNNEKQHVPSLVQREKNKHASASSCNDIKNTSDKKDASYDRIGFR

SEQ ID NO: 88182 - protein, 495 aa, Enterobacter sp.
  REGION 1..495: note = tr|A0A4V3YXJ4|A0A4V3YXJ4_9ENTR Tryptophan 7-halogenase OS=Enterobacter sp. Z1 OX=2561927; GN = E4M14_05745 PE=4 SV=1
MINLRGMNRVVVVGGGTAGWFAALQLRQLFSPSVEVMVISAPEVPIVGVGEGGVLNLLTVLHDLNIDLKTFIDKTGSTLKLGFRYERWRTGKEDDYYYHLFPLPTPDFAWNEFGFNPYLSGLFNHGIDISRYMASYQFSEDRKPFHEVLQILLDGKNNFGASLHFDTFRVGQYLKEIALARGIIHVEQRIHDFVLNPQTEYVTAIQLLDQKIQCDFVVDASGFSRLLIGKKYKSGWHSFADTLPMNRALPFHLQHQDKIELVTRATAMSSGWVWQIPLQERIGAGYVYHDQFITDEQAQQEVEQWLGAKISPTHPIAFEAGFYKKVWMKNVVAIGLASGFIEPLEATSIGQMLSQLQLMISFIQENHGVISQQNIDFYNRQNSQYWQGICDFIRMHYDTGRKDTPFWQYMLTVPQSQSYQELKKCWEHRTPRDIDFVEHSMGGMSMFSAASWFAVGAGVGVIKPEATSAELYALSTEKKQKLAKYLQQIKQQLFL

SEQ ID NO: 88183 - protein, 514 aa, Novosphingobium taihuense
  REGION 1..514: note = tr|A0A562JG26|A0A562JG26_9SPHN Tryptophan halogenase; OS = Novosphingobium taihuense OX=260085 GN=IQ25_03448 PE=4; SV = 1
MGQPIRNITIVGGGTTGWLAALFLVTRLQGAVRRGELDIHLIESERIPIIGVGESLSPSMATTLEQLGIPEDDFIRDTDATFKVAGYFVGWDAADDGRPLSWVNPFVGFMTAGWEFERYELTGGAYGDGPDYARVVSPCREAIELRKSPKMRGQKPFEHVLRYAYHTNAAAFAPFLRKHAEARGVRRTGADVIGATRDERGHISTITLEGAREVPVELVIDASGFSSVLHHKVMGVPLVDYSHILLNDRAVVTQLAHANPDEPLEPATRATALPHGWAFRVPLYHRTGNGFIYSSKHCSDEAAANEFAGYLGSGARVDDMRVIPMRVGRTQHSWEGNCIALGLAAGFVEPLEASAIFTVETSVKWLLHYFPDSDWEPALRDRYNSRVTDLYDEVADYIALHYRLSRREDTSYWRAQRHEMKVSDRLEQNLSIWRHTLPVRADFASTNYFDENTYIAALFGKGFYRGRELQPMREVDARNWAGLKQNITSAHARALGMLPDHRAVLTEIRTRASG

SEQ ID NO: 88184 - protein, 378 aa, Caulobacter segnis
  REGION 1..378: note = tr|A0A2W5UWY7|A0A2W5UWY7_9CAUL Tryptophan 7-halogenase OS=Caulobacter segnis OX=88688 GN=DI526_19495; PE = 4 SV=1
MGSVLVVGSGVDAWMTAAALATATRGVTIAVAETAPPKPGRIAALPSLRGLHTRLGLSEEMVAKVCRASPTLGSRYGEAVAPYGETGAMLEGVPFHHYWLRAAEGAPLGAWSLAAQAAARGRFAPASRDPRSPLSTLDHGLTLDGAAYAELLKATALRAGVALLEAQARPEADLLVDATGTEARLIGDEPWIDWSAWLPTGLTMSAEENGLTPLFTPGAPLRAGRRERAMAGKVVAVGAAHGAIGAADGGELHLLHGAISRLVALFPTGPAAVAEYNRLSEAALERARDMAILRWGALDAPPEPLAWKIAQFESRGRVVMYDEEIWSESAWIHAFLARGVVPRRWDPLAERMPLDRARAVLERMRAVIAQTAEAMPHV

SEQ ID NO: 88185 - protein, 501 aa, Alteromonas sp.
  REGION 1..501: note = tr|A0A2V3URL1|A0A2V3URL1_9ALTE Tryptophan halogenase; OS = Alteromonas sp. I10 OX=1938740 GN=BZA03_11276 PE=4 SV=1
MTVSGLDSSKNQTPVKNVVIAGGGTAGWMAATALSRLLGKSINVTLVESKDIGIVGVGEATIPPIRTFHKLLGIDEKAFMRATQATFKLGIEFENWREQGHSYIHSFGITGRECWAGEFHHFWLRAKEYGFGGEFGDYCPELIAAKQSKFATSEAMPLNFAYHFDAVAYGRFLKSLACDAGVTHKEGDIEEVVVCPQSGNIQSLRLASDEVIDGDFFIDCTGFKGLLIEQALHTGYDDWRHYLFCDSAVAMQTELTAPPVPYTKSVAHQAGWRWQIPLQERMGNGLVFCSRFMSDEDAINTLKSQVTGAPINEPRVIRFTPGKRRRGWNKNCVALGLSSGFIEPLESTSIHLIMTGLIRLMRLFPFDGITQSAIDEYNNKFDSEMSAILDFIVMHYKVTQREDSPFWQQCQRMDIPSSLKHKLDLFAESGRVFLDDGDIFRVDSWTQVLMGQGMTPSQYHRVADEMSEQSLKQFMAGLKQQVDNHVAKLPSHEAFLTQYLK

SEQ ID NO: 88186 - protein, 499 aa, Caulobacter segnis
  REGION 1..499: note = tr|A0A2W5X2L3|A0A2W5X2L3_9CAUL Tryptophan halogenase; OS = Caulobacter segnis OX=88688 GN=DI526_09160 PE=4 SV=1
MTQQMIRKVVIAGGGTAGWTAAAALARQLGPLLDITLVESEDIGTVGVGESTIPTARTFNALLGIDEAEFMRATQSTFKLGISFENWGEIGDRYIHSFGVVGKSTWMGGFHHFWMQAKAQGFGGDLGDYCLELKAAEGERFYTGENGPLNYAYHLDAGLYGQFLRRIAEADGVKRVEGKIASVRQSATDGSVEALVMESGEAVEGDLFIDCTGFRGLLIEQTLKAGYEDWNHWLPTNSALAVQTRSTEPAKPYTRAIAHRAGWRWKIPLQHRVGNGLVYCNEFMSDDEALALLQSEIDGETLIPPRLIRYRTGRRRKTWDKNVVALGLSSGFVEPLESTSIHLIMIGMTRLMQLFPFGGISQAVIDRYNRLADDELEKIRDFIILHYKATERTDSPFWDRVREMDIPDSLAQRIALFRESAQVYQAPGELFQVDSWLQVLLGQRVQPQSFHAMGRLMPPQQLKQALDDLKRNIAGTVSRLPQHQAFLDAYCAPPVSKSA

SEQ ID NO: 88187 - protein, 520 aa, Novosphingobium taihuense
  REGION 1..520: note = tr|A0A562JNT3|A0A562JNT3_9SPHN Tryptophan halogenase; OS = Novosphingobium taihuense OX=260085 GN=IQ25_02400 PE=4; SV = 1
MVRAVRDVVIVGGGTAGWLTAAIIAAKHKARIGHDFSVTLVESPNVPIIGVGEGTWPTLRSTLKSVGISETDFFRECDAAFKQGALFAKWTTGAEDDAYYHPLVLPQRFGQLNLAPHWLAGTLNEGGDNGETFCDAVCPQGRLCDENLAPKSMVNAEYEGQANYAYHLDAGKFAPFMQRHCTGKLGVRHVLADMREVLQDESGDIRAISTEQAGEISGDLFIDCTGMRSLLLGQTLGVGFKDCNDVLFCDTALAMQVPYPAPDAPVATHTISTAQSAGWIWDIGLPTRRGVGHVYSSRHVSREDAEAELRAYVGPAAEGLSVRKIDIRSGHRETFWKNNCVAVGLAAGFLEPLEASAIVLIELSAKMIADQMPPVREVMDVVARRYNEKTLYRWGRIIDFLKLHYVLSKRRDTAFWRDNMDPASIPERLQELMALWQYQGPYMHEEFDRVDEVFPSASYQYVLYGMGFRTEVSALTLEPEVREARRARAENADMTSRMLGSLPKHRDLIDRIVKYGLQPV

SEQ ID NO: 88188 - protein, 439 aa, Bacillus mycoides
  REGION 1..439: note = tr|A0A090YYB5|A0A090YYB5_BACMY Tryptophan halogenase family protein OS=Bacillus mycoides OX=1405 GN=DJ93_5050; PE = 4 SV=1
MFSKAIVIGGSIAGKLAAKALSHTVEEVIILEAGESWDGKGPRKRVPQINHPHVLLKGGEEALEELFPNITSELKAAGSIINNFTRDLKWHQFGLWKHPFKGEINMIQQSRPLLESHIQKRIEQVSNVFTKYEMMVEELLVNEKLNKVCGVKAKCLKTGMKEEFDADIVVDASGFGSKNIDWLREYNIEVKEEKVRIDLFYATRMFRLKENEQLDCCNMLMSPSFPENPYGVLIQTIEDDRYFVTFSGYANEKAPQTDDEFYAFAEKLSISDVTDFLNSAEPITDIKIYKIPYQIRRRFDLIKNLPEGFLVIGDAHCRFDPVFGQGVSVAAMEALELQLYFKQNNNLERKLTRGFYKRVSKIIETPWEMTTTEIFRHPKLKRKMSLKQLFQQWYTKQIYQLSASNSDIYIRLVRVMNLIRSPFHLFHPKVLLAVLLNRK

SEQ ID NO: 88189 - protein, 494 aa, Shewanella sp.
  REGION 1..494: note = tr|A0A4Q5MF99|A0A4Q5MF99_9GAMM Tryptophan halogenase; OS = Shewanella sp. OPT22 OX=2054186 GN=SOPP22_00590 PE=4; SV = 1
MKKITSVAILGGGSAGWMSAAMLSKLMPNIEITLVESKDIGTIGVGEASIPPLTLFNQTLGINETEFMRETQASIKLGIQFENWNQQGDSYMHAFGALGKDLGFTQFHHYWLKSQQKAETFWDYSFNYQAAKSGKYNLVNQIPNTNLPGLEHAYHFDAGLYANYLSNLAIRAGVTRVEGLVKAATLVKDSGNVKSIQLSDGSEIETDLFIDCSGQHAFLIEKVLGTGYEDWSHFLPCDRALAVPSEKLDSTLPYTKSIAHDTGWQWQIPLQHRIGNGLVYSSRYLADEDAKALLLESLPSKPVAEPKLIKFKVGRRLKQWNKNCISIGLSSGFLEPLESTSIHLIQSAIMRLIKLFPQTDAFEFARKEFNKQSAYEFNHIRDFIILHYYLNNKSAPFWKHCRQMDIPENLKDKIELFKETAEVSRNPEDLFAHTAWQQVMIGQGTVPNKYHPIADNLTKQQLSDFLNDLSSIYQKCSKALPTHDEFLQHYCSKG

SEQ ID NO: 88190 - protein, 506 aa, Alteromonas sp.
  REGION 1..506: note = tr|A0A2V3UPM3|A0A2V3UPM3_9ALTE Tryptophan halogenase; OS = Alteromonas sp. I10 OX=1938740 GN=BZA03_1134 PE=4 SV=1
MQDPHNKPIKHVVIAGGGTAGWLAASLMKKVLGKAVDITLVESEAIGTVGVGEATIPPIRLVNQVLGIDEAQFLHDTKATIKLAIRFENWKTKGESYYHTFGAPGKSMAFCHFHHYWVKARQQGLKDDLWDFDLNYHAAEAGRFAQINAKDPVVELPFAYHFDASLYAQYLRKLSENMGVVRKEGKISRVQRFTDSGFIQALHLESGDVVEGDLFVDCTGFKGLLIEEALGAGYDDWSHLLPCDSAIAVPSERHEKTAPYTRSIAHDAGWQWRIPLQHRNGNGHVYSSRYISDDQACDTLLSNLDTKPLGDPKLIKFTTGRRRKQWYKNVVAVGLSSGFLEPLESTSIHLIQSAIVRLIQLFPHNGFAPSLETEYNKQSELEFEQIRDFLVLHYTVNERTDSAFFNDMRNITLPDSLAHKIALFKESGNLLREQNDLFLESSWLQVLYGQGITPKDYHGLVNSVPEVQLNQMLTRLLEIKKEPIAKLPTHDEYINGMVAKYKRAMS

SEQ ID NO: 88191 - protein, 527 aa, Luteimonas aestuarii
  REGION 1..527: note = tr|A0A4R5U0N8|A0A4R5U0N8_9GAMM Tryptophan 7-halogenase OS=Luteimonas aestuarii OX=453837; GN = E2F46_02645 PE=4 SV=1
MAEGRIQKVVIAGGGTAGWVAACALAHQFRDLIQITLVESEQIGTVGVGESTIPTIRTFHRLLQIDEREFLRAVAGTFKLSISFENWKREGDRYIHPFGLTGLGTWSCEFHHFWLESLRRGMHSELGDFCLETLASREDKFALTEAQTGGGAQWSTRWTGQSLVPENPEVSYAYHFDAALYAAFMRRKSEGFGLRRVEGKIREVRQHPETGFVTALVMEDGREVEGDLFIDCTGFRGLLIEQTLKTGYEDWNQWLPCDRAVALQTESVGPPVPYTRAIAHQAGWRWHIPLQHRVGCGLIFTNRFMSDDEAAAKLARDAGAPAIRDPWLVPFRTGRRLKAWNKNVVSLGLASGFIEPLESTSIHLALSSVARLLHLFPADGIQPAMVERYNDVSRAEMEHVRDFIILHYHLNQRSEPLWRECREMSLPHSLAERIAQFRERAHAWQGDDELFRLDSWTHCMLGQGVVPSQHHPVTRAIKDQDLRQLFEVIRRPLTRTVAAMPSQQAFIDRYCKADPGVWDLRNRSTVG

SEQ ID NO: 88192 - protein, 517 aa, Caulobacter segnis
  REGION 1..517: note = tr|A0A2W5V8A5|A0A2W5V8A5_9CAUL Tryptophan halogenase; OS = Caulobacter segnis OX=88688 GN=DI526_19490 PE=4 SV=1
MSEASRARTADPIRKILIVGGGTAGWMTAAALAKSLKARDVAITLVESEQIGTVGVGEATIPPITTFNQLLGLDEAAFMRATQASFKLAIEFVDWMGPGHRYLHPFGGFGLDIEALKFHQIWLRALHEGWAPPIDAFNLSARASHLGRFALPSRDPRQVMSSLKYAFHFDAGLYAKHLRAYAEQRGVARIEGKVAHVAQHGETGFLTSVTLDGGPTLEADLFIDCSGFRGLLIEQTLKAGYDDWSHWLPNDRAVAMPCETGGDGLTPYTRATADAAGWRWRIPLQHRTGNGYVYASADISDDEAVARLRATLDGPALAEPNFLRFQAGRRRQAWVKNVVAIGLSSGFLEPLESTSIHLIQAGITKLLALFPDKGFDPVEIAEYNRLTAQQVELIRDFIILHFKTNGRTEPYWVRAREMAIPETLARKIALFAASGRLFQSDYDLFAEPSWIAVLLGQGVIPHRHDPLVDALDDAMVRGQLSRLATLIRRTAEALPTHEAFIARYCAASPTPAARVPA

SEQ ID NO: 88193 - protein, 508 aa, Pseudoalteromonas distincta
  REGION 1..508: note = tr|F3BGN9|F3BGN9_9GAMM Putative tryptophan halogenase OS=Pseudoalteromonas distincta OX=77608; GN = PH505_ai00170 PE=4 SV=1
MNKTIKTIAVIGGGTAGWLSAAIIASYHQGKNGDGLKVMLVESSDIPTIGVGEGTWPTMKNTLQQIGLREVDVFKACNATFKQGGKFVNWTHGNNDFYYHPFTVPLGYGRIDLAPYLDNVEDFAQQTNFQHDICEASLAPRGIAQGEYQGNCNYAYHLDAGAFAEMLKQHCKSKLGVEHIIGTVDQVKLDDDGEINELTLKDQTRIISADLFIDCTGFSSLLLGQALNVPFKKMDHVLFNDSALAMQVPYDENDDSLASHTIATAQNAGWIWDIGLTHRRGVGHVYSSKFLSDDEAEQNLRNYLGDAANGLTARKISFESGYREKFWHKNCVAVGMSAGFVEPLEATAIMLVEISARFVAEHMPADTQVMPIVAKRFNEQMDYRWQRIIDFLKLHYMLTKRPEPYWQAHVHPDTIPQTLQEDLLLWGSRGPLIQDFHGALELFPAASYQYVLYGMGFKPDFTKQAYLYSQDAQAKQIIERNSQLTQQMLQTLPPHRAYIEQWLAANPV

SEQ ID NO: 88194 - protein, 496 aa, Pseudoalteromonas distincta
  REGION 1..496: note = tr|F3BJ32|F3BJ32_9GAMM Tryptophan halogenase; OS = Pseudoalteromonas distincta OX=77608 GN=PH505_ar00440; PE = 4 SV=1
MKPIKHVVIAGGGTAGWITAALLNKVLGKVIKITLIESSTIGTIGVGEATIPPIIQLNNALAINEQEFINATNASIKLGIEFENWKTTSHSYMHAFGSFGKDFPFCDFYNFWVKGKITGCEDSLWDFSLNYQAAKRHKFAPLNTIPNTQLPGLSYAYHFDATRYAEYLKKLATSRGVLHIDAKIEQVNQCPHSGNITSLTLDDTQINGDLFIDCTGQRALLIEQTLNTGFVDWSHYLPCDSAVAVQSQGTDSLKPYTRSIAHSAGWQWQIPLQSRIGNGLVYCSRYLSDDAATQLLLKNLPAEPITAPRVIKFKTGRRLKQWHKNVVSVGLASGFLEPLESTSIHLIQSAVTRLIKLFPHHGISETLVTEFNKQSVIEIEHIRDFIILHYKLTAREDSAFWRQCKQMDIPHSLAHKLKLFKETGKVVRENDELFAEVAWQQVFIGQGLIPDDYNSIVDSLSSEQLNDLFSTLKTLITSTVDQLPTHKDFLAKIKKA

SEQ ID NO: 88195 - protein, 518 aa, Pseudoalteromonas distincta; identical to SEQ ID NO: 84619
  REGION 1..518: note = tr|F3BF65|F3BF65_9GAMM Putative tryptophan halogenase OS=Pseudoalteromonas distincta OX=77608; GN = PH505_ad00390 PE=4 SV=1

SEQ ID NO: 88196 - protein, 522 aa, Xanthomonas sp.
  REGION 1..522: note = tr|A0A3A5EEH5|A0A3A5EEH5_9XANT Tryptophan halogenase; OS = Xanthomonas sp. CFBP 7698 OX=2082399; GN = XnspCFBP7698_17745 PE=4 SV=1
MAHTTSPDPAQRPVRRVVIAGGGTAGWMAAAALSKLLGRQLQITLVESDEIGTVGVGEATIPSLVTFHRLLEIDEAAFMAATQATFKLGIAFEHWRDVDRHYIHSFGHTGTDHWSAGFHHFWLKGRQRGVARDFGDYCLELRATQEGRFAHLPNGGMNYAYHLDAGLYARFLRRFSEGFGVQRIEGRIGQVETDPHSGFLTALTLDNGSRVEGDLFIDCTGFAALLIGKTLGVDSDDWSRWLFADSALAVQTESVGPPVTYTRARADQAGWMWRIPLQHRVGNGIVYSSRYTDQDSARAVLERNLQGRALTEPRALRFTPNQRQRVWEKNCVALGLASGFLEPIESTNIHLIQRGIVRLLQTFPQVINAVDIAEYNRQAADEIAHIRDFVILHYHATDRRDTPFWRDCAAMDIPDSLRHRVELFRQSGRVFHQGNELFAENSWVQVMLGQGIVPQQHHPVADLMGDAELSHFLESIRQRVDATVASLPPHAQFLRHHCPAVPLPDPAACTPADVAAMAAPAG

SEQ ID NO: 88197 - protein, 506 aa, Alteromonas sp.
  REGION 1..506: note = tr|A0A2V3V1Q5|A0A2V3V1Q5_9ALTE Tryptophan halogenase; OS = Alteromonas sp. I10 OX=1938740 GN=BZA03_102366 PE=4 SV=1
MNKLPQEIVIVGGGTAGWMTASYLARTAELMANKSNVPACAPKITLLESAVISTVGVGEGSTPYLRHFFEFLGINESEWMLKCSATYKMGISFERWTTTAESKTTRPAFTDSDSYFHPFFSSLDIPTADMYFSAVNEYRKGASHDINPSHYFTAAHMVEKGITPDAICSSANIDYAYHFDAGLLGDFLKEYALNKGVSHQIGTVANVECHEHTINSLKLDDGNTLSADFFIDCSGFRGLLGKQALSRRFTSYADTLFNDAAVAIASDATASPETALQTRSIALGHGWQWHIPLTSRTGNGYVYSSQFCTEAQAEEELRLALEPDQFHQQARHLKMTVGRLEEHWKGNCLCIGLSQGFIEPLEATALMLVQYALHHFIDCWQSNNPRREVRYNSEINRMFDGIRDYIAAHYYLNTRDDSAYWVACREDLKVPDTLSYLLNAWDKGASFEQALNEVDNKLVYLRPSWYCIFAGMKRFTQNTTPLAHPNTLALRTMQQSVEGAHRVRQP

SEQ ID NO: 88198 - protein, 501 aa, unidentified
  source 1..501: note = Phycosocius bacilliformis
  REGION 1..501: note = tr|A0A2P2EA44|A0A2P2EA44_9PROT Flavin-dependent tryptophan halogenase PrnA OS=Candidatus Phycosocius bacilliformis OX=1445552 GN=prnA_1 PE=4 SV=1
MSIETIVILGGGTAGWMAAAALSRLRAGRPVNVVVIESEQIGTVGVGEATIPPFLDFNRLLEIDERDMLSAVQGSFKLGIQFVNWGKIGDSYIHPFGNYGYQLDGVSFHHIWHKFKQAGDKRPIQIFNIETMAAHFGRFARTEDYQREDLPPINYAYHLDAGRYAKYLRAYAEARGAVRIEGKVQHVALDGQTGFVTELTMDNGNIVKGDLFVDCSGFRGILIEQALQTGYEDWSNYLPCNRAVALPCKREDGSPPPPYTRATAHKAGWQWQVPLQHRNGNGHVYCSEFMGDDEALDILVNNIAGKPQAEPNFLRFVTGRRKKFWNKNVVALGLAAGFMEPLESTSIHLINTGINKLIALLSLDGITQAQEDAFNRLTGKEYARIRDFLILHYNATTRDDSPFWNYCRNMAVPESLTEKTDLFRLNGQIFREDDELFTETSWAAVMMGQGITMQGHNAMADTLIEPKTSDELRGIEQSIQFVVQHMPTHGDYLKHYCPAAM

SEQ ID NO: 88199 - protein, 510 aa, Sphingomonas sp.
  REGION 1..510: note = tr|A0A1R1Z225|A0A1R1Z225_9SPHN Tryptophan halogenase; OS = Sphingomonas sp. Sph1(2015) OX=1628084 GN=BSZ14_03970; PE = 4 SV=1
MSDPYRPTRVVIAGGGTAGWLAATALARQLGPLVDVTLVESDEIGTVGVGESTIPTARSFHAFLGLDEAEFMRATQATFKLGIAFENWGPDGARYFHPFGTVGRSVAIADFQHFWLEARRHGFGGAYTDYSLETRAAEAGRFGRDEAGTLAYAYHLDATAYARFLRGIAEPAGVCRVEGRIARVERHGERGDIAALHLASGNRIEGDLFLDCTGFRALLIEGALETGFEDWSEWLACDRALAVQTEAVSPPVPYTRAIAHRAGWRWRIPLQTRVGNGLVYSSADMSDDEASATLLGGIEGKPLFEPRALQFRAGMRRRAWSANCVALGLAAGFIEPLESTSIHLVMIAVMRLIQGFPFQGQDCAALRTRFNAQSRHEWEHIRDFIILHYAQTGRTDSMFWQRCSTMSVPDTLAQRMALFVESAGAWQGQDDLFKIDSWISVMLGQGMVPKAHHRISGMLSPHALRDSFDGLDQQLSRQVQQIPDHLAFINGYCATQARPDLRIDPGDAAH

SEQ ID NO: 88200 - protein, 497 aa, Pseudoalteromonas sp.
  REGION 1..497: note = tr|A0A0M9UHN8|A0A0M9UHN8_9GAMM Tryptophan halogenase; OS = Pseudoalteromonas sp. SW0106-04 OX=1702169 GN=W04_1552; PE = 4 SV=1
MANINRVVILGGGTAGWLSAALLAKMLGKQLSITLVESTDIGTVGVGEATIPPIVAFNNALGIDEKTLIQRTGATIKLGIQFENWGRQGDSYMHAFGHLGKALPFCDFHHLFHHAKEQGLGHSLWDYSLNFQAEKAGRFAPLRHLPNTQLAGTEHAYHFDASLYAQLLRERAEHFGVQRIDAKVDKVEQSDNGDVQALMLQSGERVEGDLFIDCSGQRALLIAQTLGVGFEDWSHWLPCDRAIAVQSHHGDDKGLLPYTRSIAHDSGWQWQIPLQHRVGNGLVYCSRYLDDDQAKAQLLANLPGEALHEPRVIPFRTGARRQQWHKNVVAIGLSSGFLEPLESTSIHLIQTAVIRLLKHFPHQGIAPDSVRAFNRLFSTEMAQIRDFIILHYALNQRQDSRFWRYCADMELPPSLGERIAQFQQSGQVHRYQDELFAEVAWQQVLIGQNCWPQQHHLLAEQLSNEQLDELLQSLRTLINQAVQNMPSHQQFIQRNLS

SEQ ID NO: 88201 - protein, 507 aa, Shewanella sp.
  REGION 1..507: note = tr|A0A501X6W1|A0A501X6W1_9GAMM Tryptophan 7-halogenase OS=Shewanella sp. LC6 OX=2589790; GN = FJD32_22990 PE=4 SV=1
MTIRKIAIIGGGTSGWLAANHLGRALKGRSGLSISVIESPDIPIIGVGEGTVPSIKKSLQSFGISESEFIRTCDVTFKQSIKFVNWLDKSRHGKHNFYHHLFDIINLHQGDAVSTWLAEQSGHFADFVSPQHLACEAAKAPKLITTPEYAGVLGYAYHLNAAKFAKLLAKNAIEKFNVEHILTTVHDVCLGVDGAIESLQTEQGNLSFDFYIDCSGFESILLAKALKVPFISKALQLFIDTALVAQIPTQPADVIPPYTKATAHQAGWIWDIALTQRRGTGFVYSSAHMNQTEAEQKFDRYLGGKLADIPHRKIPMTVGYRQQFWVKNCVALGLAQGFLEPIEATSILLTDFSARFLAERFPANKDEVDYLSMRFNRTVNHAWERVVEFAKLHYCLSDRNDSAFWLDNQREETIPEPLKERLNMWKSFSPIAEDFPSKFEVFNLDNYLYVLYGMKYPTQPHDRGLVAKANLNAYMSNMSNVKRQMFEGLPEHRELIDKICTYGLQAI

SEQ ID NO: 88202 - protein, 576 aa, unidentified
  source 1..576: note = Phaeomarinobacter ectocarpi
  REGION 1..576: note = tr|X5MMV5|X5MMV5_9RHIZ Tryptophan halogenase; OS = Candidatus Phaeomarinobacter ectocarpi OX=1458461; GN = BN1012_Phect1362 PE=4 SV=1
MADPIKHITIVGGGTAGWFTANMLSVFFGMQKNHPANRMRITLIESPNIPTVGVGEATVPSMSLSLQQTGISETDFFKTCNASFKLGVDFAGWNVDAKGKPFSYINPFNTGHRVGGIDPGYYYGRFGGSGASFVQTISPAQDLGMMRKGPRPLGSKPFTEPVNYAYHLDAGLFAKMMQGISVGRGVEHVLDDMVDVERAEDGSIAAINLKEAGRHEVELVIDCTGFKGLLINGALDEPFISYDKYLANDRAMAVQIPHPEQTANGPKFIEPVTRSTALGAGWSWRVPLYNRIGTGYVYSSAHRSDDEARDEFLKHLGDAGKDAEPRVIPMRVGRTRNSWVKNCIAIGLSGGFIEPLESTAIYMIEMAVRWLIAYFPDNSYPDSLRNRYNDVASGLYDEVRDFICLHYALGNRTDSQYWIDAREELEVPDSLAENMEVWKHAMPVMTDLKSQHLFSPEVYTAVLQGKRIYQMRDDWNAGLSLNLNRDMWRKHVSGQRHKISQFVKAMPDHVALLRQIRGETAQQDAPSPLMGNMQGLPGQQAPLPQGSVPLPGLGTRRTPVIKTPIAPADAGDGNLL

SEQ ID NO: 88203 - protein, 505 aa, Caulobacter segnis
  REGION 1..505: note = tr|A0A2W5X8C9|A0A2W5X8C9_9CAUL Tryptophan halogenase; OS = Caulobacter segnis OX=88688 GN=DI526_00010 PE=4 SV=1
MDAKPYRKFVIVGGGTSGWIAAATLIQALKGHLGEVELIESDEIGTVGVGEATIPPIQFLNGLLGIDEYDFVRKTQATFKLGIQFRNWGRQGQEYFHPFGAYGEPIDGVGFHHYWLRLRANGEGGSLDSYALSTVAAKAGKFATPPKDLPPGVPGLGYAYHFDAGLYAQYLRAYAEARGVKRTEGRIAKVEQRLEDGFVSGLVLADGRRVEGDFFVDCSGFRGLLIEQALEAGFEDWSHWLPCDRALAVPCENAYPLTPYTRSTAREAGWQWRIPLQHRTGNGYVYCSDHISDDEAAATLLANLDGKALADPRPLRFKAGRRRKAWSKNVVALGLAGGFMEPLESTSIHLVQTGAMRLLALLPLGGYDPAAEHEYNRLTQIEYEQIRDFIILHYCATERDDAPLWTYCRTMAIPDSLAHRIELFRSRAKIARYDDQLFAEPSWLAVFLGQGVAPRDYDRLADAAAYDEVVARVRRIGQANAGLVSRLPTHDAFIAAACKADPLAA

SEQ ID NO: 88204 - protein, 527 aa, unidentified
  source 1..527: note = Unknown
  REGION 1..527: note = tr|A0A520MIH3|A0A520MIH3_9GAMM Tryptophan 7-halogenase OS=SAR92 clade bacterium OX=2315479; GN = EVB03_01735 PE=4 SV=1
MTSSENLKSIVIVGGGTAGWLTAGIIAAEHSSNGSESDGLIDIKVTLVESPDISTIGVGEGTWPSMRSTLQKMGISETDLIRGCDASFKQGTLFKSWKTGGSDAYTHPFTPPHSYASTNLAPQWQKFSNEVSFAEAVSSQNALMFKGLAPKQISTPEYAFHTNYGYHLDAGKFAELLRKHCVDKLGVTHLKANVVSVNSSADGDIASLKTDSHGDISGDLFVDCSGSRALLLGEHFGVPFCSKGQFLFNDTALASQIPYVNADDPIASSTLSTAQTAGWIWDIGLPTRRGIGHVYSSGHTTEDRAAQELLAYIAAIVSPEAAASASIRKVPFSPGHRAKFWHKNCVAVGMSAGFIEPLEASALVLVELSAAMIAEQLPANRQIMDVVAKRFNDKFLYRWDRIIDFLKLHYILSQRQDSDYWKDNISSSSVPDNLSELVKLWRWQAPWHRDTGHIDEMFPSASYQYVLYGMGFLTQDSTTARRSDREAQSVAEGLFRENAERTKKLLASMPTNRELIEKITNYGLQKI

SEQ ID NO: 88205 - protein, 430 aa, unidentified
  source 1..430: note = Chthoniobacter flavus
  REGION 1..430: note = tr|B4D801|B4D801_9BACT Tryptophan halogenase; OS = Chthoniobacter flavus Ellin428 OX=497964; GN = CfE428DRAFT_5041 PE=4 SV=1
MPSEFSLAMNMSNQYEVIIIGAGPAGTTTAALLAEKGRRVLVLEKEKFPRYHVGESLMPYCWFTLNRLGLVEEMNHIAYTKKYSVQFVTQDGRQSAPFYFFQHYDHPSSTTWQVERADFDLMLLKNARAKGAEVRELTPVTRLLKDESGKVIGVEARDENGATHEFYAPMTVDCSGREQISIARDGWRVKDAKLNKIAIWTYFRGAKRDPGIDEGNTTVAYVEGRGWFWYIPLKNDTVSVGIVAEKDYLFSESKDPAKIMQREIERNAWIKEHLSMGEQFGEYFVTSEFSYRSKYCAADGLLLAGDAFAFLDPVFSSGVFLALKSGEMAADAVDAALTTGDFSGSQFVEYGETLCRGMENMRKLVYAFYDPNFSFGRMLKAYPEHRGLLTDSLIGHLFDPDFSQLYASMQEFVTLPEPLSHGRAPENAAA

SEQ ID NO: 88206 - protein, 515 aa, Stenotrophomonas maltophilia
  REGION 1..515: note = tr|A0A0U5IBU2|A0A0U5IBU2_STEMA Tryptophan halogenase; OS = Stenotrophomonas maltophilia OX=40324 GN=prnA PE=4 SV=1
MREGTALDTESTPAGRIRKVVIAGGGTAGWLAGCALAHQFRDQLQITLVESEHIGTVGVGESTVPPIRTFHRFLQIDEQEFLRAVAGTFKLSISFENWRLPGDRFFHPFGTIGHGTWAAPFHHFWLDSLRRGMPSDLGDFCLESIASRGDRFSLHTQPQASYAYHFDASLYARFLRGRAEANGLRRIEGRIAQVRQHAHDGSVQALVLDDGQVIEGDLFIDCTGFRGLLIEQALGTGYEDWHEWLPCDRAVAVQTEAVAPPVPYTRAIAHEAGWRWHIALQHRVGCGLVYDSRHLSDDEAAAKLLRDAGAPPLRDPWNVPFRSGRRLKAWNGNVVSLGLASGFIEPLESTSIHLTISAVVRLIQLFPFDGISASLVQLYNDVSRQEMEHVRDFIILHYHATQRTEPMWKACREMSVPGSLQQRLQAWRERAHAWQDPGELFRVESWTSVLLGQGIPPGPPHPLARAVSDADLRTLLKGIQQPVQQAAAQMPTQAEFIAQYCRSGVDVWRSTAANA

SEQ ID NO: 88207 - protein, 522 aa, Alteromonas sp.
  REGION 1..522: note = tr|A0A2V3UZP7|A0A2V3UZP7_9ALTE Tryptophan halogenase; OS = Alteromonas sp. I10 OX=1938740 GN=BZA03_103361 PE=4 SV=1
MHQANSPLRRIVVVGGGAAGWLTASIIAVTHKHDDNISVTLVESPDVSILGVGEGTWPTMRSTLLNIGISEETFLAQCNASFKQGTSFHNWRSDNVEHQYYHPFSLPFRYFESDVAAWWQSYAAEQDFAHAVCSQAALCDHHLAPKQRQTPAYAGIANYGYHLDANKFAALLQKHATTVLGVQHIVDHVDDVVGSSSEPISAIVGREHGNITGDLFIDCTGFAARLIGQHYGVPLTSCSNVLANDSAIAIQAPYVDSSVDIASTTHSTAQDSGWIWDIGLPSRKGVGYVYSSAHCSEDEARATLETYLKHDKKTADVDVSKARKITFSPGYRKTLWVENCVAIGTSAGFLEPLEASALVMIELSATHIAKQLPRTYKECQAAGRQFNQAFEKKWERIVDFLKLHYVLSEREASAYWRDMRNQESCSTQLQDWLTLWKSRSPISSDFELREELFPAASYLFVLYGMGFRSQYNDVYQANLHTPEQRQAYAKHVQSIQQQLSGLPTNRQFLNQVAQSQGLSMHY

SEQ ID NO: 88208 - protein, 514 aa, Stenotrophomonas maltophilia
  REGION 1..514: note = tr|A0A2J0TFH6|A0A2J0TFH6_STEMA Tryptophan halogenase; OS = Stenotrophomonas maltophilia OX=40324 GN=B9Y66_19440; PE = 4 SV=1
MGSIALNAADTTQGRIRRVVIAGGGTAGWLAGCALAHQFRQQLDITLVESEQIGTVGVGESTVPPIRTFHRFLQIDEQEFMRAVAGTFKLSISFENWRRPGERFIHPFGTIGQGTWATPFHHFWLDSLRRGMPSELGDFCLESVASRADRFSLQTQPQVNYAYHFDAGLYARFLRGKAEANGLRRVEGKIREVRQHADDGSVASLLLEDGQVIEGDLFIDCTGFRGLLTEQTLHTGYEDWNEWLPSDRAVAVQTDAATPPVPYTRAIAHEAGWRWHIALQHRVGCGLVFSSRHMSDDEAQAKLLRDVDGRPLRDPWLVPFRSGRRLQAWNRNVVALGLASGFIEPLESTSIHLTISAVVRLIQLFPSEGITPSLVALYNDVSRQEMEHVRDFIILHYHANQRDEPMWKACREMALPESLQVRLRAWRERAHAWQDPGELFRVDSWTSVLMGQGILPGPPHPLARAIGDADLRTLLHRLRQPVQEAVAKMPSQADFIERYCKAAPGAWQTGRAVA

SEQ ID NO: 88209 - protein, 538 aa, Burkholderia ubonensis
  REGION 1..538: note = tr|A0A124U6C6|A0A124U6C6_9BURK Tryptophan halogenase; OS = Burkholderia ubonensis OX=101571 GN=WJ58_27895 PE=4 SV=1
MSNPIKNIVIVGGGTAGWMAASYLVRALQQQTNITLIESAAIPRIGVGEATIPSLQKVFFDFLGIPEREWMPQVNGAFKAAIKFVNWRKPPERSRDDHFYHLFGSVPNCDGVPLTHYWLRKRELGFQQPMEYACYPQPGALDGKLAPCLPDGTRQMSHAWHFDAHLVADFLKRWAIERGVKQVVDEVVEVRLNDRGYISSLSTKEGRTLEADLFIDCSGMRGLLINQALKEPFIDMSDYLLCDSAVASAVPNADARVGIEPYTSAIAMNSGWTWKIPMLGRFGSGYVFSSKFTSRDQATADFLDLWGLPDNQPLNQIKFRVGRNGRAWVNNCVAIGLSSCFLEPLESTGIYFIYAALYQLVKHFPDTSFDPRLTNAFNAEIVHMFDDCRDFVQAHYFASSRDDTPFWLANRHDLRLSDAIKEKVERYKAGLPLTTTSFDDATYYETFDYEFKNFWLNGNYYCIFAGLGLLPDRSLPLLRHRPESIDKAEAMFARIRREAERLRASLPTNYDYLRSLREGDAGLSRSQPGPTLAAPEIL

SEQ ID NO: 88210 - protein, 538 aa, Burkholderia ubonensis
  REGION 1..538: note = tr|A0A119J6H6|A0A119J6H6_9BURK Tryptophan halogenase; OS = Burkholderia ubonensis OX=101571 GN=WJ87_13450 PE=4 SV=1
MSNPIKNIVIVGGGTAGWMAASYLVRALQQQTNITLIESAAIPRIGVGEATIPSLQKVFFDFLGIPEREWMPQVNGAFKAAIKFVNWRKSPERSRDDHFYHLFGSVPNCDGVPLTHYWLRKRELGFQQPMEYACYPQPGALDGKLAPCLSDGTRQMPHAWHFDAHLVADFLKRWAIERGVKQVVDEVVEVRLNDRGYISSLSTKEGRTLEADLFIDCSGMRGLLINQALKEPFIDMSDYLLCDSAVASAVPNADARVGIEPYTSAIAMNSGWTWKIPMLGRFGSGYVFSSKFTSRDQATADFLDLWGLPDNQPLNQIKFRVGRNARAWVNNCVAIGLSSCFLEPLESTGIYFIYAALYQLVKHFPDTSFDPRLTNAFNAEIVHMFDDCRDFVQAHYFASSRDDTPFWLANRHDLRLSDAIKEKVERYKAGLPLTTTSFDDATYYETFDYEFKNFWLNGNYYCIFAGLGLLPDRSLPLLRHRPESIDKAEAMFARIRREAERLRTSLPTNYDYLRSLREGDAGLSRSQPGPTLAAPEIL

SEQ ID NO: 88211 - protein, 510 aa, Stenotrophomonas maltophilia
  REGION 1..510: note = tr|A0A270NMI1|A0A270NMI1_STEMA Tryptophan halogenase; OS = Stenotrophomonas maltophilia OX=40324 GN=CEK00_06455; PE = 4 SV=1
MLDTQSTPSGRIRKVVIAGGGTAGWLAGCALAHQFRDQLQITLVESEQIGTVGVGESTVPPIRTFHRFLQIDEQEFLRAVAGTFKLSISFENWRLPGDRFFHPFGTIGHGTWAAPFHHFWLDSLRRGMPSDLGDFCLESIASRGDRFSLHTQPQASYAYHFDAGLYARFLRGRAEAHGLRRIEGRIAQVRQHAHDGSVQALVLDDGQVIEGDLFIDCTGFRGLLIEQALCTGYEDWHEWLPCDRAVAVQTEAVAPPAPYTRAIAHEAGWRWHIALQHRVGCGLVYDSRHLSDDEAAAKLLRDAGAPPLRDPWKVPFRSGRRLKAWNRNVVSLGLASGFIEPLESTSIHLTISAVVRLIQLFPFDGISASLVQLYNDVSRQEMEHVRDFIILHYHATQRSEPMWKACREMRVPESLQHRLQAWRERAHAWQDPGELFRVESWTSVLLGQGIAPGPAHPLARAVSDVDLRTLLKGIQRPVQQAAAQMPAQAEFIAQYCRSGVDVWRSTEASA

SEQ ID NO: 88212 - protein, 554 aa, Nostoc sp.
  REGION 1..554: note = tr|A0A2D0HLS1|A0A2D0HLS1_9NOSO Tryptophan halogenase; OS = Nostoc sp. 'Peltigera malacea cyanobiont' DB3992; OX = 1206980 GN=CK516_08650 PE=4 SV=1
MSQHVQNIVIVGGGSAGWMTAAYLSKALKKNIQITLVESSNITKIGVGEATFSSIKSFFDFLGLQEYEWMPKCNATYKMGIKFVDWNSDRRHFYHPFERFDFIDGFSISEWWLKLKSANEPFDYSCFMAPTLCDHQRSPRYLNGKIFDDRVEHLFSEKHFSEKNLITLADAEGQYPYAYHFDANLIARFLKDYSRQRGVKQIVDDVVNVNLTEDGSIDSLNTKEHGIVSGDLFIDCTGFRGLLINQALGEPFISYSESLLCDRAIAMQIPTDIQKNGINPYTTATALSSGWVWNIPLYGRNGTGYVYSSAFISAEEAEQEFRQHLGNVADNCKASHIQMRIGRNRNSWVKNCVAIGLSSGFVEPLESTGIFFIQHGIEELVNHFPGKSFNEELIRNYNRAIANCLDGVRDFLVLHYRASDRADTKFWQATKQEIKVPAELQEKLKLWRSRLPNKKNINPYFHGFETYSYSVMLLGLNHKPEGSLPLLEHLDDEKALAKFQAIKEKANYLSKNLPSQYEYLTYVIKSQEQSEYLSDNHLATSSVGDSAYQIPVPI

SEQ ID NO: 88213 - protein, 514 aa, Novosphingobium pentaromativorans
  REGION 1..514: note = tr|A0A2W5P461|A0A2W5P461_9SPHN Tryptophan halogenase; OS = Novosphingobium pentaromativorans OX=205844; GN = DI555_01565 PE=4 SV=1
MQGSPIRSILIVGGGTAGWMAANLLATRLRRLPIEITLVESPDIRTVGVGEATVPAIRDYFKAIGVTEAEVMQASQGTVKLGIEFRDWRAPGTRFFHPFGRYGVDAFSVPFHQYWLKRRMAGDQTPLSQYCLPTQAAMRNLMLLPPEQPVNDLGVFDWAIHFDAGLFARFLAQRARDLLGVRHLEGTISGATRDAENGRIASVTLTDGRMLEADLFVDCSGFRSLLLGQTLEVPYEDWTHLLPCDRAVAMPCAHGDALTPYTRSTALAAGWQWRIPLQHRIGNGYVYSSRHISDDEATATLIASLEGEALAEPNMLRFRTGHRTNVWEKNCVALGLAAGFLEPLESTSIVLIQSGIERLLAHFPDRDFDPSLADEFNRITALEYARIRDFLLLHYWGGQRPEKMWQECRALDLPETLARRIRAYKGAGKLPRFEWDSFQSPSWLSMFAGFEIWPSRYDPLADQFTTEELGDTFEQMRAAVARAVSLAGTHEQFIAETCAAPAQNAAPQFTLNSA

SEQ ID NO: 88214 - protein, 515 aa, Novosphingobium taihuense
  REGION 1..515: note = tr|A0A562JYX4|A0A562JYX4_9SPHN 2-polyprenyl-6-methoxyphenol hydroxylase-like FAD-dependent oxidoreductase OS=Novosphingobium taihuense; OX = 260085 GN=IQ25_00445 PE=4 S V=1
MSGSVQQVVIVGGGTAGWLSACLLAARRPELSITLVEAPDIPTIGVGEGTWPTMRETLATIGIAEAEFIAQCDASFKQGSRFDGWVDGGERDSYLHPFTPPPSGDMAGMLAAWQAEAPLQPFASAMTPQAVACAESLAPRQRAMPDYAGALNYGYHLDAGKFAALLKRHATTRLGVTHMAAQVTAVASDASGNIAHLHLHDGSELAGDFFIDCSGLAAVLIGGHCGVPWVDRSDVSFNDSALALQVPVKPGSPIASQTIGTAHEAGWIWDIALPTRRGIGCVFSSRFMDDARAEEVLRAYVAAKVPGADLSSLRPRKLTFSTGHRERFWQGNCLAVGLSAGFIEPLEASAIVTIELSIKALAENFPRRAETMGLLADRFNELFRYRWDRIVEFLKLHYVLSRRPEPYWLAQRDPATIPARLAECLELWRDQPPSAWDFPRMDELFCAASQQYVLYGMGFAAPAGTFDPATLERLAEVRQRSRALAAALPSNRTYLDALRPVAATDPIAMHGAAVK

SEQ ID NO: 88215 - protein, 495 aa, unidentified
  source 1..495: note = Unknown
  REGION 1..495: note = tr|A0A520MID9|A0A520MID9_9GAMM Tryptophan 7-halogenase OS=SAR92 clade bacterium OX=2315479; GN = EVB03_01745 PE=4 SV=1
MAQQKIKKVIIVGGGTAGWMAAASLSKLIGRDLDISLIESDQIGTVGVGEATIPTFFALHQLLKINEAEFLSEVQGTIKLGISFENWKNNGEDYIHAFGYTGQSCWAAGFQHFWLKGKTLGISEEYSCYSPELMAAKANKFGLLKQNALNYAYHIDASLYAKFLRRLAEKNNVTRIEGKIITVNQADDGNIKSVQLESGLTIDGDLFIDCSGFAALLIDKTLGTEYEDWSHWLPCDRAVAVQTKSVSPPIPYTRSIARECGWQWRIPLQSRVGNGLVFSSEHMSEDEATSTLLNNVEGETLTTPRVIKFRTGQRTVQWNKNCVALGLSGGFLEPLESTSIHLIQRGIIRLMQMFPLSGITEADRDEFNRQMSDEYNFIRDFIIMHYHVTERTDTEFWRQCKNMDIPDSLDHRLRLFKDSGRVFQGEGDVFGENSWTQVMLGQGLMPEQYHPIVNMMSDNELERFLKGNRASVDNTLKQLPTHQQFIAQYCPAKPI

SEQ ID NO: 88216 - protein, 496 aa, Shewanella sp.
  REGION 1..496: note = tr|A0A501XY89|A0A501XY89_9GAMM Tryptophan 7-halogenase OS=Shewanella sp. LC6 OX=2589790; GN = FJD32_09095 PE=4 SV=1
MSQIKDIVIVGGGTSGWMTAALLAKLFKHTLSITLVESEDIGTIGVGEATIPPLQLFNSVLGIPENEFIKATHATFKLGIQFEHWGKQGDSYMHAFGNIGKDIGYTQFHQYWLSTQPEMMASFWDYSLNYQAALNNKFQSLEQIPHSPLSCLTHAYHFDAARYALLLRQYSEKSGVKRIEGKIEAVNCLDNGHIANLTLVSGKSVHGDFFIDCSGFAALLIGKTLNVGYESYQDWLLCDSAYAVPSEKACEIKPYTRAIAHEAGWQWRIPLQHRTGNGIVYSSRYMKDEEAKAKLLSTLEGKPLAEPKKISFIPGRRLKQWQHNCVAIGLSSGFLEPLESTSIHLVQSAIIRLTKLFPHQGVVQATVDEFNRQSQLEFEQIRDFIILHYCLNQRSDSDTDTLWSACQQMQIPESLQQKISLFSETGAIFRHKDELFTEAAWVQVMLGQGIIPTDYNPLANTVAPEALTEFLSNIKVIIKNTVSNMPTHEKYLAQLV

SEQ ID NO: 88217 - protein, 507 aa, unidentified
  source 1..507: note = Nocardioides bacterium
  REGION 1..507: note = tr|A0A4S4ZPN6|A0A4S4ZPN6_9ACTN Tryptophan 7-halogenase OS=Nocardioides bacterium OX=1565122; GN = E7Z54_19205 PE=4 SV=1
MLQTDFWTDELVASAGIPIIDVPFVTVGSGIGSFVTTDYLRIAGVPTSQIRVLGTLDRPWQTYEYLTRVSQVPRPERLRSDSASRPDNIWGFPSYGFAEGVRHGRLKVLWQLFSEPIFSDYYTPKAGEVFQQLEREANRIGYNEMHVKGLVRIVRRRYGGGYFTILTPPEGASATKRVAFRSQYVHLAVGYPGLKFLPELQRYRTEHNDYRHIVNAYEAHEHVYERLMQVPSTVIVRGGGIVASRVLQRLMDDRLLHGAQTNIVHLFRTYINGPNDGYGNETDPRPGGGKPRLTMRRRGGDGWAYQGFNYPKSVWGGQLKAQVRKLEGEQRAEIYKRMGGTNTPWRKLWQKQMNQGRREGWYTCVVGSVEDMQPHGDRIVNHVRTAQGTVPIEADFVIDCTGLEADIAEHRLLKDLLEHGGASRNPVGRLNVDRSFELIGTRSGIGVMYASGATTLGGYFPGVDTFLGLQVAAQEIYQDLAKRGFGKRIGPVRSTIQWWKWLAGSAP

SEQ ID NO: 88218 - protein, 514 aa, Caulobacter segnis
  REGION 1..514: note = tr|A0A2W5VDE5|A0A2W5VDE5_9CAUL Tryptophan halogenase; OS = Caulobacter segnis OX=88688 GN=DI526_05425 PE=4 SV=1
MQPLKKILIAGGGSAGWMTAALCARLFQGLYEIVLVESEQIGTIGVGEATIPAIKKFNELLGLDEDDFLRKTQGSFKLGIQFRNWWRRGESYLHGFGVIGQDLGWLRAHQYWLRMRELGQAPPFDNLAINNAMALSDKFMRARGDMSESPIGHIAHAFHFDAGLYAKHLSTYAQARGVKRREGKIVDVALRPDDGFVQSVTLDDGETIEADFFIDCSGFRGLIIEQALKTGYEDWTHWLPCDRAIAVPSERSENFTPYTRSTAHDAGWQWRIPLQHRTGNGHVYCSRFIDDDDAERVLLSNLDGAQRADPLRIRFATGKRRKIWNKNCVAVGLAAGFMEPLESTSLHLIQSSVIRMVRLLPDAGFDQATIDEFNRQTDFEYERVRDFIILHYKATERDDTAFWRHCRDMVVPATLQRKMDLFRANGRVFREDDELFTEESWIQVFLGQGVIPRGYDPLVRVQSDEAIAQYLRNIETVIGKCLAVMPSHAEFVARTCEAPSPAALQAATLLVPTP

SEQ ID NO: 88219 - protein, 516 aa, Caulobacter segnis
  REGION 1..516: note = tr|A0A2W5VCH3|A0A2W5VCH3_9CAUL Tryptophan halogenase; OS = Caulobacter segnis OX=88688 GN=DI526_00085 PE=4 SV=1
MSQATATSAAAASARHGPLDRIVIVGGGAAGWMAAAALSRVLGPRGPAITLIESEDIGIVGVGEATIPPIRAFNALIGLDEATFVRETQGTFKLGIAFVDWTRLGDRYFHPFGVYGHDFGVAPFEAVWRAARRAGQAQPLDAYSVCARAAAQGRFAPLPQSANGPPPMGYAFHFDAALYARLLRAHAEAAGVVRREGKVVDVALRGADGFVEAVTLESGERIAGDLFIDCSGFRSLLLGQALGARFEDWSRWLPNDRALAVPSANVGPPPPFTRSTAREAGWQWRIPLQHRTGNGYVFSSAHVSVDEAHDTLLSGLEGQPLAEPRLLTFQAGCREACWVKNVVALGLASGFLEPLESTSIHLIQAGVARLLEMLPTKAFEPADARRYNRLMAADFENVRDFLVLHFHVTQREDTAYWRDLRAMAPPDSLAERLAIHRATGRIFREADELFTKTSWLAVLEGQQAPVMGEDPLALAVPPEVAATRLARIAELAREAADSMPGHAEFIAARCQARASA

SEQ ID NO: 88220 - protein, 511 aa, Caulobacter segnis
  REGION 1..511: note = tr|A0A2W5V4A0|A0A2W5V4A0_9CAUL Tryptophan halogenase; OS = Caulobacter segnis OX=88688 GN=DI526_11140 PE=4 SV=1
MADNRIRKLVIVGGGTAGWMAAAALRRRFQGGPLEITLVESAEIGTIGVGEATIPTIRGFYQQLGLNDLEVMRATQATCKLGIRFDGWLREGHAFIHPFGLFGQDLRGVPFHHYWRKLAQGGEPTNIQDYSLGASLAAAGKFMAPPRNPSNSLSIFDWALHLDAGLFAQLMRRVAEDNGVRRIDAKIIKVNLRPEDGFVASLDLDTGATVEGDLFIDCSGFRGLLIEEALGTGYESWSDLLLCDRAFAVQSEGVGDPAPYTEVKAHTAGWRWRIPLQHRYGNGYVFSSRHSSDEAALAELKAAVPDRLLHEPRLIRFTPGRRKQAWNRNVIALGLSSGFLEPLESTSIALIETGIEKIKALFPDKDFAPELVDEFNDWSRREMERVRDFIILHYWANQRAKSGGGGTAFWRDCNAVTLPESLRRKVELFRQRGHFVRYRWEMFQPASWMAIYAGFELLPETIDPALDGIDAQALSAPLAEMRKAIAEVVASAPPHAAFLDQYCRPAPVAAQ

SEQ ID NO: 88221 - protein, 515 aa, Pseudoalteromonas sp.
  REGION 1..515: note = tr|A0A0M8KLK9|A0A0M8KLK9_9GAMM Tryptophan halogenase; OS = Pseudoalteromonas sp. SW0106-04 OX=1702169 GN=W04_3133; PE = 4 SV=1
MKDLSRVIVVGGGTSGWLSAAYLASSFKRTGRDIKVSIIESDTIPTIGVGEGTFPTIVNTLYEIGLSEKEFITACDASFKQGALFKNWLYNPSDKPHAYYHPFDPPAKPKGLDLSAYWVSRKHQGTMQQDFAHATSVQSFLCDENLAPKTPETGEYAWLAKYAYHLDAAKLGQLLKKHAMNKLQVEHIVADIEQVELDEQGFIAHLVDKQQRQHDADFFVDCTGFSSLLLAKALNVPFVDKSHYLTVDTAVVLPVEYADAETPITTHTVSTAQDAGWIWDIALQNRRGTGYVYNSHYCSKEQAEKTLCDYHGIAHDSEKRYRHISFKTGYREKSWAKNCCAIGFSSGFVEPLEATAIAMVEAGVRSLAARFPATREAMLEREKQYNRIFTSRWDNIIDFIKLHYCLTKRDDTPFWREQKNPKTIPASLQEKLKAWQHYGITDGDLPYKYDLFTLASWQYILYGLEFLPDYVEKAPINEEIIDKAFASIAAQKRSAASKLLSNRALLEAFSASCKS

SEQ ID NO: 88222 - protein, 445 aa, unidentified
  source 1..445: note = Caballeronia pedi
  REGION 1..445: note = tr|A0A157ZQL7|A0A157ZQL7_9BURK Tryptophan halogenase; OS = Caballeronia pedi OX=1777141 GN=AWB80_01145 PE=4 SV=1
MVKALQMQQDWDVVVIGGGPAGSTAATLLADRGYRVRVLEKARHPRFHIGESLLPANLRLFERLGVADEVRAIGMVKLAAEFVSPQHGDRTQRFLFADAWDKSMPSAYQVRRSELDEILLRNASKHGAHVSEACRARDVVFAPDGSSATIGAEHDDGRIEQVRARFVVDASGRDTLLANHFKTKRRNERHNSSALYGHFRNARRNAGENEGNITVFWFEHGWFWFIPLADGATSIGAVVWPAYLKRRPKGTSVEAYFRDTIALCAPLAERLNDAELISEVHATGNYSYTGDMTHGRNFLLLGDAFAFIDPVFSSGVMLAMQSAFAGAEAIDTALAHPARARAALAKFDRDVRHGPREFSWFIYRMTSPTMRNLFMGPKNPLRMKEALLSLLAGDIFGTTPIWHSLRAFKGIYYIAAALDWRNSLRAYRQRRRNLSDAERAELSAN

SEQ ID NO: 88223 - protein, 516 aa, Caulobacter segnis
  REGION 1..516: note = tr|A0A2W5V8C0|A0A2W5V8C0_9CAUL Tryptophan halogenase; OS = Caulobacter segnis OX=88688 GN=DI526_11145 PE=4 SV=1
MTHTHPNAIRKIVIVGGGSAGWITAAMLSHYFQAGGCAVELVESEEIGTIGVGESTIPPFLRLLASLGIDERDFIQSTQASFKLGIRFEDWKSLGDRYMHPFGVIGGPFGPHEFYQCWLRAKAAGHPSGLHDFAPGAVMAEQGKFMLPFKAERTLIGGANYALHVDARLVARYLRDYAEARGVKRSEGIVSDVVTHTDGSVAKVRIKDGREIEGDLFIDCTGFRSLLIGKTLETPFEDWSDMLLCDRAVVVQTENVGAPHPYTLSKAEAGGWRWRIPLQHRAGNGYVFSSRHISDDEARATLLGGLEGRALMEPMFIPFKTGVRQRLWEKNVVAVGLSGGFIEPLESTALHLIYRGVDFLLRFFPDRDFDPALRAEYNRRMVADYEEIRDFIVLHYCKTQRDDTPFWRAVREAPIPDSLKERMALFERSGVLREGVDDMFRNPSWQSVMEGMGVRPQRYQQLVDTIPYEVISQTLDQSAPMLAAQVAGLPSHGEFLAKHCPAPPPEAAVAPFKTVA

SEQ ID NO: 88224 - protein, 505 aa, Xanthomonas sp.
  REGION 1..505: note = tr|A0A3A5EP08|A0A3A5EP08_9XANT Tryptophan halogenase; OS = Xanthomonas sp. CFBP 7698 OX=2082399; GN = XnspCFBP7698_05395 PE=4 SV=1
MTQAQIRKVVIAGGGTAGWIAACALSHQFRNLLDITLIESEQIGTVGVGESTVPPIRTFHRFLQIDEQEFLREVAGTFKLSISFEHWLRQGERYIHPFGITGQSTLVCAFHHLWLESQRRGMRGSFGDYCLETVASREDRFALPREPAVNYAYHLDAALYARFLRTRSEACGVQRIEGRIQQVTQHPDSGDVASLVLEDGQAIAGDLFIDCSGFRGLLIEQTLHTGYEDWSHWLPCDRAVAVQTEALGPPVPYTRAIAHEAGWRWHIPLQHRVGNGLVFSSRHLSDDEAHAKLLRDVAAPAVKDPWMVPFRTGRRLKAWNKNVVSLGLASGFIEPLESTSIHLTISAVVRLLTLFPAEGIAPSQVQLFNDVSRAEMEHVRDFVTLHYHATRRDEPLWQQCREMELPESLALRLRAWRERAHAWQAADELFRVDSWTHVLMGQGLMPEQHHPLTRAFSDRDLQGLLNGIAQPIRHAVDQFPSQQAFIERYCQARPEVWGARKPAIA

SEQ ID NO: 88225 - protein, 508 aa, Porphyrobacter dokdonensis
  REGION 1..508: note = tr|A0A1A7BD32|A0A1A7BD32_9SPHN Tryptophan halogenase; OS = Porphyrobacter dokdonensis DSW-74 OX=1300349; GN = I603_2361 PE=4 SV=1
MTGEGSVQKLVIVGGGTAGWITAAAFARLLGGRLDIELVESETIGTVGVGEATIPQIIRLNAILGIDENEFLKATSGTFKLGIEFVDWGQKGSRYLHTFGDTGMNLGNVAFHHYWRRSMGAGGNPKGLWNYSLHQRAADEARFGKLDRVGNTAMTGLAYAYHFDASRYALFLRAYAEGRGVTRTEGIVERVERDGESGDITAIVLKGGERVAGDFFIDCTGFRSLLLGGELGVGYQDWSKWLPCDRALAVPSERLETLVPYTRATAKDAGWQWRIPLQHRTGNGHVYSSGFTTDAAAADTLLDGLDTKALGDPRPIRFTTGRREAFWAHNCAAIGLSSGFLEPLESTSIHLIQSHVSRLIQLFPRSANAAAMRAEYNRRCAAEFAQIRDFLILHYHRTDREDTEFWRYCKHMSVPDSLTHKLELFAASGRVGRDTDDLFRDASWVQVMLGQGIMPADYDPMADQIDDAQLTGFLESLRAIIERSVAGLPRHEDYLARHCPAEKLNAAA

SEQ ID NO: 88226 - protein, 505 aa, unidentified
  source 1..505: note = Actinokineospora bangkokensis
  REGION 1..505: note = tr|A0A1Q9LIZ9|A0A1Q9LIZ9_9PSEU Tryptophan halogenase; OS = Actinokineospora bangkokensis OX=1193682 GN=BJP25_24255; PE = 4 SV=1
MTASYLKAAFGDRVEVTLVESGVVGTIGVGEATFSDIRHFFEFLGLEEEEWMPACNATYKLAVRFQDWRAPGHHFYHPFEQMPSVNGLPLADWWLGGHGGSDRFDLDCFVMASVCENERSPRHLDGSMFEREAAKRRKGESYGLTMSEHQGKTQFPYAYHFEAALLADYLAEYAKSRGVRHVVDHVTHVPLDGRGWIAGVRTKEHGTLTGDVYVDCTGFRSLLLGGALEEPFESYQDTLPNNRAVALQVPLDMEQRGIRPCTTATARDAGWIWTIPLFGRIGTGYVYAEDYLEPEEAERTLREFVGPAAANASANHIRMRIGRSRNSWVNNCVAIGLSSGFVEPLESTGIFFIHHAIEQLVKHFPGPDWNPVHRERYNAAVGNVMDGVREFLVLHYQAAARNDTPYWKDAKLREVPDGLAARIEGWQSELPDSESIHPYYHGLPPYSYMCILLGMGGIPLRSSQAVALGDADAARRAFGKVRSTAQSIVRDLPTQYEYFAHMRGA

SEQ ID NO: 88227 - protein, 508 aa, Parvularcula sp.
  REGION 1..508: note = tr|A0A371RFT6|A0A371RFT6_9PROT Tryptophan 7-halogenase OS=Parvularcula sp. SM1705 OX=2292771; GN = DX908_02825 PE=4 SV=1
MDQAATAIKQITIVGGGTAGWMTAAALSRLIRPLGVRITLIESDAIGTVGVGEATLPHIRFFNERLGIDEAEFMKATQATIKLGIEFRNWGRIGDSYIHPFGDFGRNVGGVDFHQFWLRAHQAGKAGRIDDYSLPIVMSEAARFGPPSHDPRSVMSAFSYAYQMDATLYAKYLRGFSEANGVVRQEGRIVDVHRDGESGDISEVELESGDRIGGDLFFDCSGFRGLLIEGALEAGYDDWSDILPCNRAVALPCETIEPPIPYTRATAHQAGWQWRIPLQHRVGNGHVYCSDYISDDEAASVLLENIDGPACGDPRFLKFLTGKRRKQWDRNVVAVGLSAGFLEPLESTSIYLIQAAITNLVELFPHSGIRDADRDEFNTVMDLEYERVRDFLVLHYHATERDDSPFWNYVRTMPIPDSLKYKMDLFRDRGVVVKYKDGLFLDASWIAVYLGQRVVPQNFAPLAGAIPEDRLGPFMDDLRGLIRRTVDALPSHDAYLKQHCPAGPDLMA

SEQ ID NO: 88228 - protein, 510 aa, Undibacterium pigrum
  REGION 1..510: note = tr|A0A318J986|A0A318J986_9BURK Tryptophan halogenase; OS = Undibacterium pigrum OX=401470 GN=DFR42_104342 PE=4 SV=1
MRVKNIAIIGGGTAGWLAANHLAVELRAETDITITVIESPEIGIIGVGEGTVPHIKKSLLKFGIPEAELLATCDTTFKKGIKFVDWMAPSASNPENSYYHPFSSAYPGGADVTSWYLKNSASMEFADVTEAPSLAEAMKSPKRISSAPYEGVVNYAYHFNAVKFGQLLAKNAKEKLGVLHKPATIVNAQLNEHGEVDYLITKEGEQLQYDFFVDCSGFHSLIMGKLFNIPFVDKSSQLLTDTALAVQIPTEANSQIPPYTLAKAHSAGWMWDIPLTNRRGVGFVYSSAHMTEDVAVEHLSRHLQLNTDQFSPRKIPMRMGYREKFWCKNVVALGLAQGFVEPLEATSIFVTDFSAELFARNFSVEKESMSVAADYCNKAVAYTWERVIDFVQLHYCISDRQDSAFWRATTQEVKRSDILQERLDMWAVNSPKKLDIFSRFDLFDVENFLFVLYGMKYKTRAKNMTVYEEDYFRQEIEKVNMYRKKLSGELLDHRLWLDKFATAYQQTSGK

SEQ ID NO: 88229 - protein, 496 aa, Alteromonas sp.
  REGION 1..496: note = tr|A0A136HV16|A0A136HV16_9ALTE Tryptophan halogenase; OS = Alteromonas sp. Nap_26 OX=1795869 GN=AXW14_15495 PE=4; SV = 1
MYDKAVKKVVVVGGGTAGWISAAVIKRLIGTDLTVTLVESEDIGTVGVGEATIPPIITLNNVLGIDEKEFLRETNATMKLAIKFENWRVKGEDYFHTFGAPGKSYAFCHFHHYFKRAQKLGLTDSIWEYDLNYLACKAGKFAHIKSPDPIIEMPFAYHFDASLYARFLRKKCEAMGVTRKEGIIHDVKQDSESGFITGVTLKDGEHIEGDLFIDCSGFKGLLTQQTLNTGYEDWSHWLPCDRAVAMPSERLEKTLPYTRSIAHSAGWQWRIPLQHRNGNGLVYSSNYYTDEQALDILSNNLDTKPLADPNFIRFKTGRRRKQWNKNVIAVGLSSGFLEPLESTSIHLIQSAVVRLIHLFPHEGFKQRQIDEYNKQSKTEYEQIRDFIILHYHVNERTDSHFWKDLREMDVPDSLTHKIELFRESGNLFREQNDLFLESSWLQVLMGQGIVQGDYHPLANALSEQKLQELMQNIKRIKNEPIGKIATHDDFLKQFCG

SEQ ID NO: 88230 - protein, 447 aa, Streptomyces sp.
  REGION 1..447: note = tr|A0A1S2Q9N8|A0A1S2Q9N8_9ACTN Tryptophan halogenase; OS = Streptomyces sp. MUSC 1 OX=1678012 GN=BIV23_24595 PE=4; SV = 1
MAKETADVVVIGAGPAGAVSAYVLAKQGHSVLLLEKELDPRFHIGESLLPYMMGLFERIGLREVVEGQGFVRKFGGEFIDPTEKKFFEGVFRADFTKQGTGRHDNAFQVERRRFDRMLAEQAQAAGAKLVFGANVNELLMEGDRMVGVRYERDGESHEVRSAYVIDASGRAGKIAHRFGLRKTLEKLRMVAVFRHYSGLDESHNLGVEGDIQVGAHDDGWVWAIPLTKDTISVGTVMPRDVLRASTPEEVFEEHVARVPRIVARLTGTRPSMDLKIETDYCYHADTVTGPGWLLVGDAGCFGDPMFSGGVLVATATAVRAAETLGEALADRSAEERLLERYSNYFKTGYDTYIRLIHAYYDGELVAMAADAARSTDRETLEKYLVRLIGGDFWSEHNSVAQEMRRRKEWDTFEPFQRVYGCPSYPHLDEIDRKERSESRVRRVTAGR

SEQ ID NO: 88231 - protein, 504 aa, Rhodanobacter sp.
  REGION 1..504: note = tr|A0A1Q3VHF1|A0A1Q3VHF1_9GAMM Tryptophan halogenase; OS = Rhodanobacter sp. 67-28 OX=1895822 GN=BGO50_03245 PE=4; SV = 1
MTDPRIRNIVIVGGGTAGWMAAAAFAKVLGPDYAIRLIESEEIGTVGVGEATVPHLKLFNNLLEIDEIEFIRQVQGTFKLGIQFNDWGRIGDTYIHGFGTIGHDVSLLPFHQFWIKANQLGIAEDIGAYSLNTVAAPLGKFMPSATDVPAGSPLADIAYAYHFDAGRYARYLRGYAERRGVRRTEGKISQTLLRAHDGFVEAVVLESGERIDGELFIDCSGFRGLLIEQALHTGYLDFTHWLPCDRAVAVACEKVGPPTSYTRSTARDAGWQWRIPLQHRTGNGYAYSSSHVSDDEAAATLLAHLDAPAVGEPRPLRFTTGVRKKFWNRNVVALGLSSGFLEPLESTSIYMIQSGIARLLNLFPQRDFSEVVINRYNAQAVFEYERIRDFLILHYHATRRDDTPFWRQCRTMSIPDQLRENIALFRDSGRFFRNAEEMFALVSWVQVMIGQGIIPRGYHPLVDQMPERDLRKFIAGVGQVVASCVDSMPMQQAFIDRYCTAGAA

SEQ ID NO: 88232 - protein, 390 aa, Corallococcus sp.
  REGION 1..390: note = tr|A0A3A8UI74|A0A3A8UI74_9DELT Tryptophan halogenase; OS = Corallococcus sp. AB030 OX=2316716 GN=D7Y15_07460 PE=4; SV = 1
MSEDSCDVAVIGGGPAGAAMAVALRRKAPSLSVTLVERTTYDAPRLGETLPPDVRLSLSRLGVWESFLRDGHLASRGTASCWGRAEPGFNDTMMSPWGSAWHLDRTRFDERLSVEAARQGARVLRATTLVDSESLGRNGYRLRLSHGAADPSTLRARFVVDATGGKATFASARGARRLVSDRCFAVYGSFQLQGGAVFPTHALVESCPEGWWYSALLPRGRVVVALVGDGDSLRGLRWATPEPWMNLLKQAPVTWARLDACDFVGEALIAVPVLVGQLDRPRGEQWLAVGDAACTYDPLSSQGITKALGSALLAADALERCLSGDADALQDYESMLNARFQDHQRTRGVYYRQEQRWPQAPFWMNRWEALPAPAASPAQSRRSHSTEVNP

SEQ ID NO: 88233 - protein, 533 aa, Streptomyces sp.; identical to SEQ ID NO: 82569
  REGION 1..533: note = tr|A0A0F0H0D7|A0A0F0H0D7_9ACTN Tryptophan halogenase; OS = Streptomyces sp. NRRL F-4428 OX=1609137 GN=UK14_16280; PE = 4 SV=1

SEQ ID NO: 88234 - protein, 538 aa, Pseudomonas chlororaphis
  REGION 1..538: note = tr|J2FAV3|J2FAV3_9PSED Tryptophan halogenase PrnA; OS = Pseudomonas chlororaphis subsp. aureofaciens 30-84; OX = 1038921 GN=prnA PE=4 SV=1
MNKPIKNIVIVGGGTAGWMAASYLVRALQQQANITLIESEAIPRIGVGEATIPSLQKVFFDFLGIPEREWMPQVNGAFKAAIKFVNWRKSPGSSRDDHFYHLFGNVPNCDGVPLTHYWLRKREQGFQQPMEYACYPQAGALDGKLAPCLPDGTRQMSHAWHFDAHLVADFLKRWAVERGVKRVVDEVVDVHLNERGYISSLFTKEGRTLEADLFIDCSGMRGLLINQALKEPFIDMSDYLLCDSAVASAVPNDDAREGVEPYTSAIAMNSGWTWKIPMLGRFGSGYVFSSKFTSRDQATADFLNLWGLSDNQPLNQIKFRVGRNKRAWVNNCVSIGLSSCFLEPLESTGIYFIYAALYQLVKHFPDTSFDPRLSDAFNAEIVYMFDDCRDFVQAHYFTASREDTPFWLANRHDLRLSDAIKEKVQRYKAGLPLTTTSFDDSTYYETFDYEFKNFWLNGNYYCIFAGLGMLPDRSLPLLQHRPESIEKAEAMFASIRRETERLRTSLPTNYDYLRSLRDGDAGLSPSQRGPTLATQETL

SEQ ID NO: 88235 - protein, 519 aa, Altererythrobacter sp.
  REGION 1..519: note = tr|A0A411ZDU9|A0A411ZDU9_9SPHN Tryptophan 7-halogenase OS=Altererythrobacter sp. BPTF-M16 OX=2169535; GN = BPTFM16_01538 PE=4 SV=1
MRVAADKLRARIPRVTETYSPLKKIVIVGGGSAGWMTAAALADTLGSQCEITLVESEMIGTVGVGEATIPPIRHFNQRLGIDEATFIKETSGSYKLGIQFVDWTRLGHSYFHPFGQYGAEFDKVPFYHFWMREYLAGRVDGPIDDFSMCWAMAKAGKFSRPVPDRRQIQSTFDYAYHFDATLYAAYLRRYAEARGAKRVEGRVTDVALRGEDGFIESMVLESGATLEAEFFIDCSGFRGILIEDALKAGYDNWQHWLPCDRAVAVPCAKGDEIAPYTRSTAKSAGWQWRIPLQHRTGNGYVHCSEYITEVEATEELMSSLDGKALADPRTLRFVTGKRRKFWDKNCVAIGLSAGFMEPLESTSLHLIQYGILRLLALFPDAQMSPLLAREYNEQTTAEYERIRDFLILHYKATERGDAELWRYCAAMDIPESLQYKMDHFRSHGMIVSDERELFKNPSWIAVYLGQGVVPDRAPAMANMRQHVPVKERLSAISQAMESAVDAMPSHGEFLAQHCASPHA

SEQ ID NO: 88236 - protein, 512 aa, unidentified
  source 1..512: note = Thalassotalea sp.
  REGION 1..512: note = tr|A0A4P7JTA7|A0A4P7JTA7_9GAMM Tryptophan 7-halogenase OS=Thalassotalea sp. HSM 43 OX=2552945; GN = E2K93_13975 PE=4 SV=1
MNESVQSITIVGGGSSGWMTALYLNQLYNHKQQRVAIRVIESKDIGILGVGEATVHSIRFFFAAMGIDENELIQATNATLKTGIMFRNWMKPKQGNSHEYFHPFEHQALGSITDISSAWILSSRQLFERYDQGVSVSAHLMKNNLTPKMAQSKPYQGVVPYGYHLDATMMARFLRDKAKQRGVEHVEATVTDVITVGNNIERVITEQGEFSADLFIDCSGFKGLLIERLKDNNWQSFKKELPCTKAVAMQLKFADKQIPRSYTTATALTNGWVWEIDLNNRRGTGYVYDGDRISAEQAEQELKQFLQQSGDIEVVKTLHLDMKVGCRKEFWVGNCISIGLSGGFIEPLESTGLHIINIGAKLLATHLNEKHTQQSTRDSYNRLMNGVYDDLKRFIVLHYCLTDRDDSEFWRYAQTTAQYSDDLQRQLQIWRHKTCEFMDLSGGFATTFTDENYRFILYGMDYLPQLHMPFDEQECQQMFARLQMMATRAQSVVYSNYDWLQMMHGERTVSAN

SEQ ID NO: 88237 - protein, 497 aa, Parvularcula sp.
  REGION 1..497: note = tr|A0A371RHK2|A0A371RHK2_9PROT Tryptophan 7-halogenase OS=Parvularcula sp. SM1705 OX=2292771; GN = DX908_06290 PE=4 SV=1
MSGAIRKIVIAGGGTAGWMTAAAIGKVLGANLDITLIESDQIGTVGVGEATIPTLLTYNRLLGIDEAKFMSAVGGTFKLGIAFENWTDVDHRYIHSFGITGKDHWTAGFQQFWRKGRELGVAKEFGDYCLELVAAEKRRFAHLPKLGLNYAYHLDSSAYAQFLRKMAEDNGVVRREGKIGEVRKNEAGDISSLILDDGTVIEGDFFVDCTGFRALLIGEALGVGYEDWTHWLPCDRAIAVQTKSVGPPLPYTRSIAHSAGWRWQIPLQHRTGNGIVFSSQYMDEEEGRAFLLSQIEGEVLAEPRVIPFRTGTRSAHWERNCVAIGLSSGFIEPLESTSIHLIQRSVMRMLQMFPQGSVANADIDEFNKQTFFELEHIRDFIILHYHLTKREDTPFWRYCRGMDIPDTLRHRMQLFRETGRTFRANDELFAENSWTQVMLGQGIMPKSHHPVADVMSEGEVRNFLSHIDENVRRTVETLPSHEDYLKSYCPSSQSIPD

SEQ ID NO: 88238 - protein, 503 aa, Massilia aurea
  REGION 1..503: note = tr|A0A422QLP5|A0A422QLP5_9BURK Tryptophan halogenase; OS = Massilia aurea OX=373040 GN=NM04_10170 PE=4 SV=1
MEHQAIKDIVIVGGGTAGWMTAAALSSMLNGRYNIRLVESDEIGIVGVGEATIPMIQRFNRVVGIDEAQFMRETMGTFKLGVEFVNWGKLGERYMHGFGRMGQDLATVPFEQYWHKMRALGKAAPLEEYSITRMAAKAGKFMPARTDVPNSPLGDIAYAYHFDASLYAKYLRALCEARGVTRIEGKISRAIQREPDGFIEAVELEGGQRIEGELFVDCSGFRGLLIEQTLETGYEDWNHWLPADRALAVPCESVPAMTPFTRATAHKSGWQWRIPLQHRTGNGHVYCSRFISDDEATATLLSNLDGRALAEPRMIKFRTGMRKQAWNRNVVAIGLAGGFLEPIESTSIHLIQSAIARLVEFFPDRRFSETDRIEFNRQSRFEYERVRDFIILHYHLNQRTDSAYWTECANMAIPETLRQKMDLYRSRGKIVRVDNELFSEVGWLQVFEGQNMPIDGYHPLADTQSEADIADYMGSVRDVIRKCVDVMPSHEEYIAKHCAARKS

SEQ ID NO: 88239 - protein, 515 aa, Sphingomonas sp.
  REGION 1..515: note = tr|A0A1P8PV72|A0A1P8PV72_9SPHN Tryptophan halogenase; OS = Sphingomonas sp. LK11 OX=1390395 GN=AV944_11935 PE=4; SV = 1
MVQPVQNIVIVGGGTAGWLTAGVIAARHQGRRPHGFTVTLVESPNVPIIGVGEGTWPTLRTTLRKMGVSETAFFRECDASFKQGARFNRWTTGADDDGYYHPLMLPQSFAQVNLAPHWLTADGEQVSFCDAVTPQGRICDAGLAPKTIATPEYEAIANYAYHLDAGKFADFLRRHCCEQLGVRHVLADVEEVLLTESGDIRAVRMAQAGEVTGDLFVDCTGFRSLLLGEAMGVPFKPLNDVLFCDTALAIQVPYDDPEAPIASHTISTAQSSGWIWDIGLPTRRGVGHVFSSSHIDRDGAERELRAYLGEAGRDLPVRELKIRAGHRTRFWERNCVGVGLAAGFLEPLEASAIVLIELSAKLIAEQMPACREVMDTVAKRFNDTTLYRWGRIVDFLKLHYSLTQRTDSDFWRDNCRPETMPDRLQELMELWRYQAPWMHDEFDRVEEVFPSASYQYVLYGMGQSTDIAPGSLIAETIVAQRARRENDVQTGRLLAGLPKHRDLIRKIVEQGLPTI

SEQ ID NO: 88240 - protein, 508 aa, Sphingomonas sp.
  REGION 1..508: note = tr|A0A1P8PVP6|A0A1P8PVP6_9SPHN Tryptophan halogenase; OS = Sphingomonas sp. LK11 OX=1390395 GN=AV944_13075 PE=4; SV = 1
MDAAPSADHIAQRVVIVGGGTAGWMAAAALARFAPASTRITLIESDAIGTVGVGEATIPGIRLFNQMLGLDEAEFLRATNGSFKLGIRFEGWSGEGSGYLHAFGSIGRGLGLVPFHHYWLRGGGAANPASLWGHMPGAQAAMAGRFAPDPGRPDLPSGLAWAYHFDASLYAALLRCHAEGAGVVRVEGRIASVARDAGGRIDHVVLDGGQVHTGDLFIDCTGFRALLIGETLAEPFDDWSELLPCDRALAVAGERTSPLPPYTRAIAHGAGWRWRIPLQHRTGNGLVYDSRHLSEDEAADRLLTALNGKAMGEPRCLRFSTGRRRRAWVGNCVALGLAAGFLEPLESTSIHLIQSGIARLLDYWPGTIPPAVEIDAYNRETAAEWLAIRDFLILHYHANARPEPFWTERRAVPLPDSLAARIALFRANGRFRREGEELFAEPAWVQVMIGQGIIPAGHHALADALSADELDDFLGLTRRHAAQVAARLPTHDAFLAAHCAAPVPKVFA

SEQ ID NO: 88241 - protein, 167 aa, unidentified
  source 1..167: note = Caulobacteraceae bacterium
  REGION 1..167: note = tr|A0A4Q3TF05|A0A4Q3TF05_9CAUL Tryptophan halogenase (Fragment) OS=Caulobacteraceae bacterium OX=1978230; GN = EON96_17075 PE=4 SV=1
AGFLEPLESTSIHMIQTAITRLLALFPDRSFDPTLVDEYNRLSRREAERIRDFVILHYHQTTRDDAPLWRQVRTMEVPETLRRKLELFRSRGRYFREDDDLFVEANWLAVMLGQGVVPRTIDPVADALDVERTAARMAKFRDAVAHAAAEMPTQQAFIDRNCKAPSV

SEQ ID NO: 88242 - protein, 415 aa, Pseudomonas chlororaphis
  REGION 1..415: note = tr|J2Y1K7|J2Y1K7_9PSED Putative tryptophan halogenase OS=Pseudomonas chlororaphis subsp. aureofaciens 30-84 OX=1038921 GN=Pchl3084_0467 PE=4 SV=1
MPTVEMERRQIVVIGAGPSGAIAAALLKGKGHDVLIVERQHFPRFSIGESLLSHCLDFVEEAGMLEAVKAAGFQLKNGAAFAWGERYSAFDFGDTFSEGKPTTFQVQRADFDKLLADQAALQGVEVRYGEAIVSADFNLARPQLQVLREDGSEYRVEADFVLDASGYGRVLPRLLDLEAPSNFPVRQAVFTHVEDRIDSPAFEREKILITTHPSKRDVWFWTIPFSNGRCSVGVVAAKEHFDGRGDDLDQCLRGFIEETPSLAKVLHNAVWDTPARAIGGYSANVKTLHGPGFALLGNAAEFLDPVFSSGVTIAMRSASMAAAVLHRQLQGESVDWESEFAIPLKRGVDTFRCYVEGWYAGTFQDVIYHPGSSPEIRRMISSILAGYAWDERNPFVSEPKRRLRMLSEICAMEAP

SEQ ID NO: 88243 - protein, 520 aa, Acinetobacter sp.
  REGION 1..520: note = tr|A0A143G2T7|A0A143G2T7_9GAMM Tryptophan halogenase; OS = Acinetobacter sp. TGL-Y2 OX=1407071 GN=AMD27_06210 PE=4; SV = 1
MSSQLIKNVLIVGGGSAGWMTASYLAKAFGNKVNISLVESPEIPKIGVGEATIPNLQKVFFDFLGLKEEDWMPECNASFKAAIKFVNWNDPNDKNDYFYHMFGQVKNIEDIPLTHYWNYFRENKTTNLPMAYDCYDKAKLLDAKLSPKTLNHESVMSHAWHFDAHLVAKFLKKLSISWGVKHFEDEVKNVNLDANGYVKSVTTTKNGDLEADLFIDCSGFKGLIINKALNEPFLNMSDQLFCNSAVAASIKHDDEENGIEPYTSAIAMKNGWTWKIPMLGRFGSGYVYSDNFTTKDQATDEFLKLWNVKEDNISLNHIKFRTGRNKRAWVKNCVAIGLSSCFLEPLESTGLYFIYVAIYQLVKHFPTKEMDEKLINSFNDKIEVMFDDSRDFLQTHYFTTSRIDTDFWKANKHDLKLSDSLKAKLDMYKAGLVVCPPITTNEKDYYGNFDIEFSNFWTNSNYYCMFTGFKWYPDSVYPKVLYDEKFEQAQQYMKDLKERENMLLQSLPTTYEYLKFIHHK

SEQ ID NO: 88244 - protein, 510 aa, Pacificibacter maritimus
  REGION 1..510: note = tr|A0A3N4UMW0|A0A3N4UMW0_9RHOB Tryptophan halogenase; OS = Pacificibacter maritimus OX=762213 GN=EDD53_0475 PE=4; SV = 1
MDKNAKHIAIVGGGTAGWLAALVLKRAAEKAGQTIRFSVIEAPDIPTVGVGEGSTSVFRQVLLDLGIDESEFLRETGATFKFGIHHKGWRAGGKHFFGPIDDPNALGPVPAGLPANWLHHARIASGKSLADAHLFTALMRARKSPFARSATGDPIALSPFHHAYHFDQARLGAFLARKAKNIDHIRAQVAGLKRASSTGNITDLIMTDGAALPVDFVIDCTGFRRAIIGELQAGWTSYGKFLPLNRAMPFWMEHDPNKDIAPYTTAQAVDAGWIWAIPVQDRMGCGYVFSDAHITPDAAQAEIETKLGKPIEPRGVLSIEPGRLNHAWVNNCVAIGLAQSFLEPLEATSIHGSLVQTLILTRLSFDTLLGPKAAQARIKYNMTVARQVNDFAQFINLHYAGGRTDTAFWTDMTHSGLTGQTQAQLRHWQAHPVTRADFQPFAGNLPHVEEQLYAPVLAGLGKLPAACAKQVFANHPRLKAQARKTLMQLDREFKSAALRALGHRAYLTQL

SEQ ID NO: 88245 - protein, 501 aa, unidentified
  source 1..501: note = Thalassotalea sp.
  REGION 1..501: note = tr|A0A4P7JMX5|A0A4P7JMX5_9GAMM Tryptophan 7-halogenase OS=Thalassotalea sp. HSM 43 OX=2552945; GN = E2K93_07985 PE=4 SV=1
MSNDKAFDIVIVGGGTAGWMTATLMAKKWQHLPVRITLVESPDVNIIGVGEGSTPTLKRFFEIIGVAESEWMAKCNATYKVNIRFADWSPASGIDSYCHPFPAQVDSFSSRAFLVNGRTRRLGLDVETQPEKFLLNGLLAEQGKGPLTPDNFPFKIEYGYHFDSSLLGQYLRSVAESLGVRYQQCHIDQVQQQPNGNISRLCTKQGETIDGDFFVDCTGFASLLMQKTLGVKFKSFKDNLFNDSAVVMPTPITEQIPSETLSTALSAGWCWKIPLTNRFGNGYVFSSDFINQDQAETEFRRHIGMLDSEQECHHLKMRVGQVEKHWHKNVLAIGLSQGFIEPLEATALHLVQIAVEMFIIDMEKGQFTNQQQDSYNQKVSERFERVRDYIVAHYKLNTRNDSDYWRANRDNNHLSDSLLGVLKTWYNREDLAAEIERQNISPHFDSMSWNCLLAGYGAFPKLAPNQPGQGDLYHEKNIQSFVQGCALNFQSHQHNLKSISK

SEQ ID NO: 88246 - protein, 488 aa, Streptomyces sp.
  REGION 1..488: note = tr|A0A2V1NY33|A0A2V1NY33_9ACTN Tryptophan halogenase; OS = Streptomyces sp. V2 OX=1424099 GN=DF268_07215 PE=4 SV=1
MGTTTPSGLFNDIDVVVIGGGPAGSTFASLVAKRGHRVALLEKETFPRYQIGESLLPSTVHGICRITGVADDVARAGFVRKRGGTLKWGASPEPWTLAFADSPIMGEAAGYSYQVERMKFDQILLDGAARNGAQVHHRCTVTGVVEDDTRVTGVRFLDENRVEHTVRARYVVDASGNTSRTHRHVGGTRTYSDFFRNLALFGYFEGGKRLPEPNSGNVFTVAFTNGWFWYIPLSDTLTSVGAVVRPELAPRIQENRQEALTGFVQECPTIRDYLAHAHRVTTGPYGQIRVRKDYSYWNTKFWRPGMVLIGDAACFVDPVLSSGVHLAGYSGLLAARSVNSVLENSVTEEEAFTEFEQRYRHEYGIFYEFLSVFYNSHAERDSYYWSAKQITNSASGEFEAFINLAAGMGSPQAAETVTDRLRHHSSEVVEALARLEPDSPRNAALLGRTTVASRTAPVEEELLHGTERTDFAGALRASPDGLSWIRQD

SEQ ID NO: 88247 - protein, 504 aa, Alteromonas sp.
  REGION 1..504: note = tr|A0A136I1U5|A0A136I1U5_9ALTE Tryptophan halogenase; OS = Alteromonas sp. Nap_26 OX=1795869 GN=AXW14_07800 PE=4; SV = 1
MHNPLTTPIKRVVIAGGGTAGWLAAALMKKVLNSAVEITLVESEAIGTVGVGEATIPPIRLVNQVLGIDEAQFLHDTKATIKLAIRFENWKTKGQSYYHTFGAPGKSMAFCHFHHYWLKGKSLGHTADLWEYDFNYHAAEAGKFAQINAKDPVLELPFAYHFDATLYAKYLRKLSENMGVSRIEGKIAHVERYQDSGYIKSLRLDNGQEIEGDLFVDCTGFKGLLIGEALGAGYDDWSHLLPCDSAIAVPSERHEKTAPFTRSIAHDAGWQWRIPLQHRNGNGHVYCSRYISDQQAQDTLMENLDTKPLGDPKLIKFTTGRRRKQWYKNVVAVGLSSGFLEPLESTSIHLIQSAIVRLIQLFPHNGFTPSLQAEYNKQSELEFEQIRDFLVLHYQVNERSDSAFFNDMRNIELPDSLKHKIELFRENGNLFREQNDLFLESSWLQVMYGQGITPNDYHGLVNSVPNDQLNTMLTKLREIKKEPVSKLPTHDEYINGMIARVSNR

SEQ ID NO: 88248 - protein, 532 aa, Caulobacter sp.
  REGION 1..532: note = tr|B0T4D4|B0T4D4_CAUSK Tryptophan halogenase; OS = Caulobacter sp. (strain K31) OX=366602 GN=Caul_0297; PE = 4 SV=1
MSDEPTIDRILIVGGGTAGWMTAAYLARRLGAMRPDGVQITLIESSEIGIIGVGEGTFPTIQNTMRTIGVDEARFMREAGAAFKQGIKFVDWKTAPKDGVHSHYYHPFAPPRLLNGGMDLAPYWLMGEAGNIPFSDAVTLQDKVCDAMRGPKRRDDPQYGGPMAYAYHFDAGKLANLLRDVGKATGVKHLLGNVQAVNKTEDGSIASVTIREHGDLTADLYIDCTGFAGALIGEAMGSAWIDKNDVLFVDRALALQVPYDRPDAPVASTTLSTAHEAGWTWDIGLPDRRGTGYVYSSRHTTDDRAEQILLGYVGKAGEGLNPRLLKLKVGHRAQHWVKNCVAVGLSGGFLEPLESTGIVLIEAAAYMLARNLPRRGGMAAAARQFNTAMTDRYLRAIDFIKLHYCLSQRADNSFWTDNADPASIPQTLQDHLAMWKHRPPNVFDFPNLHESFKSFNYQYILYGMGYETKVDPAAHVHGDLARADFARVREAGVRAAASLPDHRALLTEVYAHGFKTKTPDAASAEAAEGLRR

SEQ ID NO: 88249 - protein, 501 aa, Mitsuaria sp.
  REGION 1..501: note = tr|A0A1I6JNM6|A0A1I6JNM6_9BURK Tryptophan halogenase; OS = Mitsuaria sp. PDC51 OX=1881035 GN=SAMN05428960_2065; PE = 4 SV=1
MVQRIVIVGGGAAGWMTAAALASSRQGRWSVTLVESEEIGIIGVGEATFPSIRAFNERIGIDEAEFLHATHGSYKLGIEFRDWHSIGDRYFHTFGNFGSLLGPYMLWGQYRRAADASLGELGEQCLPTAMAMQGRFVVPDEDGGAPYKYAYHFDAMLYAAFLREWSMRRGARRIEGRIVEVLRREDGDVERLRLADGREVEGDLFIDCSGFASLLLGRALKEPFVDFSHWLPVDGAWACPCERVGEALTPYTRATALEGGWAWRIPLQSRTGHGHVFSSRYIDPDAARAQLMAQLDGKPLAEPRLLRFSTGHRERFWVRNVVALGLSSGFLEPLESTSIFLIQTNLAHLMTLLEAKAPIDEAAIDAFNARGTREFRRIRDFILLHYCLTARRDSALWRDMATMELPDTLAYKIELWRHHGVLHQQQDEGFDETSWLAIHAGMRHWPQRTDPVLEELPLDHARDILRQRREAIARAVAPLPPHHAYLARLMNLAQGAGRSPR

SEQ ID NO: 88250 - protein, 508 aa, Porphyrobacter sp.
  REGION 1..508: note = tr|A0A3M9YYZ7|A0A3M9YYZ7_9SPHN Tryptophan 7-halogenase OS=Porphyrobacter sp. IPPAS B-1204 OX=2483793; GN = EDM03_04660 PE=4 SV=1
MMSDSPQPVRVVVLGGGTAGWMTAAGIAKLLPGLASVQLVESEEIGIVGVGEATLPHIRGFVEKLGIDEAAFMKATHATFKLGIDFRDFGRIGESYIHPFGSFGEEVAGVGFHHYWLELARHGKARDLGDYSLAVAAAKANRFRPPTQDDSLGSTYGYAYQFDATLFGPFMRKFGLGLGIERYEGRVVTVERDGASGDVTALILADGRRVAGDLFIDCSGFRSILLGQELGVAWEDWTHWLPCDRAAAMPCTHATDDLRPYTTATAMPAGWRWQIPLQHRMGNGYVFSSAHISEDEACEAIRASAEGTPLADPRILKFRPGRRTQSWCHNVIGVGLASGFLEPLESTSIYLAQMAITYLIELFPAAAGQIDARDRAEFNRLVDMEYDRVRDFLILHYNATTRDDSEFWNHVRTMKVPDSLADKLELWRRAGRIEKYSDGLFYDASWIAVYVGQGMLPEAHDPRAAMIAPDALARATERLRMAVTGEVAAMPGHRDYLRAEAARLAEAA

SEQ ID NO: 88251 - protein, 375 aa, unidentified
  source 1..375: note = Caulobacteraceae bacterium
  REGION 1..375: note = tr|A0A4Q3T9W9|A0A4Q3T9W9_9CAUL Tryptophan 7-halogenase (Fragment) OS=Caulobacteraceae bacterium; OX = 1978230 GN=EON96_19105 PE=4 SV=1
FHPFGTIGAPVDLADFYQLWLKAKLNGYKGALQDFAPAAVMAREGRFILPFKAARTPIGGASYALHVDAKRVAGFLRTFAEARGVTRTEGVVDDVVLRTDGFVEALVLRDGRRVEADLFIDCSGFRSLLIGKAMKVGYHDWSHWLLCDRAIAVQTENVGSPAPYTVAQAQDFGWRWRIPLQHRTGNGYVFCSRYLSDDEATASLMSQVEGAPVRPPMVVPFKTGVRERLWDKNVVALGLAGGFIEPLESTAIHLIYRGMDFLFRLLPDRDCDAALATEYNRRMIADYEEIRDFIILHYCLTQRDDTSFWRACRDMELPPGLQRKLDLFRVNGSLAEGLDELFRAVSWQSVMEGMGVRPRAYHPLVDRIPFAGVTD

SEQ ID NO: 88252 - protein, 518 aa, Parvularcula sp.
  REGION 1..518: note = tr|A0A371RHK9|A0A371RHK9_9PROT Tryptophan 7-halogenase OS=Parvularcula sp. SM1705 OX=2292771; GN = DX908_06305 PE=4 SV=1
MTGAIREIVIVGGGTAGWLTAGILAADHRAASSDGLRVTLIESPDIPTLGVGEGTWPSLRDTLRRIGISETDFLRHCDASFKQGSRFDGWVNGKTDDIYYHPFDAPPPTDDIDPLALASAAPAGTPFAEAVSTQAILCQMGRAPKQAMTPEYAAVANYAYHLDAPAFAAMLREHCQTRLGVTLIIDTVDGIERDETGNISSLQAREHGNITGDLFVDCTGGRALLIGEAMRAELTDVSDLLFNDRALAIQIPNGESNSQIASQTTATAMPSGWVWDIALQSRRGIGHVFSSSHQDEETARNQLSDYIARTAPWSDLNGGDARLIKFRSAYRKTPWVGNVVAIGMSQGFVEPLEASAIVMIELSATMLSDTLPPRRELLEGSARRFNDRFSYRWERIVEFLKLHYVLSERPEPYWAAHRDPANSTGRLNDLLDRWRFEVPSREDFPQAQEIFPATSFIYILYGMGKYPADRPLRRRKDDKERAERFFAEIVTKTRKFAEGLPSNRELLDHLKSHGFPRI

SEQ ID NO: 88253 - protein, 517 aa, Duganella sp.
  REGION 1..517: note = tr|A0A1H7NHH1|A0A1H7NHH1_9BURK Tryptophan halogenase; OS = Duganella sp. CF402 OX=1855289 GN=SAMN05216319_1320; PE = 4 SV=1
MNNETHGGGIRRIVIVGGGTAGWMTAAPLAQRLARHPTQPCEITLIESPEIGTIGVGEATLPTIRVYNKALGLDGADFVAKTQASFKLGIEFKDWGHLGNRFFHQFGDFGPPLAGISAHHHWLRLAKEFNQMPEIENWSLASVMARENKFVPPNEDTPGMTDAYSYGFHFDASLYAHYLRDYAVARGVNRIEGMIVDVEQHPENGFVRAVKLRDGRRVEGDLFVDCSGFRGLLIEGALKAGYEDWSNYLPCNSALAVPCASAPQLTPFTRSTAQEAGWTWRIPLQHRTGNGYVYSNNFTSDARARDVLLGALDGEALDEPRQIRFVTGRRRKSWDKNVVAIGLSAGFVEPLESTSINLIETAVGKLLELFPDRDCSPHLADEFNRFMGIRYESVRDFIVLHYKLTRRDDTEFWRHCAHMAIPDSLQHQIELFRATGRVAILDRAGFAEPSFVAMMMGLGVTPKRYDPLADRVDIRAVHGHFAELRDMIAKAAARMPDHGVFVANQAAAAKAASRAAA

SEQ ID NO: 88254 - protein, 496 aa, unidentified
  source 1..496: note = Thalassotalea sp.
  REGION 1..496: note = tr|A0A4V1BRY9|A0A4V1BRY9_9GAMM Tryptophan 7-halogenase OS=Thalassotalea sp. HSM 43 OX=2552945; GN = E2K93_07980 PE=4 SV=1
MNKAINKVVILGGGTAGWISASLLQKLIGPQLQVELIESNEIGTVGVGEATIPPIQNLNQVLGLNEAEFLRETKATIKLAIKFENWKEQGHSYYHTFGAAGKSLAFCHFHHLLKRAGQLNDDSHLWQYDLNALCAEQGKFAHIKAKDPILDLPYAYHFDAGLYAQYLRKVSEKMGVKRTEGTVVDVKQCQQSGYIEELTLKDGRKVQGDLFIDCSGFAALLIEQKLSTGYEDWSHWLRCDRAVAVASERFEHTLPYTRSIAHKGGWQWRIPLQHRNGNGLVFQSNQYSEQEAIDLLMNNLDSKPLTDPKVLKFKTGRRYQQWNKNVIAVGLSSGFLEPLESTSIHLIQSAIVRLVHLFPHAGIADTDVSEYNKQSKLEFEQIRDFIILHYHVNERNDSLFWKDMRNMQVPESLTHKIELFRQTGRLFREQNDLFHDSSWLQVMLGQGIIPQDYHPIANTLSDEMLKTNLQRIKAIKNEPIAQLPSHDQFLKNYCGM

SEQ ID NO: 88255 - protein, 78 aa, Tenacibaculum sp.
  REGION 1..78: note = tr|A0A2G1BPG7|A0A2G1BPG7_9FLAO Tryptophan halogenase (Fragment) OS=Tenacibaculum sp. 4G03 OX=2045443; GN = CSC81_17690 PE=4 SV=1
LFKATGKIIREDDELFAQIAWQQVMIGQGLEANDYSALASALSDDQLSELFSSFKTLINGTVEQLPSHSDFLLRMKNN

SEQ ID NO: 88256 - protein, 523 aa, Duganella sp.
  REGION 1..523: note = tr|A0A1H8BE02|A0A1H8BE02_9BURK Tryptophan halogenase; OS = Duganella sp. CF402 OX=1855289 GN=SAMN05216319_4790; PE = 4 SV=1
MSELRHIVIVGGGSAGWLTAGVIAAEHAAHPGARVRVTLLESPDVAPIGVGEGTWPSMRDTLARIGVSESDFFRECDAAFKQGSRFNRWVTGGDDDFYFHPFVVPQGYGEANLAARWRQTRPDVAFADLASFQPQLCLHGRAPKQAATPEYAAVSNYGYHLDAGKFGVFLRRHCIERLQVRHIVDHVAGVQSHDHGDIAALQTRHHGAIAADLFIDCSGAQSLLLGQHYGVPLRSQRHILFNDSALALQLPYPDEHSPIASQTNSTAQAAGWIWDIGLPTRRGIGYVYSSAHTSDEQAEKALQAYVRQTSGAQEAPMPRKLSFQPGYREHFWHRNCVAIGQSAGFIEPLEASALAMVELGAATLADVLPDNRAGMEIAAQRYNDAFRYRWERVIDFLKLHYLLSKRDDSAYWRDNRQASSVPPRLQELLALWRYQPPSHYDLPRIEEVFPAASYQYILYGMGFATDYGDARRRSDLPQLADAYFAEAQTLTRKMLAGLPTNRELINHIKRHGLPRPGHPIHDQ

SEQ ID NO: 88257 - protein, 506 aa, Altererythrobacter sp.
  REGION 1..506: note = tr|A0A411ZG04|A0A411ZG04_9SPHN Tryptophan 7-halogenase OS=Altererythrobacter sp. BPTF-M16 OX=2169535; GN = BPTFM16_02272 PE=4 SV=1
MGYGRPIDRIVIVGGGTAGWMAAAVLSRLKKGRDLQITLVESEAIGTVGVGEATIPPFVEFNQMLEIDERELLSKVQGSFKLGIQFENWGEVGDSYIHPFGAYGYHMGGISFHQVWRRMREAGEKRPIQAFNLETMAAYFGKFARTQDFAQDDLPPMNYAYHLDAGRYAAFLREYAEQRGVVRQEGRIEDVTLDQESGFVTSVTLDNGTAISGDLFIDCSGFRGLLIEQAMETGYEEWTHWLPCNRAVALPSNRDDGSPPPPFTKATAHSAGWQWQVPLQHRNGNGHVFCDAYMTADEAHDILVNNIAGKPTAEPNHLRFVTGHRKKFWNKNVVALGLSAGFMEPLESTSIHLINTGVNKLVALLSLEGISPTQVEAFNRLTLKEYTRIRDFLILHYNATERTDSEFWNYCRTMSVPDTLTEKVELFKMNGQIFREEDELFTETSWAAVMMGQRIAMGGHNPVADTFELSATKSELDEMEKSIRFVVQRMPGHEDYLKQYCPAPAI

SEQ ID NO: 88258 - protein, 520 aa, Porphyrobacter sp.
  REGION 1..520: note = tr|A0A3M9YWV5|A0A3M9YWV5_9SPHN Tryptophan 7-halogenase OS=Porphyrobacter sp. IPPAS B-1204 OX=2483793; GN = EDM03_04635 PE=4 SV=1
MFGSNGIGNANRLARVVIVGGGTAGWMAAAALSRFFNDGRRTVTLIESDAIGTVGVGEATIPPIRSFNAMLDIPEAEFLRETRGTCKLGIEFVNWGRQGDRYFHPFGTYGQDLHGIAFHQLWLREHARSGAGAGDIGDYSMSTAAARLGRFARPTAGAQSAVKEIAYAYHFDAGLYAAYLRRMAERQGVIRIEGQITHANRNGETGDVESVTLENGTAVAGDLFIDCSGFRGLLIEEALDTGYEDWSHWLPMDRALAVPSRSPGPPDPFTRATAHSAGWQWRIPLQHRTGNGHVYSSAFMDDDTAREILLDHLESAPLAQPRGLRFLTGMRRKAWNHNVVAIGLSSGFIEPLESTSIHLIQNGIARLFALFPDLPFSPIERDEYNRGMRELFEDVRDFVILHYKATQRDDSEFWRYIQHMSIPDSLARKMALWQHRGRVFRENAELFSAPSWIAVMLGQNIWPQAHDPIADTLDEDKVAAAMAQMRAAYADVAGRLPAHGDFLRQSGSWHDTPTAQAISA

SEQ ID NO: 88259 - protein, 534 aa, Caulobacter sp.
  REGION 1..534: note = tr|A0A1I3WA87|A0A1I3WA87_9CAUL Dehydrogenase (Flavoprotein) OS=Caulobacter sp. UNC279MFTsu5.1; OX = 1502775 GN=SAMN02799626_03249 PE=4 SV=1
MDKRPSEWDVAGGETNMAKQILIVGGGTAGWLTACYLARMIGGREAQGARITLVESEDIGIIGVGEGTFPSIRKTLKRIELDEAALIRDANATFKQGIRFDNWRHAPSVEPTDRYYHPFQTADQHTDLDLLPYWLLGAAGDAPWSRVGTVQQAVIDAHRAPKLIEHPDYAGPLAYAYHFDAVAFGQLLRRHALERGVTRIADTIDAVRLAPDGAIESLTARASGRLEADLYIDCTGFRAQLIGQALGSPFTSYRNQLFCDRALAVQLPYARPDVPIASCTISTAQESGWTWDIGLQERRGVGYVFSSAHTSETRAAEVLSAYAGVPVDRLEPRLLKFEAGFRHVQWRKNCVAIGLSAGFIEPLEATGIGFAEIAALILVNLFPWAGEYDQAAAQFNAQMRRRYDHVIDFIKLHYCLSKREDTDFWRDNRASASISDSLKTKLDIWRWRPPSFLDVDLSHDIFIAPNWQYVLYGMGFRTDISGRAGALRYHDAAREEFANIREQSRNALRIMPDHRALVEEVRRAGFRRPMAGAR

SEQ ID NO: 88260 - protein, 378 aa, Corallococcus sp.
  REGION 1..378: note = tr|A0A3A8T654|A0A3A8T654_9DELT Tryptophan halogenase; OS = Corallococcus sp. AB030 OX=2316716 GN=D7Y15_36905 PE=4; SV = 1
MDTIRYDVAVLGGGPAGAALALALCRHSGLRVVLFERSTYAQPHLGETLPPDSRRLLARLGVWEAFARQGHLRSMGSCSRWGDSALGDNDHLRSPWGTGWHLDRSRFDRMLADEALRFGVDVRIGSVVTDWTPLENGGHRLFVPTEGDAPRDFVDARFVVDATGRSAVFATSQGARRHTVDRTLGLCGTFALQPGRTVDALTLVESCEDGWWYSARMPGDQIVFGLMGDKDSLQGLMPEDAEAWRARMERAPETRRRLEACDFTGEPLLAVSANVACLDRLHGEDWLAVGDAACMLDPLSSQGTSQALRTANQAADVVSRYLRGDSAALRLHEVRTRHEFQEHLRIREGYYRLERRWPGAPYWRNRQQSCAPVLSSPP

SEQ ID NO: 88261 - protein, 515 aa, Sphingomonas sp.
  REGION 1..515: note = tr|A0A1P8PQ27|A0A1P8PQ27_9SPHN Tryptophan halogenase; OS = Sphingomonas sp. LK11 OX=1390395 GN=AV944_00760 PE=4; SV = 1
MGETEVRRVVVVGGGSAGWIAACRLAAQAHRIGSGVQVTLVESRHVPTVGVGEGTWPTMRNTLMKIGITETDFIRSCDAAFKQGARFVGWTDGTPQDGYYHPLNPPAGATEIDLAPHWLHGAAKNASFADWVDYQAMLCDAGLGPKTIVMPEYAGHANYAYHLDAGKFATLLREHGVGTLGIDHVLGDVVRPQMSDHGDIMHLELADGRTVAGDLFIDCTGFAARLIGGVYQVPFRRCGDVLFADRAMALQLPYADQDAPITCHTVSTAQDAGWIWDIGLWTRRGVGHVYSSAHTSDDAAEAALRAYVGPAAEGLSARRITIDAGHRTRFWQNNCVAVGLSAGFIEPLEASALMLIEASMDAIADRLPRTRAAMDVMARQFNATFTHHWMRIIEFLKLHYVLTRRTDTDFWRDNVAASSIPDSLAERLELWRHHSPGPQDFDHAREVFSWPSYQYVLHGMGFDSRQPRIDAAAPDTALAQRFVTRMARARDDLRARAPRHRDLLRAIREHGLQRV

SEQ ID NO: 88262 - protein, 506 aa, unidentified
  source 1..506: note = Thalassotalea sp.
  REGION 1..506: note = tr|A0A4P7JJY3|A0A4P7JJY3_9GAMM Tryptophan 7-halogenase OS=Thalassotalea sp. HSM 43 OX=2552945; GN = E2K93_02210 PE=4 SV=1
MNNKPVKNVVIAGGGTAGWMAAASMAKLLGKAINITLVESDQIPTVGVGEATIPTLHLLHNLLGINEAEFMAATNATFKLGISFENWRDVGKDYIHSFGHLGHDCWACGFQHFWLKGLQKGLVSEIGDYCPEHLGSREGRFAVMAKQDLNHAYHLDAGLYAKFLQKIAYQHGCQRVEGKIDKVNLCSESGNITSLDLDNGKHVEGDLFIDCTGFRGLLIEDALHTGYDDWSHMLPCDSAVAVQTKTVGRPVAYTRSIARESGWQWRIPLQNRTGNGLVFCSKYMSDEDAIQTLLDNIEGEPINQPRVIKYKTGTRRKHWNKNCIAIGLSAGFIEPLESTGIHLFQRAVVRLMQIFPHTGINQADVDEFNQQTSDEMLDIRDFIILHYHLTDRRDTPFWRYCADMDITDSLRHRMELFRQSGRVFKKAEELFGESSWVQVMMGQGLTPEQYHPIVDMMGDEELKGFLDKIKQHTANKVANWPDHWDFINHYCPSKSADDDDKMVKTG

SEQ ID NO: 88263 - protein, 530 aa, Rhodanobacter sp.
  REGION 1..530: note = tr|A0A1Q3V8H8|A0A1Q3V8H8_9GAMM Tryptophan halogenase; OS = Rhodanobacter sp. 67-28 OX=1895822 GN=BGO50_13765 PE=4; SV = 1
MPRLKKVLVVGGGTAGWLAACYLAKAMNSTAPESVQVELVESPNIRLLGVGEATFPSIRGTLAAIGLDERRFLVGATATFKQGIQYVNWVRPPGMPGADRFFHPFNTPSRRPGSPELLPYWLLGAAPEGTPFAEAVTMQSRLVDHGRAPKHASDADYQAPMNHAYHFDAAAFAATLAEHGQGLGVKRHLATVERTELDERGNIARVVTTELGALSADLYVDCTGLRGSLIGGAMRSAFRSRRDVLFVDRAVALQVPYPAPDTPILPYTRATAQPAGWVWDIGLQKRRGIGHVYSSRHMDATQAEEIARRYVGAAADALEAQHLQFETGYRPEHWRGNCVAVGLAGGFVEPLESTGIALVELAVCMLTHLFPADHDDMERTARRFNEMMVARYERIIDFIKMHYCLSQRRDSAFWIDNANPASIPQTLRDRLQLWRCRPPHRLDFVTDLEMFMPASWQYVLYGMEFRTDLEHARSAYPQMDEARREFAMIQQVAGRALQDLPDHRALVEQLCRQHAQRNPVRTGEPVAVGG

SEQ ID NO: 88264 - protein, 291 aa, unidentified
  source 1..291: note = Caulobacteraceae bacterium
  REGION 1..291: note = tr|A0A4Q3U7N9|A0A4Q3U7N9_9CAUL Tryptophan 7-halogenase (Fragment) OS=Caulobacteraceae bacterium; OX = 1978230 GN=EON96_01570 PE=4 SV=1
DLFIDCSGFRGLLIEQEMQAGYEDWTQWLPANRAVAVPCDRVEDPVPYTRSTARESGWQWRIPLQHRTGNGYVFSDAFISEDQATADLMSRLDGAPQAEPRVLRFVTGRRRKGWIGNVVAIGLSSGFLEPLESTSIHLIQTAISKLLALFPRARRDYAMADQFNREMDQQYEGVRDFIIAHYKVSTRDDTPFWRHCRDMAVPDSLAAKLELFRARGEVMVENHELFRETNWFPILYGQGLTPEGYHPLADVLSDDDLRLRLSQIRTAIKARVDGLPSHESYLRQCVAGTAR

SEQ ID NO: 88265 - protein, 503 aa, Erythrobacter gangjinensis
  REGION 1..503: note = tr|A0A0G9MVM3|A0A0G9MVM3_9SPHN Tryptophan halogenase; OS = Erythrobacter gangjinensis OX=502682 GN=AAW01_05165; PE = 4 SV=1
MDTVPHTFVIAGGGTAGWMAAAALSRFTPPGTRIVLVESDAIGTVGVGEATIPQIHNFNRALGFDEREFLRATRGTFKLGIEFDGWLRAGERYMHAFGPIGRAHGLLPFQHYWIRARQLGFAKPLSAYSLNETAARQMRMQKGRTSVGIELPYAYHFDAGLYAAFLRDFAEARGVRRVEGVIASVERDGESGDITALALNDGERIEGTFFIDCTGFRALLIGEAMEARFDDWSAYLPCNRAITVPCEGVAEITPYTRATARKAGWQWRIPLQHRIGNGLVYCADFMSDDEAAETLLANLDGEVQADPRPIRFTTGARRQHWVGNCLAVGLSAGFMEPMESTSIHLIQSAISRFLSVVPGGRADPATIDWFNAQSRFEWERIRDFLVLHYTANQREGEPFWDHVRTMDLPDTLSAKIAQWKATGFIHREHEELFTEVGWFQVLAGQGVKAQSYNPLADALPESDLRAMLEGVEGALDAAVQPMTNHTEFLQSYTGGMVRTEIPA

SEQ ID NO: 88266 - protein, 145 aa, unidentified
  source 1..145: note = Caulobacteraceae bacterium
  REGION 1..145: note = tr|A0A4Q3TES5|A0A4Q3TES5_9CAUL Tryptophan 7-halogenase (Fragment) OS=Caulobacteraceae bacterium; OX = 1978230 GN=EON96_16015 PE=4 SV=1
TGLSNLIGLFPTEAAAMPEAEAYNRAMTSHVGNLRDFMLTHYALNQRFDEPVWDRARDANLPERLKTRLRVFAARGRVPLYDDESFQQQNWAQILIGHGLIPSSYDPMVDGVPVEEQMGKVRGLLGKIAEEVALMPSLDAEFGAA

SEQ ID NO: 88267 - protein, 473 aa, unidentified; identical to SEQ ID NO: 83930
  source 1..473: note = Gammaproteobacteria bacterium
  REGION 1..473: note = tr|A0A2N2A7N5|A0A2N2A7N5_9GAMM Tryptophan halogenase (Fragment) OS=Gammaproteobacteria bacterium HGW-Gammaproteobacteria-1 OX=2013791 GN=CVV05_20265 PE=4; SV = 1

SEQ ID NO: 88268 - protein, 511 aa, Duganella sp.
  REGION 1..511: note = tr|A0A1H8ANU4|A0A1H8ANU4_9BURK Tryptophan halogenase; OS = Duganella sp. CF402 OX=1855289 GN=SAMN05216319_4540; PE = 4 SV=1
MLRRIVIVGGGSAGWMTAGLIAAEHRAAGGLQVTLIESPDVPAIGVGEGTWPSMRDTLHRIGVSESDFFRECDASFKQGSRFNRWIDGGDNDYYFHPFVLPQGYGEVNLPAQWQARHPQIPFADLVSFQPHLCTQGRAPKQAQTPEYAAVANYGYHLDAGKFGLFLRKHCLEKLGVHYVPDHVVGINSHQNGDIASLQTQKHGALEGDLFIDCTGMQSLLLGQHYGIPLIPQQHVLYNDSALAVQIPYPADEHPIASQTSSTAQSAGWIWDIGLPTRRGIGHVYASGYISDDQAEAELRAYIVQTGGPQDIPQPRKLTFDPGYREKFWHRNCVAIGLSAGFIEPLEASALAIVEMSAAMLSDDLPATREAMDIVARRFNEAFTYRWERVIDFLKLHYVLSKRRDTPYWRDNTDPAQTPERLRELLTLWQHRAPSRSDFYRIEEVFPSASYQYILYGMGFRSNFSRASKPQEAGMADGYFQEAAGLTRKMLGALPDNRTLINHIKRHGLQKI

SEQ ID NO: 88269 - protein, 515 aa, Porphyrobacter sp.
  REGION 1..515: note = tr|A0A3M9YUN6|A0A3M9YUN6_9SPHN Tryptophan 7-halogenase OS=Porphyrobacter sp. IPPAS B-1204 OX=2483793; GN = EDM03_02995 PE=4 SV=1
MARRGPTGIEEIVAIERIIIVGGGTAGWMAAAALSRIRAGRPVEITLIESESIGTVGVGEATIPPFVGFNQLLGINEAEMLAEVGGTFKLGIQFENWGNLGDSYIHPFGAYGYTMGGISFHHVWHRMMGAGDKRPIQVFNLETMAAYFGKFARTEDYARDDLPPVNYAYHLDAGRYAAFLRRFAETRGVVRQEGRIADVQLDGESGFVTGVTLDDGRAFQGDLFIDCSGFRGLLIEQALKTGYDDWSQYLPCNRAVALPCQRDDGSPPPPFTRATAHSAGWQWQVPLQHRNGNGHVYCSAYMEDQKALDILLGNIAGKPQAEPNWLRFTTGRRKKFWNKNVVALGLAAGFMEPLESTSIHLINTGIDKLISLLSLDGITKVQEDTFNRLTGREYARIRDFLILHYNATQRTDSDFWNYVRTMDVPDTLTEKVEIFRANGQIFREEDELFTETSWAAVMMGQGISMGGHNAMADAIDPATLRTEVDEMEKSIRYLVQHMPGHGDYLARYCPAPMAA

SEQ ID NO: 88270 - protein, 505 aa, Porphyrobacter sp.
  REGION 1..505: note = tr|A0A3M9YUY2|A0A3M9YUY2_9SPHN Tryptophan 7-halogenase OS=Porphyrobacter sp. IPPAS B-1204 OX=2483793; GN = EDM03_05115 PE=4 SV=1
MTQPAPLKSIVIVGGGSAGWMTAAALAHAVGRSCAITLIESEAIGTVGVGEATIPPIRHFNHRLGIDEATFVRETQGSYKLGIEFVDWGRLGHSYFHPFGQYGAEFDSVPFYHHWMREALEGRIEGPIDEFSMCWAMAKAGRFTHPSPDRRMIQSTFDYAYHFDAGLYAAYLRRFAEDRGVTRLEGRVVDVTLRGEDGFIEAVTLENGARIGGELFIDCSGFRGLLIEEALEAGYDNWQHWLPCDRAVAVPCEKGEFTPYTRSTAREAGWQWRIPLQHRTGNGYVHCSEFISEDEASTTLLANLDGKPLADPRTLRFVTGKRREFWKHNCVAIGLSAGFMEPLESTSLHLIQYGILRLIALLPDSAMSPLLAREYNAQTTLEYERIRDFLILHYKASERDDSALWRYTADMPIPDSLQYKIDHFRSHGMLVSDERELFANPSWIAVYLGQGITPNRAPALAAMREGVPVAERLVQIRAAMAEAVAAMPTHAEFVARHCAAPPLAA

SEQ ID NO: 88271 - protein, 511 aa, Caulobacter sp.
  REGION 1..511: note = tr|A0A1I3YZ69|A0A1I3YZ69_9CAUL Tryptophan halogenase; OS = Caulobacter sp. UNC279MFTsu5.1 OX=1502775; GN = SAMN02799626_04113 PE=4 SV=1
MLTETSRQNGPLTRIAIVGGGAAGWMAAAALARVLGPQGPAITLIESEEIGIVGVGEATIPPIRAFNAMIGLDEDVFVRETKGTFKLGIEFVDWRRRGHRYFHPFGVYGPDFGPTPFEGAWRRLRQVGQAEPLEAYSICAQAAAAGRFARPQPGAGPLSQLAYAFHFDAALYARLLRAHAEAAGVVRREGKVAAVNLRGGDGFVESVTMEDGERIAADLFLDCTGFRALLIGQALDSPFEDWSRWLPNDRAAAVPSVNAGPPAPYTRSTAREAGWQWRIPLQHRTGNGYVFSSRHISEDEAVGALLANLDGEALAEPRVLRFQAGRRQAGWVKNVVALGLASGFLEPLESTSIHLIQVGIARLLEMLPTRAFEPADARRYNRLMAAEFESVRDFLILHFHATERNDTPYWDQLRAMAVPDTLLERLRIYRATGRVFRESDELFTKTSWLAVMDGQGPKVEGGEPLAEGLPLDQARDRLARIAAATAAAVGRMPSQTDFIRAHCQAGALAAV

SEQ ID NO: 88272 - protein, 497 aa, unidentified
  source 1..497: note = Albimonas pacifica
  REGION 1..497: note = tr|A0A1I3HVD6|A0A1I3HVD6_9RHOB Tryptophan halogenase; OS = Albimonas pacifica OX=1114924 GN=SAMN05216258_106188; PE = 4 SV=1
MTAMSGGPDPLRVLVAGGGSAGWMAAATLDAALNRGGARAVAITVVESPDTPRIGVGEATIPTIRRTLRRLRIPEAEFLAAAEATFKQAIVFADWSGPGSGFAHPFHTRPGDGAEQAAARFLRSDGRTPFADLVTPQPALAAAFRGPRRAGDADYVGPLPYAYHMDAEAFAELLAARAVTRGVARVSAHLRPPERAPDRPLEAVEATDGRRFAADLFVDATGFRRLLIGQGGFLDQSRHLICDAAVALRAPCAPGPTRPFTVAAAREGGWTWDIPLRTRRGRGYVHATAHLAPEAAEDALRAETPGAGEARRLRFQVGRLAQPWQANVVAVGLAAGFVEPLESTGLHLADLAAGLLAENAPLAGPNPGLARAYNALLAAAHDEVVDFVNLHYAASPRRDTPFWRDAADPARRTDRVAHLLELWEARPPVAADFPSSLQAFNHRNWEFILHGLGWRPRALGPAGGPPLAPDPELAAEARRLAAELPGHDALLAALAPR

SEQ ID NO: 88273 - protein, 512 aa, Porphyrobacter sp.
  REGION 1..512: note = tr|A0A3M9YUC9|A0A3M9YUC9_9SPHN Tryptophan 7-halogenase OS=Porphyrobacter sp. IPPAS B-1204 OX=2483793; GN = EDM03_04640 PE=4 SV=1
MNAPAPVTKIVIVGGGTAGWMTAAALVRVLGALPGLSVTLVESEAIGTVGVGEATIPQIIGFNRLLGLDEMEFMRETRATYKLGIEFVDWLRPGHAYVHPFGSFGIDMLGIEFQHFWLRGQAVGDTSRIDDYSIAAMAGKAGRFAWPRPDNPKSPLSKLSYAFQFDAGRYARFLRRYAEGMGAVRVEGRITQVRQDGETGFVTAVALEDGREVAGELFIDCSGFRSLLLGQTLGVPFTDWSKWLPCDSAVAVPCELGGRTEPLTRSTARTAGWQWRIPLQHRIGNGHVFSSSHIDRTAATDLLLANLDGKPLADPNQLAFKAGHRAQMWDRNVVALGLAAGFLEPLESTSIHLVQSGIARLLALFPDTGFGAVERDRFNHETTREYRDIRDFLVLHYRASERDDSEFWRYCRNLRPPDGLAEKLELFRSSGRIIRENNELFTEDSWLSVMLGQGVRPQAYHPAARILDDAETRQRLSHIRGVIAQAVDQMPTQAEFLRAQGGAIAAEEYLTA

SEQ ID NO: 88274 - protein, 504 aa, Caulobacter sp.
  REGION 1..504: note = tr|A0A1I3N8X1|A0A1I3N8X1_9CAUL Tryptophan halogenase; OS = Caulobacter sp. UNC279MFTsu5.1 OX=1502775; GN = SAMN02799626_01051 PE=4 SV=1
MTDKAPSKFVVVGGGTAGWIAAATLAHAMKGRVGEICVIESDEIGTVGVGEATIPPMQFLNSMLGIDEIDFVKKTQATFKLGIEFRDWTRLGHSYFHPFGLHGMPIEAVSFHHYWMRLRQHGDTSAIGDYSLATVAAREGKFVIPPRDLPPELPQLGYAYHFDAGLYARYLRDYAEKRGVKRIEGKIVEVKQRAADGFIEALELEGGKRIEGDFFVDCSGFRGLLIEQTLKTGYEDWTHWLPCDRALALPCDSVSPRTPYTRSTARKAGWQWRIPLQHRIGNGYVYSSPFISDDEAAATLLANLDGAPRADPRPLRFTAGRRKKAWNKNVVALGLASGFMEPLESTSIHMIQTGIFRLLSLLPVGVRDEATVEEYNRLSKIEYEQIRDFIVLHYKATERDDSELWRYCKDMAIPDSLAHKIELFRARGRIARFDDQLFAEPSWLAVFLGQGVEPNHYDRLADVAPLADIERRLAGVRQTIAQIVQGLPTHDEFIARHCRAEPLG

SEQ ID NO: 88275 - protein, 499 aa, Caulobacter sp.
  REGION 1..499: note = tr|A0A1I3QWQ8|A0A1I3QWQ8_9CAUL Tryptophan halogenase; OS = Caulobacter sp. UNC279MFTsu5.1 OX=1502775; GN = SAMN02799626_01664 PE=4 SV=1
MDNGPQQDIVILGGGAAGWIAAALLAKQTDRRRTRITLVESEEIGIIGVGEATVPVLAQCNALLGIDEFDFVRRTQGTFKLGIEFCDWGVVGNRHFHAFSDYGHAVQGVSTHHYWLRLRQAGDERPIDDYSFAYAVAKDNRFEPSDPQNARYHHAYHFDAALYARYLRDVATELGVRRIEGKMTHVDLDGASGDIAAIHLANGVTVAGDLFLDCTGFASELLGKALGTPFVDWSRWLLCNSAIAVPSKRAGPTMPFTRSTAHAGGWRWTIPLQHRSGNGMVYSSDFWSDEAAREALLGAIDGEPLAEPRLFRFTSGHRKQFWNRNCVGIGFASNFLEPLESTGLQLIVMGVLKLLKYFPERIIDPVLRDEYNRVSTCEIERIRDFIIAHYHLSRRPEPLWAACRDIEIPDSLRHKLEVWNASGQIALGDAESYMEPSWLAILLGNGVVPARYNVLADQHPLEQIRKGMELRREEIVSSAQAVTSHQDFIDRHCKAAPAS

SEQ ID NO: 88276 - protein, 501 aa, Caulobacter sp.
  REGION 1..501: note = tr|B0T4P3|B0T4P3_CAUSK Tryptophan halogenase; OS = Caulobacter sp. (strain K31) OX=366602 GN=Caul_1866; PE = 4 SV=1
MARTNPIRSILIVGGGTAGWMAATWLAGRLARQDIQITVVESPDIRTVGVGEATVPAIRDYFRDIGVTEAEVMAATQGTVKLGIEFRDWKRDGECFFHPFGLYGMPSRGVPFHQFWLKRRAEGDATPLAAYSLCTQLAMANQMMEPPASPPNDLGVFNWAVHFDAGLYAQFLRRKATSELGVTHVDGTVVEVSKNGENGFLTGVTLADGRIFEADLFIDCSGFRSLLLGQALGVAYEDWTHLLPCDRAVALPCERDGPLTPYTRSTALAAGWQWRIPLQHRVGNGYVYSSRHISDDEATAVLMSRLEGPALAEPNLLRFQTGHRRRFWEKNCIALGLAAGFMEPLESTSIVLIQSGVERLGALFPERGFDPALADEYNRITTLEYERIRDFLLLHYVANRRDGEAMWDHVRQLALPEPLVHKMRMFASRGTMVRYEWESFHDPSWLSMYGGFDIVPQAHDPMADYFTKPELDSALRRMREAITRAQAFAVPHETFLAAQRT

SEQ ID NO: 88277 - protein, 503 aa, Caulobacter sp.
  REGION 1..503: note = tr|B0SYT9|B0SYT9_CAUSK Tryptophan halogenase; OS = Caulobacter sp. (strain K31) OX=366602 GN=Caul_1290; PE = 4 SV=1
MTQPPPFKFVIVGGGTAGWMAAAALAQAFKGKVAEIELVESDEIGTVGVGEATIPPIQFLNSLLGIDEIEFVKKTQATFKLGIEFRDWRRPGHSYLHPFGPIGAPIEGVGFHHYWRRLREHGDTTDICDYSMSAVAARKGKFVIAPRELPPGVPPLAYAYHFDAGLYARFLRDYAEARGVKRTEGKIVEVKQRVSDGFIEALKLEGGRRVEGDFFVDCSGFRGLLIEQTLKTGYEDWSHWLPCDRALAVPCDSVAPLTPYTRSTARTAGWQWRIPLQHRTGNGYVYSSPFISDDEAAATLMANLDGAPRAEPRLLRFTTGRRKQAWNKNVVALGLASGFMEPLESTSIHLIQTGVMRLLSLLPTRHHDPAAVEEYNRLSKIEYEQIRDFIILHYRATERDDAELWRYCRSMALPDSLTHKIELFRERGKVARYDEQLFAEPSWIAVFLGQGVEPRDHDRLADVPPLADVQRTLFNMRDKMAHIADRLITHDAFIARHCKADPI

SEQ ID NO: 88278 - protein, 507 aa, Caulobacter sp.
  REGION 1..507: note = tr|A0A1I3PQ52|A0A1I3PQ52_9CAUL Tryptophan halogenase; OS = Caulobacter sp. UNC279MFTsu5.1 OX=1502775; GN = SAMN02799626_01355 PE=4 SV=1
MSPSPIRKVLVLGGGTAGWMTAAALSKVLGDQVEVTLIESEQIGTVGVGEATIPPILTFNAMLGIDERDFMRATRATFKLGIEFRDWTRLGDRYIHPFGSFGLDIEAIKFHQVWRKVRDQVGPLEDFNLAAVAARQNRFTLPDPDPAKVLSSLKYAFHFDAGLYARFLRGFAEARGARRIEGKVADVGLRGEDGFIQSVTLEDGRTFEADLFIDCTGFRALLIGQALGGRHVDWSHWLPNDRAVALPCATGGDGLTPYTRATADKAGWRWRIPLQHRTGNGYVYSSAHIGDDEALAGLLAGLDGPTDAEPNFLRFQAGRRDRAWIKNCVAIGLSSGFLEPLESTSIHLIQAGITKLLALFPDKGFDPLEIDEYNRLTALQVELVRDFIILHFKATERSDTPYWDYVRTMEIPESLQRKIDLFAGRGRIFQSDYDLFAEPSWIAVLMGQGIVPRQYDALVDSLPQAALVQRLQRMSALIGQTAQAMPDHAAFIARYCAADAAAAGVPA

SEQ ID NO: 88279 - protein, 524 aa, Caulobacter sp.
  REGION 1..524: note = tr|B0T4D3|B0T4D3_CAUSK Tryptophan halogenase; OS = Caulobacter sp. (strain K31) OX=366602 GN=Caul_0296; PE = 4 SV=1
MTKPIDEVLIVGGGTAGWITAAYLARKLGAARPDGVRITLIESSEIGIIGVGEGTIPTIQTTMREIGIDEARFMRGAGATFKQGIKFVDWTTAPVGGAHNHYYHSFSRPHTLGGLDLAPYWMLGCAGDVSFSEAVTLQDTVCEAGKGPKLIDDPQYSSPLGYAYHFDAGKLATLMRDVGKALGVRHLIGNVEGARLDESGAIAAIVTREHGELTAGLYIDCSGFSAKLIGEAMGVPFVDDSDVLFVNRAVAIQVPYDRPDAPVATTTLSTAHEAGWTWDIALPERRGVGYVYSNNHTSDDRAEEILRAYVGPAAEGLNARQLKLPIGHRQKPWVKNCVAIGLSGGFLEPLEATGIMLIEAAAWMLGRLFPRPGELEPTAALFNEAMGLRYKGVLDFIKLHYCLTQRTDNDFWIDNTRPESIPDSLHARLEMWKTRAPDPFDFGTVHDSFEVFNYQYVLYGMGFKTDLSANLSAYPHLEAARREFARLKSAAGRAAAAMPDHRTLLDEIYRGGFRSPTPQGLAAR

SEQ ID NO: 88280 - protein, 506 aa, Undibacterium pigrum
  REGION 1..506: note = tr|A0A318JIA0|A0A318JIA0_9BURK Tryptophan halogenase; OS = Undibacterium pigrum OX=401470 GN=DFR42_101609 PE=4 SV=1
MTMNKRISKITIVGGGSAGWMAATALVTYLGKGSIIRLIESEEIGIVGVGEASVPHIRLFNGQWLGIDEAEFVKRTQGTVKLGIQFNDWGRIGDSYIHGFGAIGRSLGPLPFHQFWLKLFLSGRAAPIGDYSPQTVMAPLGKFAPGDQNAAPNSPLADIAYAYHFDATLYARYLRELAEGRGVQRIEGKIVGVNQRASDGFIESVRMENEAVVDGELFIDCSGFSALLIEQTLKTGYVDWSHCLPCDRALAVPSESVDPITPYTRATARAAGWQWRIPLQHRVGNGYVYSSQHLSDDEAAATLLANLDGKALADPRQLRFTTGMRKKFWNKNVVALGLASGFLEPLESTSIYLAQSGVTRLLSLFPKSDFNPLLAERYNRESVAEYERIRDFLVLHYHATEREDTPFWKHCRSMEIPDSLREAIELFRYDGRYFRNGEDFFALPSWVQIMLGQRITPLGYHSIVDDMPEDKLLDYVEGMRTTFMHAVAAMPTHQQWIDRYWKATAK

SEQ ID NO: 88281 - protein, 497 aa, Erythrobacter gangjinensis
  REGION 1..497: note = tr|A0A0G9MRG1|A0A0G9MRG1_9SPHN Tryptophan halogenase; OS = Erythrobacter gangjinensis OX=502682 GN=AAW01_05145; PE = 4 SV=1
MSEPMPPHVVVLGGGSAGWITACLLHKAWGEHGGKVTVVESPEIGIIGVGEGSTPQLKAMFDHLGIAEADWMAACDATYKLGIRFTGWSERPGFESYFHPFPCAVDLHSEPDFTQNCTLARRGFDVPAHPDDWFLASILADAGSGPQPADTFPFPPTYGYHFDAYKLGAFLRDWAVERGVDHRALKAEKVELSGHTDVAALLCEGGERIEGDIFVDCSGFRAMIAGDALGGEFLPFAENLFADRAVVVPTEKVAQFKPQTGAIAMSSGWRWHIPLTTRTGNGYVYSSRYISDEDAAAELLHAVGLKDDETEPRFLRMKVGRMAKSWRGNCLAAGLAQGFIEPLEATALHIVIATALDFAAAYEAGGFSPEHRDHFNRQTALRYEAIRDYIVGHYRLNQRSDAAFWRDNAANQNLSDELKAMITAWFTHKDIAATNAERYSVQAYSAASWHCLFAGYGTFPAPAKMQPLPANLKAADHGAITSMLAACARNFSPVDWS

SEQ ID NO: 88282 - protein, 537 aa, Sphingomonas sp.
  REGION 1..537: note = tr|A0A1P8PT01|A0A1P8PT01_9SPHN Tryptophan halogenase; OS = Sphingomonas sp. LK11 OX=1390395 GN=AV944_06965 PE=4; SV = 1
MTPHSDHLIRRVVIVGGGTAGWMAAAAFARLLNNGYTHVTLVESEEIGTVGVGEATIPPIITFNQMLGLDENDFLAKTAGTFKLGIEFVDWGDKGERYIHPFGRHAQDLQGVHFHQLYLRERSRRALPDIAEWSMSAVAAKAGKFGRAKPDARSPIRELFYAFHFDASLYARYLRGYAERSGVTRIEGRIDAVNLRPEDGYVEAVTLADGRRIEGDLFIDCSGFRGLLIEEALGTGYESYAQWLPCDRAVAAPCALPNPAEPDPFTRATARDAGWQWRIPLQHRMGNGLVYCSDYLDSEAAEAQLLGSLEGELLGDPRHLRFTAGRRRQSWNRNVVALGLSSGFLEPLESTSIHLVQAAIQRLVALFPDTRFDPAERDEFNRQMHDLYEDVRDFIILHYKATRRDDTPFWNRVRTMEVPESLARKMALWSGKGRLFREGYDLFSNPSWVAVCLGQGLVPQSWEPAADALDENLVAQALEQMRAGYADTAARMPSHGDFLRMTAPSPLAPAMTATRGGQDGFDFARTSGTVQAKGPLL

SEQ ID NO: 88283 - protein, 506 aa, Parvularcula sp.
  REGION 1..506: note = tr|A0A371RFU9|A0A371RFU9_9PROT Tryptophan 7-halogenase OS=Parvularcula sp. SM1705 OX=2292771; GN = DX908_02840 PE=4 SV=1
MSVSRIKKVLIVGGGSAGWMTAATLSKILKNDYCDITLVESEEIGTVGVGEATIPQIGTFNRTLGIEENEFVRETKGTFKLGIEFVDWGKKGDRYLHPFGPYGLDMEGLSFHAFYMKQHKDQSPQALSDYSLQAVACRDNRFMRPVNAGNSPLSKIAYAFHFDAGLYARYLRKASEGRGVTRIEGKIADVTLNSDDGFVKSVTLEDGREIEADLFIDCSGFRGLIIEGALKAGYNDWTHWLPADRAIAVPCETSRPLLPYTRSTARDSGWQWRIPLQHRMGNGYVYSSAYASDDEAVDTLMGNLEGKPLGDPRFLRFTTGHRKKFWDKNCVAIGLSAGFLEPLESTSLHLIQSGIAKLLQMFPDKEFNQADIDRYNRVTTFEFERIRDFIILHYNATTRDDTPFWDYVRTMSIPDYLEDKINLYKSYGRIFRENEELFNDTSWFAVMNGQNIKAEKYDPVADVLSDAETAHRLTHIRETIATSANYMPSHEKFILENCSSGDLEKA

SEQ ID NO: 88284 - protein, 507 aa, Aphanizomenon flosaquae
  REGION 1..507: note = tr|A0A1B7X8A3|A0A1B7X8A3_APHFL Uncharacterized protein OS=Aphanizomenon flos-aquae WA102 OX=1710896; GN = AN484_01030 PE=4 SV=1
MTKNIVVVGGGSAGWLTALTAKKKYPKLNVTVIESKDIGILGAGEGSTPYLPLFLETLDISIEDLVKNCDATIKNGIKFSNWNNDNDFYYHGFGFIDPSLGTEALSSKFLSASPMLVSSIALNNDLKDLDFTENVSEKNKVPFVLEKNKSGKTVSEYKKIGKTSFHFNATKLAERFKDIGLERGIEVFENTITKVSLDENNNVVGLDLDSGITIPSDFVFDCSGFHRLIIGKTFNSKWKSYKEFLPVDSAIPFFLDMTEKIPPYTEAIAMKYGWVWKIPLQNRFGCGYVYDSSLISQEEAIKEVEEFLGFTPYYPRKDKGGFSFSPGSFEEPWQNNCVAIGLAANFVEPLEATSLWVSMVALTEIFSSPDFLTNNSDEIRSEFNKLILNMNDDILNFIYLHYMSLRKDTEFWKKFSYEMAPDELKQKLKVWEKRMPGKRDNGNFWNSASWFVVASAQEKINKGLAQEYVDMSDEYKKAVDSYEYYKKYREYKVTECTDHRQFLEGLK

SEQ ID NO: 88285 - protein, 231 aa, Altererythrobacter sp.
  REGION 1..231: note = tr|A0A411ZDV9|A0A411ZDV9_9SPHN Tryptophan 7-halogenase OS=Altererythrobacter sp. BPTF-M16 OX=2169535; GN = BPTFM16_01540 PE=4 SV=1
MSDWTLASTDAQIGHFSDIKHILVSIPDFLKDPGAAISDASLQNFARITPQYPGIRASLSDSPKKRLTEQLSPLLSDAFEMRQGTWSIMAWYSLVTSPPSGLLPIQRLPHVDGTDPNQIAMMLYLHETDHGGTAFFRHRSTGLEALTQETYPRYRDTLQAEVEKTGMPPARYVTDGAPLFEVTHNVAGNFNEAVFYRGNILHSGVIENDVPLPSDPCKGRLTLNAFLRPPQ

SEQ ID NO: 88286 - protein, 507 aa, Streptomyces sp.
  REGION 1..507: note = tr|A0A0F0GPC1|A0A0F0GPC1_9ACTN Tryptophan halogenase; OS = Streptomyces sp. NRRL F-4428 OX=1609137 GN=UK14_26210; PE = 4 SV=1
MSACYLKATFGSNVSVTVVESKNIPSIGVGEATFSTVRHFFHYLGLQEHEWMPECSATYKLAIRFENWREPGHHFYHPFERTRVVDGFPITDWWLNQRPSERFDDDCFVIPALCEQLSSPRHLDGNIFEQREDRAGNGSEMVGRSTLTEQQTQFPYAYHFDTVLLAKFLTKYGTERGVKHVLDDVTRVALDERGWISHVDTAENGELHGDLFIDCTGWRGMLINQALDEPFISYQDSLPNDRAVALRVPVDAAKRGMRPCTTATAQDAGWIWTIPLFDRIGTGYVYAGDYITPEEAEQALRDFVGPEAEGVEANHIRMRIGRTRNAWVNNCVAIGLSAGFVEPLESTGIFFIQNAIEQLVKHFPDAAWSEGMRSSYNGHMARMLDGVREFLVLHYYAAARQDNQYWKDTKTRPLPDGLKERLEQWRVKLPDAESIYPSYHGFEPYSYHAMLLGLGGVQLQSSPALASMDGAAAEKAMQSIRDEARELVATLPSQYEYFAHMRRPSSV

SEQ ID NO: 88287 - protein, 502 aa, Sphingomonas sp.
  REGION 1..502: note = tr|A0A1P8PUE9|A0A1P8PUE9_9SPHN Tryptophan halogenase; OS = Sphingomonas sp. LK11 OX=1390395 GN=AV944_10045 PE=4; SV = 1
MSDDAPIGRIAIIGGGTAGWMAAAALARVLGPEGPAITLVESEEIGTVGVGEATIPPIQAFNALLGIDEDDFVRATQGTFKLGIEFVDWRRPGHRYFHPFGVYGIDKGAIPFEAMWQRLRLAGEALPLEAYSICAAAARSGRFMRPQPGNTPLAHIGYAFHFDAALYARFLRGHAEAAGVRREEGRVISVERGGPRDFIEAVLLADGRRIAADLFIDCSGFRGLLIEDAMGAGFEDWGHWLPNDRAVAVPTANVGPPTPFTRSTAHGAGWQWRIPLQHRTGNGLVYASRHLSDDEAATTLLAHLDGEPLSDPRPLQFRTGRRDRFWIGNCVALGLAGGFLEPLESTSIHLIQAGIARLLEMLPTRAFEPADTRRYNRLMAAEFDSVRDFLILHFHATERRDTAYWRELASMDIPETLAERLAIHARTGRVYREADELFTKTSWLAVMDGQGLVANGHDPLAQGMPMDELRARLNRIAAVTQAAAGHMPAHADFLARHCSARR

SEQ ID NO: 88288 - protein, 494 aa, Parvularcula sp.
  REGION 1..494: note = tr|A0A371RFR5|A0A371RFR5_9PROT Tryptophan 7-halogenase OS=Parvularcula sp. SM1705 OX=2292771; GN = DX908_02595 PE=4 SV=1
MNTSVPKRIVIAGGGTAGWVAAAALSTQLGKLAKITLVESSDIGTVGVGEATIPTITTFHHLLGIDEQAFMKATRATFKLGISFENWGAVGDSYIHSFGQIGKPTWMGEFHNIWLEAQKEGLGGPLENYCFELQAAKAEKFAISEKLRLNYAYHLDAKAYASFLRKLSEKHGVTRIEGKIAKVSQNSETGNIAALLLEEGQQVEGDLFVDCTGFRGLLIEKTLGVGYQDWSEWLPTNSALAIQTEAVRDARPYTRAVAHEAGWRWQIPLQHRVGNGLVYDNRHLSDEAAQDLLMQSIEGKPLTDPLPIRYTTGMRERVWEKNCIALGLSTGFVEPLESTSIHLFMIGITRLIQLFPFGETSEAVRKRYNDMAVNELERVRDFIILHYHATEREDSEFWRQCRNMDIPDTLKERIELFCEYGHAYQAPDDLFRVDSWVQVMFGQRLRPKAHHRMGRVMDKEQIRQVMTGLDANIRTAVERMPTHQAFLDKYCPIN

SEQ ID NO: 88289 - protein, 483 aa, Streptomyces sp.
  REGION 1..483: note = tr|A0A1S2QPR7|A0A1S2QPR7_9ACTN Tryptophan halogenase; OS = Streptomyces sp. MUSC 1 OX=1678012 GN=BIV23_03035 PE=4; SV = 1
MTSEYDLVVVGGGPAGATAATAVALRGHRVLLLERDTFPRYQIGESLLPATVHGLCRLLGVADEVARAGFTPKRGGTMRWGRDPEPWRFSFSMTPRLPEPTATAFQVERSRFDEILLRNAERVGVEVREGSPVRRVLSVGGRVRGVEYTDRDGTARTAQGRYVIDASGNTSRIHSQVGGARVYSEFFRNLAVFGYYAGGRRLPEPDSGNIFCAAFDAGWLWYIPLRDDLTSVGAVIAPEHLAAVQRDPRGAWQDMIKACPEVDRLLTDVPLATEPPYDRIRVRKDYSYGKTSLWVPGMALAGDSACFVDPVLSSGVHLATYGALLAARAVNSALDGSVPEERGFAEFEARYRREYGVFHEFLIAFYDMERGEDSYFWSAKKVTRVDLDEAAAFAELAGGLVSGDASVLAAERGAAAAELDEAVGRLADGTERGNPLLSTRIVADTFRTGNDLEEQALYGGPLDAPAAAGSLTVAADGLSWLRP

SEQ ID NO: 88290 - protein, 519 aa, unidentified
  source 1..519: note = Thalassotalea sp.
  REGION 1..519: note = tr|A0A4P7JVC4|A0A4P7JVC4_9GAMM Tryptophan 7-halogenase OS=Thalassotalea sp. HSM 43 OX=2552945; GN = E2K93_13980 PE=4 SV=1
MEHIVVVGGGTAGWLSANHLLKQLGKRNIRITLIESPDIATVGVGEGTVPMMRQTLQELGIRETEFIQRCDVTFKQGIKFIDWLDNPDDSLANADKPYYHHIFDYPLIHEFNDLTEHYLSGHAPKQTSFVDAVAFQGKVCDQHRAPKDITTPEYQGQLHYAYHLDAGKFSELLKEHAIKQGVHHVKANVTDVKLANNGDIEALETDCAGVISAQFFVDCSGFRSLLLGQALGVDFIDKSDVLFVDKAVVAQIAYPEGQPDIPSYTLSTAQKHGWIWDIGLQSRRGVGHVYSSRYCSEQEAKATLIDYINAGEHDAQTEIKLRTIDMKIGYREKFWSRNCAAIGLSQGFVEPLEATGLLVFDATAKLLASQFPANRSHMDIVAKQFNSRVNESWLRVIDFIKLHYCLSRRDDSEFWRANRDPSSCPQSLQDRLALWRHQAPSAYDFASRFEIFNLENYLYVLYGMEFDSQVPNNSDLEQNKAQAQAFFARVAEHGNTLTAQMPDHAELLNKINKFGLQTR

SEQ ID NO: 88291 - protein, 505 aa, Sphingomonas sp.
  REGION 1..505: note = tr|A0A1P8PT10|A0A1P8PT10_9SPHN Tryptophan halogenase; OS = Sphingomonas sp. LK11 OX=1390395 GN=AV944_06975 PE=4; SV = 1
MTKVTNDVVRVVIVGGGTAGWMAGAALTRLLSGQCTVRLIESEAIGVVGVGEATLPHIRSFNERLGIPEAEFMARTRATFKLGIEFRDWGRIGDSYIHPFGTFGRGAGAIDFHHYWSRLAGEGQDLPPLDQLSYACTLAREARFEHPDQGRGGLTSTFGYAYQFDALLFAPYLRSLAEEAGAVRTEGMVVDVERDGESGLIRSVTLADGERVEGDLFIDCSGFRSLLLGQTLDEPFEDWSKWLPTDRAVAMPCRTETAVTPYTSAIAMPAGWRWRIPLQHRTGNGYVYASDFISDGDAARALEEAVEGEKLAEPRLLRFKAGRRRRSWVGNCVAIGLASGFLEPLESTSIYLVQQAITALIELFPGRQMDASDRDEFNRVIDLEYDRIRDFLILHYHATSRDDSPFWDYVRTMAIPDSLGEKLELWRRRGRVVKYREGVFLDASWIAVYLGQGIVPEGWDPRADVAGTGDLVQAVQSLRSEIAAEVAVRPDHRAFLERYCPMAAA

SEQ ID NO: 88292 - protein, 377 aa, unidentified
  source 1..377: note = Caulobacteraceae bacterium
  REGION 1..377: note = tr|A0A4Q3TGU7|A0A4Q3TGU7_9CAUL Tryptophan 7-halogenase (Fragment) OS=Caulobacteraceae bacterium; OX = 1978230 GN=EON96_15385 PE=4 SV=1
APLGDYSLCTVAAQLNRYTAPSADPRTVLSSLKQAYHFDAGLYAAYLREFAQARGVVRTEGKVVDVGLRPADGFIETVTLEDGSVHGADLFIDCSGFRGLLIEQALGSGYEDWSHWLPCDRALAVPCAGVAPLTPYTRATADKAGWRWRIPLQHRTGNGYVYSSQHISDEDARAALLAGLDGAPLAEPRGLRFTTGRRKSQWIKNCVSLGLASGFLEPLESTSIHLIQSGISKLLALFPDRDFDPVCTAEYNRLSKLQFEQIRDFIILHYKATQRDDTAFWTQVRTMEVPDTLNRKLDLFRSGGRIFRYDDELFSDASWVSVMLGQNIVPKSHDPLVDVVDVAAMTQKMSGLRQIIRKTAEAMPLHDDFIASYCKAN

SEQ ID NO: 88293 - protein, 515 aa, Shewanella sp.
  REGION 1..515: note = tr|A0A411PKB3|A0A411PKB3_9GAMM Tryptophan 7-halogenase OS=Shewanella sp. D4-2 OX=2520507; GN = EXU30_15720 PE=4 SV=1
MQISKVAIIGGGTAGWLAANHLGLALAGRAIQLTLIESPDIPTIGVGEGTVPSIRQTLKRFGIRETEFIRSCDVSFKQSIKFQNWLNKQLHGEGNFYHHLFDNPFRFGDQHSKAWYQDWQSSQTDSAYAQTVSPQFAACEANLAPKQITTPEYESVCGYAYHLNAAKFAQLLGDNAKGKFNVEHVKANVLDAKLHANGAIKSLILDKHSAQPEREFDFYIDCSGFESILHAKVLKSDFVDKSSQLFVNQALVAQVPTDESQALPPYTLATAHQAGWIWDIALPSRRGCGLVFSDNHISSEQAQDKFAKYLGEAAAQASIRQIPMKVGYRKQFWQQNCVALGLTQGFLEPIEATSILLTDFSADYLAKRFPSSTEQISLLRERFNHTMTYAWERVVEFAKLHYCLSDRIDSQFWIDNRAAESIPDGLKQRLALWQTAMPITDDFFSRFEVFNLDNYLYVLNGMKFKGDFVAASSQSNKSAGKGNLAIESMANQLLAELPEHRDLINKIHQFGLQTV

SEQ ID NO: 88294 - protein, 504 aa, unidentified
  source 1..504: note = Caulobacteraceae bacterium
  REGION 1..504: note = tr|A0A4V1ULK0|A0A4V1ULK0_9CAUL Tryptophan 7-halogenase OS=Caulobacteraceae bacterium OX=1978230; GN = EON96_01095 PE=4 SV=1
MSDNRLRRIVIVGGGTSGWMAATVIAKSLTPGYCEIDLIESPEIGTVGVGEATIPPLLALNRQLGIDEDEFVRRTQATFKLGIQFRNWGHLGNEYVHPFGVYGADLEGVDFQHYWLRLREARDAASIEDYSLATAALKAGRFIRPSTDPRNVLSRMNYAFHFDASLYGGFLREIAMERGVRRHERKIVDVELNPETGFVEALKLEDGSRMEGDLFIDCSGFRGLLIEQALKTGYEDWSQWLPMDRAFAVPCEAVGAPTLYTRSTAHEAGWQWRIQLQHRTGNGHVFCSSFTDEETARQRLLDNLDGPPLAEPRMLRFLTGRRKKAWNKNVVSLGLASGFIEPLESTSIHLVQSGVTTLMSFFPDRSFDQADIDRYNAIIQEEYEHARDFVILHYHATQRDDSAFWNHVRTMDIPDSLKARVDLFRSRARISGRREDLFAFTSWVSVMLGQGITPTGHDPMADQMPLDEVEQKLTRMRAVIGNAVQAMPTHQQFIDRFCKAPALP

SEQ ID NO: 88295 - protein, 502 aa, Sphingomonas sp.
  REGION 1..502: note = tr|A0A258RMH5|A0A258RMH5_9SPHN Tryptophan halogenase; OS = Sphingomonas sp. 28-63-12 OX=1970434 GN=B7Y47_14505; PE = 4 SV=1
MIEPIRIVVLGGGTAGWMTANLLAHAWGAVKGNGRAQVAVVESPDIGIIGVGEGSTPQLKAFFDRLGMAERDWMPRCNATYKTGIAFHGWSDRAGCESYFHPFPTALDVHSEDAFFTHCAARRGGADLPAHPDRFFLPAWLALHGKGPHPAANFPFDVSYGYHFDAHLVGGMLRDHAVSLGVEHIKARVVQVHVAEDGNVAALITDQGEPIASDVFIDSSGFRGVIAQQALGVVFKPFADNLFNDSAVVMPTPHASDPINPYTRATALSAGWCWDIPLTSRTGNGYVYASGYVSPDAAETELRAHLGLLDSDVAARHLQMKVGRVADSWSANCLAVGLAQGFLEPLEATALHLVQATVEGFIAAFEQGDFTPRHRDGFNRMIAARYEGVRDYIVCHYRMNQRHDTAYWRDNAANSALSDSLKSILTCWFTGQDMVAEIARQDIGGYYSAISWHCLLAGYGSFPEDDRMRPVPIGNRMAIIDDFIARCGMNFPTHQSMLAALS

SEQ ID NO: 88296 - protein, 459 aa, Sphingomonas sp.
  REGION 1..459: note = tr|A0A518RC82|A0A518RC82_9SPHN Tryptophan 7-halogenase OS=Sphingomonas sp. XS-10 OX=2599297; GN = FPZ54_02585 PE=4 SV=1
MTGRAIRSICVVGDGIVGLSAAAAFARALPNVTVTIVPAEPDPAAVAELQCATWPSIHRFHAAIGLDEQELVRAGIATHLLGTRFVDWARAGDNWVHGFGEHGLKAGTVPFHSLWHRASRAAEAAPFWHYSAAAVLGAAGKFTHPSRDPASPLGGFLYALRIDPPRYRARLAALTAPLVRHAPFAAAEHGDGGAIAAVTTADGGRVTADLYLDCSGSQAVLRHPEDRAFESWADWLPGRTMATCDVTGGAIDPLDRAERVAGGWRWHSALADHTRVIALGEDEGGVAVRFGCRTPWTANVLAIGDSATAIDPLFGTALHLAQDAILLALELLPGRDFARVEIAEYNRRSHATRARMRDLHALYHLRSGQRPLPDGLARTLEQFARRGRLPPSEAEPFETDAWIASLLGLGVTPHGVDPLSESVDLERVSHAIAALATRLTEAADRVPPYPQLLARLRAG

SEQ ID NO: 88297 - protein, 495 aa, Pseudoalteromonas sp.
  REGION 1..495: note = tr|A0A2N5LQN0|A0A2N5LQN0_9GAMM Tryptophan halogenase; OS = Pseudoalteromonas sp. MelDa3 OX=888435 GN=CXF89_15640; PE = 4 SV=1
MTKTNAVKNVVIAGGGTAGWMAAAALAKLVGNNINITLVESDDIGTVGVGEATIPPIRTFHKLLGINEQAFMKATQASFKLGISFENWGDENTHYIHSFGATGKECWAGEFHHFWLQGKTLGINNPFGDYCYELQAAKGGKFAFNQQNPINYAYHMDATRYAQFLRECSEPLGVKRIEGKIQKVVKNTKTGHIESLTLNNGEHINGDFFIDCTGFRGLLIEQALHTGYEDWSHLLPCNSAIAVQTKSTSDTVLPLTRSIAHKNGWQWRIPLQNRVGNGLVYCSQYMDDEQAKALLLNNIEGEPLTEPRIIKFKTGRRLKGWNKNCLALGLASGFVEPLESTSIHLIMSGIIRFMRLFPFNGITNHAIDEYNKQLKSEIENIRDFIVLHYKVTNRDDSEFWQHCSAMDVPKTLQHKIDLFKQTGRVFLDDGDIFRVDSWVQVMLGQGIEPNQHHLIASMMSDEELTRFLYGIKQQIEQRVSQLPPHHEFLKQYCPA

SEQ ID NO: 88298 - protein, 503 aa, Massilia sp.
  REGION 1..503: note = tr|A0A098UBF5|A0A098UBF5_9BURK Tryptophan halogenase; OS = Massilia sp. JS1662 OX=1519190 GN=IA69_10150 PE=4 SV=1
MNAPLLNTIVIVGGGTAGWMAATALATALRGRYTIRLVESDEIGIVGVGEATIPMIQRFNTVAGIDEAEFMKATNGTFKLGIEFVNWGRQGERYMHGFGRLGQDLWMVGFDQYWHKMHGLGRARPLDEYSITRMAAKANKFMPARTDVGNSPLADIAYAYHFDASLYARHLRKLSESRGVERIEGKIVQVSQRAHDGFIDAVVLESGRRVEGDLFIDCSGFRGLLIEQTLHTGFEDWSHWLPCDRALAVPCESAAVTTPYTRATAHAAGWQWRIPLQNRIGNGHVYCSRHISDDEAAATLLVNLDGKPLADPRPIRFTTGMRKKAWVKNVVALGLASGFLEPLESTSIHMVQSGLQQLLDFFPDRGFAQVDIDAYNDLTRFHYERIRDFIILHYHANQRTDSDFWQACANMAIPGTLREKLDLYRSHGRIQRVNGELFTEVGWLQVLVGQNIHPDVYHPLVDVQSEAGIHEYMEGVADVIRQCVDFIPGHDRFIADYCKAPQM

SEQ ID NO: 88299 - protein, 505 aa, Thalassomonas actiniarum
  REGION 1..505: note = tr|A0A0D8D7K4|A0A0D8D7K4_9GAMM Tryptophan halogenase; OS = Thalassomonas actiniarum OX=485447 GN=SG35_00350 PE=4; SV = 1
MMSEHQAKSIVIVGGGTAGWMAANLMAKSWQHLGFNIRLIESPDIGIIGVGEGSTPQLKGFMDFLGIKESDWMGQCNATYKNGIEFVNWSTKPGFSRYFHPFPAQTDDYSAPGFFHNSYIRRKGISVEGHPDHFFLASYLAKHKLAPIPEFHFPFETNYGYHFDSALLGKFLAGKAEEFGVTHTRGTVAEVKLHVNGDIQSVITQAGETIAGDIFIDCTGFASLLLQQQLKVPFKSFGNNLFNDAAVVLPTEQTQQLGSQTISTALKHGWAWEIPLTNRNGNGYVYSSAYTSGDSAETELRAKLGLLDADVEARHLKMKVGRVEQHWHKNCVAVGLSQGFIEPLEATALHLVQETVQGFIDSYQKGNFSGQYQGEFNASVNARFEAVRDYIVGHYRINSRTDSQYWLDNANNNQLSASLVAILQCWMRGDNLSDELDRQKIDHYYPSISWHCLLAGYGLYPDSAQLKPGNEYANKYNIEQIADFISRCGLNFKPHRQRLAELSTG

SEQ ID NO: 88300 - protein, 499 aa, Sphingopyxis macrogoltabida
  REGION 1..499: note = tr|A0A0P0DZN0|A0A0P0DZN0_SPHMC Tryptophan halogenase; OS = Sphingopyxis macrogoltabida OX=33050 GN=LH19_14975 PE=4; SV = 1
MNEDKPVRRIVIAGGGTAGWMMAAAIARTMGHTVDLTLVESEAIGTIGVGESTIPPLVNFNRILGIPEPEFMRAAQATFKLGILFDNWKHDGHSYFHSFGLSGKDHWSAGFQHFWLHGKARGHAQSYDDYCVELVAGLQGKFAHLPEERMNYAYHVDATLYGRFLRKLAEADGARRVEGKIARVELDSESGDIAALLLDGDRRIEGDMFVDCTGFRGLLIDGALHAGFEDWGHWLPNDSAIAVQSDHLGPPMPYTQAIAHDAGWQWRIPLQHRMGAGIVYSSGYLSRDAAYERLMSSVGTPRIEPFDIKFRGGVRRKQWFRNCVAVGLAGGFVEPLEATTVHLIQRAVLRFIRMMPNGRVSECDAAEFNDQQRLDIEQIRDFVILHYKATNRRDSPFWRHVANMPIPASLEQKIELFRETGRVFRKNEELFAENSWVQVMMGQGIEPQSYHPIAEKLRDDELDRLLQMLRDNVTSTVATLPEHHAYVARYCGAEAPATA

SEQ ID NO: 88301 - protein, 499 aa, Sphingopyxis macrogoltabida
  REGION 1..499: note = tr|A0A2W5L455|A0A2W5L455_SPHMC Tryptophan halogenase; OS = Sphingopyxis macrogoltabida OX=33050 GN=DI569_01865; PE = 4 SV=1
MNEAGQTRRVVIAGGGTAGWMMAAAIARTMGPTIDLTLVESEAIGTIGVGESTIPPLVNFNRVLGIPEPDFMRAAQATFKLGILFDNWKYDGHSYFHSFGLSGKDHWSAGFQHFWLAARAKGYPHSYDDYCLELVAAMQGKFAHLPEDRMNYAYHVDATLYGRYLRTLAEAAGATRVEGRIEQVELDGESGHIAALRLDGDRRIAGDMFVDCTGFRGLLIDGALHAGYEDWSHWLPNDSAIAVQSKHLGPPMPYTQAIAHDAGWQWRIPLQHRMGAGIVYASGYLSRDEAYDRLLSSVGEPLIEPFDIKFKGGVRRRQWYRNCVAVGLSGGFVEPLEATTVHLIQRAVLRFIRLMPNGRVSERDAIEFNEQQRQDIEQIRDFVILHYKATQRRDSPFWRHVAHMPVPDSLQQKIELFRETGRTFRKNEELFAENSWVQVMMGQGVDPATWHPIAERMTDDERDRFMAGLRESVARTAATLPDHHAYVARYCGAPEPRAA

SEQ ID NO: 88302 - protein, 473 aa, Alteromonas sp.
  REGION 1..473: note = tr|A0A136I1A8|A0A136I1A8_9ALTE Tryptophan halogenase; OS = Alteromonas sp. Nap_26 OX=1795869 GN=AXW14_08700 PE=4; SV = 1
MAATALSRLLGKSISVTLVESKDIGIVGVGEATIPPIRTFHKLLGIDEKAFMKASQATFKLGIEFQNWRECDHSYIHSFGITGRECWAGEFHHFWLRAKEYGFADDFGDYCPELIAAKQGKFATSEAMPLNFAYHFDAVAYGRFLKQLAIQAGVTHIEGDIKQVEQCPASGNITALRLTDNTHISGDFFIDCTGFKGLLIEETLHTGYDNWQHYLMCDRAVAMQTELTDAPLPYTKSVAHHAGWRWQIPLQQRMGNGLVYCSRYMSDDEAIDTLKSQVTGNPINTPRVIRFTPGKRRMGWNKNCVALGLASGFIEPLESTSIHLIMTGLVRLMRLFPFDGVTQSAIDEYNTKFASEMDAILDFIVMHYKVTNRTDSPFWQQCQRMDIPQSLTHKLRLFEETGRVFLDDGDIFRVDSWTQVLMGQGLMPKQYHKVADEMSEEALKQFMAGLKQQVTQRVNSLPSHHAFLSQYLG

SEQ ID NO: 88303 - protein, 509 aa, Duganella sp.
  REGION 1..509: note = tr|A0A1E7WN18|A0A1E7WN18_9BURK Flavin-dependent tryptophan halogenase RebH OS=Duganella sp. HH101; OX = 1781066 GN=rebH_4 PE=4 SV=1
MIRRIVIVGGGSAGWLTAGLIAADHQGTPLHITLIESPDIAPIGVGEGTWPSMRDTLRRIGVSEADFFRECDAAFKQGSRFNHWRGDHPLGSDRDYYFHPFVLPQGYGEVNLPQQWQAQHPDTPFADLVSFQPHLCVNGRAPKQASTPEFASVANYGYHLDAGKFGVFLRKHCLEKLGVHHVPDNVVGITSHDNGDIAALRTQAHGALEAELFIDCTGMQSLLLGKHYEVPFISQKHVLYNDSALAVQIPYPAADHPIASQTSSTAQSAGWIWDIGLPTRRGVGHVYSGAHIGDDQAEAELRRYISATGGPQDIPSPRKLSFNPGYRARFWHRNCVAIGLSAGFIEPLEASALALVEMSAAMVSDELPATRAAMDIVARRFNDAFTYRWERVIDFLKLHYVLSRRRDSDYWRDNTAAVPERLNDLLTLWRHRAPSRNDFNRIEEVFPSASYQYVLYGMGFRSEYTHPQPQQAAQADHYFREAAALTRKMLGALPDNRALINHITQRHHA

SEQ ID NO: 88304 - protein, 504 aa, Duganella sp.
  REGION 1..504: note = tr|A0A1H8AKY2|A0A1H8AKY2_9BURK Tryptophan halogenase; OS = Duganella sp. CF402 OX=1855289 GN=SAMN05216319_4543; PE = 4 SV=1
MRDSNNRQPIRRVVICGGGTAGWMAAAGVSKVLGKLLDIKLIESEEIGTVGVGEATIPTLMNFHNVLEINEQEFMAETQATFKLGISFEEWRNVKEDYIHSFGVTGTDHWTAGFQHFWRKGVERGIASDYGDYCLELKASKENRFAHLPNNGMNYAYHLDAGRYAKYLRRLSEPRGVQRIEGKIVSYDKHENGDVRSVMLASGQVIEGDLFIDCTGFRALLIGDAMQEEVEDWSQWLFCDRAIAVQTSSVGDAVPLTRSMAHQAGWQWRIPLQHRVGNGIVYSSRYLDDDAARKQLLANVEGKTLIEPRVIKFKPCQRRNTWKGNVVAIGLSSGFLEPIESTSIHLIQRSVIRLMQSFPSDGIQQADIDEYNAQCNREIDHIRDFIILHYHVNNRTDSQFWIDAREMSIPDSLKHRIDLFKETGRVFRIPNELFAENSWIQVMLGQGIMPKSHHQTADLMSDEELRGFLGGIKGRIDRTVVQLPTHQAYVERYCGRPDMGAKAA

SEQ ID NO: 88305 - protein, 507 aa, Sphingomonas sp.
  REGION 1..507: note = tr|A0A518RGU1|A0A518RGU1_9SPHN Tryptophan 7-halogenase OS=Sphingomonas sp. XS-10 OX=2599297; GN = FPZ54_11985 PE=4 SV=1
MSERLRSIVVAGGGTAGWMTAAALARFCGKGWRITLVESEEIGTVGVGEATIPMIRNFNQALGIDEAEFLRATQGTYKLGIEFAGWGGFDDCYMHAFGLVGRGLGLLPFHHYWLRARAAGRAAPLGQYVLNHVAAYGNRFAHVQRAADSVMPPMPYAFHFDAGLYAAYLRSYAQARGAGRVEGRIVDVERDGESGDVAALTLAGGERIAGDLFVDCSGFRGLLIEGALATGYEDWSHWLPCDRAVAVPCAGTSPWTPYTRATALKTGWQWRIPLQHRTGNGHVFSSAHISEDEATATLLANLDGAALAEPRMLRFTTGKRKRVWNRNVVAIGLSAGFIEPLESTSIHLIQTGINRLLDFLPNGPVADADRDAFNRMADFEIDRIRDFVILHYAANGRSGEPFWDMLRNMPLPELLANRIAMFRANGRIVREHDELFDVAGWVQVMVGQNILPQRWHPLADQLDDAQLDQFLTTVATAFSRDAERMPDHQSYLARFAATPQPQEVTRV

SEQ ID NO: 88306 - protein, 500 aa, Alteromonas marina
  REGION 1..500: note = tr|A0A0B3Z3V8|A0A0B3Z3V8_9ALTE Tryptophan halogenase; OS = Alteromonas marina OX=203795 GN=RJ41_10720 PE=4 SV=1
MNRPMNIVIAGGGTAGWMAANYFVNKWPSDKVNVTLVESPDIGIIGVGEGSTPTLKRFFEELKIKERDWMPKCNATYKVSIRFNDWSPGSGVKQYRHPFISQTDTFTQRAFEVNCRTRRLGLDSHVNPEDFLLNGVLAKQNKAPLTPENFPFRMEYGYHFDSALLGNYLRDVAVERSVTHVSAVISDVALHASGDISHLVTDRGNIEGDFFVDCTGFSSTLLQQALGVKFNSYSDNLFNDSAVVLPTHAQENIQVETQSTALSNGWCWSIPLQNRTGNGYVYSASHLAKDKAEEELRRHLGLENSDVEARHLKMKVGQVEQHWHKNCLALGLSQGFIEPLEATALHLVQICIEYFSDMFEKGAFSSVERVSYNAFAKARFDRVRDYIVAHYKLNTRNDSDYWRDNRNNLVLSDSLKSIISTWFNREDLGNEIKRQNIGMHWDSVSWHCLFAGYGAFPALAQNQPGRGDLYIEQNIERFNQGCALNFEHHNAVLLAQQHGE

SEQ ID NO: 88307 - protein, 538 aa, Burkholderia ambifaria
  REGION 1..538: note = tr|B1FAW0|B1FAW0_9BURK Tryptophan halogenase; OS = Burkholderia ambifaria IOP40-10 OX=396596; GN = BamIOP4010DRAFT_1169 PE=4 SV=1
MSNPIKNIVIVGGGTAGWMAASYLVRALQQQANITLIESAAIPRIGVGEATIPSLQKVFFDFLGIPEREWMPQVNGAFKAAIKFVNWRKSPDPSRDDHFYHLFGNVPNCDGVPLTHYWLRKREQGFQQPMEYACYPQPGALDGKLAPCLADGTRQMSHAWHFDAHLVADFLKRWAVERGVKRVVDEVVDVHLNERGYISSLSTKEGRTLEADLFIDCSGMRGLLINQALKEPFIDMSDHLLCDSAVASAVPNDDARDGIEPYTSAIAMNSGWTWKIPMLGRFGSGYVFSSKFTSRDQATADFLNLWGLSDNQPLNQIKFRVGRNRRAWVNNCVSIGLSSCFLEPLESTGIYFIYAALYQLVKHFPDTSFDPRLSDAFNAEIVYMFDDCRDFVQAHYFTTSREDTPFWLANRHDLRLSDAIKEKVQRYKAGLPLTTTSFDDSTYYETFDYEFKNFWLNGNYYCIFAGLGMLPDRSLPLLQHRPESIEKAEAMFASIRREAERLRTSLPTNYDYLRSLRDGDAGLSLSQRGSTLAAQEIL

SEQ ID NO: 88308 - protein, 507 aa, Alteromonas sp.
  REGION 1..507: note = tr|A0A136I1F1|A0A136I1F1_9ALTE Tryptophan halogenase; OS = Alteromonas sp. Nap_26 OX=1795869 GN=AXW14_18095 PE=4; SV = 1
MQNPQIKPIKRVVIAGGGTAGWLAASLMKKVLGKAVDITLVESEAIGTVGVGEATIPPIRLVNQVLGIDEAQFIHDTKATIKLAIRFENWKTEGQSYYHTFGAPGKSMAFCHFHHYWVKARQQGLTHDLWDFDLNFHAAEAGRFAQINAKDPVVELPFAYHFDASLYAQYLRKLSENMGVVRKEGKIARVQRCSDSGFIQSLHLESGEEIKGDLFVDCTGFKGLLIEGALGAGYDDWSHLLPCDSALAVPSERHEKTAPYTRSIAHDAGWQWRIPLQHRNGNGHVYSSRYISDDQACETLLSNLDTKPLGDPKLIKFTTGRRRKQWYKNVVAVGLSSGFLEPLESTSIHLIQSAIVRLIQLFPHNGFAPTLESEYNKQSELEFEQIRDFLVLHYNVNERTDSAFFNDMRNITLPDSLAHKIELFKESGNLLREQNDLFLESSWLQVMYGQGIMPMDYHGLVNSVPESQLNQMLTRLLDIKKEPITKLPTHDEYINGMVAKYKRSMNS

SEQ ID NO: 88309 - protein, 481 aa, Caulobacter sp.
  REGION 1..481: note = tr|A0A1I3PNP8|A0A1I3PNP8_9CAUL Tryptophan halogenase; OS = Caulobacter sp. UNC279MFTsu5.1 OX=1502775; GN = SAMN02799626_01354 PE=4 SV=1
MSRSPLNSVAVLGGGVAGWMTAAALARVLPGACAIRVVDTADGAPRGALSTLPALRGFHGLLGLNEPALMRAARGTFKLGARYSGWTDEDHVEGFSDAGANLDGVAFHHHWLRVRERGEAGRYEDYSLAAVAARLGRFAPPSEDPRSVLSTLSYGQHLDAAGYVAALRATAGRVEARSGEIAQVALAPDGRIAAVILADGERIAADLFVDTTPDGRLIGATPDAGWIDESTALPCDRLALREVAPRANPPPLTEFEAIAEGWLRRVPLRGGDAVALAYAGNLTSDEAAREILGGEAAIVRLRNGRRERVWTGNCVAIGPAASQLEPLNGDDAQSVQSGVGRLIALLPTADGSPLAAMEYNRLMAEEHDRARDMAVFRYVAAARSDPLWARSRQAAPSPALAYKQAQFESRGRVVLYDEETFVEGAWVAAFLGHGILPRRHDRLADRLPADQADAALARLRGLIRQAAQAMPLHADALKDRP

SEQ ID NO: 88310 - protein, 495 aa, Sphingomonas sp.
  REGION 1..495: note = tr|A0A518RK36|A0A518RK36_9SPHN Tryptophan 7-halogenase OS=Sphingomonas sp. XS-10 OX=2599297; GN = FPZ54_18525 PE=4 SV=1
MKRIVVAGGGTAGWMAAAAIARTMGRTVAVTLVESDAIGTIGVGESTIPPLVTYNRLLGINEAEFMRATQATFKLGILFDNWKVDGDRYFHSFGFTGKDHWSAGFQHFWLAGRSKGHQQPYDDYCLELVAALEGKFAQLPDNRVNYAYQLDSGLYARFLRGMGEKDGVTRIEGKIARVELDGESGDIAALGLDGGRRIEGDLFLDCTGFRALLIEGALHAGYDDWTHWLPCDSAIALQTPNVRPPVPYTRAMAHDAGWQWRIPLQHRTGNGIVYCSRYLDHDAALERLLGNLEGEPLTPPNKIRFQTGARRKQWHRNCVAIGLSGGFMEPLESTSIHLIQRAVLRVIRMMPAQGRVSERDIAEFNEQQFQDMEQIRDFLILHYKVTDRRDSSFWRQCAAMEVPDSLTQKIELFRETGRVFRRNEELFAENSWVQVMMGQGIEPQSWHPIAEKLTDAELDKTLTHIREDVRRTVNGLPAHADYVARYCGAAEPAAA

SEQ ID NO: 88311 - protein, 469 aa, Sphingomonas sp.
  REGION 1..469: note = tr|A0A518RJB3|A0A518RJB3_9SPHN Tryptophan 7-halogenase OS=Sphingomonas sp. XS-10 OX=2599297; GN = FPZ54_17070 PE=4 SV=1
MTGPVERVAVLGGGVAAPMAALAIRRAFGRLGVSVTWHDDNTRPSRHAALVAPPDLVGFHPLLGLGDAALIDHARATLTLGQQFVGWAGGDDAFLHAYGDAGTPFASLPFLQHWVRARHAGLRVALEDFCLAAVAAKQGRVGSPRDPSTSQAVKPGRHLDAPGYAAVLRAGCKAAGVRIVAADMAVKADLIVDTRDDADADADAERDAAPLCDRVILASAAPIDPIPLHGRIVAHDAGWTALTPLADRIAITCHYASAHMNEQAALDALQRAVARPVQADPAVAVGGRRIPGWSGNRLTIAQPDGIAATLDGAGLTELQLAIAQLILLWPIDRTAMPEAALYTDELRGTRARVADFSAQHFRLATRSGSPFWDAARAAPISRELAAKIDLFAARGMVAHFDHEAHVDDGWALCMAGHGVVPRSHDAQALLVEDQALLAEFQRQLRAVAAAVRGMPTHAQALAALRSGGQ

SEQ ID NO: 88312 - protein, 496 aa, Hyphomonas sp.
  REGION 1..496: note = tr|A0A328K275|A0A328K275_9RHOB Uncharacterized protein OS=Hyphomonas sp. C76AD OX=1280943 GN=HY11_03610; PE = 4 SV=1
MQKVRKVVIAGGGTAGWITAAAMSRMLGPLLDITLVESDDIGTVGVGEATIPTHRTFHHLLGIDEREFMRATKATFKLGIAFENWGGIGDTYIHSFGQVGKSSWMGEFYNIWLAAREKGIGEDLDAYCFELQAAKHNKFYTDEKFNINYAYHLDASLYAKFLRAFSEEKGVKRVEGLIGGVEQDGETGFITALKLKSGDRIEGDFFVDCTGFRGLLIEQTLKSGFEDWAHWLPTDSALAVQTRSVGPALPYTRSIAHQSGWQWRIPLQHRVGNGLVFCSQYMQPDAAEEILRNNIEGELLGEPRLIRYKTGRRRKVWNKNCVALGLSSGFLEPLESTSIHLIQIGASRLVQQFPFDGVSEAIANHYNEQSLRELERIRDFIILHYKVTERDDSAFWRDRRDMDVPDSLAQRLDVFRENGLAYQATDDLFRVDSWLQVMMGQRMRPKGYHHMGHMMTEDQMRRALGGLSSGIANTVAKMPTHQDFIERYCAIEAEAV

SEQ ID NO: 88313 - protein, 505 aa, Duganella sp.
  REGION 1..505: note = tr|A0A1E7WXV0|A0A1E7WXV0_9BURK Flavin-dependent tryptophan halogenase PrnA OS=Duganella sp. HH101; OX = 1781066 GN=prnA_2 PE=4 SV=1
MTNNRIKRVVVVGGGSAGWMAAAALATYLGKQTSVRLIESEEIGIVGVGEASVPHIRMFNGQMLGIDETEFVKRTQGTIKLGIQFQDWSRIGDSYIHGFGVIGRSLGPLPFHQFWLKLFQSGRAAQIGEYSLQTVMAPQGKFVPGDRNSPPNSPLADIAYAYHFDAGLYARFLRELSEQRGVQRIEGKIVGVNQRADDGFVESVTMENGQVVDGELFIDCSGFRGLLIEQALKTGYEDWSHWLPCDRAMAVPSERIDPITPYTRATARAAGWQWRIPLQHRTGNGYVYSSQYIGDDEAAATLLANLDGKPLADPRPLRFTPGMRKKCWNKNVVALGLASGFLEPLESTSIYMVQSGITRLLGLFPGSDFNPLLAERFNRESAFEYERVRDFLILHYHATERNDTPFWDYCRTMSVPDSLKEAMDLFRSDGRYFRNGEDFFALPSWVQVMLGQRIMPQSYHPIVDDMPEDKLVQYVEDMRATLAHAVAAMPTHGQWIDRYWKASAL

SEQ ID NO: 88314 - protein, 501 aa, Sphingomonas sp.
  REGION 1..501: note = tr|A0A518RGP3|A0A518RGP3_9SPHN Tryptophan 7-halogenase OS=Sphingomonas sp. XS-10 OX=2599297; GN = FPZ54_11720 PE=4 SV=1
MIDPVRVVIVGGGTAGWMTASALARFLPGVADVRLIESEEIGIVGVGEATLPHLRAFLQRLGIDEAEMMRATNATFKLGIDFRDFGAIGDRYVHPFGAYGVDLAGVGFHHYWLRAREEGSRRSLEDYSLPIVAARANRFAFPPADGDFLATSYGWAYQFDATKLAPMLRGYSEARGAVRTEGRVIGVERAGESGDVTELVLDSGERIAGDLFIDCSGFRALLIGGAMDAAWEDWSHWLPCDRAAALPTQSMPGPIEPYTRATAMSAGWRWRIPLQHRVGNGYVFSSAFLPEDAACDAILGAVEGARQAEPRILRFRAGRRAQSWVGNVVSIGLASGFLEPLESTSIHLAQMAVMRLIELFPERRIDPADRVAFNATVDYEYDRVRDFLILHYHATTRDDSDFWNHVRTMAVPDSLAEKLELWRESGRIEKYGEGLFLEPSWVAVYLGQGQLPERYDPRADNPTAPALTRTLDEIAGSIAQRVAAMPDHATALRAHGAWSGV

SEQ ID NO: 88315 - protein, 503 aa, Duganella sp.
  REGION 1..503: note = tr|A0A1E7WXA3|A0A1E7WXA3_9BURK Flavin-dependent tryptophan halogenase RebH OS=Duganella sp. HH101; OX = 1781066 GN=rebH_1 PE=4 SV=1
MQQAAIKNIVIVGGGTAGWMTATALSTILRGQYNIRLVESDEIGIVGVGEATIPMIQRFNQVAGIDEAEFMKATQGSYKLGIEFVNWGRVGDRYIHGFGVLGQDLWTVRFDQYWQRLRGLGKARELDEYSITRMAARHNKFMPPRRDLANSPLSDIAYAYHFDASLYARYLRTVSEQRGVRRTEGKIAQVSQRADDGYVDAVVMESGERIEGDLFIDCSGFRALLIEGALKTGYEDWNHWLPCDRALAVPCESVSPLTPYTRATAHRAGWQWRIPLQHRTGNGHVYSSAFMEDDEAQRILLANLDGKPLAEPRMVKFRTGMRKLGWNKNVVAMGLASGFLEPLESTSIHLIQSSIARLVQFFPDRGFNQLEVDEYNRQSRFEYERIRDFVILHYKLNQRDDSDFWKQCAAMPVPDSLQHKLDLFRARGRVVRFDNELFAEAGWLQVMHGQNLKPEGYDPLVDLLPVEEAEKYLESIRDVIGQCVQHMPDHAEYIAQHCAATRR

SEQ ID NO: 88316 - protein, 501 aa, Alteromonas marina
  REGION 1..501: note = tr|A0A0B3Y3F8|A0A0B3Y3F8_9ALTE Tryptophan halogenase; OS = Alteromonas marina OX=203795 GN=RJ41_12470 PE=4 SV=1
MTVSGLDSSKNQTPVKNVVIAGGGTAGWMAATALSRLLGKSIKVTLVESKDIGIVGVGEATIPPIRTFHKLLGIDEKAFMRATQATFKLGIEFENWREQAHSYIHSFGITGRECWAGEFHHFWLRAKEYGFGGEFGDYCPELIAAKQSKFATSEAMPLNFAYHFDAVAYGRFLKSLACEAGVTHKEGDIEKVTVCPQAGNIQSLQLASGEVINGDFFIDCTGFKGLLIEQALHTGYDDWRHYLFCDSAVAMQTELTAPPVPYTKSVAHKAGWRWQIPLQERMGNGLVFCSRFMSDEDAIDTLKAQVTGAPINEPRVIRFTPGKRRRGWNKNCVALGLSSGFIEPLESTSIHLIMTGLIRLMRLFPFDGITQSAIDEYNNKFDSEMSAILDFIVMHYKVTQREDSPFWQQCQRMEIPTSLEHKLALFAESGRVFLDDGDIFRVDSWTQVLMGQGMTPSQYHRVADEMSEQSLKQFMAGLKQQVDNHVAKLPSHEAFLTQYLN

SEQ ID NO: 88317 - protein, 502 aa, Massilia sp.
  REGION 1..502: note = tr|A0A098UC46|A0A098UC46_9BURK Tryptophan halogenase; OS = Massilia sp. JS1662 OX=1519190 GN=IA69_10160 PE=4 SV=1
MTQQTPLQDIVIVGGGTAGWMAAAALARLLQGRFAIRLVESDEISTVGVGESTIPMIRLFNDVLGINEDEFVRETKATFKLGIEFRDWSLAGERYMHGFGRFGQDVMTVEFFQYWLKAHQAGIAPDLEHYSINRMGARAGKFMRPPPEAPNSPLADIVYAFHLDAGLYARYLRTYAEARGVRRTEGKVVEVRQRPHDGFIESVVLASGEVVTGDLFLDCTGFRGLLIEQTLHAGFEDWSHWLPCDRAWAVPCALSGDLLPYTIAHARPAGWQWRIGLQHRTGNGHVFSSRHMSEDEAASILLQNLDGEALAEPKLLRFTAGRRRKAWHRNVVAIGLSSGFLEPLESTSIHLIQSALSRLLALFPDKGFHQADIDEFNRQSDFEIERIRDFLILHYHATSRADTRFWNHVRTMDIPDTLRRKIDLFKAHGRVVRENEELFTTIGWQQVLHGQGVRAGGYHPLVDLMGEGELRDFLSNTERVIGRCVDVMPAHKDFVAAVAGAK

SEQ ID NO: 88318 - protein, 505 aa, Massilia sp.
  REGION 1..505: note = tr|A0A098U2B5|A0A098U2B5_9BURK Tryptophan halogenase; OS = Massilia sp. JS1662 OX=1519190 GN=IA69_27575 PE=4 SV=1
MLDKAIRKLVIVGGGTAGWMTAAPLALKLGASCEIVLVESPEIGTVGVGESTLPTIRYYNHALGIDGADFVRRTKATFKLGIDFCDWGHLGNRFFHGFSDFGPAIENRPAFMYWLRLARDNPDMPSYEEWSISTAMAHGYRFVPPHGDQPGPTNAYSYAFQFDAGLYAQYLREYAMARGVQRVEGTVGNVEQHPETGFITALQLQDGRRIEGDLFVDCTGFRGLLIEGVYKAGYEDWSAMLPCNSAQAVPSALADRLTPYTRSTAKSAGWQWRIPLQHRNGNGHVYCNAFMSDEEAGRVLLDGLDTEALEAPRQLRFTTGRRRKSWVKNCVAVGLSSGFLEPLESTSINIIELAVGWLIQYFPDRDCNPELADEFNRLVAQRYEFVRDFIVLHYKLTNRTDSEFWRYCANMAIPDSLQHQIDLFRTSGRIVIYDREGFQADSYASMLLGHGIRPERTDPLIDRMDQARLLDHFRKVHATIRQVVGAMPDHAALVAQIAAEPMRKS

SEQ ID NO: 88319 - protein, 519 aa, Caulobacter sp.
  REGION 1..519: note = tr|A0A1I3WAA7|A0A1I3WAA7_9CAUL Tryptophan halogenase; OS = Caulobacter sp. UNC279MFTsu5.1 OX=1502775; GN = SAMN02799626_03250 PE=4 SV=1
MSPAGTRQGPIRRVVIVGGGTSGWMAAAALARLAPRDVTVTLVESDDIGTIGVGEATIPTLHDFNALLGIDEDQFVRQTRATFKLGIQFENWGQVGETYIHPFGVHGRTTPEYKFHQLWLRLAHEAGEDAARRAAIGDLADYNLGAVAARLGRFDRPRGGSDSVLSTIRYAFHFDAGLYARYLRNYAERGGVRRLEGVVVDVAMRPDDGFVQSVQLRDGRVVEGDLFIDCSGFRGLLINQALGVGYVDWSRYLPCDRAVALPRRRVAPPDPFTRATADLAGWRWRIPLQHRMGTGYVYCSEHLEDQAAADRLISQGDGEPLAEPRHLRFTAGHRERFWVKNCVAIGLAGGFIEPLESTSIHLAQMGVARLMMLWPECSFDPAEIDQYNTATRLEYEQTRDFIVLHYKATRRDDTAFWRRCAAMEIPDSLAHKMALFRSGGRVFRFHDDLFTEDSWLAVMLGQGVMPRSYDRLADSLDRDQLARNMARLKAVTLQAAHALPSHETFIQTHCAATPDRIAG

SEQ ID NO: 88320 - protein, 533 aa, Duganella sp.
  REGION 1..533: note = tr|A0A1E7WS22|A0A1E7WS22_9BURK Flavin-dependent tryptophan halogenase RebH OS=Duganella sp. HH101; OX = 1781066 GN=rebH_2 PE=4 SV=1
METGKTMKTIPTPVKNVLIVGGGTAGWLTAAFLARTLGADAGPGAGGDSVRITLVESKEIGIIGVGEGTFPSIRGTLAAIGIDEARFIRECNATFKQGIKFTDWVRPPGTPGNDHYFHPFSLPSQRPGGPELLPYWLQGAAPAGVGFAAAATMQKRVADASHAPKRFNDADFMGPLNYAYHFDAGKFAALLSTHAQSLGVRHVLATVERVSLDGQGAIGAVHTREAGELTADLYIDCTGFRAALIGDALGTPFRNINDTLFVDRALAMQVPYDTADAPIPSYTIATAHEAGWTWDIGLHQRRGIGYVYSSRHTDDARAEQVLRAYIGKASDGLNPRQLKLNVGYREQHWVKNCVAVGLSGGFLEPLESSGIGLIETAAYLVSYLFPHDGDMAPVAKVFNEMMKARYERIVDFVKLHYCLTQRRDHAFWTDNTDPASIPASLRDKLAMWRRRAPHRMDFVVDLEMYPPSSWQYVLYGMEYPTAQYANASTLPRFDEARREFQMIEQMSQRALADLPTHRALIDHFLQRGERKTA

SEQ ID NO: 88321 - protein, 504 aa, Caulobacter sp.
  REGION 1..504: note = tr|A0A1I3PJK1|A0A1I3PJK1_9CAUL Tryptophan halogenase; OS = Caulobacter sp. UNC279MFTsu5.1 OX=1502775; GN = SAMN02799626_01308 PE=4 SV=1
MAHLNKIVIVGGGSAGWICAAMLSHYFQNGPTQVELVESEEIGTIGVGESTIPPFLQLIRTLGINEQEFIQETQAAFKLGIRFENWRAKGDVYYHPFGQIGGPLEVNEFYQCWLRAKQNGHPSGLQDFAPATVMADAGKFMLPSKAQRTMIANANYALHIDARLVALYLRRFAEARGVKRTEGVVTDVVTRPDGGIAKVILRDGREAAGDFFIDCSGFRSLLIGKTLGEPFRDWTDVLLCDRAVALQTENVGAPHPYTLAQAQDFGWRWRIPLQHRSGNGYVFCSKYLSDDEAVAALVGQVQGETVLGPTIIPFKTGMRQRLWVRNCVAIGLAGGFIEPLESTALHLIYKGMDYLLRFFPDLDADPTLAAEYNRRMTVDYEEIRDFIVLHYATTKRDDTPFWRAYQQVEIPESLRERIALFKAAGVLRDGVDDMFRAPSWQSVMEGMGVRPDRYQQLVDRIPLSVIMNLMDKSAPMLADFVATLPSHEEFLRTHCPAAPFKRSA

SEQ ID NO: 88322 - protein, 501 aa, Caulobacter sp.
  REGION 1..501: note = tr|B0T7S8|B0T7S8_CAUSK Tryptophan halogenase; OS = Caulobacter sp. (strain K31) OX=366602 GN=Caul_2138; PE = 4 SV=1
MARTNPIRSILIVGGGTAGWMAATWLAGRLARQDIQITVVESPDIRTIGVGEATVPAIRGYFRDIGVSEAEVMAATQGTVKLGIEFRDWKRDGESFFHPFGLYGMASRGVPFHQFWLKRQAEGDTAPLAAYSLCTQLAMANQMMEPPASPPNDLGVFNWAVHFDAGLYAQFLRRKATSELGVTHVDGTVVEVAKNGENGFLTGVALADGRVLEADLFIDCSGFRSLLLGQALGVDYEDWTHLLPCDRAVALPCERDGPLTPYTRSTALAAGWQWRIPLQHRVGNGYVYSSRHISDDEATAVLMSRLEGPALAEPNLLRFQTGRRRRFWEKNCIALGLAAGFMEPLESTSIVLIQSGLERLGALFPDRGFDPALADEYNRITTLEYERIRDFLLLHYVANRREGEAMWDHVRQLALPEPLVHKMRMFASRGTMVRYEWESFHDPSWLSMYAGFDIAPRAHDPMADYFTKPELDSALRRMREAIARAQALAVPHEAFLAAQRP

SEQ ID NO: 88323 - protein, 527 aa, Rhodanobacter sp.
  REGION 1..527: note = tr|A0A1M7CQW8|A0A1M7CQW8_9GAMM Tryptophan halogenase; OS = Rhodanobacter sp. OK091 OX=1881037 GN=SAMN05428972_0759; PE = 4 SV=1
MARIRKILVVGGGTAGWLTACYLAKTLNIAEPESIRVELVESPNIGLLGVGEATFPSIRGTLAAIGLDERRFLVGASATYKQGIQYVNWVRPPGEPGPDRFFHPFSLPSQRSGNPELLPYWLLGGAPEGMAFADAVTMQKRLIDHGRAPKRATDPDYQGPMNHAYHFDAACFAAVLAEHGQSLGVRRHLATVERAELDGSGAIARIVTKEIGELSADLYVDCTGLRGALIGTAMQSPFHSRRDVLFADRAVALQVPYPKPDTPILPFTRATAQEAGWTWDIGLQKRRGIGYVYSSRHTDATRAEQVVRDYVGDAAAGLEALHIKFETGYRPDHWRRNCVAVGLAGGFVEPLESTGIALVELAAYLITHLLPGDVGDMERTARQFNQMMVARYERIIDFIKMHYCLTQRRDNAFWIDNTDPAGIPQTLQDRLALWRHRPPHRLDFVTDLEMFMPASWQYVLYGMEFRTDLEPMRSAYPQMEAAQREFAMIQQMAGHALGDLPDHRALVEQLCREHAQRLRQKETVGVS

SEQ ID NO: 88324 - protein, 506 aa, Xanthomonas citri
  REGION 1..506: note = tr|D4T3Z2|D4T3Z2_XANCI Tryptophan halogenase; OS = Xanthomonas citri pv. aurantifolii str. ICPB 10535; OX = 427082 GN=prnA PE=4 SV=1
MIPAPLRNIVIVGGGTAGWMAAAAFARVLGPTFKVQLIESEQLGTVGVGEATVPHIKAFNNLLGIDEAEFVRQTQGSFKLGIEFVDWQRPGSTYMHGFGTQIGHPLGLLPFHQYWIKQHARGKAQPLGAYTLNTVAATRGKFMTSAGDVPANSPLANIAYAYHFDATQYAHFLRRYSQQRGVSRIEGLVEQVQLHPESGHVQSLQLASGQVVHGDLFIDCSGFGGLLIEQALHTGYHDSTHWLPCDRALAVPCEKVGPPTPYTRSTARAAGWQWRIPLQHRTGNGYVYCSAHISDDEAAATLLANLDGKPLADPRPLRFTTGRRKQCWNRNVVALGLASGFLEPLESTSIHLIQSGISKLLELFPREGISPVLVQRYNDRLAFEFDRIRDFLLLHYHATERDDSAFWRHCRHMPITPELQATLDLFRDSGRFYRNAEEMFAEISWVQVLVGQGILPQGYHPLVDQVPDRDAEGFLASVAQTISHCVDVMPSHQQFIDRYCKAVTLP

SEQ ID NO: 88325 - protein, 511 aa, Caulobacter sp.
  REGION 1..511: note = tr|A0A1I3PNJ0|A0A1I3PNJ0_9CAUL Tryptophan halogenase; OS = Caulobacter sp. UNC279MFTsu5.1 OX=1502775; GN = SAMN02799626_01353 PE=4 SV=1
MTDQAVRNILIVGGGTAGWMTAAALSAKLAGLPIAIRLVESAEIGTVGVGEATVPHIRHFNAALGLDEADFMRRTQATYKLGIEFRDWGKPGDSYIHPFGAYGAAIAGVGFHHHWLRARQGGDATPLEAYSLPIMAARQGRFAPPSPDLSSVASTYNYAYQFDAGLYAAYLRAYAEARGVVRTEGKVADVALRGGDGFIEAVTMESGERIEADLFIDCSGFRGLLIEQALKAGYEDWTRWLPCDRAAAVPCETVEISTPYTRCTADTAGWRWRIPLQHRVGNGYVYSSAHISDDDAAAALLAGLEGKAQADPRFLRFTAGHRRKQWSRNCVAVGLASGFLEPLESTSIHLIQVAVTTLLELFPDRGCDPADQDEYNRVMNLEFERIRDFLVLHYHANQRTGSPFWDDRRNLPIPDSLAYKMDLFRDRGVVVKYKDGFFLEPSWLAVYLGQNVVPRAYDPVSDSVPDAVLAQRLKAIRDSVADTAGAMPAHDDWVARFCAAAPVNAAQAVRA

SEQ ID NO: 88326 - protein, 500 aa, Caulobacter sp.
  REGION 1..500: note = tr|A0A1I4AH19|A0A1I4AH19_9CAUL Tryptophan halogenase; OS = Caulobacter sp. UNC279MFTsu5.1 OX=1502775; GN = SAMN02799626_04587 PE=4 SV=1
MTDNRIRSVVVVGGGTAGWMSAALLARALGETVRIRLVESEEIGTVGVGEATIPQIRHFNAFLGLDENAFLAATQGTIKLGIEFVDWRAPGQSYIHAFGEIGRPLGAVPFHHYWLAGRRKGDDHALWDYSLNARAARAGRFDRAVRRAAGDAGEPLTYAFQFDAALYARHLRDHAQRLGVARTEGKILGAMLREPDGFVRAVTLESGEVVEGDFFLDCSGFRGVLIEQALKTGYEDWSDLLPCDRAVAAPTANVGPPRPYTQAIARAAGWQWRIPLQHRTGNGHVFCSRFVSEDEATAQLMASLEGEPLAEPRTLKFVTGRRKRFWNRNVLALGLAGGFMEPLESTSIHLIQSGLSRLLNLFPNKGFAQRDIDEYNRQTGLEFERIRDFLVLHYWANQRAEPFWKACRDRAVPTELTRKVELFRTHGRLFREPDDLFLEASWLQVLVGQGVPPDDHHPMTGQLTDDQLRGFLADLRKITADGAAALPAHGDFLRQQRAAR

SEQ ID NO: 88327 - protein, 500 aa, Caulobacter sp.
  REGION 1..500: note = tr|B0T6X7|B0T6X7_CAUSK Tryptophan halogenase; OS = Caulobacter sp. (strain K31) OX=366602 GN=Caul_2064; PE = 4 SV=1
MKPLKKILIAGGGSAGWMTAALCAKLFQGLYEIVLIESEEIGTVGVGEATIPAIKRFNELLGLDEDDFLRRTQGSFKLGIQFKDWSRLGSSYVHGFGVIGQDLGWLRCHQYWLRMNALGHGGDFAQLSINTAAALDNRFMRAKPEMGDSPIAHIAHAFHFDAGLYARYLSGYAQERGVRRREGKIVDVALRSDDGFVQSVTMDDGEVIAADLFVDCSGFRGLIIEQAMKTGYEAWKHWLPCDRAIAVPCERSANFTPYTRSTAREAGWQWRIPLQHRTGNGHVYSSEHIDDDEAERVLLANLDGAQRADPLRIRFVTGKRKKIWNRNCVAIGLASGFLEPLESTSLHLIQSAIIRMVRLLPDAGFDQAGIDEFNRQSDFEYERIRDFIILHYKATQRDDTAFWRYCRDMEVPATLQRKIDLFSANGRVFREDDELFTEESWIQVFLGQGIIPRGYDPLVQVQSDAQIAQYLANIETVIGKCVKVMPTHADFVAKTCQAPG

SEQ ID NO: 88328 - protein, 505 aa, Xanthomonas citri
  REGION 1..505: note = tr|D4T3I7|D4T3I7_XANCI Tryptophan halogenase; OS = Xanthomonas citri pv. aurantifolii str. ICPB 10535; OX = 427082 GN=prnA PE=4 SV=1
MTQAQIRKVVIAGGGTAGWIAACALSHQFRNLLDITLVESEQIGTVGVGESTVPPIRTFHRFLQIDEQEFLRAVAGTFKLSISFEHWRRQGERYIHPFGITGQSTLVCAFHHLWLESQRRGMPGSFGDYCLETVASRVDRFALHGEPAVNYAYHLDAALYARFLRARSEACGVKRVEGRIQQVTVQPHSGDVASLVLEDGQTIEGDLFIDCSGFRGLLIEQTLHTGYEDWSHWLPCDRAVAVQTEALGPPVPYTRAIAHEAGWRWHIPLQHRVGNGLVFSSKHLSDDEAHAKLLRDVAAPVVKEPWMVPFRTGRRLKAWNKNVVSLGLASGFIEPLESTSIHLTISAVVRLLALFPAGGIAPSQVQLFNDVSRAEMEHVRDFVILHYHATQREEPLWQQCRQMELPESLALRLRAWRERAHAWQGADELFRVDSWTHVLMGQGIAPEQHHPLTRAFSDHDLRRLLDGIAQPIQHAVQQMPSQQDFIERYCKAGEQVWGMRSPVPA

SEQ ID NO: 88329 - protein, 501 aa, Caulobacter sp.
  REGION 1..501: note = tr|A0A1I3PNW0|A0A1I3PNW0_9CAUL Tryptophan halogenase; OS = Caulobacter sp. UNC279MFTsu5.1 OX=1502775; GN = SAMN02799626_01356 PE=4 SV=1
MTDQRLRKIVIVGGGTAGWMTAAALGRFLKDGHTQVTLVESEEIGTVGVGESTIPQIKIFNRMLGLDEFDFVRRTKATFKLGIDFVDWKTIGHQYHHPFGPYGVDMEGVSFHAYWLRLKAMGEAADLGEYSLQAVASAQGKFMRPNQQRNSPLARIDHAYHIDAGLYARFLRGYAEERGVRRQEGRIVDVHQRTEDGFIEAVTLQNGQRVEGDLFIDCSGFRGLLIEQTLKTGFEDWSQWLLNDRAVAVPCALGGSTQPVTRATARPAGWQWRIPLQHRLGNGYAYSSQHISEDEATAYLLAHLDGEPLIDPFTLRFKAGRRKKSWNKNVVAIGLSAGFMEPLESQSIHLIQVGISRLLAMFPDKRFETPDIDRYNRVMKFEYETIRDFLILHFHATRRNDTPYWDYLREMPIPDYLADKMAVFQSYGRVFRENEELFTDTSWFAVMVGQGLEPRGHDPMADVMADDELRARMADIHAVIARSAQVMPDHMRFIADNCAAA

SEQ ID NO: 88330 - protein, 522 aa, Alteromonas sp.
  REGION 1..522: note = tr|A0A136I295|A0A136I295_9ALTE Tryptophan halogenase; OS = Alteromonas sp. Nap_26 OX=1795869 GN=AXW14_17575 PE=4; SV = 1
MKESHFQAPLTSIVVAGGGAAGWLTAAILAAEHNIKNNDRVSVTLVESPDVKILGVGEGTWPTMRDTLRKIGISEADFIASCDASFKQGTRFINWKSTESENIYDHPFSLPAGFFEGEVGAWWLSHGHQHQKSTFSEMFSTQSLLCNFSKAPKQVQTPPYAAVANYGYHLDAHKFAELLKTHCIERLGVNYVNDHIEHIKEDVEGYIASLECKSQEIRGDLFVDCTGFSASLIGKHFNSPITDVSQGLKNNSAMAVQAGYVDETVDIASATLSTAHENGWIWDIGLPHRKGVGCVYSSEFASDEKAAETLKAYLTSCKKTKDVSENDFRKITFSPGYRKTAWVKNCVAVGTSAGFVEPLEASALVMVEMSARFISEHLPNHREIMPSVSKRFNSNFTRRWERIVDFLKLHYVLSERKDSPYWRFMTNLDNASEQLKDWLLEWQYRPISLTDFCYADELFPAASYMYVLYGMKAPEQFAINFSRYSDSVMGQTLNAVKANEKLSHKHVAALPTNRELIKAIRA

SEQ ID NO: 88331 - protein, 496 aa, Caulobacter sp.
  REGION 1..496: note = tr|A0A1I3W6M6|A0A1I3W6M6_9CAUL Tryptophan halogenase; OS = Caulobacter sp. UNC279MFTsu5.1 OX=1502775; GN = SAMN02799626_03191 PE=4 SV=1
MQDQVVKKVVIAGGGTAGWMAAAALAKQLGPLLDITLIESDEIGTVGVGESTIPTARTFNALLGIDEPAFMRATQATFKLGISFEHWGQIGDRYIHSFGQVGKSNWMGSFHHFWLAAKAAGFGGELGDYCFELKAAEADRFSAGEGPELNYAYHLDATLYGGFLRRMSEDLGVRRVEGKISQVQQHPETGFIQALVMENGDRVEGDLFVDCTGFRGLLIEQTLEAGYEDWSHWLPTNSALAVQTRSTGPAVPYTRAIAHAAGWRWKIPLQHRVGNGLVYCNEYMSDDQARETLLGALDGERLIEPRVIRYRTGRRRKTWSKNCVALGLASGFVEPLESTSIHLIMIGVTRLMQLFPFGGVSEAVVARYNQQAVDELEKIRDFIILHYKLTERTDSPFWDRCRTMDIPDSLAQRIALFRESAQAFQAPGELFQVDSWLQVMLGQRLQPAAHHQMGRLMPPEQLRRALADLSGNIARAVGGLPNHQAFIDRYCGVAAT

SEQ ID NO: 88332 - protein, 522 aa, Caulobacter sp.
  REGION 1..522: note = tr|B0T750|B0T750_CAUSK Tryptophan halogenase; OS = Caulobacter sp. (strain K31) OX=366602 GN=Caul_3561; PE = 4 SV=1
MDRSRRILIVGGGTAGWLTAAYLAKSLRIAEQAHLEITLLESPDIGVIGVGEATFPTIRTTLRFLGVDEARFIRETSATFKQGIRFNDWAWAQGEGGDGPQRHQYFHPFEAPFSTDGASLAPYWLLQSEATRAPFAEAMTIQARVADAQRAPKRPHEGDFSGPLNYAYHFDAAKLAVVLAERAVELGVRRLPGLLTGVELDATGAIDHVISQEHGRLEADLYIDCTGFRAELIGQALKAPFKSARPILFADRALACKIPYDRPDAPIQSFTVATAHEAGWTWDIGLNGARGVGCVYASDHMDDDRAEAILRGYVGEGVEIAPRSLSFEAGYRQKQWVKNCVAVGLSAGFLEPLESTGVVLIEAAVAIIAELFPHNGPISAPALRFNELMTARYDNIITFLKLHYCLSQRTEPFWRANADPASIPERLADLLEQWRWRPPTRYDFILDLETFAFFNYQYILYGMGFKTDLSPGRGEFPDVAAADKLFAKIKTFGDRATQDLPSHRDLISRINRFGFDRAAEHA

SEQ ID NO: 88333 - protein, 530 aa, unidentified
  source 1..530: note = Saccharothrix saharensis
  REGION 1..530: note = tr|A0A543JPX6|A0A543JPX6_9PSEU Tryptophan halogenase; OS = Saccharothrix saharensis OX=571190 GN=FHX81_7318 PE=4; SV = 1
MEDRRIKKVVVLGGGTAGWMAAAYLGKALGPGVTITVLEAPSIPKIGVGEATVPNLHKTFFEFLGIAEEDWMRECNASYKMGIKFTNWRTPGRGEADPRPYGDGTDHYYHLFGLLPNHENQPLSHYWAHKKLTGQTDEPFDYACYREPPILDAKLSPRFMDGTKWTNYAWHFDTNLISPFLRKWSIENQNAIHIQDLMTEAVIDQRGHVSALKTEGGLTIEGDLFIDCSGFRGLLINQAMKEPFLDMSDHLLNDSAVATQVPHDDAANGVEPYTSSIAMSSGWAWKIPMLGRFGTGYVFSSRFQTRDDATLEFCTMWGLDPETANLNQIKFRVGRNRRAWVKNVVSIGLASCFLEPLESTGIYFVYAALYQLAKYFPDKNFDSILQDRFNAEIETMFDDSRDFVQGHFSFAPRNDTAFWQACKELRLADDFQEKVRMYKAGLAVNMPITDESTYYANFDAEFRNFWNNSNYYCIFAGLDYLPDHSLPALAARQDVLDSAEPVFAQIKQTQKELLTTLPSTYEYLKQLHGK

SEQ ID NO: 88334 - protein, 497 aa, Caulobacter sp.
  REGION 1..497: note = tr|B0SXK4|B0SXK4_CAUSK Tryptophan halogenase; OS = Caulobacter sp. (strain K31) OX=366602 GN=Caul_4092; PE = 4 SV=1
MTDNRIKSVVVVGGGTAGWMSAALLARALGGTVDIRLVESEEIGTVGVGEATIPQIRNFNAFLGLDENAFLAATQGTIKLGIEFIDWRAPGQSYIHAFGEIGRQLGAVPFHHYWLAGRLKGDDHPLWDYSLNAQAAKAGRFGCAAGAPPTEALTYAFQFDAALYAGHLRAYAEHHGVARTEGRILGANLRGVDGLVESVTLESGEVVAGDFFIDCSGFRGVLIEQALRTGYEDWSSYLPCDRAIAVPTANVGPPRPYTQAFARSAGWQWRIPLQHRTGNGHVFCSRFISEDEAVGQLMANLEGEALAEPRTLKFVTGRRKVFWSRNVLALGLSSGFMEPLESTSIHLIQSGLSRLLNLFPDKAFAQRDIDEYNRQAGLEFERIRDFLVLHYWANQRDEPFWRACREMAVPPELTRKVELFRARGRLFREPEDLFLEASWLQVLVGQGVLPERCHPMTGMITDPQLQGFLADLRKITADCAAALPAHADFIRQHAAAR

SEQ ID NO: 88335 - protein, 533 aa, Mitsuaria sp.
  REGION 1..533: note = tr|A0A1I6KW71|A0A1I6KW71_9BURK Tryptophan halogenase; OS = Mitsuaria sp. PDC51 OX=1881035 GN=SAMN05428960_4067; PE = 4 SV=1
MDTGLSSTHHNDPETFMTPIQDILIVGGGTAGWLTAAFLARQLGTAQGGVRITLVESSDIGIIGVGEGTFPSIRGTLSAIGIGEAEFLQACSATYKQGIRFDHWVRPPGTPGADHYFHPFSQPSQRPGAPELLPYWLAGEAGPTRAFAEAVTLQKAVADARHGPKRAADGDYLGPLNHAYHFDAGRFATLLATHGQALGVRRVIATVDRVDLDEQGAIAAVHTREAGTLTAGLYIDCSGFRARLIGEALGSPFRSMRDVLFVDRALAMQVPYARPEAPIASYTIASAQESGWIWDIGLQERRGIGHVYSSRHCDDADAERVLRRYIGPASDGLTPRRLTLDIGYRETHWVKNCVAVGLAGGFLEPLESSGIGLIETAAYLIGQLFPFNGDTAPVARHFNAFMKARYERIVDFIKLHYGLTQRTDTAFWRDNADPASFTDSLKEKLAMWRCRPPQRLDFITDVEMYLPASWQYVLYGMEFKTEPGAWMAPLHRGEEARREFAAIAQLGAHALRDLPPHRTLIEQILARADRRAA

SEQ ID NO: 88336 - protein, 512 aa, Caulobacter sp.
  REGION 1..512: note = tr|A0A1I3PJK6|A0A1I3PJK6_9CAUL Tryptophan halogenase; OS = Caulobacter sp. UNC279MFTsu5.1 OX=1502775; GN = SAMN02799626_01309 PE=4 SV=1
MQHRAQDRRIRDIVIVGGGTAGWMAAASLKQHFGAAPVKITLIESSEIGTIGVGEATIPTIRRFYQALGLSDIDVLRATGGTCKLGIRFNDWTAPGASFIHPFGLYGQDLKGVAFHHYWMRLRALGEDVPIGDYSLGASLAAGGKFTTPSRNPPSTLSVFDWALHFDAGLFARLMRQVAERNGVRRVDARIVKVNLRGEDGFIESVSLDSGATIAGDLFIDCSGFRGLLIEEALHTGYEDWSQWLLCDSALAVQSEGQGPPPPYTDVTARPAGWQWRIPLQHRWGNGYVYSSRHTTDEAARAVLTGALDERLLHEPRKIGFHPGRRRKAWNRNCIALGLASGFLEPLESTSIALIETGIEKIKQLFPSRDFDPAVVDEFNEMSRLEMERVRDFVILHYKLNRRPDTTGFWTHCREMAVPDTLQRKIDLWRAQGHFVRYRWEMFSPPSWLAIYAGFGLLPQTYDLSVDGFDAAQLSGALAEMRKAVADTVAATRSHGDFIEQYARPQQPVAAE

SEQ ID NO: 88337 - protein, 533 aa, Alteromonas sp.
  REGION 1..533: note = tr|A0A136I137|A0A136I137_9ALTE Tryptophan halogenase; OS = Alteromonas sp. Nap_26 OX=1795869 GN=AXW14_08705 PE=4; SV = 1
MTQLNEERSVKHIVVVGGGTAGWLAAGVLASKLKSTFQITLIESPSVSSIGVGEGSWPSLRDTLIDIGIEEKHFLTACKASFKQGSTFVNWRKPEQTNSLQQEHVYHHPFTVPVGYNELDIHSCWQAFASNEKYENAFSLQAAMCEANKAPKQVSTPDYAHVLNYGYHFDATALATLLHAHCTEKLNVVYKQAHITSVNNDSEGYIASVTTEDGIQINGDLFIDCSGSQGILIDKHYNVSWHSIEDTMLNNRAIAVQAPYANNDDVISSATIATAQSCGWTWDIGLQHRRGVGLVYSEHFTTQQQAEETLLAHVSKRLPKEHVSELDVRSLRFTPGYREQFWVKNCLSLGMSSGFIEPLEASAIAMVELGIRMLCDAFPQNFTHMKWVEERYNRRFHYRWQRVIDFLKLHYVLSNNNTPYWLAQRDSSTIPDSLAQLLDVWRFQSPSRLDLIENEEIFPSASYQYVLYGMEFQTLPSALQITRSSAQKAQDIRQKMQQTKTAYLQGLPTNRDLLSQIIASKNKEQTHDLIGFR

SEQ ID NO: 88338 - protein, 497 aa, Caulobacter sp.
  REGION 1..497: note = tr|B0T4N0|B0T4N0_CAUSK Tryptophan halogenase; OS = Caulobacter sp. (strain K31) OX=366602 GN=Caul_1853; PE = 4 SV=1
MQEQVVKRVVIAGGGTAGWMAAAALVKQLGPLLDISLVESDEIGTVGVGESTIPTARTFNALLGIDEPAFMRATQATFKLGIAFENWGRIGDRYIHSFGQVGKSTWMGGFHHFWLQAKAAGFGGDLGDYCLELKAAEADRFSTGDGPELNYAYHLDATLYGGFLRRMAEALGVKRIEGKISQVEQQAETGFIQALVMENGDRVEGDLFIDCTGFRGLLIEQTLKAGWEDWGDWLPTNSALAVQTRATGPAVPYTRAIAHEAGWRWKIPLQNRVGNGLVYCSEYMSDDKARETLLESLDGERLIEPRLIRYRTGRRLKTWHKNCVALGLASGFVEPLESTSIHLIMIGVTRLMQLFPFHGVSDAVVARYNQQAVDELEKIRDFIILHYKLTERTDSPFWDRCRTMDIPDSLAQRIDLFRESAQAYQSPGELFQVDSWLQVMLGQRLEPREHHLMGRLMPADQLNRALSDLRGNIARAVTQLPSHQAFLDRYCPASAAM

SEQ ID NO: 88339 - protein, 501 aa, Caulobacter sp.
  REGION 1..501: note = tr|A0A1I3X3V5|A0A1I3X3V5_9CAUL Tryptophan halogenase; OS = Caulobacter sp. UNC279MFTsu5.1 OX=1502775; GN = SAMN02799626_03509 PE=4 SV=1
MTDRSIRSIAIVGGGTAGWMAACLLSQALRGTGCAVTLVESPDIGVVGVGEATIPPILDFLKLIEVDLDAFIPAVQATFKLGIKFDDWRAIGDGYWHPFGTFGVSIDRRPFHHLFHKARARGLNPTVPRFSLAAALGDAGRLAHPDPRAPGPVAGLRQALHFDATLVAGFLRGHAERRGVRRLEREVAGARLRDDGFIDALALKGGGELAADLYIDCSGFRGLLIEQALGAGYEDWTRWLPCDRALAAPTAHVGPPAPYTQAAALGAGWRWRIPLQHRAGNGYVYSSAFIDDGAAQDELLAAIGQPLAEPRRLSFTAGRRKAMWSRNCVALGLASGFLEPLESTSLHLVCSGLYKLLDHFPDRDFAPVNIAAYNRALADEYETYRDFILLHYCLTARDDTPFWRERAAAPLPDRLAERLELYRACGRIDARPGELFTDLSWFYIFEGMGVKPRAYDPLVEASNFDQVRAILPELTARIDAVVAQSPAHEAALAAILRRSAA

SEQ ID NO: 88340 - protein, 498 aa, Alteromonas sp.
  REGION 1..498: note = tr|A0A136HV19|A0A136HV19_9ALTE Tryptophan halogenase; OS = Alteromonas sp. Nap_26 OX=1795869 GN=AXW14_15500 PE=4; SV = 1
MNRPMNIVIAGGGTAGWMAANYFAHKWPSDKVKVTLVESPDIGIIGVGEGSTPTLKRFFEELKIKESDWMPKCNATYKVSIQFNDWSPSSGVKHYRHPFISQTDTFTQRAFEVNCRTRRLGLDTHVTPEDFLLNGVLAKQNKAPITPDNFPFRMEYGYHFDSALLGNYLRDVAVEKGVTHISAVISDVVLHLSGDISHLVTEKGNIEGDFFVDCTGFSSHLLQQTLGVKFNSYSDNLFNDSAVVLPTHAYETIPVETQSTALSNGWCWSIPLQNRTGNGYVYSASHLTKDKAEEELRRHLGLENSDVEARHLKMKVGQVAQHWQKNCLALGLSQGFIEPLEATALHLVQICIEYFSDTFEKSGFSSKESAAYNAFAKERFDRVRDYIVAHYKLNTRDDSDYWRANRNNMVLSDSLKSLISTWFQREDLTSEINRQNIGMHWDSVSWHCLFAGYGAFPPLEQNQPGRGDLYSEQKIKRFIQGCALNFKHHNNVLQTQQS

SEQ ID NO: 88341 - protein, 501 aa, Caulobacter sp.
  REGION 1..501: note = tr|B0T4L6|B0T4L6_CAUSK Tryptophan halogenase; OS = Caulobacter sp. (strain K31) OX=366602 GN=Caul_1839; PE = 4 SV=1
MTDQRLRKIVIVGGGTAGWMTAAALGRFLKDGHTQVTLIESEEIGTIGVGESTIPQINIFNRMLGLDENEFVRRTKATFKLAIEFVDWKRIGHAYYHPFGPYGVDMDGVSFHAYWLRLKAMGEAADLGEYSLQALAAAQGKFMRANHQPNSPLGSIAHAYHIDAGLYARFLRDYAEDHGIRRQEGKIVEVHQRAVDGFIEAVTLQSGQRVEGDLFIDCSGFRGLLIEQTLKTGYEDWSNWLLNDRAVAVPCEPAGARAPVTRATARPAGWQWRIPLQHRLGNGYAYSSEHISEDEATAYLLANLDGAPLRDPFTLRFKAGRRKKSWNKNVVAIGLSAGFMEPLESQSIHLIQVGISRLLAMFPDKRFEQPDIDRYNRVMQFEYEKIRDFLILHFHATQRNDTPYWDYLREMPIPDYLADKIAVFESYGRVFRENEELFNDTSWFAVMIGQGLEPRGHDPMADVMSDDELRAKMKGIHGVIAKSAEVMPDHMTFIAENCAAQ

SEQ ID NO: 88342 - protein, 505 aa, Caulobacter sp.
  REGION 1..505: note = tr|B0T4L9|B0T4L9_CAUSK Tryptophan halogenase; OS = Caulobacter sp. (strain K31) OX=366602 GN=Caul_1842; PE = 4 SV=1
MTDRAVRNILIVGGGTAGWMTAAALAAKLAGLPIAIRLVESAEIGTVGVGEATVPHIRHFNAALGLDEADFMRKTQATYKLGIEFRGWGKPGDSYIHPFGAYGAPIGGVGFHHHWLRARQAGDPTPLEAYSLPIMAARQGRFAPPSPDPRALASTYSYAYQFDAGLYAAYLRAYAETRGVVRTEGKVADVALRGEDGFIEAITMENGERIEADLFIDCSGFRGLLIEQSLKTGYEDWTRWLPCDRAAAVPCDTVERSTPYTRCTVDMAGWRWRIPLQHRVGNGYVYCSGHISDDEAAAALLAGLEGPAQAEPRFLRFVTGRRKKQWNKNCVAIGLASGFLEPLESTSIHLIQVAVTTLLELFPERDCAQADQDEYNRVMTLEFERIRDFLVLHYHANQRTDAPFWNERRTMSIPDSLAYKMDLFRDRGVVVKYRDGFFLEPSWLAVYLGQNILPAAYDPVSDGVPTAALTRRLTAIRDSIADTVRTLPTHDDWIARFCAATPAAA

SEQ ID NO: 88343 - protein, 516 aa, Mitsuaria sp.
  REGION 1..516: note = tr|A0A1I6IWR7|A0A1I6IWR7_9BURK Tryptophan halogenase; OS = Mitsuaria sp. PDC51 OX=1881035 GN=SAMN05428960_0343; PE = 4 SV=1
MSFTPPTPSVPRSPVRRVVIAGGGTAGWMMAACIAKHLGKQLDIRLVESDEIGTVGVGEATIPTMLTFHQLLGLDEREFMAATQATIKLGIQFEGWRDPDTRYIHAFGSTGIDHWTAGFQHFWMKGRERGMASDYGDYCLELRAAQQNRFAHLPGDGINYAFHLDASLYGAFLRRFSEGFGVRRIEGRIAEVLLRPDGDLRALKLQDGSEVEGDLFIDCTGMRSVLLGQTLGVGYQDWSHWLPCDSAIALQTASVRDAVPYTRAIAHPWGWQWQIPLQHRVGNGVVFSSRYTDDDTARAALLGNIEGEVLTPHRVIRFKPGQRDVVWQRNCVAVGLASGFLEPLESTSIHLIQRSAIRLLQMFPKDGIRQSDVDEYNAQMRHELEHIRDFIVLHYHLQQRTDSPMWRDLREMSVPASLQHRLDLFRESGRVFRGPNELFTENSWIQVMLGQGLMPEQHHPTADLMSDRELAGFLGGIKARIDQTVQQMPGHQQYIARYAPGTQWQMPQVPQAPVTA

SEQ ID NO: 88344 - protein, 495 aa, Duganella sp.
  REGION 1..495: note = tr|A0A1H8BC38|A0A1H8BC38_9BURK Tryptophan halogenase; OS = Duganella sp. CF402 OX=1855289 GN=SAMN05216319_4787; PE = 4 SV=1
MQNVRRVVIAGGGTAGWMAAAALSKTLGKVIDLTLVESDEIATVGVGEATIPTMITFHNLLELSEPEFMAATQATFKLGISFENWRDVNQDYIHSFGTTGTDHWSAGFQHFWRKGVAHGLASDYGDYCRELKASLLDRFAHLPDNGMNYAYHLDAGLYARYLRKFSEPLGCKRIEGKIVQVNTNPANGYISSLTMADGSQIEGDLFIDCSGFRGLLIGQTLGVEYEDWSQWLLCDSALAVQTASTSALPPLTRAIAHGSGWQWRIPLQHRVGNGLVYSSKHMDDETAHQTLMGNLAGEPLMNPRPIRFTPGQRVQTWRKNCVAIGLSSGFLEPIESTSIHMIQRSLIRLLQVFPANGPLCQSDIDEFNTQAATEVHHIRDFIIAHYKITNRRDTQFWRDCAALEVPPSLRHRIDLFRESGKVFKAAHELFAENSWIQVMLGQGILPERYHPIADRMGEQELAYFLNNIKSSVSTLANQLPSHAEYIQRYCRAQPL

SEQ ID NO: 88345 - protein, 533 aa, Caulobacter sp.
  REGION 1..533: note = tr|A0A1I3X7U8|A0A1I3X7U8_9CAUL Tryptophan halogenase; OS = Caulobacter sp. UNC279MFTsu5.1 OX=1502775; GN = SAMN02799626_03552 PE=4 SV=1
MGVSDRPINDILIVGGGTAGWMTAAYLARRLGSTRPDGVRITLIESSEIGIIGVGEGTFPTIQNTMRTLGVDEARFMREAGAAFKQGIRFVDWKTAPQGGVHSCYYHPFAQPRLLNGGLDLAPYWLMGEAGNIPFSDAVTLQDKVCDAMRGPKRLDDPQYGGPMAYAYHFDAGKLATLLRDVGKATGVKHLLGNVLAVNKADDGSIASVTTREHGDLVADLYIDCTGFAGALIGEAMGGAWIDRGDTLFVDRALALQVPYDRPDAPVATTTISTAHEAGWTWDIGLPDRRGTGYVYSSRHTTDDRAEQVLRGYVGRAGDGLTPRLLKLKVGHRDRHWIGNCVAVGLSGGFLEPLESTGIVLIEAAAYMLARNLPRRGGMEAAARQFNAAMTDRYLRAIDFIKLHYCLSRRTDNSFWTDNADPASIPGTLRDHLAMWRHRPPNVFDFPNLHESFKYFNYQYILYGMGFETTVDPAAHVHGGLARADFARVREAGLRAAASLPDHRALLTDVYARGFSTKVPDLATAEAGEAPRR

SEQ ID NO: 88346 - protein, 506 aa, Caulobacter sp.
  REGION 1..506: note = tr|B0T4L7|B0T4L7_CAUSK Tryptophan halogenase; OS = Caulobacter sp. (strain K31) OX=366602 GN=Caul_1840; PE = 4 SV=1
MTHAPVRKVLVLGGGTAGWMTAAALAKVLRGQVEVTLIESDQIATVGVGEATIPPILTFNAMLGLDEREFMRATKASFKLGIEFVDWTRLGDRYMHPFGTFGLDIEAIKFHQVWRKLRDQVGPIEDFNLAAVAAKQNRFAMPDRDPAKVLSSLKYAFHFDAGLYARFLRGFAEARGATRIEGKVADVALRGEDGFIQSVTLEDGRTFEADLFIDCTGFRALLIGQTLGGGYKDWSHWLPNDRAVAIPCGAGGDGLTPYTRATADKAGWRWRIPLQHRTGNGYVYSSAHISDDDALAALIAGLDGPAQAEPNFLRFQAGRRDRAWIKNCVAIGLSSGFLEPLESTSIHLIQAGITKLLALFPDKGFDSLEIDEYNRLTALQVELVRDFIILHFKATERSDTPYWDYVRTMDIPESLRRKIELFAGRGRLFQSDYDLFAEPSWIAVLMGQGITPRQYDPLVDALPEPALVQRLQRMSDLIGQTAQAMPSHQAFIARYCAADAVANIPA

SEQ ID NO: 88347 - protein, 468 aa, unidentified
  source 1..468: note = Gammaproteobacteria bacterium
  REGION 1..468: note = tr|A0A2N2A7N4|A0A2N2A7N4_9GAMM Tryptophan halogenase; OS = Gammaproteobacteria bacterium HGW-Gammaproteobacteria-1; OX = 2013791 GN=CVV05_20260 PE=4 SV=1
MAANLLAHRWRERNVDITLLESPEIGIVGVGEGSTPLLGTFFETLGIADSDWMPKCNATYKNGIRFSGWSQVKGYESYFHPFASAIDIHGQAAFFMHCAMRRNGYDVAANPDRFYLAAELARQRLAPLAAHHFPFRILHGYHFDAHLVGALLGEFAQRNGVDHRQGKVVAVERDEDGAVIAVITEDARRIEGDFFVDCSGFRSLIVQQALAVPFKPFSDNLFNDRAVVLPTPTDPTGTNSQTISTALRNGWVWNIPLRHRHGNGYVYSSRFCTPDQAEQELREHLGLLDDPVGARHLQMRVGRVEQVWEATALHLVQTTLESFIEHVERDGDLDARRRSFNDGIARDFDGVRDYIVCHYRMNRRTDTEYWRANASHDQLSDSLKAILTCWFTGQNLEHEIARQGIADIYPAMSWHCLLAGYGQFPDVAKLRAPEPGIGKADMAAIDDFRSRCALNFRDHAQVLAEMAA

SEQ ID NO: 88348 - protein, 506 aa, Rhodanobacter sp.
  REGION 1..506: note = tr|A0A1M7EEY9|A0A1M7EEY9_9GAMM Tryptophan halogenase; OS = Rhodanobacter sp. OK091 OX=1881037 GN=SAMN05428972_1845; PE = 4 SV=1
MIDSRIRNIVIVGGGTAGWMAAAAFAKVLGADYSIRLVESEEIGTVGVGEGTVPHLKLFNNLLGIDDVEFVKNTQGTFKLGVQFNDWGRLGDSYVHGFGTIGHDVGLLPFHQYWIKARQMGRAADIGAYSLNTVAAPRGRFMPSATDAPPGSPLANVAYAYHFDAGRYARYLRGYAEQRGVCRTEGKVAQTVLHPDSGFVEAIVLESGEQIDGELFIDCSGFRGLLIEQALHTGYLDFSHWLPCDRALAVACEKVGPPTPYTRASARPAGWQWRIPLQHRTGNGYVYSSAHVSDDEATATLLGHLDGKPIGEPRLLRFTTGVRRQAWNRNVVALGLAGGFMEPLESTSIYMIQSGIARLLNLFPQRDFSPVLIERYNAQSRFEYEHIRDFLILHYHATERDDTPFWNQCRTMSIPPQLIDNIRLFRDSGRFFRDGEEMFAVVSWVQVMLGQHIVPQNYHPLVDQMPDAELAEFMASVGHVVTSCVDAMPPHQAFIDRCCRASALVA

SEQ ID NO: 88349 - protein, 499 aa, Duganella sp.
  REGION 1..499: note = tr|A0A1H8DC84|A0A1H8DC84_9BURK Tryptophan halogenase; OS = Duganella sp. CF402 OX=1855289 GN=SAMN05216319_5288; PE = 4 SV=1
METIKQVVIVGGGTAGWMTAAALARVLGDKVQLTLVESDDIGTVGVGESTIPMIKLFNQVLGIDEDEFMRATQATFKLGIEFRDWGRVGDQYMHGFGIFGQDLATLPFYQYWLRLQQAGKAPPLENYSINRMAARAGKFMRADRSHGNSPLADIVHAFHFDAGLYARYLRQYSEARGVRRIEGKVADVLTRASDGHVDALRMANGDLIGGELFIDCSGFRGLLIEEALHTGFEDWSHWLPCDRAWAVPCELGADLLPYTRASARPAGWQWRIGLQHRTGNGHVYSSKFMGDAGARQLLLDSLDGRPLAEPKLLRFTAGKRKQVWNKNVVAVGLSSGFLEPLESTSIHLVQSTIARLISFFPDRGFSAPDIAEFNRQCAFEIERIRDFIILHYHATERDDTPFWNYVRTMDIPDTLREKMELWRTRGRIVRVDNELFAEVGWLQVLEGQRVPAAGHHPLAQLLPEQEIADYLGDIASVIGKCVDQMPSHAAFIKARCAAN

SEQ ID NO: 88350 - protein, 521 aa, Xanthomonas citri
  REGION 1..521: note = tr|D4T1T1|D4T1T1_XANCI Tryptophan halogenase; OS = Xanthomonas citri pv. aurantifolii str. ICPB 10535; OX = 427082 GN=prnA PE=4 SV=1
MTDTTPSDPHQRPVRRVVIAGGGTAGWMAAAALSKLLGRHLHITLVESDEIGTVGVGEATIPSLVTFHRLLEIDEAAFMAATQATIKLGIAFEHWRDVDQHYIHSFGHAGTDHWSAGFQHFWLKGRQRGVARDFGDYCLELRAAQEGRFAHLPNGGMNYAYHLDAGLYARFLRRFSEGFGVTRVEGRIGQVETDAQSGFLTALTLQDGMRVEGDLFLDCTGFAGLLIGKTLGVGSDDWSRWLFADSALAVQTESVGPPVTYTRSRADQAGWMWRIPLQHRVGNGIVYSSRYMDQDGARAVLERHLTGRALTEPRPLRFTPNQRHRVWEKNCVALGLASGFLEPLESTNIHLIQRGIIRLLQTFPQVIIAVDIAEYNRQAAQEITHIRDFVILHYHATDRRDTPFWRDCAAMDIPDSLRHRVELFRQSGRVFHQANELFAENSWVQVMLGQGVVPQQHHPVADLMGDAELSRFLETIRTRVEAALVRLPAHADFLQRYCPAPPLPEPAARVPAPPVMATPAG

SEQ ID NO: 88351 - protein, 519 aa, Caulobacter sp.
  REGION 1..519: note = tr|A0A1I3TJY5|A0A1I3TJY5_9CAUL Glycine/D-amino acid oxidase OS=Caulobacter sp. UNC279MFTsu5.1 OX=1502775; GN = SAMN02799626_02379 PE=4 SV=1
MDRRRRILIVGGGTAGWLTAAYLAKSLRIAEQAHLEITLLESPEVGIIGVGEATFPTIRTTLQFLGIDEARFIRETSATFKQGIRFNDWAWAPKEDGERHQYFHPFEAPFSTDGASLAPYWLLQDEATRAPFAEAMTIQARVADAQRAPKRPHEGNFSGPLNYAYHFDAAKLAQVLAERARELGVRHLQGRLTQVELDATGAIDHIVCAEHGRMEAELYIDCTGFHAELIGQALKAPFKSARPILFADRALACKIPYDRPDAPIQSFTVATAHEAGWTWDIGLNGARGVGCVYSSDHIDDDRARAILGDYVGRGVDIAPRALAFEAGYRTKQWVKNCVSVGLSAGFLEPLESTGVVLIEAAVAIIAELFPHNGPINAPAFRFNELMTARFDNIITFLKLHYCLSQRTEPFWRQNADPASMPERLVDLLEQWRWRPPTRYDFILDLETFAFFNYQYILYGMGFKTDLSPGRSEFPDVAAAEKLFAKIRNFGERATHDLPSHRDLIAQINRFGFDRSLEPA

SEQ ID NO: 88352 - protein, 514 aa, Caulobacter sp.
  REGION 1..514: note = tr|B0SVR5|B0SVR5_CAUSK Tryptophan halogenase; OS = Caulobacter sp. (strain K31) OX=366602 GN=Caul_2406; PE = 4 SV=1
MVRPVKNIVIVGGGTAGWLTAGLIAAKHKARQATGFTVTLVESPNTPIIGVGEGTWPTLRTSLDKIGVSETDFFRECDAAFKQGAKFARWTTGAADDAYYHPLMLPQSFSQVNLVPHWLVGGAGRSFCDAVTPQGRLCDEGLAPKTITAAPYQGAANYAYHLDAGKFAPFLQRHCCDKLGVRHVLADVESVAMTEDGDIRGVVTEQHGEIQGDLFVDCTGFRALLLGETLGVPFRGCGDVLFCDTALAIQVPYETETSPISSHTISTAQSAGWIWDIGLPTRRGVGHVYSSRHISDEHAERELRAYIGPAGHNLPARKIAIRSGHRETFWKRNCVAVGLAAGFLEPLEASAIVLIELSAKLIAEQMPACREVMDIVAARFNATTHYRWGRIIDFLKLHYVLSQRSDSAFWRDNRARETIPDRLADLLLLWRHQPPWLHDEFDRADEIFPAASYQYVLYGMGFRTQIEPESLADERAIAERAWRETAAQTERLRATLPHHRDLIRKIVEHGLQPV

SEQ ID NO: 88353 - protein, 481 aa, Caulobacter sp.
  REGION 1..481: note = tr|B0T4L8|B0T4L8_CAUSK Tryptophan halogenase; OS = Caulobacter sp. (strain K31) OX=366602 GN=Caul_1841; PE = 4 SV=1
MTGRSLKSVAIVGGGVAGWMTACALARVLPADCAIRVVETAAAAPRGALSTQPTLRAFHGLLGLDEPALMRAARGTFKLGSRFSGWTVADHVEGFSDTGANLDGVAFHHHWLRARERGEAGRYEDYNLAAVAGRLGRFAPPSEDPRSVLSTLSYGLHLDAAGYVAALRAAAGRVDRMAGEIVEVTPNADGGLDTVRLASGERVAADLFIDTTPDGRLIGSNAVGAWIDWSSWLPCDRLALREVAARLEPPPLTEVEAIPEGWLRRIPLRGGDAVALAYNSRLTSDDAAREILGGEATIAPLSNGRRAQAWVGNCLAIGPAAGQLEPLNGDDAHLVQSGVSRLIALLPTADGSPLAATEYNRLMAEELDRTRDTAAFRYAVAARTDPVWTLARQAPPSPALAYKLSQFESRGRVVMYDEETFVEGAWLAAFLGHGILPRRHDRLADRLPADQADAALARLRGLIRQAALAMPTQAQALKDPA

SEQ ID NO: 88354 - protein, 226 aa, Arthrobacter sp.
  REGION 1..226: note = tr|A0A0K2RK78|A0A0K2RK78_9MICC Tryptophan 2-halogenase OS=Arthrobacter sp. Hiyo8 OX=1588023; GN = AHiyo8_35290 PE=4 SV=1
MNQPESTTCVVVGGGPAGVMLGLLLARAGVEVTVLEKHADFLRDFRGDTVHASTIRLLDELGLGEGFRALPQSKLGNFKLPAGGKEVTLADFDRLKPPYDYVAMVPQWDLLNFLVDAAEQEPQFTLRMNTEATDLLYDDGGKVAGVAYRTRDAATGVETGTGELRATLTVACDGRGSVLRQKAGLVPASSPCRSTPGGSGSPGTRTSRNSWPRSCPASPVPMSSSA

SEQ ID NO: 88355 - protein, 252 aa, unidentified
  source 1..252: note = Albimonas pacifica
  REGION 1..252: note = tr|A0A1I3HUN8|A0A1I3HUN8_9RHOB Tryptophan halogenase; OS = Albimonas pacifica OX=1114924 GN=SAMN05216258_106184; PE = 4 SV=1
MTAHAPLAHALAPGDELAERLRAVVAGFGLPFGAERSVKLRAGEARHGRALFSLALGPDPRGQLLAAAEALGAPQAAVAPLLPWAGAASHLHVGAEPPATAKLYLEFAAPPPRRADLVFLAAKWRVDGAAPRALATYSRRDEPLESLLARLAPAPLHAPLRALAARTQTPPRALEVAEPPSPRLSLDLNVYDADLTLAEAAAEIRALHAALSAPGADALLAAHGAEPLGHVAAGVSRDGAPFATIYFGGGPG

SEQ ID NO: 88356 - protein, 518 aa, Caulobacter sp.
  REGION 1..518: note = tr|B0T3U1|B0T3U1_CAUSK Tryptophan halogenase; OS = Caulobacter sp. (strain K31) OX=366602 GN=Caul_3278; PE = 4 SV=1
MNRIEKVVILGGGTAGWMTAAALSRRLGRSLRIDLVESDAIGTVGVGEATIPTIHWFNDLIGLDEAAFVRETQASFKLGIEFVDWRRPGHRYFHPFGRHGVELDQIPFHQHWLKARADGGQHPLAAFSLATTLAEANRFAKPVADPRSILSTLGYAYHFDATLYAAHLRRLAEAGGVVRHEGKVATVERDPQSGFVTALVTDTGIRVEGELFIDCSGFRAMLIGETMGAEFQDWSHWLPCDRAVAAPCARVAETTPYTRSTLRPAGWQWRIPLQHRTGNGYVYASALVSDDEAAATLLRNLDGDLLADPRFLRFQAGFRRESWRGNVVAIGLSSGFLEPLESTSIHLIQSGVAKLITLFPDRDCDPRLAHQFNSLFARDMDGIRDFLILHYHATEGHNAPLWRQARAMALPDSLTDKLAHYRRSGRLMLTPDELFREASWLAVLEGQGVSAQGFAPLADTLDSAQNLRQLNDIASLIARVAPTLPHHDAAISELIRSAGAPLTSETAAPNSTDRTSER

SEQ ID NO: 88357 - protein, 495 aa, Alteromonas marina
  REGION 1..495: note = tr|A0A0B3YF44|A0A0B3YF44_9ALTE Tryptophan halogenase; OS = Alteromonas marina OX=203795 GN=RJ41_10725 PE=4 SV=1
MNKTVKNVVIVGGGTAGWISAAVIKRLIGAGVNVTLIESEEIGTVGVGEATIPPIITLNNVMGIDEKEFLRETNATMKLAIKFENWRVEGESYFHTFGAPGKSYAFCHFHHYFKRAQELGLSDSIWEYDLNYLACKAGKFAHIKSPDPIIEMPYAYHFDASLYARFLRKKCEAMGVTRKEGIITDVKQDADSGFITGVTLKDGAHIEGDLFIDCSGFKGLLTQQTLNTGYEDWSHWLPCDRAVAMPSERHEQTRPYTRSIAHSAGWQWRIPLQHRNGNGLVYSSNYYSDDKALDILSNNLDTKPLADPNFIRFKTGRRRKQWNKNVVAVGLSSGFLEPLESTSIHLIQSAVVRLIHLFPHEGFKQYQIDEYNKQSQLEYEQIRDFIILHYHVNERTDSHFWRDLREMEVPDSLTHKIELFRASGNLFREQNDLFLESSWLQVLLGQGIAQGDYHPLANALSEQKLQELMQNIKRIKNEPIGKIATHDDFLKQFCG

SEQ ID NO: 88358 - protein, 522 aa, Alteromonas marina
  REGION 1..522: note = tr|A0A0B3YFZ2|A0A0B3YFZ2_9ALTE Tryptophan halogenase; OS = Alteromonas marina OX=203795 GN=RJ41_09935 PE=4 SV=1
MHQANSPLRRIVVVGGGAAGWLTASIIAVTHKHDDNISVTLVESPDVSILGVGEGTWPTMRSTLLKIGISEETFLAQCNASFKQGTSFHNWRSDTIEHQYYHPFSLPFRYFESDVAAWWQSYAAEQDFAHAVCSQAALCDHHLAPKQRQTPAYAGIANYGYHLDANKFAALLQKHATTVLGVQHIVDHVDDVVGSSSEPIAAIVGREHGNITGDLFIDCTGFAARLIGQHYGVPLTSCSNVLANDSAIAIQAPYVDSSVDIASTTHSTAQDSGWIWDIGLPSRKGVGYVYSSAHCSEDEARATLETYLKHDKKTADVDVSKARKITFSPGYRKTLWVENCVAIGTSAGFLEPLEASALVMIELSATHIAKQLPRTYKECQAAGRQFNQAFEKKWERIVDFLKLHYVLSEREASAYWRDMRNQESCSTQLQDWLTLWKSRSPISSDFELREELFPAASYLFVLYGMGFRSQYNDVYQANLHTPEQRQAYAKHVQSIQQQLSGLPTNRQFLNQVAQSQGLSMHY

SEQ ID NO: 88359 - protein, 530 aa, Massilia sp.
  REGION 1..530: note = tr|A0A4Y9SCL6|A0A4Y9SCL6_9BURK Tryptophan 7-halogenase OS=Massilia sp. MC02 OX=2561931; GN = E4L96_10385 PE=4 SV=1
MARGCCAASCSSASTDNTHNRIQDRRPIVQNSSTPAGRPVRRVVIAGGGTAGWMAAAALSRILGKRLDLTLVESDEIGTVGVGEATIPTLLNFHNILEINEREFMAATMATFKLGISFENWRNVNEDYIHSFGLTGTDHWTAGFQHFWMKGRERGLASDYGDYCLELKAAQALKFAHLPNNGMNYAYHMDASRYSRFLRTMSEHHGTKRVEGKIAKVNTDAATGHITSLTLDSGSTIEGDLFIDCTGFRALLIGQTMGVPYEDWSHWLFNDSAIAVQTDATGPAVPMTRSIAHASGWQWRIPLQHRMGNGVVFSSRYIEDDAAKSLLLSTVAGEPLTDPRVIRFKPGQRPETWKGNCVALGLSSGFLEPIESTSIHLIQRGIIRLMQMFPTDGISAHDVAEFNRQSARELEHIRDFIILHYKVTNRVDSPYWRAAREMEVPASLQHRIDLFRETGRVFREPTELFAENSWIQVMLGQGIMPRTHHQTADLMGDHELSGFLNGIRDTIARTVAQLPPHQAYVQQYCGIPKM

SEQ ID NO: 88360 - protein, 504 aa, Caulobacter sp.
  REGION 1..504: note = tr|B0T7T4|B0T7T4_CAUSK Tryptophan halogenase; OS = Caulobacter sp. (strain K31) OX=366602 GN=Caul_2144; PE = 4 SV=1
MAHLNKIVIVGGGSAGWICAAMLSHYFQNGPTQVELIESEEIGTIGVGESTIPPFLQLIRTLGINEQEFIQETQAAFKLGIRFENWLEKGDVYYHPFGQIGGPLEVNEFYQCWLRAKANGHPSSLQDFAPATVMAAAGKFMLPAKAQRTMIANANYALHVDARLVALYLRKFAEARGVKRTEGIVTDVATRADGGVEKVIMKDGREVAGDFFIDCSGFRALLIGKTLNEPFRDWSDVLLCDRAIVAQTENIGPPHPYTLVQAQDFGWRWRIPLQHRSGNGYVFASQYLSDDEATATLLSQLQGEIVLGPSVIPFKTGVRERPWVKNVVSIGLSCGFIEPLESTALHLIYKGMDYLLRFMPDMDADQTLAAEYNRRMVADYEEIRDFIVLHYVTTRRDDTPFWRAYQQVEPPESLKARIALFKAAGVLRDGVDDMFRAPSWQSVMEGMGVRPERYQQLVDRIPLSVIMNLMDKSAPMLADFVKTLPSHQEFLDAYCPAEPFKRTA

SEQ ID NO: 88361 - protein, 557 aa, Alteromonas marina
  REGION 1..557: note = tr|A0A0B3Y522|A0A0B3Y522_9ALTE Tryptophan halogenase; OS = Alteromonas marina OX=203795 GN=RJ41_12465 PE=4 SV=1
MNNSQNQCGLHRVVIVGGGTAGWLAAGVFGAKLSTKHSVTLVESPTVSSIGVGEGSWPSLRDTLLDIGISESEFLTLCQGAFKQGSSFVNWRKNAHSYYHPFTVPAAYNELDIHACWKALAPNTPYQDAFSLQAAMCVAGKAPKQIATPDYAHVLNYGYHFDATKLADLLKQHCVDKLNVDYVSGHIGSIKSSSDGYIEKLITECGKEIVGDLFIDCSGSSGLLIDKHFNVPWIPVKRTMLNDRAVALQVPYSDTDTEIKSTTVATAQTCGWTWDIALQHRRGVGLVYCSQFTNEEQAKQVLIDYVRERYPSAQDAELSFRTLSFEPGYRSQFWVKNCLSLGMSSGFVEPLEASAIAMVELGLRMLCEAFPHNKKHMEIVSKRYNSRFAYRWQRVIDFLKLHYVLSDREEPYWIAQRDKASIPDSLAELLELWKYQSPSRLDLIENEEIFPSASYQYVLYGMGYSTSAPLLRLSEANKRKALHILKTLQRTKNAYLKGLPSNRVLLNDIAKRYNNEKQHVPSHAQCEKNEHASASSCKDIKNTSDKKDTYYDRIGFR

SEQ ID NO: 88362 - protein, 540 aa, Streptomyces sp.
  REGION 1..540: note = tr|A0A1Q5MKG7|A0A1Q5MKG7_9ACTN Tryptophan halogenase; OS = Streptomyces sp. CB00455 OX=1703927 GN=AMK16_29650 PE=4; SV = 1
MPRSAADTRVRSVVVLGGGAAGWMTAAYLGKALQGTVEITLLESGPAPAVSLGVATVPSLQHAFFDFLGINEEEWMRKCDASFQMAVRFVNWRTEGAGEARARALPRPSQGPDHFYHPFGLLPDYDQTPLSHYWFKRTYEGTTQEPFDYACFREPPVMDAKKSPRWLDGRTATRYAWHFDAGLIAGFLRDFAVAKLGVRHVRDELAGVVKDARGFVTGLRTQGGPVIHGDLFVDCSGFRGLLINEAMAEPFIAMGDHLLGDSVITTDVPHDDAAHGVEPYTSAIAMKAGWTWKIPMPGRFGTGYVYSSRFAGREEATGELCALWGLDPATTRVGHARLRVGRGERAWVKNVVAIGPSSCFLEPLEPTGIHFITTAVHQLVRHFPDLTFQAALVERFNREIRVMFDDTRDFVQAHFHYAPRNDTPFWRAGKELALPQGIQEKVAAYRAGLPIDAPVTDESAYYGLDSGSRSAWTNGSYYCVFAGLGLMPDAPLPALAHKPESVAGAEPLFDTVKRQQRNLLETLPSTYEYLRQLHGDPRFV

SEQ ID NO: 88363 - protein, 503 aa, Duganella sp.
  REGION 1..503: note = tr|A0A1H7XY71|A0A1H7XY71_9BURK Tryptophan halogenase; OS = Duganella sp. CF402 OX=1855289 GN=SAMN05216319_3826; PE = 4 SV=1
MNVTTPPKKIIIVGGGSAGWMTALMYGDALIKQGVEITVLESPTVGVIGVGEGSTPALKRYFDSLGISEAEWMPACHATYKSGITFDGWSTKPGYESYFHQFATMVDNLTLPNFMENVHARQRGAAIDARPNRYFLSSRLSDDCLAPHAAENFPFFTTYGYHFDATLLGQFLHQRAAALGVQHKVCHVTHAVMNERGDIAAVATQEGEQLAADFFIDCSGFSALLIGKTLETPFVSYADNLFNDSAIAMPSEIGDKIPTQTVSTAMKHGWAWKIPLTNRYGNGYVYSSSFVSADEAEHELRSKLGLLESDVQARHLKMKLGRVTKHWNRNVLAVGLSQGFLEPLEATALYLTQMTAAIFLLFLEKGDLSDKAQDLYNQEIHDYFDGHRDYIVAHYKTNSRSDTPYWRANAENLGSVSDSLKHIFQTWIEGKDLAAEIRRQNIERYYPVGSWYALLAGMGTFPEIGQAPNTEALAPLDDFMRRCALNFRDHRTVLNELAQQAGM

SEQ ID NO: 88364 - protein, 513 aa, Caulobacter sp.
  REGION 1..513: note = tr|A0A1I3XZ84|A0A1I3XZ84_9CAUL Tryptophan halogenase; OS = Caulobacter sp. UNC279MFTsu5.1 OX=1502775; GN = SAMN02799626_03793 PE=4 SV=1
MRPIKNIVIVGGGTAGWLTAGIIAAKHRARAATGFTVTLVESPNTPIIGVGEGTWPTLRTTLATIGVSETDFFRECDAAFKQGAKFARWTTGAADDAYYHPLMLPQGFSQVNLAAHWLAGDGTQSFCDAVTPQGRLCDDGLAPKTITAGPYQGVANYAYHLDAGKFAPFLQRHCCDKLGVRHVLADVRGVALTEDGDIRGVVTEQCGEIQGDLFVDCTGFRSLLLGETLGVPFRDCGNVLFCDTALAIQVPYESETSPIASHTISTAQSAGWIWDIGLPTRRGVGHVYSSRYISDEDAERELRAYIGPAARDLSARKIPIRSGHRETFWKRNCVAVGLAAGFLEPLEASAIVLIELSAKMIAMQMPACREVMDVVASRFNATTHYRWGRIIDFLKLHYVLSQRSDTAFWRDNRDPETVPERLADLLRLWRHQPPWLHDEFDRVEEVFPTASYQYVLYGMGFRTEIEPEALADERSMAERALRENAVQTERLRANLPRHRDLIRKIVEHGLQPV

SEQ ID NO: 88365 - protein, 512 aa, Caulobacter sp.
  REGION 1..512: note = tr|B0T7T3|B0T7T3_CAUSK Tryptophan halogenase; OS = Caulobacter sp. (strain K31) OX=366602 GN=Caul_2143; PE = 4 SV=1
MQETMHDRRIRDIVIVGGGTAGWMAAASLKQHFGNAPIGITLIESSEIGAIGVGEATIPTIRRFYQSLGLSDIDVLRATGGTCKLGIRFNDWLRPGSSFIHPFGLYGQDLKGVSFHHYWMRLRALGEDAPIGDYSLGASLATAGKFTTPSRNPPSALSVFDWAVHFDASLFARLMRQVAEQAGVKRIDARIVKTNLRGEDGFIESVTLDTGASVAGDLFIDCSGFRGLLIEEALHTGYEDWSQWLLCDSALAVQSEGQGAPPPYTDVTARPAGWQWRIPLQHRWGNGYVYSSRHTSDENAREVLTASLDERLLHEPRKIGFHPGRRLKAWNKNCIALGLASGFLEPLESTSIALIETGIEKIKQLFPNRDFDPRIVDEFNEMSRLEMERVRDFIILHYKANQRADDPTGFWTHCRQMAVPDTLQKKIDLWRVQGHFIRYRWEMFSQPSWLAIYAGFEMLPETYDLSVDGFDAGQLSEALAEMRKAVADTVASTRTHGDFIEQYARPRPVAAE

SEQ ID NO: 88366 - protein, 523 aa, Duganella sp.
  REGION 1..523: note = tr|A0A1H7V6D7|A0A1H7V6D7_9BURK Tryptophan halogenase; OS = Duganella sp. CF402 OX=1855289 GN=SAMN05216319_3467; PE = 4 SV=1
MKTLPKDGVKQVLIVGGGTAGWLTACFLAKQLGTGADGAVSITLVESKEIGIIGVGEGTFPSIRGTLATIGIDEARFIRECNGTFKQGIRFNDWVREPGTPGADHYFHPFSLPSQRPGGPELLPYWLQGAAGKDVAFAAAATMQKRVADAAHAPKRPSDADFMGPLNYAYHFDAGKFAALLSTHAQSLGVKHVQATVERVALDGDGAIGAVHTKEAGVLTADLYIDCTGFRAALIGEALGTSFRNINDVLFVDRALAMQVPYERPDAPIASYTIAQAHEAGWTWDIGLHERRGVGYVYSSRYTDDARAEQVLRNYIGKQADGLNPRQLKLNVGYRDQHWVKNCVAVGLSGGFLEPLESSGIGLIETAAYLVSYLFPHDGDFEPVAKVFNEMMKARYERIVDFVKLHYCLTQRKDHQFWIDNADMKSVPQSLQDKLAMWRKRAPQRMDFVVDYEMYPPSSWQYVLYGMEYPTELYANARTLPRTEEARHEFAMIQQMSQRALADLPTHRAMVEHLARRGERKIA

SEQ ID NO: 88367 - protein, 496 aa, Pseudoalteromonas sp.
  REGION 1..496: note = tr|A0A2N5LQ00|A0A2N5LQ00_9GAMM Tryptophan halogenase; OS = Pseudoalteromonas sp. MelDa3 OX=888435 GN=CXF89_16865; PE = 4 SV=1
MKPIKHVVIAGGGTAGWITAALLNKVLGKVINITLIESSAIGTVGVGEATIPPIIQLNNALGINEQDFINATNASIKLGIEFENWKTPGHSYMHAFGSLGKDFPFCDFYNFWVKGQITGCEDDLWDFSLNYQAAKQHKFAPLNTIPNTQLPGLSYAYHFDATLYAEYLKKLAISRGVKHIDAKISHVEQCDTGNVKSLALDNDSQISGDLFIDCTGLRALLIEQTLNTGFIDWSHYLPCDSAVAVQTKSTHELKPYTRSIAHSAGWQWQIPLQNRIGNGLVYCSRYLSDDDAKQLLLKSLPAEPITEPRIIKFKTGRRLKQWHKNVVSVGLSSGFLEPLESTSIHLIQTAVTRLIKLFPHNGISDALVTEFNKQSVIELEHIRDFIILHYKLTEREDSPFWRQCMQMDIPNSLTHKLNLFKHTGKVIREDDELFAEVAWQQVMIGQGLISDDYNSIVDSLSDDQLSDLFSTLKTLISSTVTQLPTHQNFLASIKKV

SEQ ID NO: 88368 - protein, 506 aa, Parvularcula sp.
  REGION 1..506: note = tr|A0A371RKZ1|A0A371RKZ1_9PROT Tryptophan 7-halogenase OS=Parvularcula sp. SM1705 OX=2292771; GN = DX908_13110 PE=4 SV=1
MSEPLRRIVILGGGSAGWMTAAALGNAIHKDCEVTLVESEAIGTVGVGEATIPPIRRFNRSIGVNEKEFVQATGATFKLGIQFIDWSRLGHSYFHPFGTFGSDFDSIPLYQYWLEARREGIAGPLDEYCMAWGAASRLKFTPPVSDRRNIQSTFDYAYHFDAGLYAGFLRRFAEAKGIKRREGQITKLDVDGSTGRLTAVHLDNGDRLEADFFVDCTGFRSLALGQTLGVGYQDWTHWLPCNRAVAVPCAHGGEFTPYTRSIARGAGWQWRIPLQHRIGNGHVYSSAHLTDDEAHEILLANLDGEAQGEPRLLRFTTGRRHYFWHKNVVAIGLAAGFMEPLESTSLHLIQSGIQRLLALFPDRHMDPLLAEEYNRITSLEYERIRDFLILHYHATSRDDTPFWRYCSNMTIPDSLSYKLAHFRRDGRIVADQYDLFVNASWLSVYVGQDEFPDRPDPMMQLRNRPEAFRNLESVHKAIKDAAEAMPRHDEFIARNCPADTGLVAAE

SEQ ID NO: 88369 - protein, 515 aa, Caulobacter sp.
  REGION 1..515: note = tr|A0A3R8N7S5|A0A3R8N7S5_9CAUL Tryptophan 7-halogenase OS=Caulobacter sp. 602-1 OX=2492472; GN = EIK80_15640 PE=4 SV=1
MRRRRSILIVGGGTAGWLTAAYLAKALRVADQGDLTITLLESPDIGIVGVGEATFPTIRNTLRFLGVDEARFIRETSATFKQGIRFVDWAETPADGRHHSFFHPFEAPFSTEGASLAPYWLLQDEAGRAPFAEAVTIQARVADAARAPKRPHESDFAGPLNYAYHFDAAKLAQVLAERARELGVRHLRGALSETVLDETGAIARVVSPEHGDLTADLYIDCSGFRAELIGKALGSPFKSARPILFADRALACHTPYDRPDAPIQSYTVATAHEAGWTWDIGLAGARGVGCVYSSDHMDDARAEAVLRDYLGGVEAETRRIRFDAGYRPKQWIGNCVAVGLSAGFLEPLESTGVVLIEAAVAMIAELLPHNGPVSAPARRFNELMAARYDNIIVFLKLHYALSRRQEPFWRQNADPASIPERLAELLEQWRYRPPARFDFILDLETFAFFNYQYILYGMGFKTDLAAGAGEFADVAGAARLFAKIRGFADRATQDLPSHRDLIARINASGFETEPA

SEQ ID NO: 88370 - protein, 793 aa, unidentified
  source 1..793: note = Methylorubrum populi
  REGION 1..793: note = tr|A0A160PEV7|A0A160PEV7_9RHIZ Tryptophan halogenase; OS = Methylorubrum populi OX=223967 GN=MPPM_2519 PE=4 SV=1
MFRSERSAPPRLVVAGGGPAGWMAAFYLKRVLRRAGWTVTLVAAAPAAGARVALATRPSFTRFLGAFDIDEAIFMRRCAATYRLASRYDDWFAEGQGHWHPFGACGPRIAGRDLFHYWMKLRESGPEEEAGSYADYAPQALMAAAGHGPRPETGRSSLSESGDYGYHLDRAGLVRFLRELALAEGVRVVAGRVREIERDLYGDVAALVLDDGRTVEGDIFLDCTGATSQLIGTALGEAWVAGNGPGDRLTRLSLPRSAEAPPFTAYRGRAEGWTASLPLADRTEHIFVHDSRTTLPDAAAEVLQRAFAGGADVTQSQLRYGRRASPWQRNVVALGAAAGAVEPLVGFDLDLVLAGLEAFLAYLPRQGEGSDVLRSAYIARLNRAQDDAVEAVAAHYVLGRRPERFWAAARAAPLPDRLADRLDLYELAGHVEPSGEALFGEGDHYLLFSGADFLPRRPFAPVDVSDGREIARLLASIRAQSVRIAQAMAPHDRLIEALHGPAPVAAPALRPAVASAGPASLRGTPEGARLADLVAGLGQPFGYERSVKASPAGLQTERFLISLHRISLGLTPGRTLDELAARLGLPERERAEAAGLIEDADILHLGYEGGASGTLYKLYVEWSSRTDAAWSGVDAAGAEPMLVHRAYKWRPEATHPPVVTLYHWPRVRGPEEIGARLTRIAGAWGAAGTPVRDTAHAILRLARDRGRGAVHYLEAREEPGLRLSYDLNLYACGLSVADAEPLLGQAFVDLGTPPQAAAAVLGERLGETLGHVAGGIGRDGRPFLTVYSGKAGA

SEQ ID NO: 88371 - protein, 504 aa, Pseudoalteromonas sp.
  REGION 1..504: note = tr|A0A2C6E5R9|A0A2C6E5R9_9GAMM Tryptophan halogenase; OS = Pseudoalteromonas sp. GCY OX=2003316 GN=CBQ28_16790; PE = 4 SV=1
MKSQKIVILGGGTAGWMAANMMAKSWADKAIEITVVESSSIGTIGVGEGSTPQFKGFMDYLGISEAEWMPACNATYKNGIRFIGWSTKPGFSSYFHPFPAQPDDYSAPAFFHNSFVRRKAIDVEGHPDHFFLATHLADLNKSPIAAESFPFEINYGYHFDSALLGQLLARKAAEFNVKHIDATITDVRKHLDGDIAALITSDGTEIAGDIFIDCSGFKSLLLQHTLGVGFESFESNLFNDAAVVIPTKQLDTIRSETQSVARQFGWSWHIPLTNRIGNGYVYSQRYCNADQAETELRAALGLLDSDVEARHIKMKVGQVKAHWSKNCIAIGLSQGFIEPLEATALHIVQETVQSFIECYQDADFTDGNRDKHNRALSERYQAIRDYIVAHYRVNSRTDTNYWLDNANNNNLSRSLYQILQTWVSGNNLSDELVRQNVEQYYPSVSWHCLLAGYGIYPEQAQLKSGNALANQHSIEKVNDFIRRCGLNFKDHRMELESFVANVHK

SEQ ID NO: 88372 - protein, 497 aa, unidentified
  source 1..497: note = Methyloceanibacter methanicus
  REGION 1..497: note = tr|A0A1E3W2W7|A0A1E3W2W7_9RHIZ Uncharacterized protein OS=Methyloceanibacter methanicus OX=1774968; GN = AUC68_03340 PE=4 SV=1
MVMLLNQLGLSESEFFEKTDATFKVAAHFINWNQDENGKPIEFLNILNAPGALDGRQFADYFVTFDPARTAPDAGIAYVRAFSPVAEIVRGNLAPRRPGEPDFSGEVGYTYHFDATKVAAYLRDIATSRGVKHILDDVDAVNVDERGFVTSLGLRERGEFGVDLVIDCTGFRGSILQQALGEPFEPYGEHLLNDRAAVVQIPHKDPGVIAPTTRATGFSAGWNFNIPLTTRVGTGYIFSSKFLSDEEAADELLSFYGDQAKGCEPRIIPMRTGRVRNAWVKNCVALGLSGGFIEPLEATAIFMTDLGVRWLANYLPTQDFEPELATAYNRHVRQVYEEVRDFVQLHYHLNNRADTPYWKAAREDMTLSDRLQENLRVWQHVAPEDLDLGSTFLFSSPVYTLLLIAKGFYKDRRLSRASSLSRTTYQRARDAERKARPGQLEGLISHAAFLKTGGKAPAGSVMAPHAGMAPAPELAGTKIKLKSQPARPRQSRKKKRR

SEQ ID NO: 88373 - protein, 514 aa, Caulobacter sp.
  REGION 1..514: note = tr|A0A3R8P9C5|A0A3R8P9C5_9CAUL Tryptophan 7-halogenase OS=Caulobacter sp. 602-1 OX=2492472; GN = EIK80_11855 PE=4 SV=1
MVRPVKNIVIVGGGTAGWLTAGVIAAKHRARQSTGFTVTLVESPTTPIIGVGEGTWPTLRTTLAKIGVSETDFFRECDAAFKQGAKFARWTTGEPDDAYYHPLVLPQSFGQINLAPHWLAGDASGSFCDAVCPQGRLCDEGLGPKTITAPPYQGAANYAYHLDAGKFAPFLQRHCCDKLGVRHVLADVRGVALAENGDIRAVVTEQAGEIEGDLFVDCTGFRSLLLGETLGVKFRDCGDILFCDTALAVQIPYERPDSPIATHTISTAQSAGWIWDIGLPSRRGTGHVYSSRHISDDEAERELRAYLGPAGKDLTVRKIAIRSGHRETFWKRNCVAVGLAAGFLEPLEASAIVLIELSAKLIAEQMPTCREVMDIVASRFNATTHYRWGRIIDFLKLHYVLSQRTDTAFWRDNRDPATIPERLSDLLLLWRHQPPWLHEEFDRADEVFPSASYQYVLYGMGFRTEVEAAALADEAALAQRALRENALQSERLLSSLPKHRDLIRKIVEHGLQPV

SEQ ID NO: 88374 - protein, 501 aa, unidentified
  source 1..501: note = Pararheinheimera tangshanensis
  REGION 1..501: note = tr|A0A5C8M2P5|A0A5C8M2P5_9GAMM Tryptophan 7-halogenase OS=Pararheinheimera tangshanensis OX=400153; GN = FU839_05010 PE=4 SV=1
MNTKAVKNVVILGGGTAGWITASLLVKVLGKAINITLVESDDIGIVGVGEATIPPIINFNAALGLDEKAFIRETQGSIKLGIQFENWGKPGDSYMHAFGAIGKEFPFCNFHHFWLKSKQQGMGFDFWDFSLAYQAARQNNFAKLARIEGVNLPGLSYAYHFDAGLYAQFLRRFCEPLGVKRIEGTVKKVHLDPVNGEVIRLTLASGNEVEGDLFVDCTGLHSLLIDKSLNTGFEDWSHWLPADSALAVPCGSVQPITPYTKAIAHPKGWQWRIPLQHRIGNGFVYSSKYCSDDEAKQTLLSNLDGKALAEPRKISFRTGRRLKQWNRNVVSIGLSSGFLEPLESTSIHLIQSGVFRLLKFFPHSGITDAARDEFNRQSKVEFEQIRDFIILHYKLNNRGDSQYWKDYQTMDIPESLRRKIDLFSASGLIFREQDELFAEVAWQQVFIGQGIVPTDTHPLVNALKEEQLQDLLSNLKAVMQLTSQRLGSHADFLQSCHPKDM

SEQ ID NO: 88375 - protein, 507 aa, Xanthomonas campestris
  REGION 1..507: note = tr|A0A561P9F2|A0A561P9F2_XANCT Tryptophan halogenase; OS = Xanthomonas campestris pv. translucens OX=343; GN = FHW28_2496 PE=4 SV=1
MGQIRKVVIAGGGTAGWIAASALSHQFRDLLDITLIESEQIGTVGVGESTVPPIRSFHRFLQIDEQDFLRTVAGSFKLSISFENWRRDGERYIHPFGITGQSTLVCAFHHFWLEAQRRGMPSELGDYCLETVASRADRFALQQTPPVNYAYHLDAGLYAGLLRRHAERHGLKRVEGKIQQVLQHAESGFVEALVLEDGTRVDGDLFIDCTGFRGLLIEQTLRTGYEDWKQWLPCDRAVAVQTEAVAPPVPYTRAIAHAAGWRWHIPLQHRVGCGLVFSSAHMSDDAARAKLLHDAAAPPIKDPWLVPFRSGRRLKAWNKNVVALGLASGFIEPLESTSIHLTIAAVMRLITLFPGDGIAPAMTDIYNAVSRAEMEHVRDFIILHYHANQREEPMWQACREMALPDSLQERLRAWRERAHAWQGADELFRVDSWIHVLLGQGIVPAQHHLLARALPDHDLQRFLDAIRQPIDRAVAQMPSQEAFIARYCKAGPEVWAGRAPARAPAPA

SEQ ID NO: 88376 - protein, 494 aa, Streptomyces parvulus
  REGION 1..494: note = tr|A0A191VAH9|A0A191VAH9_9ACTN Tryptophan halogenase; OS = Streptomyces parvulus OX=146923 GN=Spa2297_32975 PE=4; SV = 1
MHRDHEFDVVVVGGGPGGSTVSTLVAMQGYRVLLLEKEEFPRYQIGESLLPSTVHGICKLLGVEDELKKAAFMPKRGGTFRWGSNPEPWTFSFSVSSTFSGPTSLAYQVERMKFDQILLENARAKGVDVRERSSVADVVEEDGRVAGVVYRDADGVRHEVRSRFVVDASGNKSRIQSRIGGTRHYSDFFKNIALFGYFEGGKRLAAPNSGNILCAAFNSGWFWYIPLTDELTSVGAVLRREALDRVQGDREKALMGLIDECPLIAEYLSEARRVEDGPYGEVRVRKDYSYCQDTFWRPGMVLVGDAACFIDPVFSSGVHLATYSGLLAARSINSTLGGDIDEAKCFEEYESRYRNEYSLFHDFLVAFYDMHQDEDSYFWTAKKVIDSSAPGLESFVDLVGGGASREGGLVNAASYTEHRETDFQEFSELANRPAGENGTDRDLFDSTLVQSVLEEGAKIQVHAALGGAVDDEGPVRDGGLVPSADGMRWAEFAY

SEQ ID NO: 88377 - protein, 412 aa, Sporocytophaga myxococcoides
  REGION 1..412: note = tr|A0A098L8E4|A0A098L8E4_9BACT Tryptophan halogenase; OS = Sporocytophaga myxococcoides OX=153721 GN=MYP_192 PE=4; SV = 1
MSSEKVDVLVIGAGPSGAVAASIIHKHGLKVKVVEKLKFPRFVIGESLLPRCMEALEEAELLEAVKAKGFQQKSGAKFVKDGKICDFNFSNQFTQGWTWTWQVPRADFDKTLTDEMERKGIPVLFETGVTDIKFNGSDSITTIEDKDGNKSTIEARFIVDASGYGRVIPKLFNLDQPSNLPARRTLFAHTVDVNRFVDEEPNRITIVSHEPGVWIWIIPFSNGNTSVGFVGDTQFFDRFTGTPEERFRAMIKTQPHTQRRFDGVDFVFEPRTLEGWSVTTNKFYGDGFVLTGNVTEFLDPIFSSGVTLATVSGATAANLVVKKLKGQSVDWEKEFMEPTMQGVNTFRSYVMGWYDGTLQDIFFAPKPDDEIKKQICSVLAGYVWDLNNPFVKKHDRVIKNLSHLIRLEEGAS

SEQ ID NO: 88378 - protein, 499 aa, Caulobacter sp.
  REGION 1..499: note = tr|A0A3R8NAM3|A0A3R8NAM3_9CAUL Tryptophan 7-halogenase OS=Caulobacter sp. 602-1 OX=2492472; GN = EIK80_06725 PE=4 SV=1
MTQQTVRKVVIAGGGTAGWMAAAALVKQLGPLLDITLVESEDIGTVGVGESTIPTARTFNALLGIDEAAFMRATQATFKLGISFENWGEVGDRYIHSFGQVGKSTWMGGFHHFWMQAREQGFGGDLGDYCLELKAAEQNRFYTGEESPLNYAYHLDAGLYGRFLRGMAEAEGVRRVEGKIASVRQRGEDGFVEALVMENGEVVEGDLFIDCTGFRGLLIEQTLKAGFEDWDHWLPTNSALAVQTRSTEPAVPYTRAIAHEAGWRWKIPLQHRVGNGLVYCSDFMSDDDARAKLMGEIEGETLIEPRLIRYRTGRRRKTWDKNVVALGLASGFVEPLESTSIHLIMIGVTRLMQLFPFAGISLAAVDRYNRQADDELEKIRDFIILHYKATERTDSPFWDRVREMGIPDSLAQRIELFRQSAQVYQAPGELFQVDSWLQVLLGQRIQPRAYHHMGRLMPPQQLKGALEDLKRNIDGMVARLPQHQAFLDRYCAPLVSKSA

SEQ ID NO: 88379 - protein, 501 aa, Pseudoalteromonas sp.
  REGION 1..501: note = tr|A0A2C6DEW8|A0A2C6DEW8_9GAMM Tryptophan halogenase; OS = Pseudoalteromonas sp. GCY OX=2003316 GN=CBQ28_09780; PE = 4 SV=1
MKTHLPMKTIQSLTILGGGTAGWMCAAYLAKHQPNLSVTVIESSSIGRIGVGEGSTPHLQLFMQSLGVKERDWMPACQASYKTGIYFDNWNGDNGSYFHPFFSEMDAKTAEVYFVNANARRRGSEYIDKPEHYFLAAVLADKQQAPLPQRPLPRALEYGYHFDAQKLADWLRAFSLARGVKHIQSTVSSVQHHAKEIIALTLESGEQVKSDFYVDASGFNALLIEKTLEVPFISFADQLLNDSAVAIAGAKISPLPSSTSAIAMPCGWRWRIPLQGRTGHGYVYSSAHTTPEEAEAQLREAAQLDKGQAKHLTMKVGMMARSIEGNVFAIGLAQSFIEPLEATALMVTGYSIELLNGLLSQQLEAQAINQQLSELVLGIKEYVLAHYATSKRADSPYWQDAKIAALSLNELDELLTHWRSGGDFDAWLNQHRMHSPYIRPSWYCLLGGMDHRDSTCQMPFDQAPQHIEQAAKAYLTKLSDEHFIAHTTALEQLQRVQAFRA

SEQ ID NO: 88380 - protein, 804 aa, unidentified
  source 1..804: note = Methylorubrum populi
  REGION 1..804: note = tr|A0A514KN87|A0A514KN87_9RHIZ Tryptophan 7-halogenase OS=Methylorubrum populi OX=223967; GN = E8E01_11650 PE=4 SV=1
MLRSERSVPPRLVIAGGGPAGSIAAAYLRRILRRAGWSVTLVAPEPAAGPSVALATRPAFTRFRQGFDIDEAIFLRRCAGTYRLASRFEDWFAGGRGHWHPFGACGPRIAGRDLFHYWLKLRESGARWEAGDYADYAPQTLMAAEGRGPRPQAGTSSLVQSGDYGYHLDRAGLVRVFREIALSEGVRAVPGRVRGIERDPYGDVAALLLDGGERIEGDVFLDCTGAAAQLVGTALGEPWIAEGGAGDRIAYLSTAREPEPAPFTLYRGRPEGWIAALPLAGRFDHALVYDGRTTPPETAQALLRAASGCENGDGGVCDAELRRGRRRAPWQRNVVAVGAAAGAVEPLMGFGLDLVLAALEAFVAYLPRGGRAAEVLRRAYAARMNRLHDDAEQAVAAHYVLGRRPEPFWAAARAAAVPERLADRLDLYELAGHVEPEADAVFGEGDHYLLFAGADFLPRRPFAPVDVGDGREIERLLAGVRARSAQVAQTMAPHSVLLEGLHGRAPAGPTVQVAAAAKDSAARHGPQSLRQGPEGARLADLVAGLGQPFGYERSVKATPAGLQTERFLVSLHRTSLGLDPAKTLDALAEVLGLPAPERSEAAGLIAGADLLHLGYEAGPSGALYKLYVEWSARADAAWHETDAAGAAGAEPILVHRAYKWRVEGSAPPVVTLYDWPRVRTPGEIEARLARLGESWDGAGTSLLGTARDILRLAREHGRGAVHYLEAREEPGPRLSYDLNLYACGLTMGEAEMVIGQAIVDLGVPPPDAAAVLAERRGEALGHVAGGVGRDGIPFLTVYSGMAEA

SEQ ID NO: 88381 - protein, 497 aa, Pseudoalteromonas nigrifaciens
  REGION 1..497: note = tr|A0A379HBA3|A0A379HBA3_9GAMM Tryptophan halogenase; OS = Pseudoalteromonas nigrifaciens OX=28109; GN = NCTC10691_01820 PE=4 SV=1
MKPIKHVVIAGGGTAGWITAALLNKVLGKVINITLIESSSIGTIGVGEATIPPIIGLNNALGINEQDFIKATNASIKLGIEFENWKTPGHSYMHAFGSFGKDFPFCEFHHFWLKAKQQNHAPDLWDFSVNYQAAKAGKFAHLRNLPNTQLPGLHYAYHFDATLYAKLLKKLAQQRGVKRVEGKIKSVQQCQQSGDIQALTLESGSVIKGDLFIDCTGLSALLIEKTLNTGFEDWSHWLPCDSAVAVQSESANEPVPYTRSIAQNAGWQWQIPLQYRVGNGLVFSSRYLTDDEAKQQLLANLPGKAITEPRVIRFKTGRRRLQWHKNVVAIGLSSGFLEPLKSTSIHLIQTAAIRLIKLFPHNGIKHSQVTTYNLQSKTEIERIRDFIILHYKLTTRTDSAFGRQCQQMSIPETLQQKITLFKQTGKLTREDDELFSEPAWQQVMIGQGLEADDYHPLANALTDEPLLALFSDLKALINHTVEQLPSHSEFLSRMKNN

SEQ ID NO: 88382 - protein, 505 aa, Xanthomonas campestris
  REGION 1..505: note = tr|A0A561P8R5|A0A561P8R5_XANCT Tryptophan halogenase; OS = Xanthomonas campestris pv. translucens OX=343; GN = FHW28_2289 PE=4 SV=1
MIAAPLRNLVIVGGGTAGWMAAAALARVLGPDYRITLIESEQIGIVGVGEATVPHIKAFNNLLGINEAEFVRQTQGSFKLGIEFVDWHRPGTSYIHGFGTEIGHSLGLLPFQQYWFKQALAGKAKPLGAYTLNTVAAKRGKFMTSASDAPPNSPLANIAYAYHFDASLYAAFLRRYSEQRGVTRREGIVEEVQLHPESGDVVSVRLASGDVIGGDLFIDCSGFRGLLIEQALHTGYHDFSHWLPCDRALAVPCAKVGPPTPYTRATARAAGWQWRIPLQHRTGNGYVYSSAHISDDEAAATLLANLDGAALADPRPLRFLTGRRKQVWNRNVVALGLASGFMEPLESTSIHLIQSGISKLLELFPREGISPVLVQRYNDRIAFEFDRIRDFLVLHYTATERDDSDFWRQCRNMAITPELQATLDLFGDSGRFYRNGEEMFAEISWVQVMVGQGILPRAYHPLVDQVPAADIERFVASIEQTIGHCVDAMPPHQAFIDRYCAAAPL

SEQ ID NO: 88383 - protein, 802 aa, unidentified; identical to SEQ ID NO: 86963
  source 1..802: note = Methylorubrum populi
  REGION 1..802: note = tr|A0A177IYL6|A0A177IYL6_9RHIZ Tryptophan halogenase; OS = Methylorubrum populi OX=223967 GN=AX289_00050 PE=4 SV=1

SEQ ID NO: 88384 - protein, 503 aa, unidentified
  source 1..503: note = Pararheinheimera tangshanensis
  REGION 1..503: note = tr|A0A5C8M2Q1|A0A5C8M2Q1_9GAMM Tryptophan 7-halogenase OS=Pararheinheimera tangshanensis OX=400153; GN = FU839_00155 PE=4 SV=1
MSYAANNSIKKIVIVGGGTAGWMTAAALSNALQQGCHITLIESEQIGTVGVGEATIPPIRLFNQSLGINENDFIRATQGSFKLGIEFINWGRQNHSYFHPFGSYGRQFDLVSLHHHWLAAKAQGKADSLDSYCMAWVAAQQGRFAPPVTDPRHVLSTHDYAYHFDAGLYASYLRQYSEAKGVLRIEGKISAVKQHSISGFIEAVQLDNGQLLEGELFIDCSGFRGLLIEDTLKTGYQDWSHWLPCNRAWAVPSERGEFTPYTKSTAHQAGWQWRIPLQHRTGNGHVFSNHFISEQQAQDVLLQNLGAKALAEPRMLQFVTGRRNLFWNKNVVAIGLASGFLEPLESTSIHLIQAGIAKLLALFPDRDFDPLLTEEYNRVAIREIENIRDFIILHYKLTERDDSEMWRYCAAMPVPDPLTYRIEQFKRQGRLIPGEMDLFGNTSWLAVHIGQLNTPQKTDAVLAYRSIEGAERLAKLSQALQAAALSLPTHQQYIDQHCKAASL

SEQ ID NO: 88385 - protein, 534 aa, unidentified
  source 1..534: note = Woeseia sp.
  REGION 1..534: note = tr|A0A2E6EA89|A0A2E6EA89_9GAMM Tryptophan halogenase; OS = Woeseia sp. OX=1980636 GN=CMO98_08625 PE=4 SV=1
MRRKQVLVVGGGSAGWTAAAYLNAALNPGNQKLVDVSLIESPDVPRIGVGEATVPNINRTLATIGINELEFMKATDATFKASIRFVNWLDNKNKFYHHPFSRFGGGPNDNSGRRWLMSDRSVPFMNTISAQPVLCEMGLAPKVLEDTNLGIPVGYAFHMNALKYADYLRDFSTARGVTHYLENVVDVRITETGSITEIVTEGGKNLNADLFIDCTGFASLLIEKKLGVDWIDFSEWLLCDRAVVMPVPYETYYSGAIRPHTMATALSAGWVWDIPLQNRRGIGYVHSSAFISENDAERELHAYEGPHAKNLDTRLVKFKVGMRERAWFKNCIAIGLSGGFLEPLESTGLYLNELAAELLVEHFPYGDDMEPLAFRFNRLIQNRYYEILDFINMHYCLTNRTDTDFWREVGQPGRVNTRLQSKLDYWKIKPPSISDFIDPFFPGQPESPSAFGDASSDQRTPVDTGRLWNHHSYEAILYGMDFLRDECDEWFGKNRPRPAVHKRVLDTVNTAGDKLPPHDIWLKRMVGMQDYPKS

SEQ ID NO: 88386 - protein, 498 aa, Acinetobacter sp.
  REGION 1..498: note = tr|A0A4Q7BB22|A0A4Q7BB22_9GAMM Tryptophan 7-halogenase OS=Acinetobacter sp. WCHAc060025 OX=2518625; GN = EXE09_04150 PE=4 SV=1
MINFNSIKQVCVVGAGTAGWFAALKMRKILKKDIYISVVATQEIPTVGVGEGGILNLMSSLLQLEIPLLEFLKETGAVHKLGFVYEGWRTGCANDKYYHMFPYLSKHERINGYYPILSVLTNHNTAVSNIVDSIKLREENTSQDDLTKMFVNVQNHNFLSSFHFDTYKVAQYLKKIALSRGIRYIEGKVEKININEKNGDIESLEVHGKVINSDFIIDASGFSRVFIGQHFSSKWISLANKLVMNTAIPFHLKHPLTNPDLVTRSTAMNSGWLWRIPLQERVGAGYVFNDGFISPEKAIDEVEKKLGHYVEPIRVIKFEAGFFKDIWINNVLAVGLSSGFVEPLEATSIGQMLMQLELLSRVITETEGIVSDHLIDFYNQQNRNAWEGIGDFIRMHYDTTRDDTAFWKSTKDIPMSDKYKELKEIWKYRTPRDYDFADYQMDLMHHFGTYSWLAIGQALGHIKAEVTVNELMNLTAEQRKKLGQDIGEIYQRLGLNPK

SEQ ID NO: 88387 - protein, 508 aa, Shewanella baltica
  REGION 1..508: note = tr|G0AV80|G0AV80_9GAMM Tryptophan halogenase; OS = Shewanella baltica BA175 OX=693974 GN=Sbal175_2927 PE=4; SV = 1
MKVKQAIRKIIILGGGTAGWMAAAALANNPVFAAIELCLVESDNIGTIGVGEGSTPHLKRFMDNLGISEKDWMERCHASYKTGIDFINWNGDGQQYFHPFYFQMDVKPAEVFFINANARRRGHGNAVKPDAFFSSGVLAKHNLSPRPNKAMPYINEYGYHFDATELANYLKDYACQRGVRQIIADVVEVSTTQHQQIETLILANGERLSADFFIDASGFSAKLIHKALGVPFQSFAEELLNDSAVTVPLPVPALLDSTQTQQAKAQQAKYHTRATALSAGWLWQIPLTHRLGNGYVYSSRHLSANAAAKELLHCVNLPESTQVRFLKLRVGVSDKAWHNNVLAIGLAQSFIEPLEATSIMMTQFTLERFMSLFERYQLNKQAETLSRQTLNQAVMQLVLGIKDYIQAHYVTSQRSEPYWVAARKVAISQRLTQLLKAWYQGEDFDLLLYQYDQQLAYFRPSWYALLAGMDYRDPKLKRPFEPISADITAQAISYCQTLVEQYFQPKHS

SEQ ID NO: 88388 - protein, 493 aa, Colwellia sp.
  REGION 1..493: note = tr|A0A1V0KW64|A0A1V0KW64_9GAMM Tryptophan halogenase; OS = Colwellia sp. PAMC 21821 OX=1816219 GN=A3Q33_17760 PE=4; SV = 1
MQKVQKVVIAGGGTAGWVTAATLSSQLGSLIDITLVESADIGTVGVGEATIPTHKAFHRLIGVDEQEFMRKTQATFKLGIEFSNWGDIGERYFHAFGQIGRSTWMGDFQHLWQHASSLGWGGELQDYCFELQAAKAGKFDKDKANYAYHLDAGLYASFLSELSQKRGVKRIEGTIESIAMDSENGHISNLVLKNGTSVQGDLFIDCTGFKGLLINGALGVGFEDWSHWLPMNSAWAVQTEGKKEIPPYTKSIAHDASWQWRIPLQNRVGNGLVFCSDYTSEQDALQLLTDNLEGDMVSQPRLLKFKTGKRNKTWFKNCVAIGLSSGFLEPLESTSIHLSQISATRLVQMFPFNGMDEVLQTHFNNYVDGEVDSIRDFIILHYNLNRRSEPFWQHVATMDIPDSLQHRLELYKRTSIAFKNDLDLFRVDSWNQVMLGQGIKVEGYHQMGRLIKDDNLRQAFNDLQEHINSTVEGLPMHADFLRQYGVLDLHRKP

SEQ ID NO: 88389 - protein, 495 aa, Trabulsiella odontotermitis
  REGION 1..495: note = tr|A0A0L0GHG2|A0A0L0GHG2_9ENTR Uncharacterized protein OS=Trabulsiella odontotermitis OX=379893; GN = GM31_10840 PE=4 SV=1
MLSLKGIKRVVVLGGGTAGWYTALSLRKLFSANVEIRVVESTEIGIVGVGEGGLLNFQAALHSVDIDFNEFVRETNATFKWGFCYEGWRTGERDDKYYHPFASATGSASKWEEMGHYPLFSAMINNSIPLTSYLKGFDLIVNNASQEEARNALNNQAVDIINSFHFDSYKIAKYLKKIALSRNIIHQDVIVEHVETDDKGHVTALITEEKEKIELDFLVDATGLARKVIGKVVPSEWYSFKDYLLLDRALPFYMPHPLKNPYLVSRAIAMKSGWMWQIPLVDRVGAGYVYSSKHISDDDALQEIKDYLGYEITPQQNVIKFEPGCYRQVWVGNVLTVGLASGFVEPLEATSIGQMIEVVRNFTRVLVASQGVVSDNAIREFNESNFVSWMEILDFLRMHYDCPRRDTEFWQDVAKTPLTENYRAFKECIQVRAPRLLDVESYLLYGRRGMFHVVNWMFVAVGLGLIPPNAVVNDLLAIAPEKKQAVVDFLNSLNR

SEQ ID NO: 88390 - protein, 506 aa, Caulobacter sp.
  REGION 1..506: note = tr|A0A426GM57|A0A426GM57_9CAUL Tryptophan 7-halogenase OS=Caulobacter sp. 602-1 OX=2492472; GN = EIK80_06255 PE=4 SV=1
MQDNRIRKLVIVGGGTAGWMAAAALRRHFQGGPLEITLVESSEIGTIGVGEATIPTIRAFYNQLGLTDIEVMRATQATCKLGIRFNGWVREGQSFIHPFGHFGQDLRGVAFHHYWRKLAQAGEPTDIADYSLGASLARAGKFMAPSRNPASTLSVFDWALHFDASLFAQLMRRVAEENGVRRVDARVTKVNLRPEDGFVASLDLHTGESVEGDLFIDCSGFRGLLIEEALQTGYEHWNDMLFCDRAWAAQSEGVGDPMPYTDVTAHTAGWRWRIPLQHRYGNGYVFSSRHIGDEDALAELKAAIPDPLLHEPRLIRFNPGRRKQVWNKNVIALGLASGFLEPLESTSIALIETGIEKIKALFPDKDFAPEIVDEFNDWSRREMERVRDFIVLHYWANKRGDTAFWRDCNDVVLPEALRRKVDLFLTRGHFVRYRWEMFAPPSWMAIYAGFELLPQTVDPSLDGIDPRTLSAPLAEMRKAVREVVANAPPHAAFLDQYCRSAAMAAE

SEQ ID NO: 88391 - protein, 480 aa, Xanthomonas campestris
  REGION 1..480: note = tr|A0A109HPI0|A0A109HPI0_XANCT Tryptophan halogenase; OS = Xanthomonas campestris pv. translucens OX=343; GN = ATB53_09460 PE=4 SV=1
MAAAALVRVLGAGATRITLVESEAIGTVGVGEATIPPIALFNALLGIDENAFLRATQGSFKLGIEFVDWLQPGQRYFHPFGAYGVDFGTVPFDGLWQRMHRAGRAAPLAAYSLNTLAAMRGRFLRPQQGDALLSRLGYAFHFDAALYALLLREYAEGRGVTRLEGKVEQVLRRSPDAAIASIVLACGTRIDADFFIDCSGFRGLLIEDAPGAGFVDWSHWLFNDRAVAVPSARASAFTPYTRSTAREAGWQWRIPLQHRTGNGYVYSSAHLSDDAAAATLLANLDEEALAEPRTLRFRTGRRAVFWSGNCLALGLAAGFLEPLESTSIHLIQAGIARFLEMLPDRAGNPAAIRRYNRLMAQEFDRIRDFIILHFHATARPGAYWERARTMPIPDSLAERLQIFAHSGRVLREADELFSKTSWLAVMQGQGLSARGFDPLAAAMPDAEAAARLQRVAAAAAMAVERMPTHADFIRAHCAAT

SEQ ID NO: 88392 - protein, 500 aa, Novosphingobium sp.
  REGION 1..500: note = tr|A0A259DXB1|A0A259DXB1_9SPHN Tryptophan halogenase; OS = Novosphingobium sp. 17-62-19 OX=1970406 GN=B7X90_11895; PE = 4 SV=1
MTATNLPRRIVIAGGGTAGWMTAAALARTLGPVAQVTLVESEQIGTIGVGESTIPPLVAYNRILGINEADFMRATQATFKLGINFENWRVPGEAYFHSFGGTGKDHWSAGFQHFWMNGLTRGHTAPYSEYCLELKAAEAGRFAHLPEDRMNYAYQLDSGLYARFLRGMAEADGTKRIEGKIAQVQLDGETGNIAALLLESGKRIEGDLFIDCTGFRALLIEGALRVGYDDWTHWLPCDSAIAIQTASVRPPVPYTRAIAHEAGWQWRIPLQHRQGNGVVYCSDFLGHDVALEKLLSSVEGEKLVKPNHIRFRTGARRKQWHRNCVAVGLSGGFMEPLESTSIHLIQRAILRIVRMLPAGAISQRDIDEFNDQQFTDMEQIRDFLVLHYKVTDRRDTPFWRHVSAMDVPESLTHKIELFRETGRVFRKNEELFAENSWVQVMMGQGIMPQSHHPVAAKLRDEEMAHLFGTLRDQVARTVAALPVHGDYVVRYCGADVPVAA

SEQ ID NO: 88393 - protein, 543 aa, Shewanella baltica
  REGION 1..543: note = tr|G0AX49|G0AX49_9GAMM Tryptophan halogenase; OS = Shewanella baltica BA175 OX=693974 GN=Sbal175_3149 PE=4; SV = 1
MQQATHTAINNIVIVGGGTAGWITAALLAAEHNVDKGQLAHSPKLNITLIESPDVATIGVGEGTWPSMRNTLDKIGISETEFIRQCDASFKQGSRFIHWQHDDTERTKPFDSNQYLHPFSLPHGHQELDLCPFWLPHSDKVSFAQAVSNQDALTLLGLAPKTIATPEYHFQNNYGYHLDAGKFSQLLMQHCTEKLGIKYIRDHVTQVHSLANGDIESLATKEHGVILGDMFVDCSGTKSLLLGEHFNVPFLCQKAVLFNDSALALQVPYAEENSPIASCTLSTAQPNGWIWDIGLPTRKGVGYVYSSAHCSDDEAEQTLRAYLANDTSTNPQSASSNVVDSRKQEYRKLNINPGYHAKCWQNNCIAIGMAAGFIEPLEASALALVEWTANTLATQLPTHRGVMDTIAQRVNERYERHWQQIIDFLKLHYVVSRREVDDYWRDHREAASIPERLQQQLDLWRYQAPSSHDISYKEPLFPAASFQYVLYGMGFNTALPTHIKPSQQQVAQRLFSENQQKIHGLSQSLPSNRDLLNKVRQFGFPKI

SEQ ID NO: 88394 - protein, 495 aa, Sphingomonas sp.
  REGION 1..495: note = tr|A0A1H8DH43|A0A1H8DH43_9SPHN Tryptophan halogenase; OS = Sphingomonas sp. S6-262 OX=1166340 GN=SAMN05192583_1925; PE = 4 SV=1
MLDDPLRSVAVVGGGIVAWSAAVAIRRRLPGVRVTLVATPPSPDALADRMACTLPSAIGFHDDLGLGEDDAVVRAGSGWRLGTRFDGWAQGSPPYVHAYGAYGQPFGTASFHHHWVRAARGGTAAPFDEHAPSAMLARAGRIAPPDMEPGSPFAGVQAGLVLDLPRYEQMLRAFGRHLGLEVRDGEVREVRLRGADGFIDALLLGDGGMVEADLFVDATGPTATLRTAIDAEWEDWSAWLRCDRIMQAEVPAGAVSPLDHVTALAAGWQWRVDAPGRVLHGICYASADLGDAEAADRLTEAGGVSTAETICFRQGTRTDPWVRNCVAIGDAATVIEPLEWTNLHLAHSAIDRIIAMMPGRACHPLETADYNRQTQAETTRVRDFVLCHYAVARRPEPFWQIAADLPPSLERTLRLFAERGRLPFFEEETFTRDSWLAVLLGQGMLPRQVDPLIDGTPPDRSDAAMAAYRAAIARSVAHFPTAADHMAAQSRRIVR

SEQ ID NO: 88395 - protein, 491 aa, unidentified
  source 1..491: note = Sphingosinicella ginsenosidimutans
  REGION 1..491: note = tr|A0A5C6TUT9|A0A5C6TUT9_9SPHN Tryptophan 7-halogenase OS=Sphingosinicella ginsenosidimutans; OX = 1176539 GN=FRZ32_10150 PE=4 SV=1
MGEAIRSVLVAGGGITGWSAAAALARKLPGLSITVLPIAPAPDALADRIGGTLPSILEFHHDLGLTDADTILRAGSGLRLGTRFEGWSQGRPDYVHAYGDYGRPFGTASFHHHWLRAEKAGEAAPFDRHNAAAEIGRAGRFAPPNDDPASPLPGFLHALHINPPRYRELMRAFARHLGAIERPGEIAEVRRGADGGISGLGLVDGSEATADLYIDCTGPRALLRGTLGGDFEDWSQWLPCDRMLMAEGPPPADPPTLDDATAIEAGWRWQAASPARSSRGLVYSSAYMSDAEAAAALADGAAPIALRQGRLAEPWRRNCVAIGDAAVAVEPLEWTNLHLAHSATDRVIAMMPDRDFAAVELADYNRQAGAEADRVRDFVALHYLVADRPEPFWQSAAAAEPPPSLAHTLGLFRERGRLPFHEEETFSRDSWAAVLIGQGALPRRVDPLIDPVGPQISNRAMTELRAAIAGIVPNLPTQADYLRRLARQTAQ

SEQ ID NO: 88396 - protein, 505 aa, Shewanella baltica
  REGION 1..505: note = tr|G0AXQ9|G0AXQ9_9GAMM Tryptophan halogenase; OS = Shewanella baltica BA175 OX=693974 GN=Sbal175_3193 PE=4; SV = 1
MNNSSLKSITIVGGGSTGWMTALYLSKLYNHSSNIIDIRLIESKEIGIIGVGEATVHSLRFFFAAMGLDENELLRETNATLKTGILFRNWMKPVDGKMHEYFHPFEQQKPSGKIDNASAWILNNQINESNSTPFAEATSLSFSLMQNNLSPKTQYLNQYQGIVPYGYHLDATLMAAFLKRKATQAGVEHVEANVTDVLVNDGNITEVVTDQGSFKSDIFIDCTGFKGLLIQSLKNDNWQSFETELPCNKAVAMQREYLPHQLPRAYTTATALSHGWAWEIDLTNRQGTGYVYDGNSLTREQAEAELKAYLGDEQEIIRTVHLDMKIGCRREFWVGNCIAMGLAGGFIEPLESTGLHLINLGARLLATHLTSSNPSQAIRTSYNTAMNGLYTDLRQFIVLHYCLTDRNDNEFWQKAAQSSAFIPALEQKITLWKDKVCEYVDLANGYSSVFTDENYRYVLYGMQHIPEIHIPCPKTEITKILDNLKTQQFRAKEQSLSHQEFLAKI

SEQ ID NO: 88397 - protein, 412 aa, unidentified
  source 1..412: note = Unknown
  REGION 1..412: note = tr|A0A0R2U8E1|A0A0R2U8E1_9GAMM Tryptophan halogenase (Fragment) OS=SAR92 bacterium BACL26 MAG-121220-bin70; OX = 1655626 GN=ABS24_04985 PE=4 SV=1
MEEQKITRLVIVGGGTAGWLTAGIIAAEHFVDSKTKTNEHSFELTLIESPDIATIGVGEGTWPSMRSTLQKMGISETDFIRECDASFKQGTLFKGWKTGHDDAYTHPFTIPHAYAETNLAPQWQSFRDKVDFAEAVSSQNTLMFKGLAPKQISTPEFAFNVNYGYHLDAGKFAEFLRRHCVEKLGVKHLRANVTGVISAENGDIASVTTDVCGDIQADLFIDCSGSRALLLGEHYGVAISSKSDVLFNDTALAAQVPYTKESDAIESSTLSTAQTAGWIWDIGLPSRRGIGHVYSSRHNSEGRATEELLAYIASTVSQQAAEAATIRRLDFMPGHRTKFWHKNCVAIGMSAGFIEPLEASALVLVELSAAMIADQLPANRHIMDIVAKRFNEKFLYRWDRIIDFLKLHYVLS

SEQ ID NO: 88398 - protein, 514 aa, Pseudoalteromonas sp.
  REGION 1..514: note = tr|A0A4Q0JP69|A0A4Q0JP69_9GAMM Tryptophan 7-halogenase OS=Pseudoalteromonas sp. A757 OX=2250709; GN = DRB05_00910 PE=4 SV=1
MVKKVLIVGGGTAGWLTAARLAKQFIDSGSDIEVSIVESANIPTIGVGEGTWPTIRDTLKTLDICETEFLNTCDATFKQGAKFVNWKKVADENEDIYYRHLFTSLYDPWEFNLAPFWSSGIAGEVPYSEAVSMQGDVCEQGKAPKNITTPQYEGLQGYAYHLDAAKFANLLKDKAVNKMKVRHIIADIGHVSVQSDGSIEYVETVTGEKLHADLFIDCTGFKCLLLGDAMKVPFVDLSHTLFVNRAVALQVPYENPNSPIACETISTAQPEGWIWDIGLQSRRGIGFVYSDKYISKDCAEQRIREYAGINTDDISAKHLEFQVGYREKFWHKNCVAIGLSAAFVEPLEASAIFLVEAAVNMLCDKFPHSQHEFEFIEKQFNQSFLFRWNKTIEFIKMHYVLSQRTDGQFWLDNKNINSIPDELRSKLAHWQNNPLSKYDFASAFEPFVMDSYQYVLYGMGFKTEVDSSRLSAEKTKKARAMFAEVNKYRTLVQEKLPNHRELIEKLKEYKFPKV

SEQ ID NO: 88399 - protein, 478 aa, Azospirillum sp.
  REGION 1..478: note = tr|D3NSY3|D3NSY3_AZOS1 Tryptophan halogenase; OS = Azospirillum sp. (strain B510) OX=137722 GN=AZL_008740; PE = 4 SV=1
MTLDADIAVVGAGPAGCALAIRLTQLGWRVLLLERSALPRRQSGQSLTPGVRLQLAQLGLDGLLRQCGARPAPRSRVRWQGVEAEDRVMAQDPPLLIDRGRFDGLLRGAAAGVGVRLLCPAVLIDRHPTPEGWILAIGDAAGERRVSVATLVDATGRAGLLARARTACGPATLALYADWRGPVFPDLPCIDTGPEHWAWGLPREDGLFSTLVFVDPDAMPRRAGLEAFLRRLLAASPLLGDFAAATPVGPVRAVDATAYRADAVNGPGWIAVGDAAMALDPLSSSGVQKAIRTALAAAIVLNTRLRRPEAAALADRFYADDVRDGAEQHQRWTDGFFAAVRQSVASPSDDAPFGRGTFWHRRSGRMAALAAAPPTPHSAVLYPDQPLTLAPTARLATTSCLVGDFVEERVALHHPALGRPVAWLAGVELAPLMSALPAVTNRRALIADWSITLGPQRAASLVGWLTGHDILQAACAER

SEQ ID NO: 88400 - protein, 501 aa, Shewanella sp.
  REGION 1..501: note = tr|A0A549ZWB0|A0A549ZWB0_9GAMM Tryptophan 7-halogenase OS=Shewanella sp. YLB-08 OX=2593656; GN = FM038_21585 PE=4 SV=1
MMDANKNKKKQKVVIAGGGSAGWMTAAALSKLLGKNLDICLIESEEIGRIGVGEATIPPIRVFNQLLGIDEQVFMRAVQGTFKLGIEFTNWGALDDNYIHSFGTTGKECWAGEFQHFWIAGKQKGIAAEFGDYCTELQAAKQGKFLGSKDSSLNYAYHMDAGLYAKYLSDFSAKQGVTHIEGIIDDVIINPTNGFIEAVRLENGQIIEGDLFIDCTGFKARLIEGALNTGFESYSHLLPCDAAVAVQTEKSGEPRPYTQSMARDFGWQWRIPLQHRVGNGLVYCSRFTSDEDAIASLMDNLESPAITEPRVFKYNTGRRLKGWSKNCVAIGLSSGFVEPVESTALHLIMSSILRLMKLFPQGEISQANINEYNKQTKEEMERIRDFIILHYKATNRDDTPFWRYCHNMEIPETLAHRIALFEDTACVCITETELFRIDSWTQVMLGQGIMPKGYHQIVDNMSDDELKRFLTGLKQMVDKKVAQFPTHQQFIDQYCKSMPIS

SEQ ID NO: 88401 - protein, 505 aa, Xanthomonas campestris
  REGION 1..505: note = tr|A0A109HND4|A0A109HND4_XANCT Tryptophan halogenase; OS = Xanthomonas campestris pv. translucens OX=343; GN = ATB53_12105 PE=4 SV=1
MAQIRKVVIAGGGTAGWIAACALAHQFRDLLDITLIESEQIGTVGVGESTVPPIRSFHRFLQIDEQEFLRAVAGTFKLSISFENWRRPGERYIHPFGLTGHSTLVCAFHHFWLEAQRRGMLSELGDYCLETVASRLDRFALQQSPPVNYAYHLDAGLYARLLRRHAERYGLKRVEGRIQQVRQHAESGCVEALLLEDGTLVEGDLFIDCTGFRGLLIEQTLHTGYEDWKQWLPCDRAVAVQTEAVAAPVPYTRAIAHAAGWRWHIPLQHRVGCGLVFSSAHLSDDEARAKLLHDAAAPPIKEPWLVPFRTGRRRKAWNKNVVALGLASGFIEPLESTSIHLTIAAVMRLLTLFPSEGIAPAMVDLYNAVSRAEMEHVRDFIILHYHANQRDEPMWQACREMALPDSLQQRLRAWRERAHAWQGADELFRVDSWIHVLLGQGIVPAQHHPLARALPDQQLQQFLDAIRQPIDRAVAQMPSQQDFIARYCKAGPEVWAGRAPVAAPA

SEQ ID NO: 88402 - protein, 550 aa, unidentified
  source 1..550: note = Methyloceanibacter superfactus
  REGION 1..550: note = tr|A0A1E3W1Q5|A0A1E3W1Q5_9RHIZ Uncharacterized protein OS=Methyloceanibacter superfactus OX=1774969; GN = AUC69_09090 PE=4 SV=1
MRSITIVGGGTAGWLAACVLNRYCKSHDSKHKLDITLIESPTIPIVGVGEASLPGMVVLLNQLGIPESEFFQATDATFKVAAHFINWNHDDKGRPVEFLNILNAPGAIDGRPLADYFVTYDPARAAPDAGMAYVRAFSPVAEIVRGNLAPRRPGEPDFSGEVGYTYHFDATKLAVLLKDVATGRGVKHVLDDVDNVNLDERGYVKSLTLRRQGEHAIDLVIDCTGFRGSILQQALGEPFEPYADYLLNDRAAVVQIPHKDPRIIAPTTRATGFSSGWNFNIPLTTRVGTGYIFSSQFISDEKAIEELLAFYGDQAKGCEPRIIPIRTGRVRKAWVKNCVALGLAGGFIEPLEATAIFMTDLGARWLQHYLPTQDFEPELAAAYNRQVSRVYEEVRDFIQAHYHLNNRQDSEYWRTAREGMKLSDRLQENLKLWRHTTPESLDLDSSYLFGSPVYTLLLIAKGFYKDARLAKAPSLSRTAYDRYRAAERKARPDQLAGLVSHAEFLKTGGKAPVGLFTSPQVVDAPAFASATRIKLPPSPAFSHGRRKPKR

SEQ ID NO: 88403 - protein, 499 aa, unidentified
  source 1..499: note = Pararheinheimera tangshanensis
  REGION 1..499: note = tr|A0A5C8LTD1|A0A5C8LTD1_9GAMM Tryptophan 7-halogenase OS=Pararheinheimera tangshanensis OX=400153; GN = FU839_11535 PE=4 SV=1
MLEPIQTIVIVGGGSSGWMSAALLAKLTGQRYRIELVESEQIGTVGVGEATIPAIKLYNHLCGINEQEFIRATGATFKLGIEFANWGQQGDSYFHAFGALGRQWEWLSFYQYWLKLKQQGLALPFEHYCIASQMAQQHKFMPADPGKPKSPVSEIAYAYHFDASLYARYLRSLSEKRGVIRHEGVIRHVERDAVSGHIRHLLLEDGRQVAGDLFIDCSGLRALLIGQTMGVGYDDWSHWLPNDSAWAVPSATLNPLPPYTRATAHEFGWQWRIPLQHRTGNGLVFSSAYASDDVAQQRLLQTLEQPASADPRLIRFTTGKRKQMWVGNCVAIGLSSGFLEPLESTSLHLVQTAITRLVNLFPDRSFAKANTDHYNLLAAQEMEQIRDFIIAHYKVTERDDSEYWRYLKQMTVPDSLQQKLDIFQSYGRVHRVADELFREDSWVQVLLGQRLMPERYDPMVDNKTLAQITDFAASTAHVISACVEKMPTHTDFIAGIAAH

SEQ ID NO: 88404 - protein, 508 aa, unidentified
  source 1..508: note = Pararheinheimera tangshanensis
  REGION 1..508: note = tr|A0A5C8LX32|A0A5C8LX32_9GAMM Tryptophan 7-halogenase OS=Pararheinheimera tangshanensis OX=400153; GN = FU839_09190 PE=4 SV=1
MSKAVKKLVIVGGGTAGWLSAAIIAAQHRSNTQDGLQVVLVESSDIPTIGVGEGTWPTMKNTLQQIGIKEADLFQRCHAVFKQGGRFVNWVHGNEDFYYHPFTVPMGYGRIDLAPYVQDISQFAVESNFQHQICEAGLAPRGFSEGEYQGQCNYAYHLDAGAFADLLKEHCKNNLGVQHRIGTVERCQLSQDGQIQALYLTDGTAPLEADLFIDCSGFSSLLLGKALGVPFEPVEHLLFNDSALAMQVPYDTPDAAIPCHTIATAQNAGWIWDIGLTHRRGVGHVYAGKYLSDDEAEFNLRRYIGPAAQGISARKISYQTGHRSKFWQHNCVAIGMSAGFVEPLEATAIMLVEISARFVADNLPADLATMPLVATRFNQQMLYRWQRILDFLKLHYLLTKRPEPYWQDHLKPESIPQSLQDDLKIWQHRGPQIQDFHGALELFPAASYQYVLYGMGFKPDFSRQSYLYQQQSQAEQIIRRNQQLTAQLLQTLPSHRDYITGWLSSNRG

SEQ ID NO: 88405 - protein, 495 aa, Pseudoalteromonas sp.
  REGION 1..495: note = tr|A0A4V1K7A3|A0A4V1K7A3_9GAMM Tryptophan 7-halogenase OS=Pseudoalteromonas sp. A757 OX=2250709; GN = DRB05_12400 PE=4 SV=1
MKTIQSLTILGGGTAGWMCAAYLAKHQPNLSITVIESSKIGRIGVGEGSTPHLQLFMQSLGVKERDWMPACQASYKTGIYFDNWNGDNGSYFHPFFSEMDAKTAEVYFVNANARRRGNEYIDKPEHYFLAAVLAGKQQAPLPQRPLPRALEYGYHFDAQKLADWLRAFSLARGVKHIQSTVSSVQHHAREIMALTLESGEQVKSDFYVDASGFNALLIEKTLEVPFISFADQLLNDSAVAIAGAKTNPLPSSTSAIAMPCGWRWQIPLQGRTGHGYVYSSAHTTPEEAEAQLRQAAQLDKGQAKHLTMKVGMMARSVEGNVFAIGLAQSFIEPLEATALMVTGYSIELLSRLLSQQLEAQAINQQLSELVLGIKEYVLAHYATSNRADSPYWQDAKVAALSLNELDELLTHWRSGADFDAWLNQHKKHSPYIRPSWYCLLGGMDHRDSTCQMPFDQAPQHIEQAAKAYLTKLSDEHFTAHTTALEQLQRAQAFRA

SEQ ID NO: 88406 - protein, 532 aa, unidentified
  source 1..532: note = Ktedonobacterales bacterium
  REGION 1..532: note = tr|A0A4P6JJC6|A0A4P6JJC6_9CHLR Tryptophan 7-halogenase OS=Ktedonobacterales bacterium SCAWS-G2; OX = 2509675 GN=EPA93_03080 PE=4 SV=1
MEYHIKHVVILGGGTAGWMSACYLAKNLEGSVAITVVEAPSIPRIGVGEATIPNLHKTFFASLGLREDEWMRACNASFKMGIKFINWRTSGSGEAHPRRWGNSYDAFYHIFGQLPEYERLPLSHYWFARKYRDQTTEAFDYACYKEPPALDANLAPCGQDGKPWTNYAWHFDAQRVADFLKDFAIRKLNVQHREEEMTEALLDERGFITALRTKSGLLLEGDLFMDCSGFRGLLINQAMREPFLDMSDFLLCDRAVATAIPHDDETKGIEPYTSAIAMRAGWAWKIPMPTRFGSGYVYSSRFVSQDQATKDFCQLWNLKPEEAELNHVRFRVGRNRRAWVKNCVSIGLSSCFLEPLESTGIYFITAALYQLVKHFPDNRFDPILLERYNREIETMFDDCRDFIQAHFYFSPRSDTSFWKANKELTLSENIREKIAMYRVGMPVNLPVVDESTYYGNFEAEFRNFWTNSNYYCIFAGLGFLPDHPLPLLTYRNASAEGASPLFEKIKEQQRELLSSLPTNYAYLCQLHGKQAG

SEQ ID NO: 88407 - protein, 507 aa, Erythrobacter sp.
  REGION 1..507: note = tr|A0A259K182|A0A259K182_9SPHN Tryptophan halogenase; OS = Erythrobacter sp. 34-65-8 OX=1970335 GN=B7X57_06205; PE = 4 SV=1
MAVNQRAPIEHVLIVGGGSAGWMTAAALAQTLGPGCRIILVESEEIGTVGVGEATIPPIRHFNQRLGIDEATFVRETGGSYKLGIEFVDWGRLGHSYFHPFGQHGAEFDTVPFYHYWMREHLAGRIGGPIDDFSMGWAMARAGKFVHPSPDRRMIQSTYDYAYHFDAVLYARFLRGYAEARGVTRVEGKVVDVALDGASGDIRSVTLDDGRVLEAELFIDCSGFRGLLIEGALEAGYENWQHWLPCDRAVAAPSLRQADIAPYTRSTARTAGWQWRIPLQHRTGNGYVHCSAFIGEQEAHDTLVDSLGDELAGDPRLLRFVTGRRRAFWHRNCVAIGLSAGFMEPLESTSLHLIQYGILRLLALFPDKAMSPLLAREYNAQTAVEYERIRDFLILHYKATERDDAELWRYCAAMPVPDSLQYKIDHFREFGVLVADERELFNNPSWIAVYLGQGIVPERAPAMATMRSHVPVAERMQSIAGAMQDAVAAMPSHSQFIEQHCRSAVAA

SEQ ID NO: 88408 - protein, 510 aa, Planctomyces sp.
  REGION 1..510: note = tr|A0A142WRZ0|A0A142WRZ0_9PLAN Tryptophan halogenase; OS = Planctomyces sp. SH-PL14 OX=1632864 GN=VT03_06115 PE=4; SV = 1
MTPEPFDIAILGGGFGGTITALVLHRLGFRVIVIDRGVHPRFAIGESSTPIADLVLRDLAIRYDLPRLLPLVKYGTWKAAYPDVTCGLKRGFSYYEQPQGERFAPREDHANELLVAASHDNARSDTHWFRADVDAFLAREVTDAGIPYLDRTEVTIGATGPWLLMARRIGEMRPITAQFLIDGTGDAGVLKGYLGLRDQAERLKTHSRALFAHFAGVKRWGPLIEERGANVTDHPFPTDDAAQHMVLPRGWMWQLRFDTDVTSLGFMLDTRHDPLDTSLSPSEEWEEWLRRFPSIADQLAGAALVDPPGGLRRTGRIQRWIDRAAGPDWALLPHSAGFIDPLNSTGIAHTLCGIEKLALAFERSFGKPALADEMATYAEAVSREIELIDELISGCFDAMPHFPAFVTWSMVYFAVVTSYEHGRSMGEIPPGTPFLGADSEARWSMVRGARQKLMDRLSRIEDKASESSARSEADAWLSEHVCQAIAPYNIAGLCNPQVKNMYRYTAADKG

SEQ ID NO: 88409 - protein, 504 aa, unidentified
  source 1..504: note = Sphingomonadales bacterium
  REGION 1..504: note = tr|A0A2M7HJ09|A0A2M7HJ09_9SPHN Tryptophan halogenase; OS = Sphingomonadales bacterium CG12_big_fil_rev_8_21_14_0_65_65_10 OX=1974094; GN = COW16_05975 PE=4 SV=1
MAIENIVIVGGGTAGWMAAAVLSRMGNGRGIDVTLVESEAIGTVGVGEATIPPFVDFNKLLGISEAEMLAAVGGTFKLGIQFVNWGKLGDSYIHPFGNYGYEIDGVSFHHIWHAMKEAGDMRPIQVFNLETIAAHFGKFARTEDYQKSGDLPPSNYAYHLDAGRYAKFLRKFAEDRGVVRQEGKVSEVNLDPESGFVFSITLEGGQEISGDLFIDCTGFRGLLIEQALETGYEEWTHWLPCDRAVALPCGRDDGSPPLPYTRATAHSAGWQWQVPLQHRNGNGHVYCSQFMEADEATDILVGNIAGKPQADPNHLRFVTGHRKKFWNRNVVALGLSAGFMEPLESTSIHLINTGLNKLVSLLSSNGITQAQEDAFNRFTLKEYERIRDFLILHYKATERTDSEFWNYCRTMSVPDSLTEKIELFRHNGQIFREEDELFTETSWAAVMMGQGIAMEGHNIMVDPSKLAALKGEIDGIEQSIRWLTQHMPTHQQYLAKYCPAKDAA

SEQ ID NO: 88410 - protein, 511 aa, unidentified
  source 1..511: note = Sphingosinicella ginsenosidimutans
  REGION 1..511: note = tr|A0A5C6TUH2|A0A5C6TUH2_9SPHN Tryptophan 7-halogenase OS=Sphingosinicella ginsenosidimutans; OX = 1176539 GN=FRZ32_10140 PE=4 SV=1
MRDDLIRKVVIVGGGTAGWMAAAAMSRIIGGMPGLSIELVESEQIGTVGVGEATIPQLVLFNQLLGIDEDEFIKATHGTYKLGIEFRDWVRIGHRYIHPFGFYGPDMKGIEFYHYWLKGRGLGDATPLDAYSISAMAALSTKMMRPRPDLPNSPVSKIAYAFQFDASLYARFLRTRAEAWGVVRTEGRIVEVAQDAESGFIEAVLLEDGRRIEGDLFIDCSGFRGLLIEQTLRSGFEDWSKWLPNDRAIAIPTESSGDETPLTRATARPAGWQWRIPLQHRVGNGHVYSSAHMSDEDALDLLLANLDGAPLADPNRLRFKAGYRRQAWVKNVVALGLAGGFLEPLESTSIHLVQSGIARLMTLFPSRRWNDAEIRRYNERTIREYEDIRDFLVLHYLATQRDDTPYWDYCRNIDPPPGLAEKLEMFRSNGRVFREHEELFTETSWQAVLIGQEIEAGGYHPVADLLSDEETLTRLRHIREVIADTVRQLPTQREFLRMNNSASDVVMKRAS

SEQ ID NO: 88411 - protein, 513 aa, Shewanella baltica
  REGION 1..513: note = tr|G0AXR0|G0AXR0_9GAMM Tryptophan halogenase; OS = Shewanella baltica BA175 OX=693974 GN=Sbal175_3194 PE=4; SV = 1
MTSRKDIKSVVIVGGGTAGWISACHLAKKLNARTPQIQVILVESPNIPTIGVGEGTVPILRETLKYFGIREDDFIHRCDVTFKQSVKFIDWNEPNSGEYYHHLFDYPYFKDFTSTWLNKSLSDRGRYADLVSVQGHLIDAGFGPKAMTQPQYRGAMHYAYHLDAAKFTKLLTEFGVEQLGVKHLLAEVIDTKIDAQGNILELYTDNAGVLTADLYVDCTGFSAQLIGSACNVPFVDKSDILFVDSALVVQLPYEDKYTPIPCFTKSTAQEAGWIWDIGLSERRGVGYVYSSQYSSIEQAESVLREYLGKAAEEISFRHIPMKVGYREKSWQGNCVAIGLSSGFVEPLEATGLLMFDATARMLAECFPANTDVMPLVANRYNQRVSNAWNRVIDFIKLHYVTAKRMDTPFWVDNKNEISIPDSLKEHLELWRYHIPTAYDFTSTLEFFNLENYLYVLYGSDFESKLKMTLNDEEERLFSEMTDKLDKQVTLLKSQLLPHRELIERIKLYGIQLN

SEQ ID NO: 88412 - protein, 498 aa, Colwellia sp.
  REGION 1..498: note = tr|A0A1V0KWF7|A0A1V0KWF7_9GAMM Uncharacterized protein OS=Colwellia sp. PAMC 21821 OX=1816219; GN = A3Q33_17865 PE=4 SV=1
MSNEQQIKTFVIVGGGTAGWISAAILSRALLNLPCKIRLIESPHVPTIGVGEATIPSIVDMLEYLKIPLAEFILKTNATFKLGIKFCDWHKLGSHYWHPFGHVGNKIEGKPFYQHWLKNKLNGGTSEFTDFSPAIALAKQNRFFIPDPQNPTNLSASTYALHFDATLVAEFLSQYCQNNSVEHIKGHVQNVVLDTQGNISQLTLENGALVDGDFFIDCSGQQSLLLGKALRIGYENWQHYLPVNKAVAAQSKVMRPLPSFTSSFAHEHGWRWQIPLQNRTGNGYVYCDQYCSDQQAQDLLAKNVGDFITEPRIISFTTGKRHKMWHKNCLAVGLSSGFLEPLESTSIYLIMKAMLNFVQTIPSKKLHQAPIDEFNRKMDHEYECIRDFIVLHYSETKRTDSPFWQMWQNLAIPDSLETKLDLFRSQGQLFHDTDDLFATDSWYSVLEGMGVRPNEYDPLIDASDYSKIQQALVSSQIALDQSAAKALEHMAYIKKIKF

SEQ ID NO: 88413 - protein, 496 aa, Colwellia sp.
  REGION 1..496: note = tr|A0A1V0KV89|A0A1V0KV89_9GAMM Tryptophan halogenase; OS = Colwellia sp. PAMC 21821 OX=1816219 GN=A3Q33_15610 PE=4; SV = 1
MTNKIKKVVVLGGGTAGWMSASLIKKLMGKSIDVELVESEDIASVGVGEATIPPIRLFNSVLGINEAEFLRETKATIKLGIKFENWKNTEESYFHTFGAAGKSSPFCHFHHYLKRAQDNGLKDNLWDYDLNYLCATQGKFAQIKSKDPIIDIPYAFHFDAGLYAQFLRKFNEKIGVKRTEGMVEKVEQCKKTGNVNSLVLKSGEVIKGDLFIDCSGFRGLLIQQTLNTGYENWGHWLPCDRAVAVPSERFDETVPYTRSIAHAGGWQWRIPLQHRNGNGLVYSSKHYSDDQAKALLLANIESEPLAEPRVIKFTTGRRRKQWHKNVIAVGLSSGFLEPLESTSIHLIQSAIVRLIHMFPQNGISSAQVDEYNRQSKVEYEQIRDFIILHYHVNQRDDSQFWRDLREMDIPESLAEKIKLFKESGKIFREQNDLFNEGSWLQVMLGQGIEPEDYHPMANDMPLEQLNSMLEKIKAIKHEPLSKLPSHDEYLTNFCRL

SEQ ID NO: 88414 - protein, 385 aa, unidentified
  source 1..385: note = Unknown
  REGION 1..385: note = tr|A0A0R2UAX9|A0A0R2UAX9_9GAMM Tryptophan halogenase (Fragment) OS=SAR92 bacterium BACL26 MAG-121220-bin70; OX = 1655626 GN=ABS24_08745 PE=4 SV=1
QHFWLKGKERGISKEFGDYSVELQAAKANKFAVLPNNGLNYAYHIDASLYAKFLRRLAERHNTKRVEGKITVVNQHDNGDIKSVVLASGKIIQGDLFIDCSGFAGLLIEKTLNTEFEDWSQWLPCDSAIAVQTRSVRDPIPYTRAIARESGWQWRIPLQSRVGNGLVFCSKYLTDQEATQTLLSNLEGEVLTEPRVIKFRTGQRTQHWNRNCIALGLAGGFVEPLESTSIHLIQRGIIRLMQMFPFDGVVEPDVQEFNSQMKDEFYFIRDFIVMHYHLTERTDTEFWRHCKAMKIPDSLQHRLDLFKKTGRIFQQAGDVFAENSWSQVMLGQGLIPEHYHPIVDMMSDDELEQFLKKISISVEQTVSQLPSHQQFLSQYCPAKSI

SEQ ID NO: 88415 - protein, 505 aa, unidentified
  source 1..505: note = Sphingosinicella ginsenosidimutans
  REGION 1..505: note = tr|A0A5C6TV38|A0A5C6TV38_9SPHN Tryptophan 7-halogenase OS=Sphingosinicella ginsenosidimutans; OX = 1176539 GN=FRZ32_10155 PE=4 SV=1
MTAGGEQVNIVVVGGGTAGWMTAAALVKLLPRRCTVHLVESEAIGIVGVGEATLPHIRAFNEKLGIAEAEFMARTRATFKLGIEFQGWGKPGDSYIHPFGTFGTGQSEVDFHQYWLRCIHQGIPVPPIQELSAACMIARMNRFDLPSTDPNRLESTFGYAYQFDANLYAPYMRAFAEAMGAKRTEGRIVDVHRNGETGDIESVQLESGERIAGDLFVDCSGFVSLLLGKALGEPFQDWSKWLPCDRAVAMPCRTETALTPYTGVIAMPGGWRWRIPLQHRTGNGYVYSSAFMGDDEARAGLVAAVEGEPIAEPRVLRFRAGRRERSWVHNCVGIGLASGFLEPLESTSIYLTQQAITALLELFPEREVSPIDRAEFNRLVDMEYDRVRDFLILHYHATTRAGMPFWDYVRTMEIPDSLAEKLELFRRRGRIVKYREGAFLDASWIAVYLGQGVMPEGHDPRADIPSAESLARGMAALHEEIRAAATRLPDHRQHIESYCPMADAA

SEQ ID NO: 88416 - protein, 503 aa, Lysobacter sp.
  REGION 1..503: note = tr|A0A514BVL9|A0A514BVL9_9GAMM Tryptophan 7-halogenase OS=Lysobacter sp. SJ-36 OX=2591633; GN = FKV23_16040 PE=4 SV=1
MTDNRIRKVIVVGGGSAGWMTAAFLSQAVGTDIELRLIESDEIGIVGVGEATIPPIVNFNTALGIDEDEFIKATQATFKLGIQFRDWGAQGETYTHGFGTMGHSTGVVDFHHYWLKMRQAGKVDGIENYSINLLACDRNRFMRASDQYPNSPLQDIAHAFHFDAGLYARFLRGYAEGHGAIRTEGRIASVQQHPESGFVTSVTLANGDVHEADLFVDCSGFHGLLIERTLQTGYEDWSHWLPCNRALAVPCRSVAPLTPYTRSTAHAAGWQWRIPLQSRIGNGHVYCSEFMSDDEAAGILMRNLDGEALAEPRPIRFTTGRRKRFWNRNVVAIGLAGGFMEPLESTSIHLVQKAIARLVAFFPNRHFDPADIDEFNRQSVQEYEQIRDFIILHYHATRRDDSAFWNHCRTMPIPDTLRHKIELFKSNGRVQRLNNELFTEVSWFQVMYGQGIHPRGYHGLADVKSEAKVEGMLADVRRVIHGVVELMPTHEEFIAQNCKAEPV

SEQ ID NO: 88417 - protein, 502 aa, unidentified
  source 1..502: note = Pseudooceanicola batsensis
  REGION 1..502: note = tr|A3U2I3|A3U2I3_PSEBH Tryptophan halogenase; OS = Pseudooceanicola batsensis (strain ATCC BAA-863 / DSM 15984 / KCTC 12145 / HTCC2597) OX=252305 GN=OB2597_03933; PE = 4 S V=1
MRVVIAGGGTAGWMAAAALAKYFGGTVAITLVESDEIGTVGVGEATIPQIRLFNSGLGIDEREFLRETNGTIKLGIEFVDWRRRGERYFHGFGEVGRAIGLVPFHHYWLRYAGEGGELPLEEFSPNAVAAREGRFGPGAGVAGARLPASAYHFDATLYARFLRRYAEARGVTRREGKVLSCTRNGGTGFIEALEMEKGDRIAGDLFIDCTGFRALLIGETLGIDYEDWSHWLPCDRAFALPSEGRGRLDPFTRSTARGAGWQWEIPLQHRTGNGHVFASAFTDEQAALATLTGTLPGKALAEPRLLRFATGKRRRMWHGNCVALGLSSGFLEPLESTSIHLIQAGIARLLALFPDRSCDPALVEEFNRQLDFEYEAIRDFLILHYHATDREDTEFWRYCRTMAIPESLSDKMELFRASGRIVRFNTELFDVPSWLQVMWGQGLRPRTYHPMVDAAPDADLTRYIAMNAGEVRQQVDTLDLHETYIARVARAGRDTAAPAGGG

SEQ ID NO: 88418 - protein, 503 aa, Stakelama pacifica
  REGION 1..503: note = tr|A0A4R6G0M7|A0A4R6G0M7_9SPHN Tryptophan halogenase; OS = Stakelama pacifica OX=517720 GN=EV664_101603 PE=4 SV=1
MGSPMNRHMVIAGGGTAGWMAAAALARFLPNTVRITLVESEAIGTVGVGEATIPQIRLFNQRLGIAEDQLLAATHGTIKLGIEFDGWNGPESRYIHAFGTIGRPLGNVPFHQHWLRHCCTGRAGALHEYSVAACAAHQNRFAPDLGRPELPTGLAWAYQFDAARYAALLRAHAEQAGVTRLEGRINHVAVDDRGHIASLHLDDGRAVSGGFFIDCTGFSARLIGDALGVGHEDWSRWLPCDRALAVQSAATAPLDPYTRATARTAGWQWRIPLRHRTGNGMVWCSAYQEEQDAADLLLANLDGAPLTDPRPLQFATGRRKAAWQANCVALGLASGFLEPLESTSIHLIQSGIDRLLQLFPAGDPIPAEVAEYNRQTAREWECVRDFLILHYHAANRPEPFWAAYRNQPAPDRLAHRIELFRATGRLFRDSDDLFTDVGWLQVLMGQGIMPERHDPLADTVPERDLDEFLTLARRHVANVVSRMPDHQAYLMREAAPGKNGEPN

SEQ ID NO: 88419 - protein, 530 aa, Colwellia sp.
  REGION 1..530: note = tr|A0A1V0KW09|A0A1V0KW09_9GAMM Tryptophan halogenase; OS = Colwellia sp. PAMC 21821 OX=1816219 GN=A3Q33_17620 PE=4; SV = 1
MMQSEINKIVIVGGGTAGWITAGLIAAKHLAANSTSLSITVIESPNVPTIGVGEGTWPSMRETLKTIGINEADLFTYCDASFKQASKFVNWEKLPNEGVATHPLDNAYFHPFSLPTGINKLDLGTYIGEQSSLVLSPQTFSQQVCFQSILCERNLAPKQITHKAYDYVANYGYHLNATKFAELLKIHCLNKLGVQYISAHITEINNDKLGDITSLSTDKADVIEGDLFVDCSGSQSLLLGKHYNIEFCSKKSILFNDSALAVQIPYEHPDATIASSTLSTAQTAGWIWDIGLQSRRGVGHVFSSRHTSDENAKQALLHYIKQSGTTINIDDDSIRKLSFSPGYYKKFWHRNCVAVGMSAGFIEPLEASALAMVEQAAKMISEQLPTTKRTMEITAKRFNEKFTQHWQQIIEFLKLHYVLSKRTDSSYWLDNKDPLTIPQSLQNMLELWKFQSPSSYDIPHNNPLFPAASYQYVLYGMNFTTERLRVNIQNEPLMHQMLLDIQNKRQQLVKVMGANRDLIHKIKQYGLTNI

SEQ ID NO: 88420 - protein, 503 aa, Colwellia sp.
  REGION 1..503: note = tr|A0A1V0KVW6|A0A1V0KVW6_9GAMM Tryptophan halogenase; OS = Colwellia sp. PAMC 21821 OX=1816219 GN=A3Q33_17475 PE=4; SV = 1
MHLCIVGGGSAGWMTAAALAKKFSRLKLQITLVESQEIGTVGVGEATLPHIRFFNQTLGIDERDFMRKTKATFKLGIEFVDWGSKGDSYIHPFGDFGEKINSVDFYQYWLLAQKNNDMGKLEDYAFGIAAAKSNKFTIPELGAPDLKNSFGYAYQFDSSLYAKYLREFSCKLGVNTIEGKVVNTSLNETNGNISALTLENGQRISADLFVDCSGFRGLLIEQSLQSGYQDWSNWLPCDRAIAVPCERTQQLTPYTRSTAKEAGWIWRIPLQHRTGNGHVYCSQFISDDAAQHSLLEQLDGKVLAEPRKLRFKTGRRNHFWKNNVIAIGLSAGFLEPLESTSIHLIQEGITKLIELFPAFDDQQTTSNTLTIDELDITEYNAQMSLEYERIRDFLLLHYVANDRSDSPLWAYFKNMTLPDSLQEKLDLWMHRAYIQRYEIGAFLPPSWVAVLLGQNLIPHNVDPRVQAFGTSDIRSKANAMREDIKLGLHQAEGHQAFLNRYIS

SEQ ID NO: 88421 - protein, 483 aa, Colwellia sp.
  REGION 1..483: note = tr|A0A1V0KY63|A0A1V0KY63_9GAMM Tryptophan halogenase; OS = Colwellia sp. PAMC 21821 OX=1816219 GN=A3Q33_17490 PE=4; SV = 1
MSAAALSSMLRPDDVQIVLVESEEIGTVGVGEATIPDIISFNRMLGIDEAEFLKATNATFKLGIEFSDWGKLGDKYFHPFGNHGADMNGIDFHQYWLHTRQAGNTNSLEEYSMCAVAAKSMKFALPNDNPRSLLSQIGYAYHFDATAYALFLRNYAQKRGVIRIEGRIDLVLLNEQTENISALVMQNNERVEGDFFFDCTGFKSKLLGETLGVPFHDWSKWLPCNSAQAVPSERRGELLPYTKSMAKTAGWQWRIPTQHRTGNGHIYSTDFMNDQQATDILMQGLDAPALSDPRTLRFTTGCRDKFWHKNCLAIGLASGFLEPLESTSIFLIQQGISRFISLYPSLTPAPKVVEEYNRLMTREFHQVRDFIILHYKATQRTDSEFWRYCKNMSIPDSLQHKMELFQCAGRVFRDDHELFSTSSWVAVMLGQNIYPETADPMLLGVPIQNIEQSLQSMQRAMQQTSLQMPTHAEFIKNYAGSSV

SEQ ID NO: 88422 - protein, 499 aa, Sphingomonas sp.
  REGION 1..499: note = tr|A0A1H8CUK6|A0A1H8CUK6_9SPHN Tryptophan halogenase; OS = Sphingomonas sp. S6-262 OX=1166340 GN=SAMN05192583_1757; PE = 4 SV=1
MDQQPVTIVIAGGGTAGWMTAAALGQFIESGYRIRLVESEEIGTVGVGEATIPQLRLFNSALGLDENAFLRATQGTFKLGIEFDGWRRPGESYLHAFGDIGRDVGLIAFQHYWLRARSLGVAGPLSHYALNDIAARAGRMHRGPAVTANTIPSLPYAFHFDAGLYAAYLRRFAEMRGVARTEGRIAHVERHGDSGDVAALHLASGERVEGDLFIDCTGFRGMLIEETMAAGFESWAHWLPCDRALALPTSNIAPPPPYTRAIARGAGWQWRIPLQHRTGNGLVYSSVHLSDDEAASALLGNLEGETLADPRPLRFTTGRRRQAWKGNVVAIGLASGFLEPLESTSIHMIQSAISRLLKFLPGRRIDPAERREYNRQTDYEIERIRDFLILHYHANERSEPFWQAMRAMPIPDTLAERIALWRGKGHIVREHEELFTEVAWFQVFAGQGVDPAGWHPLANAIPERDLGEFMETIEALYRREVGRWPAHDAFIAQHCAARR

SEQ ID NO: 88423 - protein, 505 aa, Croceicoccus marinus
  REGION 1..505: note = tr|A0A1Z1FB79|A0A1Z1FB79_9SPHN Tryptophan halogenase; OS = Croceicoccus marinus OX=450378 GN=A9D14_07250 PE=4 SV=1
MSDVTPTRVVVAGGGTAGWIAAMALARQLGRLVDVTLVESDDIGTIGVGEATIPTARSFHEFLRIDERAFVEATGATFKLGIQFENWARPGDQYIHSFGTFALQNWVADFQHFWLEARHAGIDTPMGAYCLEHEAALAGRFSNEGKPALSYAYHLDAGRYAAFLRTIAETNGAQRVEGRIADVRHQPESGDIAALVLEDGREIEGDLFVDCTGFRALLIGQAMGSGYDDWSEWLATDAAWAVQTETDEAPPPLTRAIAHDAGWQWRIPLQHRTGNGLVFASDYLDPDKARDRLMGSITGRPRSEPRLIRYKTGKRQQMWRGNCLALGLSSGFVEPLESTSIHLVMIGVTRLIQMFPFAGSDQAVRDRWNTMADTELEKVRDFIILHYKLTERDDSAFWRRCRDLAIPDSLRHRIASFTSSAQAWQAPDDLFRAESWLQVMLGQRLQPEHWHRIGALMSEGRLEGELERQRAAIAAHVDRLPKHQDFIERLLSGKAQAGAGLVHSG

SEQ ID NO: 88424 - protein, 501 aa, unidentified
  source 1..501: note = Nitrospirillum amazonense
  REGION 1..501: note = tr|A0A248K153|A0A248K153_9PROT Tryptophan halogenase; OS = Nitrospirillum amazonense CBAmc OX=1441467; GN = Y958_24910 PE=4 SV=1
MSNRRIRKVVILGGGTAGWMTAAALAKVNTPPQFEVTLIESDDIGIIGVGEATIPTIHWFNRLVELDEAQFLRETKATFKLGIEFVGWNGGNSRYFHPFGRYGGPADAQMFFHRWIRASLGGFPHGHQDYSLATLAAMANKFGPPAPDPKSLFSTLGYAYHFDAGLYAAHLRRRSEARGVKRVEGKVERIEQDPETGFVTRLTTHRGQVVEGDLFIDCSGLRALLIEGVMNSGFEDWSHWLPCDRALAVPCERVTAPVPYTRATAHAFGWQWRIPLQHRTGNGIVYSSRFAGDDEAASTLMANLDGKALADPRLIRFQTGRRRRSWIKNVVAIGLSSGFLEPLESTSIHLIQSGIAKLLSLFPTRDCPEETAGQFNRVYGADVESVRDFLVLHYSRTQGRDEPLWRHCQAMAVPEGLSLKERHFTRTGRIVLSTDELFREASWFAVLMGQGLRATDYNPLLDTMPADENLAHLLRLRDQMAKAAATLPSHEEYLRRVMGTA

SEQ ID NO: 88425 - protein, 519 aa, Streptomyces sp.
  REGION 1..519: note = tr|A0A2S6X266|A0A2S6X266_9ACTN Flavin-dependent tryptophan halogenase RebH OS=Streptomyces sp. MH60; OX = 1940758 GN=rebH PE=4 SV=1
MSTHNPGKVVIVGAGVAGAMTAAYLKAAFGDRTEVVLVGFPPAGEPAGHESTLGDIRDFFDFLGLAEEDWMPACDATCKLAVRVQDWSGPGQYFYLPFEPARRAGGFPLTEWWLRQRPSGRFDRDCFVSAWLCDAGRVPRPAADTGPGADAAAVPYGYHLDSAALTRLLTRYAAERGAVSLTGAPTDVRLDARGWIECLVTEEHGEVHGDLFVDCTGERGLLLHRALKVPRVSYRDTLPNDSLVTLEAPADMRTRGIPPYTTVTARGTGWMWTVPLFDRIGAGHAYAGEYCTPEEAERALREHVGPEAAGAAAVHTPLLPGRGAQAWKHNCVAVGASAGRAEPLGTVGDASAAHHALEREFATLHYQGAARDDTQYWRDAKTLALPGGLAERLAGWRVLPPGPEHPGDGHRGRPAHAYTSVLIGTGGAPPRAPAALPLVGDAVALREFAAVRHTAAALTGTSPTGYEYLAQLGATSPPAERRSVLSTGQRPRPPQVGEQEFPHQGPTGGGTLDCGRAQG

SEQ ID NO: 88426 - protein, 505 aa, Lysobacter sp.
  REGION 1..505: note = tr|A0A514BWJ4|A0A514BWJ4_9GAMM Tryptophan 7-halogenase OS=Lysobacter sp. SJ-36 OX=2591633; GN = FKV23_02880 PE=4 SV=1
MSDNRIRNVVVVGGGSAGWMAAATLATYLGKGASIRLVESEEIGIVGVGEASVPHMKTFNSEMLGIKEVDFVTHTQGTFKLGIEFRNWGRIGDSYIHGFGKIGQGIGPLPFHQFWLKLFLAGRAADIGAYSLQTVAAPQGKFMVSPGNAPAGSPLSDIAYAYHFDAGLYARFLRNLSEKRGVKRTEGKIVDVIQRAEDGFIEAVLMEGGERIEGELFIDCSGFRGLLIEQALKTGYVDWSQWLPCDRAMAVPCENVGPPTPYTRSTALKAGWQWRIPLQHRTGNGYVYSSQHISDDEAAAALLTNLDGKALADPRALRFTTGMRRKFWNRNVIALGLASGFLEPLESTSIYLVQSGLGRLLSLFPGRDFDPLLAERFNRESTFEYERTRDFLILHYNATERDDTPFWDYCRTMPIPDTLREAIDLFRSDGRYFRNGEDFFALPSWVQVMLGQRIVPRGYHPIVDEMPEDDLVAHVEHMRQVIANCVTAMPLHQDFIDQYCKAPKT

SEQ ID NO: 88427 - protein, 501 aa, Erythrobacter sp.
  REGION 1..501: note = tr|A0A259K4C2|A0A259K4C2_9SPHN Tryptophan halogenase; OS = Erythrobacter sp. 34-65-8 OX=1970335 GN=B7X57_00685; PE = 4 SV=1
MAIEKIVIVGGGTAGWMAAAALSRIVGARGVTITLIESEEIGTVGVGEATIPPFVEFNNLLGIDEREMMAACQASFKLGIQFVNWGQVGDSYIHPFGAYGYHMGGIAFHQIWHRFREMGDKRPIQAFNLETMAAYFGKFSRTEDYAREDLPPINYAYHIDATRYARYLRSYAEQRGVLRREGRVADVTLDAESGYVASVTMADESVIPGDLFVDCSGFRGLLIEQALETGYEDWRHYLPCDRAVALPCEREDGSGPPPFTRATAHSAGWQWCVPLQRRNGNGHVYCSEHMSDDEAHGILVNNLAGKPAAEPNFLRFITGRRKKFWNRNVVALGLAAGFMEPLESTSIHLVHTGINKLIALLSLDGITQAQIDAFNRLTTKEYLRIRDFLILHYNATERTDSPFWNHVRTMPVPDTLTEKVELFRANGQIFREEDELFTETSWAAVMMGQRIAMGGHNAIADKIAGPDLKKELDEMESSIRYLVQHMPTHAAYLDKYCPAAA

SEQ ID NO: 88428 - protein, 516 aa, unidentified
  source 1..516: note = Sphingosinicella ginsenosidimutans
  REGION 1..516: note = tr|A0A5C6TW93|A0A5C6TW93_9SPHN Tryptophan 7-halogenase OS=Sphingosinicella ginsenosidimutans; OX = 1176539 GN=FRZ32_10145 PE=4 SV=1
MNEHSIREVVIVGGGTAGWMAAAAFARFLNNGYTRITLIESAEIGTIGVGEATIPPLITFNRMLGINENEFLRATKGTFKLGIEFVGWGGEGERYFHPFGYHGHDLEGVHFHQLYLRERKRRVMQDISAWSMSAVAAQLGKFARPPADARPPFGQLLYAFHFDASLYGQFLRAYAEGRGVRRIEGKVVDVAQDGESGHVRSVTLADGQVIEGDLFIDCSGFRGLLIEQTLKTGYEDWSNWLPCDRAIAVPSEHAVAPDPYTRVTTRRAGWQWRIPLQHRMGNGYVYSSAHISDDDAERELLANLEGPPLDQPRRLSFVTGRRTLAWNANVVSLGLASGFIEPLESTSIHFIQAGIARLISLFPDKRFNPVERDEYNRQMQNLFEDVRDFIVLHYKATRGTTDFWKRCQALEIPSTLQTKIDLFRAKGRVFREGFELFATTSWVAVFLGQHIVPEDYEPAVDALDEDKIAQALEQMRIGYLETAQAMPTHAEFVARCCAPPQPQAEAPFAFASGFGA

SEQ ID NO: 88429 - protein, 498 aa, Stakelama pacifica
  REGION 1..498: note = tr|A0A4R6FKL2|A0A4R6FKL2_9SPHN Tryptophan halogenase; OS = Stakelama pacifica OX=517720 GN=EV664_10857 PE=4 SV=1
MKPVQRIVIAGGGTAGWMAAAAIAHNMGETVDLTLVESDAIGTVGVGESTIPPLATFNRVIGVKEADFMAATNATFKLGIWFEGWRTGAADDRYFHSFGITGRDHWTAGFQHFWLHGREKGHHQPYDDYCLELVAAREEKFAHLPDNRLNYAFQLDATAYGRFLRRLAEQNGARRVEGRIAEVELDGASGDIAALKLESGERIEGDLFIDCTGFRALLIDGALHAGFEDWTHWLPCDSAIAIQTESGRPAPPFTRAMAHDAGWQWRIPLQHRTGNGLVYCSRYLSRDDALARIEGNLEGAAITSPNFLRFTTGARRRQWHRNCVAIGLSGGFMEPLESTSIHLIQRAILRLIRMMPAGGVISERDIAEFNDQQLLDMEQIRDFLILHYKATERRDSAFWRHCAAMEIPDSLAQKIELFRETGRVFRRNEELFAENSWVQVMMGQGIVPQRYHPIAAKLGEAELDRLLSGLRQDVARTVASLPSHTDYIARYCAADTTA

SEQ ID NO: 88430 - protein, 510 aa, Sphingomonas sp.
  REGION 1..510: note = tr|A0A1H8DGP8|A0A1H8DGP8_9SPHN Tryptophan halogenase; OS = Sphingomonas sp. S6-262 OX=1166340 GN=SAMN05192583_1923; PE = 4 SV=1
MRRDAIRRVVIVGGGTAGWMAAAAISRVLGEMPGLSIELVESEEIGTVGVGEATIPQIVLFNQMLGIDEAEFVRETRATYKLGIEFVDWLRPGHRYVHPFGFYGLDMKGIEFHHFWLKGQALGQHAPLDDYSLCIVGGLQGRFAHPRPDQPGSPLSKIGYAFQFDAGLYARFLRRRAEGHGVVRTEGRIVDVERDGTTGHVAAVLLQSGQRVEGDLFLDCSGFKGLLIEGAMEAGFEDWTRWLPCDRAVAVPCENGGDRQPLTRSTARGAGWQWRIPLQHRIGNGYVYASQHISDDEATATLLVHLDGTPLAEPRQLRFTAGHRRSAWVGNVVALGLAGGFLEPLESTSIHLVQSAIARLLTYWPNRRFDQREIDRFNAAHVADYVDIRDFLLLHYRATERDDTPFWTYCRTLEPPPGLAEKLAIFRANGRIFRNHDELFTETSWLSVMVGQGVLPGDYHPAADLLSDDETLSRLHHIRQVVADTASIMPMQDDYLGQIGCTLHHAGIRS

SEQ ID NO: 88431 - protein, 131 aa, Pseudomonas sp.
  REGION 1..131: note = tr|A0A2N7XTY7|A0A2N7XTY7_9PSED Tryptophan halogenase (Fragment) OS=Pseudomonas sp. GP01-A4 OX=2070571; GN = C1X83_34965 PE=4 SV=1
VMATVEAFLDAVDANGFTPAASAPFNDTIAARYDGVRDYIVAHYRLNQRATDPIGYWAAARALSHLSDPLKSLMSAWFTGADMAALIEQMGIGRYYSAISWHCLMAGYGTFPDDARLVPAGPEIERIDMLK

SEQ ID NO: 88432 - protein, 499 aa, Colwellia sp.
  REGION 1..499: note = tr|A0A1V0KVZ7|A0A1V0KVZ7_9GAMM Tryptophan halogenase; OS = Colwellia sp. PAMC 21821 OX=1816219 GN=A3Q33_17495 PE=4; SV = 1
MQSMDVKNVVIVGGGTAGWMSAAAMSKLLGSKKINIRVIESESIGTVGVGEATVPHIQYFNRLLGIDENSFIKKTNATFKYGIEFVDWHKRGESYFHSFGPYGMDMEGIHFHHMWLRQQQAGTAKPIDEFNLQIQAAKAGKYMPARPELQGSPLSALSYAFQFDAALYAAFLRDYSEKNGVTRIEGKIVNVTQAANTGHIESVTLEDGECIKGDLFIDCSGFKGLLIEETLKTGYDDWSLYLPCDSAVTRLSERMAELPPYTRATAKAAGWQWRIPLQSRTGNGYVYSSQFLSDEDAIESLNKDLDTAPISDPRQLKFKTGIRKQTWNKNVVSIGLSSGFLEPLESTSIHLIQTAIARLMTNFPDMSFNQPDIDYYNERTKAEYMQIRDFLILHYKATTRDDSPFWDYVREMDIPVSLEKRIAIYKENARLYSEDKVLFNHSSWFAVFNGQGIHPQRYHPIANFLEEKEMERRMAEIHTVTQKCLSIMPSHDEFLSKMI

SEQ ID NO: 88433 - protein, 521 aa, Xanthomonas sp.; identical to SEQ ID NO: 83183
  REGION 1..521: note = tr|A0A3Q9Q561|A0A3Q9Q561_9XANT Tryptophan halogenase; OS = Xanthomonas sp. ISO98C4 OX=1680158 GN=AC801_20100 PE=4; SV = 1

SEQ ID NO: 88434 - protein, 503 aa, Shewanella baltica
  REGION 1..503: note = tr|G0AXM1|G0AXM1_9GAMM Tryptophan halogenase; OS = Shewanella baltica BA175 OX=693974 GN=Sbal175_3152 PE=4; SV = 1
MTRAIKRVVIAGGGTAGWMAAAALTKLMGKHLEIVLVESDEIGTVGVGEATIPTLHIFHRLLGLKEQEVMAATNATFKLGISFENWQDINKNYLHSFGFLGKDCWACGFQHFWLKGKQLGMVSEIGDYCAEHLAARQGRFAVLPNQDYNHAYHMDASLYAKYLRKMAEQHGIHRIEGKIKQVLQHHDSGNIKALVLENDETIEGDLFIDCTGFRALLIEQTLNTGFEDWSHYLPCDSAIAVQTQSVGAPIPYTRSIARDSGWQWRIPLQNRTGNGLVFCSKFISDEDATELLLANLEGEPLNKPRVIKFKTGTRRLHWHKNCVAVGLSGGFLEPLESTSIHLIQRSIIRLMQLFPSAGIVQSDIDEFNQQTKLEMDNIRDFIILHYKATEREDSRFWRYCKNMDIPASLKHRIEMFADSGKVYKYGSELFGESSWIQVMMGQGIMPKHYHPIVDVMEEPELEAFLNNIKSTVKRKVESLPAHIDFIQHYCPAEVLANTKPMAM

SEQ ID NO: 88435 - protein, 290 aa, Caulobacter sp.
  REGION 1..290: note = tr|A0A257WTA7|A0A257WTA7_9CAUL Tryptophan halogenase (Fragment) OS=Caulobacter sp. 12-67-6 OX=1970329; GN = B7Z44_19045 PE=4 SV=1
PTAAASAQAADGSLKTGYDDWRSWLPMDSAIAVPCASVTPLTPFTRATAREAGWQWRIPLQHRTGNGHVFCSDYIDAAQATDVLMRNLDGAPLADPRQLTFTTGRRKRFWNRNVVAMGLASGFMEPLESTSIHLVQSALSRLIALFPNADFNTVEIDEYNRQTALEYEYIRDFLVLHYKATTREDTPFWRACKAMEIPDTLKARIELFAQSGRIFSKEDDLFKEASWVQVLIGQGVLPGAAHPLTGVVTDQQLDEYMANIRQIMGRAVEALPDHADFIARQCAAASRPAA

SEQ ID NO: 88436 - protein, 512 aa, unidentified
  source 1..512: note = Pseudoalteromonadaceae bacterium
  REGION 1..512: note = tr|A0A2E9T306|A0A2E9T306_9GAMM Tryptophan halogenase; OS = Pseudoalteromonadaceae bacterium OX=2026783; GN = CMK63_11395 PE=4 SV=1
MSKIINNIVIIGGGAAGWLTAGLLAKEHPHLHITLIESADIGISGVGEGTWPSMRNTLQRIGVKETDFLRQCDASFKQGSKFINWRGEQQGDNYYHPFMIPEGYYEYDVHAAWKQLFSQQKYADAMNMQSFICQAALAPKQINTPQYAGVTNYGYHLDAHKFARFLTQHCVNTLNVKHIVDNVICANNDEQGYIKSVSTQHNGAITGDLFIDCSGSQGLLIAKHYQIPFLDQSHILFNNTAVAAQIPYESQSQNIASATLSTAQSAGWIWDIGLPTRRGIGYTFSDKYCDEASAIETLKSYAAQTIGTQQADTIETRTLRFTPGYREIFWHKNCVAIGMSQGFIEPLEASALAMVELSISMLSEQMPVDQDHMQLLSTRFNKRFKYRWEQVINFLKLHYVLSNRDDNGYWHANRNPNSIPLELQNLLTLWQYQAPSRFDLVENEEIFSSASYQYVLYGMGFETSLTTKLDGQKCHKAEQLYQLNRNKIAQYLQKLPTNRLLLEQLQGSKVAT

SEQ ID NO: 88437 - protein, 440 aa, Nonomuraea sp.
  REGION 1..440: note = tr|A0A429AFN0|A0A429AFN0_9ACTN Tryptophan halogenase; OS = Nonomuraea sp. WAC 01424 OX=2203200 GN=DMB42_42895 PE=4; SV = 1
MSVEEFDVVVAGGGPAGSTVAALVAMRGHRVLLVEREVFPRYQVGESLLPSTVHGVCRMLGVTDELAAADFRVKRGGTFRWGARPEPWTFSYAASARLTGPASFAYQVERARFDEILLNNAKRKGVEVREGCPVTGVVEEDGRVTGLRYTGPDGGDHEVRARFVIDAAGHESGLSAGGTRKHSDVFPGVALFGYFGAGKRLPDPHSGNILTVAFDSGWFWYVPLTGGLTSVGVVVRRDLAAKVEGDREKAFRALIDECPPIAELLSEAMRVTAGKYGKLRIREDYSYHQSTFWRPGMMLVGDAACSMDPVFSSGVHLATYGGLLAARSINSVLAGDLDEKTALTEFEARYRREYEVFREFLTSFYEMDANEESYFRHAKKVTDNEHSELESFADLVGGVSSGEAALTAPDGPDAAPETPLLAGGPAASPDGMTWMPHHPA

SEQ ID NO: 88438 - protein, 502 aa, Stakelama pacifica
  REGION 1..502: note = tr|A0A4R6FUK2|A0A4R6FUK2_9SPHN Tryptophan halogenase; OS = Stakelama pacifica OX=517720 GN=EV664_102253 PE=4 SV=1
MTDHAIRDVVIVGGGTAGWMTAAALSRFLGGGGTRIRLIESEQIGTVGVGEATIPTIATFNQMLGIDENDFLRHTQGTFKLGIEFVDWRQIGERYFHPFGQFGRDIEGANFHQLFLKLASRGLAADIWHYAPCAMAAAAGRFNRTVDPTFGPMPYAFHFDASLYARYLRGYAEARGVERIEGRISDVALRGEDGFVDTLTLDDGRSVTGELFIDCSGFRGLLIEEALESGYEDWRHWLPCNRAVAVPTANIGDPPPYTRATARSCGWQWRIPLQHRTGNGYVYTNEYLSDEDACAALLNSVEGEPLGEPRFLSFVTGRRNRFWNRNVVAIGLSGGFLEPLESTSIHLIQTGIAKLLALFPDTRFLEVEAGEYNRLMRAAYDGVRDFIILHYHATTRDDSPFWNHVRTMDVPETLARKIDLFRAKGRFFRYDDELFSLASWVAVLLGQGIIPKGHDPLVGAMDENSLAHRVEELRQSVRRSVAAMPSHAEFLRAHCAAAPLQR

SEQ ID NO: 88439 - protein, 497 aa, unidentified
  source 1..497: note = Pseudoalteromonadaceae bacterium
  REGION 1..497: note = tr|A0A2D7N3Z3|A0A2D7N3Z3_9GAMM Tryptophan halogenase; OS = Pseudoalteromonadaceae bacterium OX=2026783; GN = CMK62_16450 PE=4 SV=1
MKPIKHVVIAGGGTAGWITAALLNKVLGKVIKITLIESSTIGTIGVGEATIPPIIQLNNALGINEQDFINATNASIKLGIEFENWKTPSHSYMHAFGSFGKDLPFCDFYNFWVKGHISGAKESLWDFSLNYQAAKQHKFAPLNTLPNTQLPGLSYAYHFDATLYAEFLKNLATSRGVEHIDAKIEQVEQCPLSGNIKSLTLGNSQQINGDLFIDATGQRALLIEQTLNTGFVDWSHYLPCDSAVAVQSQGTSELKPYTRSIAHSAGWQWQIPLQSRIGNGLVYCSRYLSDDAATQLLLNNLPAKPMTEPRVIKFKTGRRLKQWHKNVVSVGLASGFLEPLESTSIHLIQSAVTRLIKLFPHNGISEALVTEFNKQSVIEIEHIRDFIILHYTLTAREDSPFWRQCKQMDIPDSLAHKLKLFKQTGKAVRENDELFAEVAWQQVFIGQGLIPEDYNSIVDSLSSEQLNDLFSTLKTLITSTVDQLPTHKNFLAKIKKA

SEQ ID NO: 88440 - protein, 504 aa, Sphingomonas sp.
  REGION 1..504: note = tr|A0A0Q4I864|A0A0Q4I864_9SPHN Tryptophan halogenase; OS = Sphingomonas sp. Leaf22 OX=1735687 GN=ASE70_11630 PE=4; SV = 1
MAIDQVPVRSVAIVGGGSAGWMTAAALARFLPADTRVTLIESDAIGTVGVGEATIPQLRLFNQHLGIDEDDFVARTGGSFKLGIEFAGWNGADSRYLHAFGTIGRSLGLVPFHQYWLAAGGGDAPESLWSHSACAAAASANRFDRDPGNPQAPSGIAWAYHFDAARYAAYLRERAEAGGVERAEGRVVAVGLNDVGIDTVTLDDGRTIAADFFVDCSGFAALLIGRLAGDRWDDWSALLPCDRALAVPCAATQPVTPYTRATARSAGWQWRIPLQARTGNGLVYSSAHLSDDEAAATLLGNLDGAALADPRPLRFTTGRRHAPWIGNCVALGLAAGFLEPLESTSIHLVQSGIARLLSLWPASRPRPADIAAFNRQSEREWLGVRDFLIAHYALNGRDEPFWQERRATPLPDSLAERIALFRESGRIVRDEHELFAEVAWVQLLVGQGVRAGGYHPLADALPAERRSQFLDMSSKHVAATVARMPTHDQFLRAHCPAPDAKVAA

SEQ ID NO: 88441 - protein, 503 aa, Sphingomonas sp.
  REGION 1..503: note = tr|A0A0Q4I659|A0A0Q4I659_9SPHN Tryptophan halogenase; OS = Sphingomonas sp. Leaf22 OX=1735687 GN=ASE70_00415 PE=4; SV = 1
MSEANIRSIVIVGGGTAGWMAAAALSHMLAGSGMAIRVVESEAIGTVGVGEATIPHIQYFNRLLGIDEDDFVRRTCATFKLGIEFVDWGQIGERYIHPFGTYGQEMEGIHFHHFWYRHAQAGGALPLDRFSIGVGAARAGKFMRPDPSRRGSPLAGISYAFQFDAALYAKYLRERAEAAGVVRTEGRIVDVALNGANGHVDHVLLDDGSRVAGDLFIDCSGFRGLLIEGALNAGYDDWCEWLPCDRAVARPCARVGDPTPYTRATATSVGWRWRIPLQSRTGNGHVYCSDYVDDDTALAMLNDGLDGAPLADPNFLRFTAGCRRKAWDRNVVALGLAAGFLEPLESTSIHLIQTGIARLLTNFPDRSFNQPDIDYYNRRTRLEYEQVRDFLILHYKATARNDSPLWRRCRDMAIPASLEERIAIFRENARLYRHDNELFSATSWLAVLHGQNIHPKRHHPIADILSADELDRRMTHIAGAMDAGVRAMPDHMAFIDRFCRSPS

SEQ ID NO: 88442 - protein, 511 aa, Ponticaulis sp.
  REGION 1..511: note = tr|A0A2E0U551|A0A2E0U551_9RHOB Tryptophan halogenase; OS = Ponticaulis sp. OX=2020902 GN=CMK06_04180 PE=4 SV=1
  VARIANT 94: note = Xaa can be any naturally occurring amino acid
  VARIANT 129: note = Xaa can be any naturally occurring amino acid
  VARIANT 204: note = Xaa can be any naturally occurring amino acid
  VARIANT 207: note = Xaa can be any naturally occurring amino acid
  VARIANT 441: note = Xaa can be any naturally occurring amino acid
MNKAIRKIVVVGGGTAGWITAGLIAARHPDRSENGVQITLIESPDVPTIGVGEGTWPTIRKTLSRIGIREADFLRACDASFKQGSRFDGWVSGXPEDSYHHPFDLPVSQYGTDLIHAWTSFAGDRPFAXAVCAQVGPGLDGLAPRQSGMPDFIGATNYAYHLDAVKLATLLREHVLGQLGVTYIQDHVTEVVAAPDGDISSVKXREXGPVEGDLFVDCTGQASLLLGQHYGVEFVDQSRILFNDRAVIAQVPVAPDSQIASQTISTAHEAGWIWDIGLPTRRGVGCVYASGFMSADVAEATLREYIGPQEEVRTRHIQFRSGHRKTFWQNNCVAIGLSAGFLEPLEASAIVMVELSAEMIAENLPVTRAAMNFEADRFNATFRYRWSRIIDFLKLHYVLSRRTDPYWQENRKSETIPDRLKSLLQVWQYRPPAMEDFEHAXEVFSVSSYLFVAYGMGMRPQPHPTLQPRQQAELCKEMQTIARKQRSFASGLPTNRAYLSAFSDPPVRQPA

SEQ ID NO: 88443 - protein, 504 aa, unidentified
  source 1..504: note = Halioglobus sp.
  REGION 1..504: note = tr|A0A165RYG7|A0A165RYG7_9GAMM Tryptophan halogenase; OS = Halioglobus sp. HI00S01 OX=1822214 GN=A3709_08090 PE=4; SV = 1
MNNNDSRTITVVGGGSSGWMTALYLNTLFNKEQLNYQIRVIESPDIGIIGVGEATVHSVRFFFAAMGLDENELLRETNGSLKLGILFRNWMKPVDGKTHEYFHPFEQQRLGRGMDISSMWHMSGRGTRERYDEAVSLSSELVAHRHVPKTANSQAYQGVVPYGYHIDATLLARFLRRKAVAEGVEHIEATVTSATTEGEMIQSVETDKGSFTADFFIDCTGFRGLLIDQLKQDNWESFADALPCNKAVAIQRELPDDLGAKPYTTATALSNGWAWQIDLQNRQGTGYVYDGNRLSKEEAEQELRDFLGPDAAVLKCAHLNMKVGCRKEFWVGNCVAIGLSAGFIEPLESTGLHLINLGAGLLATHQPNREVDQSIRDSYSRLMRGFYQDLKQFIVLHYCLTDRNDTDFWRAAPATVEHTPWLQSQLQIWKHKICEFHDLAGSFSTTFNDENYRYILYGMQHNPALTQSVDAAASEQLFAQAKANAERARQLTSAQGDYLSQLNL

SEQ ID NO: 88444 - protein, 510 aa, Erythrobacter sp.
  REGION 1..510: note = tr|A0A259JXC3|A0A259JXC3_9SPHN Tryptophan halogenase; OS = Erythrobacter sp. 34-65-8 OX=1970335 GN=B7X57_08785; PE = 4 SV=1
MQNQGQGAQGIRRLVIVGGGTAGWIAAAAFARLLGERLAITLVESDAIGTVGVGEATIPQIIRLNSILGFDEHDFVRRTQGTFKLGIEFVNWSAPGSRYLHTFGDTGMNLGNVHFHHYWRRHMMAGGAESLWHYSLHQLAADQNRFGKLERVGNTAMAGLAYAYHFDASLYARYLRAYSEKLGVTRQEGTIESVQRDGESGDVTAVTLAGRVRVEGDFFIDCSGFRSLLLGQELGVEYTDWSHWLPCDRAMAVPSERLPDLPPYTRSTARQAGWQWRIPLQHRTGNGHVYCSSFLSDDEAADTLMANLDTPALADPRPIRFTTGHRKQFWAHNVVALGLSSGFLEPLESTSIHLIQSNVSRLIELFPRGRVCAADRAEYNRRTIHEFAQIRDFLILHYHQTGRDDTEFWRYCQHMSVPESLTHKIALFASSGRLGRDVDDLFREASWVQVMLGQGVVPADYNPMADRLEAAQLGQFMGDVRRLVEKAVSGLPTHADYVAAHCSAADSAGP

SEQ ID NO: 88445 - protein, 168 aa, unidentified
  source 1..168: note = Moraxellaceae bacterium
  REGION 1..168: note = tr|A0A4Q6CLW6|A0A4Q6CLW6_9GAMM Tryptophan halogenase (Fragment) OS=Moraxellaceae bacterium OX=1889775; GN = EOO68_40550 PE=4 SV=1
ASGFMEPLESTSIHLVQAAISKLIDLFPQKDFRPEVINKFNTQLSFEYQSIRDFLILHYKATQRNDSAFWDYCRTMDVPQNLLDKIALYKEGGRVYRDSEESFSGISWLAVLRGQGIITDRYNPVADVYDEERLLARIENIYEVTQRSVEACPTHEEYIDKYCRARPN

SEQ ID NO: 88446 - protein, 528 aa, Serratia rubidaea
  REGION 1..528: note = tr|A0A2X5AXV3|A0A2X5AXV3_SERRU Geranylgeranyl reductase family OS=Serratia rubidaea OX=61652; GN = NCTC10848_02010 PE=4 SV=1
MSKPIKNIVIVGGGTAGWMSASYLIRALQQQANITLIESAAIPRIGVGEATIPSLQKVFFDFLGIPEREWMPQVNGAFKAGIKFVNWRESPDRSHNDYFYHLFGNVPNCDGVPLTHYWLRKREQGFQQSMAYACYPQPGALDGNLAPCLHDGSRQMSHAWHFDAHLVADFLKRWAVDRGVNRVVDEVVEVNLNDHGFISSLSTKEGRKLEADLFIDCSGMRGLLINQALKEPFIDMSDYLLCDSAVATAVPNDDAQAGVEPYTSSIAMNAGWTWKIPMLGRFGSGYVFSSKFTSRDRATADFLKLWGLSDNQPLNQISFRVGRNKRSWVNNCVSIGLASCFLEPLESTGIYFIYAALYQLVKHFPDTAFDPRLSDTFNAEIVYMFDDCRDFVQAHYFTTSREDTSFWLANRHDLRLSDAIQEKIERYKAGLPLTTTSFDDATYYDTFDYEFKNFWLNGNYYCIFAGLDMLPDRSLPLLQLRPESVEKAEAMFARIQREAERLRASLPTNYDYLRSLHQGNRPASTESL

SEQ ID NO: 88447 - protein, 520 aa, Novosphingobium sp.
  REGION 1..520: note = tr|A0A259E5V4|A0A259E5V4_9SPHN Tryptophan halogenase; OS = Novosphingobium sp. 17-62-19 OX=1970406 GN=B7X90_00925; PE = 4 SV=1
MVRAVRDVVIVGGGTAGWLTAAIIAAKHKARIGHDFSVTLVESPNVPIIGVGEGTWPTLRSTLKSVGVSETDFFRECDAAFKQGALFAKWTTGAEDDAYYHPLVLPQRFGQLNLAPHWLAGTLNEGGDNGETFCDAVCPQGRICDENRAPKSMTNAEFEGQANYAYHLDAGKFAPFMQRHCTEKLGVRHVLADVREVLQDESGDIRAIDTDQAGEIAGDLFVDCTGMRSLLLGGTLGVGFKDCNDVLFCDTALAVQVPYPDDQAPVATHTISTAQSAGWIWDIGLPTRRGVGHVYSSRHISREEAEAELRAYIGPQHADLPVRKIDIRSGHRELFWKNNCVAVGLAAGFLEPLEASAIVLIELSAKMIADQMPPAREVMDIVAKRYNEKTLYRWGRIIDFLKLHYVLSKRRDTTFWRDNMDPETIPERLQELLALWQYQPPYMHEEFDRVDEVFPSASYQYVLYGMGFRTEVSARALEPEVRDARRARRDNADQTARMVAALPTHRDLIQRIVKYGLQPV

SEQ ID NO: 88448 - protein, 516 aa, Kutzneria sp.
  REGION 1..516: note = tr|W7SW11|W7SW11_9PSEU Tryptophan halogenase PrnA; OS = Kutzneria sp. 744 OX=345341 GN=KUTG_08926 PE=4 SV=1
MVIVGGGTAGWMTAAYLKTAFGDRLSITVVESSRIGTIGVGEATFSDIQHFFQFLNLREQDWMPACNATYKLGIRFENWRHVGHHFYQPFEQIRPVYGFPLTDWWLHDAPTDRFDTDCFVMPNLCEAGRSPRHLDGTLADEDFVEEGDELANRTMSEHQGKSQFPYAYHFEAALLAKFLTGYAVDRGVEHVVDDVLDVRLDQRGWIEHVVTAEHGEIHGDLFVDCTGFRGLLLNKALGVPFVSYQDTLPNDSAVALQVPLDMQRRGIVPNTTATAREAGWIWTIPLFGRVGTGYVYAKDYLSPEEAERTLREFVGPAAADVEANHIRMRIGRSQESWRNNCVAIGLSSGFVEPLESTGIFFIHHAIEQLVKHFPAADWNPKSRDMYNSAVAHVMDGIREFLVIHYRGAARADNQYWRDTKTRPLPDGLAERIECWQTQLPDTETIYPYYHGLPPYSYMCILMGGGAIRTPASAALALTDQGAAQKEFAAVRDRAAQLRDTLPSHYEYLARMRGLDV

SEQ ID NO: 88449 - protein, 265 aa, unidentified
  source 1..265: note = Moraxellaceae bacterium
  REGION 1..265: note = tr|A0A4Q6EX02|A0A4Q6EX02_9GAMM Tryptophan 7-halogenase (Fragment) OS=Moraxellaceae bacterium; OX = 1889775 GN=EOO68_01575 PE=4 SV=1
FNENLFNNAAVVMPSMISEIIPPETRSTALSNGWAWKIPLRNRYGNGYVYSSDHITPEQAETELRRHLGLLDSEVAARHLHMKVGCAEKHWVKNCLAVGLSQGFIEPLEATALALSYETITLFMKHYESGHYTNKFESVFNVEINGKFEGVRDYIVCHYKANQRKDTDYWRDNAINTKVPDSLNKILYLWRTSQNFAKDMQAHNLEGSYQAKSWACLLAGYGVLPPLDAGAVSAHGKSSHDMNQLADFIRRCGLNFKKHNELLTH

SEQ ID NO: 88450 - protein, 498 aa, Sphingomonas sp.
  REGION 1..498: note = tr|A0A0Q4HZ96|A0A0Q4HZ96_9SPHN Tryptophan halogenase; OS = Sphingomonas sp. Leaf22 OX=1735687 GN=ASE70_01440 PE=4; SV = 1
MAAAINGVVIVGGGTAGWMTAALLAKVIGPQVRITLIESDEIGIIGVGEATIPPIQHVNAVLGIDEAEFLRETRATIKLAIRFDDWGAIGESYYHTFGAAGRNTAFCSFHHYWNRAKRAGIAGDYWDYDLNYLCAREGKFARIQVDDPLWHLPYAYHFDSGLYGQYLRRYSEARGVERIEGLVEQVARDGESGNVTALIMRDGREITGDLFIDCSGGRGLLIQRQLNVGYEDWGHWLPCDRAMAVPTARHDDTPPYTRSTARSAGWQWRIPLQHRVGNGLVYSSRHLTDDQAADLLLGNLDGEVLAEPRIIPFRTGRARRQWDHNVVAIGLSSGFLEPLESTSIYLIQSAIVRLLHLFPHAGFDDRQIAEYNRQSRIEFETVRDFIILHYHATRRDDSDFWRHVRTMALPDRLADKIALFRATGTLTQDPLDIFMEPSWVQVLMGQGIEPADYHPLADGPTDAELAEQLRQLAAMKREPVPNMPAHDRWLSGFGGAAG

SEQ ID NO: 88451 - protein, 485 aa, Sphingomonas sp.
  REGION 1..485: note = tr|A0A0Q4IB54|A0A0Q4IB54_9SPHN Tryptophan halogenase; OS = Sphingomonas sp. Leaf22 OX=1735687 GN=ASE70_01435 PE=4; SV = 1
MSPSIVILGGGTAGWIAAHLFERAWPDAAITVVESPEIGTIGVGEGSTPSLKRFFEIIGAAEADWMPRCGATYKAGIRFVDWSPAAPWRDYRHPFTTQIDVHTEDAFVLNCRNRRLGHDVPVRPDDFLLNGVLSAKGLAPVAPPNFPFRIEYGYHFDAGLLGQYLRELAVARGVVHRPAKVTEVRRAENGDIAALVTDREETIAGDIFVDCSGFNGLLIERTLGVPFHSFKDHLFNDAAVVLPTEMTGRPPVETVATALSNGWCWSIPLRHRVGNGYVYARDCQSSDAAETELRRTLGVGDEVAARHLTFRVGQVARHWERNCVAVGLSQGFVEPLEATALHLVLGTVEQFIRHYRDGGCTDRHRAAFNTVAAERMDGVRDYIVAHYKLNTRTDTDYWRANAANEALPDPLLHILDRWFRRGDIAEELARQGQRSHFGNLSWHCLLAGYGAFPAVSEARRDDMDFYAARTVSAFLEGCSLNFAQA

SEQ ID NO: 88452 - protein, 510 aa, Alteromonas sp.
  REGION 1..510: note = tr|A0A1L8MH34|A0A1L8MH34_9ALTE Tryptophan halogenase; OS = Alteromonas sp. V450 OX=1912139 GN=BK026_15675 PE=4 SV=1
MNHSSHTSQKQRIVIVGGGTAGWLTAAIVAAKHKVAAGECGLDITLVESSDIPTVGVGEGTWPTMRNTLKDIGLSEKEVFRRCSAAFKQGGKFVNWVNGDGDFYYHPFTVPLGYGRVEMAPYVGDIANFANATNFQQHVCERNMAPRTLNEQEYSSAQSNYAYHLDAGAFADMLRDFSKTELGVKHIVATVENVAATSNEHIESVTLNNGMALKADLFVDCSGFRSLLLGETLGESVVSTDDVLFNNSALALHVPHEEDFEIKPYTQATAQEAGWIWDIGLSSRRGVGHVYSTEFTTDERAEEVLREYVGDKHGDLKARTIRFNSGYKKRIWKGNCIGVGLSAGFVEPLEATALMLIEISARYIAEQMPLPESAMPIVSQRFNKQMNYRWQRIIDFLKLHYIFNQRSEPYWVANRDAASIPDSLKEDLEIWKYRGPQIADFSAAIELFPAASYQYVLYGMGFSPDFSLQSHFYNDRDLADKVIQQNQLITQQKLSSLPNHRDYIEQWLAS

SEQ ID NO: 88453 - protein, 504 aa, Sphingomonas sp.
  REGION 1..504: note = tr|A0A0Q4I737|A0A0Q4I737_9SPHN Tryptophan halogenase; OS = Sphingomonas sp. Leaf22 OX=1735687 GN=ASE70_00410 PE=4; SV = 1
MSAPLLRRIVIVGGGSAGWMTAAALSSLLDPKDVAITLVESDAIGTVGVGEATIPDILAFNQMLGVNEAEFMAATQATFKLGIEFVDWGARGDRYVHPFGQHGVDMQGIDFHQYWLRAREHGAPQPIEEYSLCAVAARAGRFALPDPNPRSVLSQIRYAYHFDATLYARFLRRYAEKRGVVRIEGIVGAVGRGADGAITGLTLADGRGVAGDFFFDCTGFRALLAGETLGSGFVDWSHWLPCDTALAVPSEHAGPPTPYTRATARDAGWQWRIPTQRRVGNGHIFASAFTTEEAASATLLAGLDAPALADPRRIRFRAGCRDTFWSGNCIAIGLAAGFLEPLESTSIYLIQEGISRFISLFPRGDIPDILRTEYNRHMRTEFEQVRDFIILHYAATTRDDTPFWNHCRTMRLPDTLLHKIELFRETGRVFRYNDELFTRPSWVAVMLGQGIVPTSSDPIVATLPERDVARSLASMRDAMAAAVARMPTHGDFLARYCPAPAMAA

SEQ ID NO: 88454 - protein, 517 aa, unidentified
  source 1..517: note = Halioglobus sp.
  REGION 1..517: note = tr|A0A165RYG1|A0A165RYG1_9GAMM Tryptophan halogenase; OS = Halioglobus sp. HI00S01 OX=1822214 GN=A3709_08085 PE=4; SV = 1
MDNGRINSVLVVGGGTAGWLAACHLARKLHPSDPQGVRVTLVESPDIPTIGVGEGTVPAMRNSLQYLGISETEFIRHCEATFKQSIRFDGWMAAPDHSYHHVFDYPRRDPVDVTPYWLLGGEEQSYAQWVGIQAGICDAGLGPKQMTQPEYAGVANYAYHLDAGKFAELLTRHATEKLGVEHLKANVREVKLAANGDIEALDTDRLGELRADLFIDCTGFNSMLLGKALGVEFIDRSDVLLADHALAVQVPYPEPDSPIPSQTIATARSAGWIWDIGLVTRRGTGYVYSSNHIDHDAAELELRDYLRQSLGDWVDDLACRRIPMQVGYRERFWFRNCAAIGLSQGFVEPLEATGLLMFDATARMLAEQFPASRDLMPLLSERFNRRVQFAWERVIDFIKLHYCISDRDDTAFWRDNRDPAGIPESLQENLALWRHQVPSEYDFSSKLEIFNLENYLYVLYGMNYGTAIEPLAYRYRDSALAAKAVQRTQAVVEEARANLLPHRELIEKIHRYGLQPV

SEQ ID NO: 88455 - protein, 496 aa, Colwellia sp.
  REGION 1..496: note = tr|A0A1V0KWB9|A0A1V0KWB9_9GAMM Tryptophan halogenase; OS = Colwellia sp. PAMC 21821 OX=1816219 GN=A3Q33_17635 PE=4; SV = 1
MNSSAIKNVVIAGGGTAGWMAAAAFGKLLGKNLNITLVESDLIPTVGVGEATIPTLHIFHDLLKIKEADVMKATNATFKLGISFENWRDVNQDYIHSFGYLGQGCWAAGFQHFWVKGKQQGMVSEIGDYCPEHLASRRGKFAVVPKQDRNYAYHLDAGLYAKFLRTMAEEHGVQRVEGKINQVNVNEENGFIQSIALDNSKIIEGDLFIDCTGFKGLLIEQALHTGYEDWSHWLPCDSAIAVQTKIQNKTVPYTRSIAHKAGWQWQIPLQNRMGNGVVFCSKHLSDEDAKALLLSNIEGELLNEPRVIKFKTGSRRKHWNKNCVAVGLSSGFIEPLESTSIHLIQQSIIRLMQNLPSKNMEQANIDDFNNKMRFEIDNIRDFIVLHYHVTQRADSPFWRYCKNMEIPETLKQRIDLFIENGNAYKTERELFGETSWIQVMIGQGLMPKYYHQIVNMMSDTELKSFLDNIKMTIERRVNSFPDHNEFIKNYCKSTVA

SEQ ID NO: 88456 - protein, 503 aa, Colwellia sp.
  REGION 1..503: note = tr|A0A1V0KW65|A0A1V0KW65_9GAMM Uncharacterized protein OS=Colwellia sp. PAMC 21821 OX=1816219; GN = A3Q33_18010 PE=4 SV=1
MDKVKTEQIKSYVVVGGGTAGWISAAVLARALTNTDVKITVVESPHVPTIGVGEATIPSIVDLLEYLRIPLKEFILATNSTFKLGIKFIDWKEKGHHYWHPFGFVGNKIEGKLFYQHWLKHQFENPQFEFTDFSPAIALAKQNKFYIPDPKVKNNLSSSTYALHFDASLVAKYLADYCKNKGVNLIKGHIQATNLNENGQVDKLILADGQAISGDFFIDCSGQQALIMHKALRVGYENWQHYLPVNKAVTAQTAIEHPTPPYTQATAHEHGWRWKIPLQNRIGNGYVYCSDYCSDDAALALLKSNSAPFITEPRFLSFTTGKRDKIWYKNCLAVGLSSGFLEPLESTSIYLIMKTMLNFVQNMPNKKLYQAPIDEFNRLIDDEYIAIRDFIVLHYCTTKRTDSPFWQMWQHLEIPKTLQTKIELFTCQGKLYENQYDLFSADSWYSVLEGMGVRPNSYDPLIDASSFNQIEQAFRQSISALSNNVAKTLTHDEFINRLIAAKE

SEQ ID NO: 88457 - protein, 514 aa, Shewanella sp.
  REGION 1..514: note = tr|A0A549ZWN7|A0A549ZWN7_9GAMM Tryptophan 7-halogenase OS=Shewanella sp. YLB-08 OX=2593656; GN = FM038_21580 PE=4 SV=1
MMIDAIKEVTIVGGGTAGWLTAAVIAAEHHSHLADTINVTLIESPEVSSIGVGEGTWPSMRSTLEKIGISEVEFITCCDASFKQGSQFIGWKNGQQDDRYYHPFMTPQGYAQANLYRAWQEFSPEQSFAETTSIQAAVCDAGRAPKQAGTPDYAAVTNYGYHLDATKFAKLLMQHCTTKLGVKHVLDHMIDIISDGNGDIAEICTKRSGNISGDLFIDCTGMSSLLLGKHFNIPFIEKRHILFNDSAMALQVPYYEDDTQIASTTKSTAQSNGWIWDIGLPSRQGVGYTYSSSHTSDQQIQDDLITYVAKSIGQVRAEQLSPRKISFTPGHRDKFWHKNCVAVGMASGFIEPLEASALALIELSASMISEELPVHRAQMDITAKRYNQRFTYRWSRVIDFLKLHYVLSERQDSDYWLDNRHNNTLPDSLQEQLELWKYKVPNRHDLMQNEEVFPSASYQYVLYGMGFQTLLPKIAKQSDNLNVAKTSFDDIQQNKRKYITGLPTNRELLKLLTQ

SEQ ID NO: 88458 - protein, 447 aa, Streptomyces parvulus
  REGION 1..447: note = tr|A0A191VAA6|A0A191VAA6_9ACTN Tryptophan halogenase; OS = Streptomyces parvulus OX=146923 GN=Spa2297_32570 PE=4; SV = 1
MAKETADVVVIGGGPAGSVCAYMLAKQGHSVVLLEKELNSRFHIGESLLPYMMGLFERIGLRETVAAQGYVPKFGGEFIDPTEKKFFEGVFRADFTKQGAGRHDNAFQVERARFDRMLAEQAEAAGARVLFGADVGELLMEGDRMVGARYQRDGETHEVRAAYVVDASGRSGRIANRFGLRKTLEKLRMVAVFRHYSGLDESHNLGVEGDIQVGAHDDGWVWAIPLTKDTISVGTVMPRDVLRGSTANERFEEHLARVPRIVSRLTGTRPSMDLKVETDYCYHTDTVTGPGWLMVGDAGCFGDPMFSGGVLVATATAVRAAETLGEVLADPSAEDRQMERYSNYFKTGYDTYIRLIHAYYDGELVAMAADAARSTDRETLEKYLVRLIGGDFWSEHNSVAQEMRRRKEWDTFEPFQRVYGCPSYPHLDDIDRKERSEARVRRVTAGR

SEQ ID NO: 88459 - protein, 529 aa, Dyella sp.
  REGION 1..529: note = tr|A0A370K5S5|A0A370K5S5_9GAMM Tryptophan 7-halogenase OS=Dyella sp. DHG54 OX=1920168 GN=DVT68_12930; PE = 4 SV=1
MAQLKKVLVVGGGTAGWLAACYLAKAVNAVDPNSVQVHLVESANIGLLGVGEATFPSIRGTLAAIGLDERRFLVGATATYKQGIHYRHWVRPPGTPGADHFFHPFSMPSQRPGGPELLPYWLLGAAPEGATFADAVSMQARLVKHGKGPKRTKDADYQGPLNHAFHFDAAYFAKVLAEHGEQVLGVKRHLATVERTELDEQGAIARVVTKELGELTADLYVDCTGLRGSLIGGVMKSPFRSRRDVLFADRAVAIQVPYKRPDTPIPPYTISTAQEAGWVWDIGLQTRRGAGYVYSSRHTDAERAEHVFRQYLGAAADGIQATHIKFETGYRPEHWRKNCVAVGLAGGFVEPLESTGIALVELGTYLLTHLLPGDTHDMERAARHYNEMMIARYDRIIDFIKMHYCLSQRRDSQFWIDNTDPISIPQTLQDKLALWKLRPPHRLDFVSDLEMFMVSSWQYVLYGMEFRTDLEPTRHLYTRTEEAKQEFANIQQAASYALNDLPDHRALVEQMCREHQERVSAAEALEVVG

SEQ ID NO: 88460 - protein, 508 aa, Shewanella sp.
  REGION 1..508: note = tr|A0A550ADG2|A0A550ADG2_9GAMM Tryptophan 7-halogenase OS=Shewanella sp. YLB-08 OX=2593656; GN = FM038_11970 PE=4 SV=1
MDIKKVVIVGGGTAGWLAANHLGKALFNTENVSVTLIESPDIPTIGVGEGTVPAIKKSLQSFGISESEFIAQCDVTFKQSIKFSNWLDQDNHGKGNFFHHLFDMPSPMGEDLTPLWLSKQGHDYASCVSPQFTACEALKAPKKITTPEYAGSLGYAYHLNAAKFAKLLAKNGREKFHVEHVIANVSEVKLNDSGAVSSLVTDTHGELKFDLYIDCTGFESLIIDKALKVPFVDKSKQLLVDRALVVQVPTDVNESIPPFTLATAHQAGWIWDIALPNRRGVGFVYSTKYMDDKTAIKKLDKYLGGGLSDFNYRFLPMKVGYREKFWHQNCICLGLAQGFLEPLEATSILLTDFAAGYIANRFPKSVAKMEDIQTQFNQVMKYAWERVVEFIKLHYCLSDRTDSQFWIDNRDPKTIPDELARKLSLWETYVPNREDFFSKFEVFDLENYLYVLYGMKYKTQVDALTDEQMSLANKQSLHLAEIGKQLTEELPEHRELLNKIKEHGLQSI

SEQ ID NO: 88461 - protein, 528 aa, Sphingomonas trueperi
  REGION 1..528: note = tr|A0A543LP50|A0A543LP50_9SPHN Tryptophan halogenase; OS = Sphingomonas trueperi OX=53317 GN=FHW45_4361 PE=4 SV=1
MLSAALRPLPGPPRRRSVGAMNPKRRILILGGGTAGWLTAAYLARYLDVAHQRRFAITLLESPALGIVGVGEGGFPTIRETLQFLGIDERSFVRQASATFKQGIRFDDWLHAPQPDGTRHRFLHPFEAPFHTEGAGLVPYWLLQPEAQRAPFAEAMTIQNRVAAQGRAPKRAEEAGFGGPLTYAYHFDAVRLAQLLRDRAIELGVTHLEGEVFSAHTDAEGAIDRIETREHGSLTADLYIDCSGFEAALIGKALGAPLSSVRHQLFTDRALACKLPYADPEAPIATTTVAAAHEGGWTWDIGLQHARGIGCVYSSAHLSDDRAADILDAHLGGAPHAPRLITFEPGYRRTPWVKNCVAVGLSGGFLEPLEATGVVLIEAAAAMIAELFPHAGPVDAPAARFNALMTARYERIVDFLKLHYCLSRRDEPFWRDNRDPASIPDTLRALLEQWRHRPPSRFDFLLDVESFAFFNYQYILYGMDFRTDLSGAREGFPHAEAAARQFARIRGFGEQAVADLPAHRELIRQLAG

SEQ ID NO: 88462 - protein, 495 aa, Pseudoalteromonas lipolytica
  REGION 1..495: note = tr|Z5XQW7|Z5XQW7_9GAMM Tryptophan halogenase; OS = Pseudoalteromonas lipolytica SCSIO 04301 OX=1452721; GN = AT00_04725 PE=4 SV=1
MTNHFTKHVVIAGGGTAGWMAAAALAKLLGNEITITLIESDEIGTVGVGEATIPPIRTFHKLLGIDEQRFMTQTQATFKLGISFENWHKPNSDYIHSFGMTGKECWAGEFHHFWLHAQNQGVKDDFGDYCYELQAAKHGKFGFNKQNPINYAFHLDANRYALFLRDFAEQHSVKRIEGKIEHINKSATNGFIESVTLKNGTTVSGDFFIDCTGFKGLLIEQALHTGFEDWSHLLPCDSAVAVQTTGSDEILPYTRSIAHQSGWQWQIPLQNRTGNGLVYCSRYLTDADATHLLLNNISGEILTDPKVIKFKTGRRLKGWNKNCLALGLASGFLEPLESTSIHLIMTGIIRFIRLFPFTHISQHAIDEYNKQLKSELESIRDFIVLHFRVTDRDDSEFWRHCKTMEITQTLSHKIALFKQTGRVFLDDGDIFRVDSWVQVMLGQGIKPQQYHHVASLMSEQELMQFLHGIKQQIAHRLAQLPNHKEFVSKYCSQNN

SEQ ID NO: 88463 - protein, 513 aa, Shewanella baltica
  REGION 1..513: note = tr|B8EFB0|B8EFB0_SHEB2 Tryptophan halogenase; OS = Shewanella baltica (strain OS223) OX=407976; GN = Sbal223_3217 PE=4 SV=1
MTSRKDIKSVVIVGGGTAGWISACHLAKKLNARTPKIQVMLVESPNIPTIGVGEGTVPMLRETLKYFGIREDDFIRRCDVTFKQSVKFIDWNEPNSGEYYHHLFDYPYFKDFTSTWLNKSLSDRGRYADLVSVQGHLIDAGYGPKAMTQPQYRGAMHYAYHLDAAKFTKLLTEFGVERLGVKHLLAEVIDTKIDAQGNILELHTDNAGVLTADLYVDCTGFSAQLIGNACNVPFVDKSDILFVDSALVVQLPYEDKYTPIPCFTKSTAQEAGWIWDIGLSERRGVGYVYSSQYSSIEQAESVLREYLGKAAEEISFRHIPMKVGYREKSWQGNCVAIGLSSGFVEPLEATGLLMFDATARMLAECFPANTDVMPLVANRYNQRVSNAWNRVIDFIKLHYVTAKRMDTPFWVDNKNEISIPDSLKEHLELWRYHIPTAYDFTSTLEFFNLENYLYVLYGSDFESKLKMTLNDEEERLFSEMTDKLDKQVTLLKSQLLPHRELIERIKLYGIQLN

SEQ ID NO: 88464 - protein, 513 aa, Cellvibrio sp.
  REGION 1..513: note = tr|A0A4R7B862|A0A4R7B862_9GAMM Tryptophan halogenase; OS = Cellvibrio sp. YR554 OX=2135765 GN=C8K91_107144 PE=4; SV = 1
MQKKVVILGGGTAGWIMAARLAAERLHIDTVPISITLVESSDIPTIGVGEGTWPSMRGTLEKIGIRESEFLQFCQATFKQGSRFINWRAGIGERYDHPFTIPPMVAGASLGANFQQAGSQQSFSHWVCLQSHMMDAKRAPKQLHTPDYAGVLNYGYHLDAGKFAQLLKMHAVDRLGVKHIIGHFQSAELDEAGQIKALNLADGTVLDGDFFIDASGTHNQLIGGALASEFISLSHASPNDRALAVQVPYVNQDDAIHSATLSTAQEAGWIWDIGLQNRRGVGYVYSSAFSTEARAREVLTQYVAAINPDADASAARQLIIKPGYRATPWVGNCVAIGMAAGFIEPLEASALVMVELTAAYLCENLPATSSALKGIANRYNQLFSERWERIRDFLQLHYLLSERRDTEYWRYVAESIPATDRLNSLLEEWRYRDPVLNDFGHFMELFPSASYQYVLLGMQPNYFTARFSRTNEKTAELLKEIENLKVKREHYLAHLPANRDFFSQLKEKQLVVS

SEQ ID NO: 88465 - protein, 378 aa, Corallococcus sp.
  REGION 1..378: note = tr|A0A3A8S7R1|A0A3A8S7R1_9DELT Tryptophan halogenase; OS = Corallococcus sp. AB032C OX=2316717 GN=D7X99_05555 PE=4; SV = 1
MDTLRYDVAVLGGGPAGAALALALCRHSGLRVVLFERSTYAQPHLGETLPPDSRRLLARLGVWEAFARQGHLRSMGSCSRWGDSALGDNDHLRSPWGTGWHLDRSRFDRMLADEALRFGVDVRIGSVVTDWTPLENGGHRLFVPTEGDAPRDFVDARFVVDATGRSAVFATSQGARRHTVDRTLGLCGTFALQPGRAVDALTLVESCEDGWWYSARMPGDQIVFGLMGDKDSLQGLMPEDAEAWRARMERAPETRRRLEACVFTGEPLLAVSANVACLDRLHGEDWLAVGDAACMLDPLSSQGTSQALRTANQAADVVSRYLRGDSAALRLHEVRTRHEFQEHLRIREGYYRLERRWPGAPYWRNRQQSCAPVLSSPP

SEQ ID NO: 88466 - protein, 500 aa, Amycolatopsis thailandensis
  REGION 1..500: note = tr|A0A229S1D5|A0A229S1D5_9PSEU Tryptophan halogenase; OS = Amycolatopsis thailandensis OX=589330 GN=CFP71_22975; PE = 4 SV=1
MSTARHEEFDVAVVGGGPAGSTLASLVAMRGHRVLLLEKETFPRYQIGESLLPSTIHGICHLLGVDEEIAEAGFLRKRGGTFRWGANPTPWNFAFSVSPKVAGPTSFAYQVERSKFDKILLDNSARKGVDVRQNRTVTDVVEGEDGRVRGLRYTDPDGTEHEVSARYVVDASGNTGRLHKRVGGSRKYSDFFRSLALFGYFENGKRLPAPNSGNILCVAFSHGWFWYIPLSDTLTSVGAVVRREDAARIQGDPEEAMRALIDECPMIGEYLAGATRVTTGQYGQLRVRKDYSYHHTNFWRPGMVLVGDAACFVDPVFSSGVHLATYSALLAARSINSVLDGKVGEQRAFDEFEARYRREYSVFYEFLTSFYDMHIDEDSYFWSAKKVTKSSDTELESFVELVAGMSSTEFNLTDTEAGVLRLKQRSAEFADAVDTLVEAREENMTPLFRSSVVRQAMQEGSQVQTRAQLGDEAGEVAPVFDGGLVATPDGMSWSEPDPVR

SEQ ID NO: 88467 - protein, 514 aa, Allokutzneria albata
  REGION 1..514: note = tr|A0A1G9WPW5|A0A1G9WPW5_9PSEU Tryptophan halogenase; OS = Allokutzneria albata OX=211114 GN=SAMN04489726_3743; PE = 4 SV=1
MIKSVVIVGGGTAGWMTATYLKEAFGDRVDVTLVESKRVGTIGVGEATFSTVRHFFDYLGLDEREWMPECSASYKLAIRFEDWRRKGHHFYHPFERLRVADGFTMADWWLRLGDGGEDFDRHIYLTPTMCENNLSPRLLDGSLFVSNLDGSLGRSTLDEQRSQFPYAYHFDADLLAKFLAKFGTKRGVRHVTDDVVEIGQDERGWVSHVRTKENGDLRGDLFVDCTGFRGILINQTLGEQFESFQDVLPNNRAVALRVPREGELAKTMQPYTTATAMDAGWIWTIPLYKRNGHGYVYSDEFCSPEEAERTLREKVAPGQDHLEANHIRMRIGRNQRSWVNNVVAIGLSSGFVEPLESTGIFFIQHGIEQLVKHFPDERWDPGLADAYNTKVARVIDGVKEFLVLHYRATKREDTPYWKETKLRAIPEGLVPRMEYARSLLIDESAMYPHYHGFESYSWITMTLGLGLRPEHPRPALAHIDPVNANAEFERLAAEAKELVENLPTCYEYIDSING

SEQ ID NO: 88468 - protein, 504 aa, Cellvibrio sp.
  REGION 1..504: note = tr|A0A4R7BAS0|A0A4R7BAS0_9GAMM Tryptophan halogenase; OS = Cellvibrio sp. YR554 OX=2135765 GN=C8K91_10690 PE=4 SV=1
MNPLKKIVILGGGTSGWIAASMLAAHLKRELCEIELVESDDIGSIGVGESTIPPVVRLITSLGIDEEEFIRETQACYKLGIKFVDWRNKGQSYFHPYGALGKRIGSQDFYQCWLKATMAGEQYNLQDFSPCAVMAAQERFFPPSQAMNTPIGGAGYAIHLDAKLVAAYLRRYAEARGVVRSEGNCAQVLRNDSGFIEALVLAGGRKISGDFFIDCSGFKALLIEKELGVEFEDWSRFLPCDRAIVVKTQVAGSRIPYTTATARKAGWAWRIPLRNGTGHGYVYSSKFCTDAEAKTTLLKNLDAPRINDPRVIQFRTGRRTEFWKDNCLALGLSGGFIEPLESTAIHLIARGMDFFLRFFPDAECEPSLQREYNRRMAADYEEVRDFIVLHYCATEREDSDFWRWCKTMPLPDTLRERIDLFKGHGILREDNDELFRSTSWQSVFEGMGIRPQKYSPRVDNLDFEQISDTLKLARSAIFNMVKSLPSHEAYLQEHYGADPDTPKS

SEQ ID NO: 88469 - protein, 499 aa, Sphingomonas trueperi
  REGION 1..499: note = tr|A0A543M4V4|A0A543M4V4_9SPHN Tryptophan halogenase; OS = Sphingomonas trueperi OX=53317 GN=FHW45_1119 PE=4 SV=1
MGQHIIIAGGGSAGWMAAALFARLRPAPDTRITLVESDAIGTIGVGEATVPILRDFNRLLGLHEPDFVAATQGSFKLGIEFVGWGEAGNRHFHGFGDFGAPIEGLAPHHHWLRLRAAGRIADPIDGWSMPALAAAQDRFAPPEALRGEAAEYRYAYHFDAGLYAPLLRSYAEARGVTRIEGRILAAECDPSTGDLAALRLEGERRIAGDLFIDCTGFASRLLGEALGTPFVDWSRWLPADRALAQGCTRAGRFTPFTRSTAHAVGWQWRIPLQHRTGNGLVYSSAYLSDNEAAAQLAANLDGEPLGDPRPLRFTTGRRERFWAHNVVAIGLAAGFMEPLESTSLQLVQTGLVRLAELLPSIGAADPAVISEYNRETIGEYERIRDFLIAHYCISRRPEPFWRDMAAMALPDTLAHKLALWDAIGRLPLYDRESHAEASWVAVLLGQGRFPRGHEPTADRPPLDALDRLFAQRRAELEAALPRLPAHDRFVAKTCRADDA

SEQ ID NO: 88470 - protein, 507 aa, Sphingomonas trueperi
  REGION 1..507: note = tr|A0A543M4Z1|A0A543M4Z1_9SPHN Tryptophan halogenase; OS = Sphingomonas trueperi OX=53317 GN=FHW45_1141 PE=4 SV=1
MRAAGQPLRSILIVGGGTAGWMAAALLERLLDRQPVTITLLESPDIRTVGVGEATVPAIRDYFRAIGVSEAEVLREAKGTAKLGIEFRDWARPGDSFFHPFGLYGIASRGVEFHHYWLKRRASGDQTPLADYCLATQMALRGLVMPPAENPPNDLGIFDWAVHFDAGLFARFLERLATGRGVRHVEGTVATVEQDGESGFLTGVTLQDGSRIEADLFLDCTGFRSLLLGGTLGVPYVDWSHLLPCDRAVAMPCTHGDAFTPYTRSTALAAGWQWRIPLQHRVGNGYVYASAHLSDDEAQAVLRGGLEGQALAEPNFLRFTTGHRARVWEKNVIALGLAAGFLEPLESTSLTLIQSGVERLGNLMPDRGFAPELADEFNRITALEYARVRDFLLLHYWANGRVGEPLWDACRSLALPEELAYKVALFRSSGVFARYEWESFRDPSWLSMYAGFDLLPDRYDPLADHFTDGELEGAFARMREAIGRAMSLAQPHRDYLRAIGGLAGAGV

SEQ ID NO: 88471 - protein, 500 aa, unidentified
  source 1..500: note = Sphingopyxis indica
  REGION 1..500: note = tr|A0A239DDE7|A0A239DDE7_9SPHN Tryptophan halogenase; OS = Sphingopyxis indica OX=436663 GN=SAMN06295955_101201; PE = 4 SV=1
MNEEKHVRRIVIAGGGTAGWMAAAAIARTLGPAVDLTLVESEAIGTIGVGESTIPPLVNYNRLLGINEADFMRATQATFKLGILFDDWKDVGTRYFHSFGLTGKDHWSAGFQHFWMHGRAKGHEQPYDDYCLELVAALDGKFAHLPDDRMNYAYQLDSGLYARFLRRMAEKDGTKRIEGRIGRVELDAESGDIAALVLDGDRRIEGDIFLDCTGFRALLIEGALHAGFDDWTHWLPCDSAIALQTPNVRPPVPYTRAMAHDAGWQWRIPLQHRSGNGLVYCSRYLDRDAALERLLGNIEGEPLTEPNFLRFTSGVRRRQWYRNCVAIGLSGGFMEPLESTSIHLIQRAVLRFVRMLPAGRVSARDVAEFNDQQGQDMEQIRDFLVLHYKVTNRRDSAFWRQCADMPIPDSLTQKIELFRETGRVFRRNEELFAENSWVQVMMGQGIEPQSYHPIATKLRDDELEKLLATIRGQVSDTVAKLPEHHAYVARYCGAEAAEAA

SEQ ID NO: 88472 - protein, 501 aa, Shewanella baltica
  REGION 1..501: note = tr|B8E7V9|B8E7V9_SHEB2 Tryptophan halogenase; OS = Shewanella baltica (strain OS223) OX=407976; GN = Sbal223_2945 PE=4 SV=1
MKVKQAIRKIIILGGGTAGWMAAAALANNPVFAAIELCLVESDNIGTIGVGEGSTPHLKRFMDNLGISEKDWMEQCHASYKTGIDFINWNGDGQQYFHPFYFQMDVKPAEVFFINANARRRGHGNAIKPDAFFSSGVLAKHNLSPRPNKTLPCANEYGYHFDATELANYLKDYACQRGVRQIIADVVEVSTTQHQQIETLILANGERLSADFFIDASGFSAKLIHKALGVPFQSFADELLNDSAVTVPVPALMDSTQTQQAKYHTRATALSAGWLWQIPLTHRLGNGYVYSSRHLSANAAAKELLHSVNLPESTQVRFLKMRVGVSDKAWHNNVLAIGLAQSFIEPLEATSIMMTQFTLERFMSLFERYQLNKQAETLSRQTLNQAVMQLVLGIKDYIQAHYVTSQRSEPYWVAARKVAISQRLTQLLKAWYQGEDFDLLLYQYDQQLAYFRPSWYALLAGMDYRDPKLKRPFEPISAEITAQAISYCQTLVEQYFQPKHS

SEQ ID NO: 88473 - protein, 503 aa, Cellvibrio sp.
  REGION 1..503: note = tr|A0A4R7BQI5|A0A4R7BQI5_9GAMM Tryptophan halogenase; OS = Cellvibrio sp. YR554 OX=2135765 GN=C8K91_101738 PE=4; SV = 1
MQVTANPLNSICIVGGGTAGWMAAALLSNMLKGTHTKITLVESPDIATIGVGEATVPSFMAFLSSANINPKEFIEATAGTFKLGIRFDDWYKKDHNFFHPFGKIGRSIDGHDFYQVWLKTLAQGDESRLMDHAPAAIMAEQGRFMLEQPLQSTPLAHYNYALHLDAVMAARYLRKIATDNSVARVEATVAQVTTDARQFIESIRLASGEAVAADFFIDCTGFKGLLIEETLKVGYDNWSNYLPCNRAVAVQTENVHEPAPFTIATARAAGWTWKIPLQHRTGNGYVFASDFCSDDEAIQTLLNTVEGKLVNEPRIIPFVTGKRKKIWHNNCLALGLASGFLEPLESTAIHLIYRTLVHFIRHFPDRDFSPLLEQQCNAQIDQDYLEIRDFIILHYCTSTRDDTDFWRWCQSMPVPASLQEKIRQFRERGHLHHHSENLFGVDSWCSILEGMNIRPKKYHPLVDALDGKKLARSLMQGKQAIYDSVMRLPKHGDFIQQICRSKM

SEQ ID NO: 88474 - protein, 499 aa, Shewanella baltica
  REGION 1..499: note = tr|B8E576|B8E576_SHEB2 Tryptophan halogenase; OS = Shewanella baltica (strain OS223) OX=407976; GN = Sbal223_2301 PE=4 SV=1
MNKIKDIVIVGGGSSGWMTAAMLARLFKSTLNITLIESEDIGTVGVGEATIPPLQIFNNVLGISEADFINATQATFKLGIQFENWGKPDEAYMHAFGNIGKDIGFTQFHHYWLSTSPKEVNSFWDYSVNYQAAKHNKFQVLQQIPNSPLAGLTHAYHFDAALYAQFLRRFSEQLGVKRIEGKITAVELTPNGDIESVILGTGQTVKADFFIDCSGFAALLIEKALKVGFDSYQHWLPCDSAYAVPCEKTPAITPYTRSIAHDAGWQWRIPLQHRTGNGLVYCSRYINDNAAKQLLLNNLDGKPLAEPKKINFTTGRRIKQWHKNCVAIGLSSGFLEPLESTSLHLVQSAIIRLSKLFPHQGIAQANVDEFNRQSQLEFEQIRDFIILHYHLNQREDAQENGFWHQCRTMVLPESLQQKIALFRATGTVFRHQDELFTEAAWIQVMLGQGIRPRDFNPLAATIQPQALSEFLLNMRTIIDNTVTKLPTHDQYLAHLSTHK

SEQ ID NO: 88475 - protein, 508 aa, Pseudoalteromonas lipolytica
  REGION 1..508: note = tr|Z5XV20|Z5XV20_9GAMM Tryptophan halogenase; OS = Pseudoalteromonas lipolytica SCSIO 04301 OX=1452721; GN = AT00_04730 PE=4 SV=1
MNTHINNIVIVGGGAAGWLTAGLLASEHPDKIITLIESVNIGISGVGEGTWPSMRNTLQRIGIKETDFLRHCDASFKQGSKFINWQTELEGDNYYHPFMVPQGYTECDIHAAWQYLSPEHKYADTVNMQSFVCQAALAPKQAQTPDYAAVTNYGYHLDAHKFAHFLAHHCVNKLNVKHIVDDVLNANNDSHGYIQSVNTLSNAAISGDLFIDCSGSAGLLIAKHYQIEYLNQNHILFNNCAVTTHLPYQDPHDNIASATLSTAQQAGWIWDIGLPTRRGIGYTFSDKYCDEATAIKTLKHYAEQSIGSKLAEQLDTRTLRFTPGYRKEFWHKNCVAVGMSQGFIEPLEASALAMVELSISMLSEQMPSNRQHMTLLSARFNERFNYRWQKVIEFLKLHYVLSKRNDSPYWLDNRQTNTIPTALQKLLELWCYQPPSRFDLIENEEVFPSASYQYVLYGMGFHTRLPAHMSTKQQEFAQQLCKLNRERIGHYLKNLPSNRLLLQQLLAK

SEQ ID NO: 88476 - protein, 480 aa, Burkholderia pseudomallei; identical to SEQ ID NO: 84753
  REGION 1..480: note = tr|A0A0E1UI82|A0A0E1UI82_BURPE Putative tryptophan halogenase OS=Burkholderia pseudomallei Pakistan 9; OX = 595498 GN=BUH_1789 PE=4 SV=1

SEQ ID NO: 88477 - protein, 501 aa, Sphingomonas trueperi
  REGION 1..501: note = tr|A0A543M4D2|A0A543M4D2_9SPHN Tryptophan halogenase; OS = Sphingomonas trueperi OX=53317 GN=FHW45_0932 PE=4 SV=1
MSVPLSHIAIIGGGTAGWMAAAALGRVLDTRAIAITLVESEAIGTVGVGEATIPPIQAFNALLGIDEAEFLRATKGTAKLGIEFVDWRAKGTRYFHPFGIHGIDFGAIPFEALWQRARLADEAAPLEAYSICAEAARLGRFQRPVTSGNNPLTHLGYAYHFDAALYAGFLREKAEQWGVRRQEGRIVTVERSEDGAIAGVVLEDGTRIAADFYIDCSGFRSLLLGETLGVPFEDWAQWLPNDRAVAVPCTLGPEGRSPFTRSTARGAGWQWRIPLQHRVGNGLVYASAHCSDAEAEAQLLGSLEGTPLAEPRLLRFQAGRRARFWEKNCVALGLASGFLEPLESTSIHLIQAGIARLLEMLPVGGGTPADIRRYNRLMATEFETIRDFLILHFHATARDDTDYWRHLRAMDLPDTLADRIAIYRASGRLYREADELFSKTSWLAVLHGQGIDSSGYDPIADGMPRDEAAARLARIAEVTALAASRMTTHEAFLHQSGALQR

SEQ ID NO: 88478 - protein, 530 aa, Sphingomonas trueperi
  REGION 1..530: note = tr|A0A543LNX2|A0A543LNX2_9SPHN Tryptophan halogenase; OS = Sphingomonas trueperi OX=53317 GN=FHW45_4249 PE=4 SV=1
MNEHSIRDVVIVGGGTAGWMAAAAFSRFLNNGYTRVTLIESDEIGTVGVGEATIPPILRFNQMIGLDENEFLAATGGTFKLGIEFVDWGGLGERYFHPFGNYAQDLQGVHFHQLYLRERARRAIPDIAEWSMSAVAASMGKFGRPSPTAQTPVRELFYAFHFDAGLYAQLLRRLSESRGITRIEGKITDVTLRPDDGFVQSVTLEDGRTVAGDLFIDCSGFRGLLIEEALQAGYEDWRHWLPCDRAVAVPCANVRDPDPFTRSTARAAGWQWRIPLQHRMGNGHVYCSEFLDDDTAERQLMASLEGPALADPRRLRFTTGRRRESWSRNVVALGLSSGFLEPLESTSIHLIQSGIVRLIALFPDKRFDPIERQEYNRQMRDLYEDIRDFIILHYKATTRTDTPFWNRVRTMDIPESLANRIALFQSKGRLFREGTELFTNTSWVAVCLGQHIVPREHEPAADALDENLVAQALEQMRQGYWETAQKMPTHAEFLARIAPQPASQPPPAAEPLPVFSFAQDAPFATPGSPV

SEQ ID NO: 88479 - protein, 502 aa, Cellvibrio sp.
  REGION 1..502: note = tr|A0A4R7BQK5|A0A4R7BQK5_9GAMM Tryptophan halogenase; OS = Cellvibrio sp. YR554 OX=2135765 GN=C8K91_101739 PE=4; SV = 1
MSEIHQVNSIVIAGGGTAGWMAAAKLSQHFAKTNIKITVVESSAIGTIGVGEATIPTLRRFYQSLGMDDMEVMRKTRATVKLGIEFKDWYKPGTSFIHPFGLFGHEANGIRFHHYWLKLQAQGDTSKLEEYSLGSVLARANKFTFPAEKPSSPLSVFDWALHFDAGKFAALMRDYALAKGVVHIDAKIESIQLNPGNGFIQSLALDNQQQLDGDLFIDCTGFNGLLIKGALQTGYEDWSQWLLCDRALAVQSELVGEPAVRTVSMAHTAGWQWKIPLQHRQGNGHVYASQLMDEAEAESILLQHIDGKILHAPRKFNFTAGRRAQAWNKNCIAIGLAAGFLEPLESTSIALIETGIEKICGSFQGPFFSQKNIDYFNQVTATEWERIRDFIILHYKANQRTDSEFWRYCRAMTVPDSLQKKLDAYQERGELLHFSWEIFHPDSWLAIYNGFHSYPKHYDKNVDRLNSDYLQQSLSAMRKSIADAVAGVQSHSEFIAQHCKAE

SEQ ID NO: 88480 - protein, 504 aa, Sphingomonas trueperi
  REGION 1..504: note = tr|A0A543LP86|A0A543LP86_9SPHN Tryptophan halogenase; OS = Sphingomonas trueperi OX=53317 GN=FHW45_4251 PE=4 SV=1
MTGQPSLRVVIVGGGTSGWMTAAALARLLPERCSLHLIESEAIGVIGVGEATLPHIRGFVEKLGIREADFMAWTRGTFKLGIEFRDWGKIGDSYVHPFGTFGRGTGEVDFHHYWTRLRLAGVEVPSLERFSYGCMLARGNRFDLPASDPAMIASTYGYAYQFDALLFAPYLRSIAEGLGARRTEGKVVEVLRDGASGNITAVRLDDGQVIEGDLFVDCSGFRSLLLGEALAEPLEDWNHWLPADRAVAMPCRTATSVTPYTSAIAMPAGWRWRIPLQHRTGNGYVYASAFTSDEAAAQALTGAVEGAALADPRVLRFRAGRRRRSWVKNCVAIGLASGFLEPLESTSIYLVQQAITALIELFPEAPDAPIERDEFNRLIDLEYDRIRDFLILHYHATTRTDTDFWTYVRTMTVPDSLAEKIELFRHAGRVVKYREGVFLDASWIAVYVGQGILPEGYDPRADAADPTALLQGMRTLEAEIAATVAQVPEHLRYIDRYCAMAAAA

SEQ ID NO: 88481 - protein, 503 aa, Cellvibrio sp.
  REGION 1..503: note = tr|A0A4R7BE67|A0A4R7BE67_9GAMM Tryptophan halogenase; OS = Cellvibrio sp. YR554 OX=2135765 GN=C8K91_10466 PE=4 SV=1
MNDLQIRKLIIVGGGTAGWMAAAACARYFHQQPIEIVLVESEEIGTVGVGEATVPVMKMFNDLLGVNEWEFIKQTSGSFKLGIHFRDWSNTGSRYFHGFGDFGADIEGIPPHHFWLRLHAQGDKTALADYSFPAQAALHNRFAPPPQQGNNTVAAYKYAYHFDASRYAKFLRAYAEARGVIRVEGEIEQVHLSAEDGRLTHVQLKSGTCVDGDFFIDCSGFKSLLVGKTLSVPYIEWRQWLPCDSALVAQCERTGEFTPYTVSTARAAGWQWRIPLQHRVGNGYVYASAFTDTETVHNTFLDNLESEPLTAPRTLNFTTGHRREFWKKNCVALGLAGGFLEPLESTSIQLIQTGLLRFLENFPTTHINEVTIAEYNRITTNEYARIRDFLILHYCTSKRDDGDLWRYCRTMALPDELQHKIDVYTHTGRVPMLSEESYSEASWVTIFTGQGVIPSRYATQANFIDLGALKTGMNQRRQNIAKFVSAMPEHREFIARVCPSDIR

SEQ ID NO: 88482 - protein, 517 aa, unidentified
  source 1..517: note = Marinicauda algicola
  REGION 1..517: note = tr|A0A4S2GW35|A0A4S2GW35_9RHOB Tryptophan 7-halogenase OS=Marinicauda algicola OX=2029849; GN = E5163_16310 PE=4 SV=1
MAIDDIVIVGGGTAGWMTAAALSRLSASGRANVTLIESEAIGTVGVGEATIPHFVAFNKLLGIDEAVLLAEVQGTFKLGIHFENWGAQGASYFHPFGGYGYEFDGLSFHHIWHMMRRGGDRRPLHVFNAETMAAQAHKFARTGPDHPEDLPPINYAYHLDAGRYARFLRKHAEARGVSRAEGRVTDVSLDGESGFVTAVTLDDGRQVRGDLFVDCSGFRGLLIEQALETGYEDWTHWLPCDRAVALPCARKGPPMPYTRSTAWSAGWQWTVPLQHRNGNGHVYSSAFMSSDEALDILLRNIDSEPAADPNHLRFVTGRRKKFWNRNVVAVGLAAGFMEPLESTSIHLISTAVSKLLSLLSLDAITPVQEDTFNRLTEKEYVRIRDFLILHYKVTDRCDSPFWDYCRTMSIPDTLEEKLALFRHNGHVFREEDELFTETSWVAVMLGQGLVPEKCSPLAETYAGPNLIHEVNEIERSIRYLVQNMPGHQQFVERYCPAPALETSAQSPARPRAARPVP

SEQ ID NO: 88483 - protein, 543 aa, Shewanella baltica
  REGION 1..543: note = tr|B8EBW8|B8EBW8_SHEB2 Tryptophan halogenase; OS = Shewanella baltica (strain OS223) OX=407976; GN = Sbal223_3178 PE=4 SV=1
MQQATHTAINNIVIVGGGTAGWITAALLAAEHNVDKGQLAHSPKLNITLIESPDVATIGVGEGTWPSMRNTLDKIGISETEFIRQCDASFKQGSRFIHWQHDDTEHTNPFCSNQYLHPFSLPHGHQELDLCPFWLPHSDKVSFAQAVSNQDALTQLGLAPKTIATPEYHFQNNYGYHLDAGKFSQLLMQHCTEKLGIKYIRDHVTQVKSLANGDIESLATKEHGVILGDMFVDCSGTKSLLLGEHFNVPFLCQKAVLFNDSALALQVPYAEENSPIASCTLSTAQPNGWIWDIGLPTRKGVGYVYSSAHCSDDEAERTLRAYLTNDTSTNPQSASNNAVDSRKQECRKLNINPGYHAKCWQNNCIAIGMAAGFIEPLEASALALVEWTANTLATQLPTHRGVMDTIALRVNERYERHWQQIIDFLKLHYVVSRREVDGYWRDHREAASIPERLQQQLDLWRYQAPSSHDISYKEPLFPAASFQYVLYGMGFNTALPTHIKPSQQQVAQRLFSENQQKIHGLSQSLPSNRDLLNKVRQFGFPKI

SEQ ID NO: 88484 - protein, 501 aa, Lysobacter sp.
  REGION 1..501: note = tr|A0A522Y955|A0A522Y955_LYSSP Tryptophan 7-halogenase OS=Lysobacter sp. OX=72226 GN=EPO46_00010; PE = 4 SV=1
MGSRITQVVIVGGGTAGWMAAAALSKVLNRDYSIRLIESEDIGTVGVGEATIPMIKLFNAALDLDENEFVRATRGSFKLGIEFVNWGRLGDSYIHGFGKIGQDLGLVSFHHYWLKMRALGRAAPLDEYSINTFASRHNRFMRAVTDRPNSPLADIAYAYHFDAGLYAAYLRRYAEGRGVERIEGKVVDVSLRGGDGFVESLTLDGGRVVGGQLFIDCSGFRGLLIEQALRTGYTDWTQWLPCDRAVAVPCAHGGPITPYTRSTARQAGWQWRIPLQHRVGNGHVFSSRHISEDEATATLMANLEGEALAEPRTLRFVTGKRNRTWNRNVVALGLASGFMEPLESTSIHLVQSGIARLTAFFPHEGFHQPDIDEFNRHADVEVEAIRDFLIAHYHATERSDTPFWDYCRTMDVPESVTRRIELFRSNGRVFREGNELFAEPSWVQVLDGQRVHPRGYHAMVDVYSDEKITEYLASVRGVISNCVQAMPTHEEFIARHCAAPA

SEQ ID NO: 88485 - protein, 538 aa, Burkholderia pseudomallei; identical to SEQ ID NO: 82926
  REGION 1..538: note = tr|A0A0E1UKF8|A0A0E1UKF8_BURPE Tryptophan halogenase PrnA OS=Burkholderia pseudomallei Pakistan 9 OX=595498; GN = BUH_7113 PE=4 SV=1

SEQ ID NO: 88486 - protein, 220 aa, Sphingomonas sp.
  REGION 1..220: note = tr|A0A520JM04|A0A520JM04_SPHSX Tryptophan 7-halogenase (Fragment) OS=Sphingomonas sp. OX=28214; GN = EOP67_09580 PE=4 SV=1
EAIDGGWRLTSCLPGRTDTAIVYASGARHEPGDVSRFRSGRGSRAWVGNVVAIGEAHCVVEPLEAAPLHVLHTQIDRLVASLPDRDFDEVELAYYNRETGQEADRLRDFLILHYATSDRPEPFWQAARDATLPPELAETLTLFRERGRLPIRDGESFDRDSWHAVLLGQGILPRRGDVLAAAIDPKGARAAMADFRARLSKAVAAAPTHRAYLASLRTNA

SEQ ID NO: 88487 - protein, 286 aa, Sphingomonas sp.
  REGION 1..286: note = tr|A0A520JG14|A0A520JG14_SPHSX Tryptophan 7-halogenase (Fragment) OS=Sphingomonas sp. OX=28214; GN = EOP67_20800 PE=4 SV=1
LLIGDAMGTTFEDWSHWLPCDRAVAVPCERVAETTPFTRSTLRPAGWQWRIPLQHRTGNGYVYASDFVSDDEAAATLLAGLDGAPLADPRVIRFTAGFRREAWRGNVVAIGLSSGFLEPLESTSIHLIQSAIAKLITLFPDRNCDPALARRFNALLGADMDGIRDFLILHYHATEGHQQPLWQHTRNMRLPDTLIEREEQYRRAGRLMLDADELFREASWLAVLNGQGIHADGPSPLADTLDQTANRNQLKQIEAVIARAAPTLPTHDAAITTLIAPPEPVAPPVL

SEQ ID NO: 88488 - protein, 503 aa, Cellvibrio sp.
  REGION 1..503: note = tr|A0A5J6NYE5|A0A5J6NYE5_9GAMM Tryptophan 7-halogenase OS=Cellvibrio sp. KY-YJ-3 OX=454662; GN = D0B88_13300 PE=4 SV=1
MQQPFRIIIVGGGTAGWMTAAAISSLYKDRSRFQITLVESEEIGSIGVGEATLPSIKSFNDQLGIDEVEMMRRTQATFKLGIQFNDWGRLGASYIHPFGLYGSLKNSSDFYQYWSHVASKKTIPDISKYSFAVQLCERNQFTFPSKDSGQIESTFSYAYHFDAALYAAYLREISERAGVLRVNGIVEAINNDPDTGNITAVFLRDGKTLSGDFFIDCSGFRSLLLHKNLQSEFEDWSHWLLCDRAVAMQSEQPKDIPPYTMSTAKEAGWQWRIPLQHRAGNGYVYCSNLISDDQAHDSLLKGLAGKPLTDPRFIKFKAGRYKKSWQKNCVAIGLSSGFLEPLESTSIYLIHIAIICLLRVFSFQSNKNLSILSDEYNRLIDNEYERIRDFLILHYRLNDRTDSELWRHCQSMKVPDSLMQKMDLFKRRGYSESFKYGLFSTPSWLAVFHGQGLFQQGIDPFISSIPTEKIEPILAEVSGMIDKGLQAASTHEHFIKQHCNAAT

SEQ ID NO: 88489 - protein, 491 aa, Cellvibrio sp.
  REGION 1..491: note = tr|A0A5J6NXZ4|A0A5J6NXZ4_9GAMM Tryptophan 7-halogenase OS=Cellvibrio sp. KY-YJ-3 OX=454662; GN = D0B88_05355 PE=4 SV=1
MTAIKNLVIVGGGTAGWMAAAAITKLYGKIVNVTLVESEEIGTIGVGEATIPTMVFFHQLLGINEAEFLSATQGTFKLGIRFENWRAQGKHYLHAFGVTGNDCWAAGFQHFWRRGLELGIAGEFGDYCFERQAAEQLRFAHMPNNGLNYAFHLDASRYAKFLRQFSEAQGATRIEGTIKQVTTEPQTGFIQSVTLNSGKIIEGDFFFDCSGMRGLLIEQALHTGYEDWSHWLPCDRAIAVQTESVREPVPYTRSIAHSAGWQWQIPLRQRVGNGLVYCSKYLADEDAKKLLLENVEGKLLTEPRLIQFRTGRRLQQWNKNCLAVGLSGGFLEPLESTSIHLIQQNIVRFMRMFPAQGIVQSDIDEFNKQAKFDLEHIRDFIILHYCVTERADSPFWNHCRTMSLPDSLAHRIKLFKETGRMFREGNELFDDSWLQVMIGQGLMPSSHNPLVDTMSRDELTVFLLKIKDTISKKLNGLPLHAEYLKKYPLPD

SEQ ID NO: 88490 - protein, 517 aa, Cellvibrio sp.
  REGION 1..517: note = tr|A0A5J6P5L0|A0A5J6P5L0_9GAMM Tryptophan 7-halogenase OS=Cellvibrio sp. KY-YJ-3 OX=454662; GN = D0B88_11755 PE=4 SV=1
MTKAIKSIVIVGGGAAGWITAGTLAAKIRSQHSEGIQISLVESPKTPIIGVGEGTWPTMRNTLKKMGVRETDFLRECNVSFKQGAKFVHWCTGQKDDFYYHPLVLPQGFSEINLAPHWLANPHNQSFSNAVCVQETLCEAGLAPKLITTPEYAAVANYAYHLDAGAFAEFLKKHCTTNLGVTHLLADVIHVNAADNGDITSIATDTQGDIAGDLFIDCSGFNSLLLGKHYKVPFISCKDVLFIDTALAVHLPYENDNSPIASHTISTAQDSGWIWDIGLPSRHGIGHVFSSAHTSTEQAEEKLHQYLRQHSSNTEQISVRKIPITPGHRAKFWEKNCVAVGLSAGFLEPLEASALVLIEISAAMIADQLPATRPAMDIIAKRFNETFLYRWQRIIDFLKLHYTLSKRDDSDFWRDNRRLSSIPESLQELMTLWRYQPPWHMDFDRAAEVFPAASYQYLLYGMGYTTEASTLGMSQHNQQLAQVLFNKNATLAQQLKSQLPSNRELINKIKEYGLQPV

SEQ ID NO: 88491 - protein, 314 aa, Sphingomonas sp.
  REGION 1..314: note = tr|A0A520J8Z7|A0A520J8Z7_SPHSX Tryptophan 7-halogenase (Fragment) OS=Sphingomonas sp. OX=28214; GN = EOP67_33830 PE=4 SV=1
LDGETGHVRDVTIAGDRRIEGDLFIDCSGFRGLLIEQTLHAGYEDWTRWLPCDRAVAMPTANMGTAITPYTRSTARAAGWQWRIPLQHRTGNGYVYSSAHCSDDEAAATLLAGVDGTPLAEPRILRFTAGRRRKQWIGNVVALGLASGFTEPLESTSIHMVQTGISKLLALFPDQGFSPVEIGTYNQLVETQFDQVRDFLILHYHATRRDDSPFWREARHRAIPDSLAEKIALWRRRGRLFRWEDDLFAEASWVAVLLGQGIVPAGWDRLVDLVDAREVNARFDRLRAMFADTAARMPRHEDYLARTCPTGVRA

SEQ ID NO: 88492 - protein, 500 aa, Cellvibrio sp.
  REGION 1..500: note = tr|A0A5J6P1A0|A0A5J6P1A0_9GAMM Tryptophan 7-halogenase OS=Cellvibrio sp. KY-YJ-3 OX=454662; GN = D0B88_18655 PE=4 SV=1
MKIIIVGGGTAGWLTAAIIAAQHNGHLPGAPELVLIESENVPTIGVGEGTWPTMRNTLSSIGLKECDVFKRCNAAFKQGGKFVNWVNGNNDYYYHPFTVPTGYGRIDLAPYLSDITNFATLTNFQQDVCEAGLAPRTLAEQEYQGSCNYGYHLDAAAFGVLLKEKCINDFGVTHIVDDVKRVAVSPNGEIMGLTLENQGEISGELYIDCSGMHSILLGKALNVPMVDVSAVLFNDRALAVQVPYPSDAAPLASHTIATAQNAGWIWDIGLTSRRGVGHVYSSRYLSDDEAESNLRRYIGDAMNTLTPRKIEFNSGYRAEFWKNNCVAVGMAAGFVEPLEATAIMLVELSARYIADNLIPDSAATRVIAKRFNEQMHYRWQRIIDFLKLHYMLTKRQEQYWKDHTNPETIPDSLKDDLAIWHCRGPRVEDFKSAYELFPAASYQYVIYGMGFKPEFEKQEYLYQRKNEVESILRRTQQLTTQLLQNLPPHREYIAKWLSQH

SEQ ID NO: 88493 - protein, 504 aa, Cellvibrio sp.
  REGION 1..504: note = tr|A0A5J6NVG3|A0A5J6NVG3_9GAMM Tryptophan 7-halogenase OS=Cellvibrio sp. KY-YJ-3 OX=454662; GN = D0B88_00730 PE=4 SV=1
MIKKIVILGGGTAGWMAANILAKRWAKYSVEIALVESSDIGIIGVGEGSTPQLKSFFDYMEIAEAEWMPACNATYKTGIRFCNWSTKPGFENYFHPFPAQPDDYSAPAFFYNCFVRRKGADVYAHPDKFFLATYLAKHQLGPKPAHHFPFQLGYGYHFDSSLVGLFLKQHAAKLGVAHIDARITEVKLDAQGYISHLLTENQQPLAADLFIDCSGFAGVLIQQALKVPFINFSSNLFNDSAVVMPTSAAMDITPQTTATALNAGWMWNIPLVNRIGNGYVYSSNYLSADMAETELRQKLNLLDKDVPVRHLKMKVGRLQHHWAKNCLAVGLSQGFIEPLEATALHLVQETVLGFAEAIELGDFTDREQANFNRSINQRFEAVRDYIVCHYRVNSRTDTQYWRDNANNNSLSDSLRELLQVWVGGGNLTQEIERQKIGCYYPSASWHCLLAGYGLFPTQDQLLPGNEVAHKYKMENIENFISRCALNFSSHREQLNDLVAKQQVM

SEQ ID NO: 88494 - protein, 107 aa, Sphingomonas sp.
  REGION 1..107: note = tr|A0A520HS12|A0A520HS12_SPHSX Tryptophan halogenase (Fragment) OS=Sphingomonas sp. OX=28214 GN=EOP67_70370; PE = 4 SV=1
MANHPLRIVIAGGGTAGWMAAATFARFLETGYEIDLIESDAIGTVGVGEATIPQIHLFNDALGLDEDAFLRATGGTFKLGIEFVDWFKPGHRYMHAFGDVGRDVGLL

SEQ ID NO: 88495 - protein, 132 aa, Sphingomonas sp.
  REGION 1..132: note = tr|A0A520I7W6|A0A520I7W6_SPHSX Tryptophan 7-halogenase (Fragment) OS=Sphingomonas sp. OX=28214; GN = EOP67_60015 PE=4 SV=1
MTACLIAHRWRDRGVRVTLVESPEIGIVGVGEGSTPQLKHFFDTLGIAEAEWMPACDATYKLGIGFEGWSDRAGYERYFHPFPTALDGHTAPQFFYNARARRTGRDVDAHPDQFLLPARLAATHCAPQPAAN

SEQ ID NO: 88496 - protein, 400 aa, Sphingomonas sp.
  REGION 1..400: note = tr|A0A520J8L8|A0A520J8L8_SPHSX Tryptophan 7-halogenase (Fragment) OS=Sphingomonas sp. OX=28214; GN = EOP67_34565 PE=4 SV=1
MEDLAIRRIVVVGGGTAGWMAAAALSRVLGRAVEIELIESEAIGTVGVGEATIPHLQYFNRLLGIDEDDFVRRTAATFKLGIEFVDWGRIGDRYFHPFGTYGQEMEGLHFHHFWLRQAQLGGALELDRFSIGADAARAQRFQRPDHSRAGSPLGTISYAFQFDASLYARYLRERAEAGGVRRTEGRIVDVALDSGNGHVQAVTLEDGSRVAGDLFIDCSGFRGLLISEALGAGFEDWSHWLPCDRAVARACRRTTDPLPYTRATAKAAGWQWRIPLQSRTGNGYVYCSDHLSDDAALDGLNAALDGDPLSEPNFLKFKAGVRHKAWDRNVVALGLASGFLEPLESTSIHLIQSAIARLLTNFPDRRFNQHDIDYYNRRTRVEYEQVRDFIILHYATTTRD

SEQ ID NO: 88497 - protein, 161 aa, Sphingomonas sp.
  REGION 1..161: note = tr|A0A520HML2|A0A520HML2_SPHSX Tryptophan halogenase (Fragment) OS=Sphingomonas sp. OX=28214 GN=EOP67_72925; PE = 4 SV=1
LIQRAVLRLLRLFPSGPVSPRDVAEFNDQQHTDMLQIRDFLILHYKATNRRDSAFWRQCAAMPIPASLEHKIELFRETGRVFRKNEELFAENSWVQVMLGQGIVPRSYHPIATKLRDDELARLLGGLRDGTNATVAGLPEHAEYVARYCGAAPAPSPVLAA

SEQ ID NO: 88498 - protein, 488 aa, Sphingomonas sp.
  REGION 1..488: note = tr|A0A520JDS0|A0A520JDS0_SPHSX Tryptophan 7-halogenase OS=Sphingomonas sp. OX=28214 GN=EOP67_24955; PE = 4 SV=1
MTITPRRIVVAGGGTAGWMAAAAIARTMGGTAAVTLIESDAIGTVGVGESTIPPLVLLGISEADFMRATQATFKLGILFDGWKDGRDRYFHSFGTTGKDHWSAGFQHFWLNGRARGHNESYDAYCLELAAAMEGKFAHLPDEGMNYAYQLDSTLYAKFLRGMAEKDGTTRIEGRIARVELDGENGDVAALHLESGAVVEGDLFLDCTGFRALLIEQALHAGFDDWTHWLPCDSAIAVQTENVRPPVPYTRAMAHDAGWQWRIPLQHRTGNGIVWCSRYMDRDAALERLLGNLEGEVLTEPNHIRFVTGARRRQWHRNVIAIGLSGGFMEPLESTSIHLIQRAILRLIRMMPQGAISPRDVAEFNDQQFADMEQIRDFLILHYKATDRRDSPFWRQCAAMPIPDSLAQKIELFRETGRVFRRNEELFAENSWVQVMMGQGIVPRAHHPIADKLGDEELTRFLSTLRENVSRTVAGLPRHADYVAHYCGG

SEQ ID NO: 88499 - protein, 530 aa, Rhodanobacter sp.
  REGION 1..530: note = tr|A0A5A7VY02|A0A5A7VY02_9GAMM Tryptophan 7-halogenase OS=Rhodanobacter sp. T12-5 OX=2024611; GN = CIW53_03235 PE=4 SV=1
MARIQKILVVGGGTAGWLTACYLAKALNSAAPGSIRVELVESPNIGLLGVGEATFPSIRGTLAAIGLDERRFLVGASATYKQGIQYVNWVRAPGEPGPDRFFHPFNQPSQRSGSPELLPYWLLGGAPAGTRFAEAVSMQAHVVEHGRAPKRAGDPDYQGPLNHAYHFDAACFAAVLAEHGQSLGVRRHLATVERAELDESGAIARIVTREIGELSADLYVDCTGLRGALIGSVMQSPFHSRRDVLFADRAVALQVPYPRPDAPILPFTRATAQEAGWIWDIGLRKRRGIGYVYSSRHTDATRAEAVIRDYVGDQAAGLDALHIKFETGHRPEHWRRNCVAVGLAGGFVEPLESTGIALVELAAYLITHLLPGDVDDMERTARRFNEMMVARYERIIDFIKMHYCLSQRRDHAFWIDNTDPASIPQTLQDRLALWRHRPPHRLDFVTDLEMFLPASWQYVLYGMEFKTDLEPMRSAYPQMEAAQREFAMIRQMAGHALNDLPDHRALVEQLCREHAERVGQEDSETAERVA

SEQ ID NO: 88500 - protein, 494 aa, Cellvibrio sp.
  REGION 1..494: note = tr|A0A5J6PBV3|A0A5J6PBV3_9GAMM Tryptophan 7-halogenase OS=Cellvibrio sp. KY-GH-1 OX=2303332; GN = D0C16_11325 PE=4 SV=1
MTKSIKKILIVGGGTAGWMTAAFLARWIAKTGVEVTLVESEQIGTIGVGEATVPGIHQFMRDLGINETEFIKATNATFKLGIEFEGWSAPDKHFFHPFAGYGVQIEERPFYQTWWSAKQKGYTEGLDSFCLCTQLARQGKFAQPSFDEDSRLAWYNYAYHFDASLFARYLRQFAERLGVTRVEGKVGSINLDETNGFIASVQVEEGMLLEADLFVDCTGMSALLIHKTLGVEYEDWSHWLLSDSALAVQTKSVVAPDPFTRSSARSAGWQWHIPLQHRVGNGYVYASQFISDEQAREELVANLRGELVTEPRLIRFTTGMRKDFWHKNCVAIGLSSGFLEPLESTSISLIQTGISKMAAFLVNFVLDEKLVAEANRLNRLEYERIRDFIILHYKLNGRTGAYWNHVRDMAIPATLVDKIETFKASGSIQMLEQESFREDSWVSMYSGFGVDPQGLVASEHSDRAWLLMDKMKRAILKGCDVAGSHEEFLGTVIP

SEQ ID NO: 88501 - protein, 512 aa, Cellvibrio sp.
  REGION 1..512: note = tr|A0A5J6P7Q2|A0A5J6P7Q2_9GAMM Tryptophan 7-halogenase OS=Cellvibrio sp. KY-GH-1 OX=2303332; GN = D0C16_13105 PE=4 SV=1
MTASINPLKKIVILGGGTSGWIAASMLAAHLKLGSCEIELVESDDIGSIGVGESTIPPVVRLVTSLGIDEEEFIRETQACYKLGIKFVDWRAKNQSYFHPYGALGKRIGSQDFYQCWLKATKEGDAYDLQDFSPCAVMAAQEKFFLPSQAMNTPIGGAGYAVHLDAKLVAAFLRRYAEARGVVRSEGNCVNVLRKENGFIDAIELAGGRKIHGDFFIDCSGFKALLIEKAMEVAFEDWSHYLPCDRAYVVKTEKAGSRMPYTTATARKSGWGWRIPLRNGTGHGYVYSSRFCTDAEAKTILLKNLDAPRINDPRVISFNTGRRKEFWKDNCLALGLSGGFIEPLESTAIHLIARGMDFFLRFFPDAECERSLQREYNRRMAADYEEVRDFIVLHYCATEREDSDFWRWCKTMELPSSLQERIELFRGHGILREDNDELFRAASWQSVFEGMGIRPQKYNPRIDNLDYQQISETLKLARSAIFNMVKSLPSHDEYLAEHYGLELDSQGRKSGN

SEQ ID NO: 88502 - protein, 504 aa, Sphingomonas sp.
  REGION 1..504: note = tr|A0A525HEZ5|A0A525HEZ5_SPHSX Tryptophan 7-halogenase OS=Sphingomonas sp. OX=28214 GN=E7773_11760; PE = 4 SV=1
MSDPQRSIVILGGGTAGWMAANLFAHHLGPTVAVTVVESPEIGIVGVGEGSTPQLKAFFDTLGIAEAEWMPRCNATYKTGIGFRGWSEAWGFEGYFHPFATDLDGFTAPAFFVNAYARRHNADVWAHPDRFFLPTALAGHRLAPLVPDNFPFKVGYGYHFDAHLVGAFLRDHAVGLGVRHLQHRVVDIAVTDGDVTHLIAEDGVTIAGDFFVDCSGFRSVIAQGALGVPFLPFASNLFNDSAVVMPTPRDPSGTNCQTISTAFRHGWAWDIPLTSRTGNGYVYASSYCSADDAETELRAHLGLLDAPVEARHLKMKVGRIADSWSGNCLALGLAQGFIEPLEATALHIVQATVEGFVAAWRDGGFGPLHRTAFNRTIAARYEGIRDYIVAHYRMNRRTDTSYWRDNAANQDLSDSLKGIITCWFTGRDLEEEIARQDIGKYYSAASWHCLLAGYGQFPDPAQVDRNAPLPPTDMTEVDAFITGCALNFASHDEALAALDGPTRE

SEQ ID NO: 88503 - protein, 358 aa, Sphingomonas sp.
  REGION 1..358: note = tr|A0A520ICG0|A0A520ICG0_SPHSX Tryptophan 7-halogenase (Fragment) OS=Sphingomonas sp. OX=28214; GN = EOP67_54625 PE=4 SV=1
YAFHFDAVALAGLLREHAVRNGVRHLTDTVSEVLLAEDGAIGGVRTERNGMLDADLYIDCTGFRAELIGKAMKVPFRSCRDVLFCNRAIAAQRPYAKPGDPIASYTISTAQESGWIWDIGLDRRRGIGHVYSSDHSDDETAERVLRGYLGAGGDEAEVRHFKFDAGYREVNWVKNCVAVGLSSGFFEPLEATGIAFAEVSAGMIANLFPWGGDYETSARQFNANMLRRYERALDFIKLHYCISERRDTAFWRDNVADASVPDSLLELLDRWRFRPPNELDIDGQVDIFTDASWQYVLYGMGWKTDLSAKAGALRYAEDARRAFAEVRRQADYAVRNLPSNRDLVTYAQHHHFGARAAA

SEQ ID NO: 88504 - protein, 505 aa, Sphingomonas sp.
  REGION 1..505: note = tr|A0A1Y2QVL5|A0A1Y2QVL5_9SPHN Tryptophan halogenase; OS = Sphingomonas sp. IBVSS1 OX=1985171 GN=CAP39_03890 PE=4; SV = 1
MRDDNIRSVCIVGGGSAGWMAAAALARNLPHGVTIHLVESEEIGTVGVGEATIPPIKLFNQMLGLNEADFVRATQGSFKLGIEFVGWGKAGHRYFHPFGTFGADFDSVAMHHWWNRQRLAGDPTPLDDYSMAWVAAKSNRFAPPAQDRRLVQSTFDYAYHFDAGLYARALRALAEALGVTRHEGRITGVARAGETGHVTAITLADGRTVEAEFWIDCSGFRGLLIAETLETPFIDWTHWLPCDRALAVPCAHANGTDGAGFTPYTRSTAHAAGWQWRIPLQHRIGNGHVFSSAFMGEDEAAAILMANLDGPALADPRLLKFTTGRRAQSWAHNVVAIGLAAGFMEPLESTSLHLVQSGLMRLLALWPTRAMDAHVRDEFNRMSATEWERIRDFLILHYHLNSRDEPMWRHCAAMPIPDTLANKIAHFASHGRLVSDGPELFLNASWLAVHVGQFNLPRRYDPLADARAANVDAPRLLSGLARVMREAAAEMPTHAAFIARHCAAN

SEQ ID NO: 88505 - protein, 183 aa, Sphingomonas sp.
  REGION 1..183: note = tr|A0A520J8L2|A0A520J8L2_SPHSX Tryptophan halogenase (Fragment) OS=Sphingomonas sp. OX=28214 GN=EOP67_34560; PE = 4 SV=1
HRRQFWRGNCIAIGLAAGFLEPLESTSLYLIQEGISRFISLFPNGDIPDILRVEYNRYMQKKFEQVRDFIVLHYVATNRDDTPFWRYCRSMSVPDSLQHKMELFRETGRIFRYDDELFARPSWVAVMLGQGIMPKRCDPIVAALPARDVANSLQSMASAMKDAASRMPTHASFIASYCAATEG

SEQ ID NO: 88506 - protein, 499 aa, Rheinheimera sp.
  REGION 1..499: note = tr|A0A0M0M4U8|A0A0M0M4U8_9GAMM Tryptophan halogenase; OS = Rheinheimera sp. KL1 OX=1635005 GN=WH43_11030 PE=4 SV=1
MLEPIQTIVIVGGGSSGWMSAALLAKLTGQRYRIELVESEQIGTVGVGEATIPAIKLYNHLCGINEQEFIRATGATFKLGIEFANWGQQGDSYFHAFGALGRQWEWLSFYQYWLKLKQQGLALPFEHYCIASQMAQQHKFMPADPGKPKSPVSEIAYAYHFDASLYARYLRSLSEKRGVIRHEGVIKHVERDAVSGHIRHLLLEDGRQVAGDLFIDCSGLRALLIGQTMGVGYDDWSHWLPNDSAWAVPSATLNPLPPYTRATAHEFGWQWRIPLQHRTGNGLVFSSAYASDDVAQQRLLQTLELPASVDPRLIRFTTGKRKQMWVGNCVAIGLSSGFLEPLESTSLHLVQTAITRLVNLFPDRSFAKANTDHYNLLAAQEMEQIRDFIIAHYKVTERDDSEYWRYLKQMTVPDSLQQKLDIFQSYGRVHRVADELFREDSWVQVLLGQRMMPERYDPMVDNKTLAQITDFAASTAHVISACVEKMPTHTDFIAGIAAH

SEQ ID NO: 88507 - protein, 506 aa, Sphingomonas sp.
  REGION 1..506: note = tr|A0A5E7Z787|A0A5E7Z787_9SPHN Tryptophan halogenase; OS = Sphingomonas sp. EC-SD391 OX=2038398; GN = SPHINGO391_440278 PE=4 SV=1
MDMRKTRVVVVGGGTAGWMTAAALVRLLPVACSVHLVESADIGIVGVGEATLPHIRAFVERLGLDEADFMRATHATFKLGIDFRDFGAIGDSYIHPFGSFGRPLDDVGFHHYWLRLAAAGRAGPIGDYSVAVAAAKRHRFAIPDGAPDDLAASFGYAYQFDATLFGPYLRHFAEAHGARRTEARIVSVDRDPLNGDVRALRLDSGEAVEGDLFVDCSGFRSLLLGDAMAEPWEDWSRWLPCDRAVAMPCTSPHGPIEPYTRATAKPAGWQWRIPLQHRVGNGYVYSSAHLSDQAAADALVTSVEGAPLADPRVLKFRAGRRRSSWVGNVVAIGLASGFLEPLESTSIYLAQMAITQLIELFPQNMRADGIAAADRTEFNRMVDMEYDRIRDFLILHYHATTRDDSDFWNHVRTMEVPATLADKIDLFRRAGRVTQYSEGLFLEPSWIAVYLGQGIVPQAWDQRADRPGLDGLDRAIASLRDRVAATATAMPDHGTFIARRNATIAA

SEQ ID NO: 88508 - protein, 380 aa, Sphingomonas sp.
  REGION 1..380: note = tr|A0A520I176|A0A520I176_SPHSX Tryptophan halogenase (Fragment) OS=Sphingomonas sp. OX=28214 GN=EOP68_00635; PE = 4 SV=1
AACDADLAPRQRAMPDYAGALNYAYHLDAGKFAALLARHGVAKLGVRHVRDHVVAVAQAEDGDVVAVETRDHGAIAGDLFVDCTGHAALLIGGTFGVPFVDRSGELFNDRALAVQVPAAPGSAIASQTTATAHAAGWIWDIGLPTRRGVGCVYASAYMTDDEARATLADYLARTAPGADLDALAPRRLTFRSGHRERFWVRNCVAIGLSAGFLEPLEASAIVLVELSLEALLAGFPATRDAMDVHARRFDQLFRYRWDRIVEFLKLHYVLSERIEPYWRAHRDPATIPPRLADQLRVWRDQPPSTLDLPHADEIFPAASYQYVLYGMGAAPPPARPAPGAAVAAVAQVDQRARALVAGLPTNRAYLDALARDHASLEATA

SEQ ID NO: 88509 - protein, 163 aa, Sphingomonas sp.
  REGION 1..163: note = tr|A0A520IHG5|A0A520IHG5_SPHSX Tryptophan halogenase (Fragment) OS=Sphingomonas sp. OX=28214 GN=EOP67_51330; PE = 4 SV=1
GFMEPLESTSIHLIQRAILRLIRMMPAGAISPRDIAEFNDQQFADMEQIRDFLILHYKATDRRDSPFWRQCAAMEVPESLAQKIALFRETGRVFRRNEELFAENSWVQVMMGQGIMPATYHPIAAKLRDEELAKFLSNLRDNVTRTVAGLPGHAEYVAHYCGG

SEQ ID NO: 88510 - protein, 505 aa, Sphingomonas sp.
  REGION 1..505: note = tr|A0A520JM60|A0A520JM60_SPHSX Tryptophan 7-halogenase OS=Sphingomonas sp. OX=28214 GN=EOP67_09585; PE = 4 SV=1
MSEHTIREVVIVGGGTAGWMAAAALSKFLGGGKEQGQPRIRLIESEEIGTVGVGEATIPTIATFNQMLGIDEDDFVAKTQGTFKLGIEFVDWRKIGERYFHPFGQFGHDIEGLNFHQFFLKLAKQGKCADIWHYAPCAVAAAAGRFARQSPDPRSPFGTLPYAFHFDAGLYARYLRSYAEARGVERIEGRIVDVALRGEDGFVEALTLEDGRRIEGELFVDCSGFRGLLIEGALKTGYEDWRHWLPCDRAVAVPTANVGDPVPFTRATARSAGWQWRIPLQHRTGNGYVYSSAHISDEDAQATLLSTVEGSPIADPRRLSFVTGRRKRFWNRNVVALGLSGGFLEPLESTSIHLIQTGIAKLLALFPDRRFLQVEAGEYDRLMGSAYDGVRDFIILHYHATTRDDSPFWNHVRTMTVPDSLRRKTELFQAKGRFFRYDDELFSLASWVAVMLGQGVTPEGYDPIVDGLDERKLVEAVERMRLGIRQTIAQMPSQSDYIRAHCAAI

SEQ ID NO: 88511 - protein, 349 aa, Sphingomonas sp.
  REGION 1..349: note = tr|A0A520IIV7|A0A520IIV7_SPHSX Tryptophan halogenase (Fragment) OS=Sphingomonas sp. OX=28214 GN=EOP67_50280; PE = 4 SV=1
GYHLDAGKLAALLARHAVTRLGVRHVRDHVVDVERTADGIVTAVQTRESGAVTGDLFLDCTGHAALLVGDVPFIDRSDVLFNDRALAVQVPVAPDSPIAAQTDATAHAAGWIWDIGLPTRRGVGCVYSSAHMSDDDAAAMLAKYLGTSEPISPRRLTFRSGHRARFWNGNCLAIGLSAGFLEPLEASAIVTIELSLDALLDDWPTRETMALVATRFNTLFRYRWDRIVEFLKLHYVLSRREGAYWRDHRDPASVPPRLVELLALWKHRPPTRADFPMVDEVFPAASYQYVLYGMGGHLPEAGPLKPGASPAFAPIAQRTRGLTSALPTIRAYLDACRMTYRPTALEQLS

SEQ ID NO: 88512 - protein, 524 aa, Sphingomonas sp.
  REGION 1..524: note = tr|A0A520JNI6|A0A520JNI6_SPHSX Tryptophan 7-halogenase (Fragment) OS=Sphingomonas sp. OX=28214; GN = EOP67_06740 PE=4 SV=1
MNEHSIRRVVIVGGGTAGWMAAAAFARFLNNGYTQVTLIESEEIGTVGVGEATIPPLINFNRMLGLDENAFLAATAGTFKLGIEFVNWGAIGERYFHPFGSYGHDLQGIHFHQLWLREKAQRPIEDISAWSMNAMAAQHGTFGRANEDARSPVRELFYAFHFDASLYARHLRDYAEKAGIVRLEGKIATVAQRPDDGYVEAVTLEDGRRVEGDLFIDCSGFRGLLIEETLHTGYESYAHWLPCDRAVAVPCALPRPGEPDPFTRSTAHQAGWQWRIPLQHRMGNGLVYCSDYLDDDAAEAQLLASLEAEPLADPRRLRFTAGRRRESWSRNVVALGLSSGFIEPLESTSIHLVQAGIQRLLALFPDKRFDPTERDEFNRQMHDLYEDVRDFIILHYKATRRDDSPFWDKVRTMEIPDSLQCKIDLFAGKGRLFREGYDLFTSPSWVAVCLGQGIVPESWEPAADALDEQKVAIALEQMRRGYLDTAQRLPTHGDFLRRTAPSPLAAPPPAAAPAAKEDVPFFSF

SEQ ID NO: 88513 - protein, 131 aa, Sphingomonas sp.
  REGION 1..131: note = tr|A0A520I692|A0A520I692_SPHSX Tryptophan halogenase (Fragment) OS=Sphingomonas sp. OX=28214 GN=EOP67_61115; PE = 4 SV=1
SEAVVARYNDQARQELEAVRDFIILHYHLNQRDEPFWRERREMTIPDSLKARIALFEEAALAYQDAGDLFRVDSWLQVMLGQGVTPRTHHPMARIMPPADLARALGDIKRNIDDGVARLPQHQAFLDRYCA

SEQ ID NO: 88514 - protein, 83 aa, Sphingomonas sp.
  REGION 1..83: note = tr|A0A520B4U1|A0A520B4U1_SPHSX Tryptophan halogenase (Fragment) OS=Sphingomonas sp. OX=28214 GN=EOP64_05830; PE = 4 SV=1
RIALFTKTAGAWQGQDDLFRIDSWVSVMLGQGVEPRAHHRIARIIKEQELQTSFADLSRGITSTMRALPRHCDFLAQYCLADG

SEQ ID NO: 88515 - protein, 505 aa, Cellvibrio sp.
  REGION 1..505: note = tr|A0A5J6P030|A0A5J6P030_9GAMM Tryptophan 7-halogenase OS=Cellvibrio sp. KY-YJ-3 OX=454662; GN = D0B88_18625 PE=4 SV=1
MDKLLRIVILGGGTAGWMAANLFAKRWPREQVQITLMESPEIPIIGVGEGSTPSLKRFFKQLDLPEQEWMPACHATYKTNIRFVGWSPASSMQEYSHPFYSQPDVFNERAFFTNCRTRRLGLDVVTDPEKFFINGELARQGKVPIASANFPFQMEYGYHFDSQLLGRYLAGVATARGVIHYQAKLAEVLRNDRGEITALQTDAGDFIAGDFFIDCTGFASLLMQQALAVQFHSYQQQLFNDSAVVMPTAALEKPPVETRSTALSAGWCWQIPLTHRTGNGYVYSSQFISRDQAEAEFRAHIGMSESAQECRHLTMRVGQLAQHWSHNCVGLGLSQGFIEPLEATALHLVQLTIEALMDALDEHNFTSNGRDNFNRTVANHFDGVRDYIIAHYKLNTRGVNNSLGSDYWRANRDNKQLPESLLQILDVWYRCGDLAAELAQRKIKPAFNTASWHCLLAGYGAFPPLAANQPGQGKGDLYRECEVKKFVEGCALNFPLQTDMIKMAR

SEQ ID NO: 88516 - protein, 223 aa, Streptomyces djakartensis
  REGION 1..223: note = tr|V9XQT4|V9XQT4_9ACTN Tryptophan 5-halogenase (Fragment) OS=Streptomyces djakartensis OX=68193 PE=4 SV=1
GGGTAGWMTASYFKAAFGERINITLVESGNIGAVGVGEATFSDIRHFFDFLGLKEKDWMPACNATYKLAVRFENWREEGHYFYHPFEQMRSVNGFPLADWWLREKPTDRFDQDCFVMPSIIDAGLSPRHLDGSLIDQPFVEGADEMQGLTMSEHQGKTQFPYAYQFEAALLAKYLTTYSVERGVKHIVDDVQQVNLDERGWIRNVTTAEHGEIGGDLFIDCSG

SEQ ID NO: 88517 - protein, 502 aa, Cellvibrio sp.
  REGION 1..502: note = tr|A0A5J6PG03|A0A5J6PG03_9GAMM Tryptophan 7-halogenase OS=Cellvibrio sp. KY-GH-1 OX=2303332; GN = D0C16_18930 PE=4 SV=1
MQKNTLNSICIVGGGTAGWMAASLLSSALQGSRINITVIESPDIATIGVGESTVPSIMDFLRVCQINLKEFVEATSATFKLGIRFDDWLKPGEQFFHPFGTVGQSIHGFEFYQAWLKTCADGNRTRWVDHSPCAVMAENRRFMLRPPQHQNWVLRSYAHALHLDAILAARYLRDLSLARGVERIEATVMNVVVDERQFISALELTGGDTITSDFFIDCTGFKGILIEEALKVGYEDWTDYLPCNRAIAVQTTNTGEPSPFTQAKARDAGWTWKIPLQHRTGNGYVYSSRYCSDDKAIDTLLGAVDGELLSDPRVIPFTTGRRKKIWHNNCLALGLASGFLEPLESTAIHLVYKTLVHFIRYFPDLDFESHTEQAFNQKINADYQEIRDFIILHYCTTQRDDTDFWRWCQSMPVPDSLQEKIRLFRERGQIDHLPGEFFTSDSWCSILEGMSVRPKKYHPLMDAFDSKMLARTLQETAQNVYQTVMQMPNHYDYIQQHCPAKK

SEQ ID NO: 88518 - protein, 506 aa, Cellvibrio sp.
  REGION 1..506: note = tr|A0A5J6P9P5|A0A5J6P9P5_9GAMM Tryptophan 7-halogenase OS=Cellvibrio sp. KY-GH-1 OX=2303332; GN = D0C16_16005 PE=4 SV=1
MKKIVIVGGGTAGWMSALIMARQWNTQGFQIELLESPEVGIIGVGEGSTPALKVFFDLLGIAEAEWMPECNATYKCGISFENWSTRAGYERYFHPFSAALDRQTLPMFMHNVQTRLRGADLYAHPDRFFIASRIARECLAPVAPENFPFDVHYGYHFDAVLLGQFLRKKAIARGVVHRVCHVVQVQQDDAGNIVAVVSDTGDVHAADFFVDCTGFASLLLQKTLQTPFVSYRNNLLNDAAVAMPSDIGEKIPSETVSTALNNGWAWKIPLTNRYGNGYVYSSQFCSADEAEHELRARLGLLDADIPVRHLKMNIGRVREHWVKNCLAVGLSQGFIEPLEATALFLVQQTIAIFAEDFTRGEFTDRYRTEFNQRINGHFDGVRDYIVTHYKTSSRTDTEYWRANTADQQDVSQTMLELYSSWFAGKDLAAEVQRLNISSYYPAPSWYCILAGMGILPKAEQVRKPTAEEARFDLPAMDNFLRRCTLNFSDHRWYLEKLASNFPVYTE

SEQ ID NO: 88519 - protein, 514 aa, Cellvibrio sp.
  REGION 1..514: note = tr|A0A5J6PBT7|A0A5J6PBT7_9GAMM Tryptophan 7-halogenase OS=Cellvibrio sp. KY-GH-1 OX=2303332; GN = D0C16_20380 PE=4 SV=1
MDKPWRILILGGGTAGWMAANLFAKQWPREQVQITLIEAPEIPIIGVGEGSTPSLKRFFKTLDIPECEWMPQCQATYKANIRFVDWSPASGVSNYSHPFYSQPDVFNERAFFTNCRTRRLGLDVVTEPERFFINGELARQGKAPVAPKNFPFQMEYGYHFDSQLLGRYLARVAAARGVVHRQATFAQVLRNDAGDISALQTRAGDLIRGDFFIDCTGFSSLLMQRGLAVPFRSYAQQLFNDSAVVMPSAAAQDYPVETRSTALTAGWCWHIPLIHRTGNGYVYSSQFINKDQAEAEFRAHLGVIDSAQECRHLQMRVGQLEQHWVFNCVGLGLSQGFIEPLEATALHLVQLTIEALIDALNQHQFTCAGREQFNRTVNNHFEGVRDYILAHYKLNTRGLVNGAGDDAGYWRANRDNKHMPESLLQLLDVWFRCGDLAEELVQRKIKPAFNAASWHCLLAGYGAFPPLAPNQPGQGKGDLYRECDVAKFVEGCALNFPLHKTLLMNDRKLIEPGA

SEQ ID NO: 88520 - protein, 507 aa, Cellvibrio sp.
  REGION 1..507: note = tr|A0A5J6P8G4|A0A5J6P8G4_9GAMM Tryptophan 7-halogenase OS=Cellvibrio sp. KY-GH-1 OX=2303332; GN = D0C16_14205 PE=4 SV=1
MTDSRIRSIVILGGGTAGWMAAAALANRFKQGITRITLIESAEIGTIGVGEATVPYIKEFLQDLNINEVDFMRATQATYKLGIDFDGWYKPSEKFIHPFAGYGARIARIPFHHYWAKLRAQNKAQTLDTYCLAVQMARHNKFALPKANNDIELSSFNYAFHFDAGLFAQYLSSLAQGMGVNRIEANVEQVAQDPDTGFIQSLTLSNGEKIQGEFFIDCSGFNGLLIEQRLKTGYESWSQWLRCDRAVAMPCASTLAPQSATRALAMEAGWQWRIPLQHRVGNGYVYCSDYISDEIAAEKLQENLQGDALAEPKFIRFTTGMRKQAWNKNVFCLGLASGFMEPLESTSIYLIQSSLTLLLNHFPNNQFNQTLVNTVNNNLRIRQEKLRDFLILHYYANQRHGQAFWDECRNMAIPDTLSARIEYFKATGQPQVDELDFFDTNSWLAMFSGFNIQPQHYHPVVDDFDVQLVEQELKAIAASIANTVKDLPDHLHFMQRNIFIKSSQVVE

SEQ ID NO: 88521 - protein, 450 aa, Sphingomonas sp.
  REGION 1..450: note = tr|A0A520IUA7|A0A520IUA7_SPHSX Tryptophan 7-halogenase (Fragment) OS=Sphingomonas sp. OX=28214; GN = EOP67_42270 PE=4 SV=1
TIHWFNQLIGLDEEAFVAATKASFKLGIEFVDWARPGTRYFHPFGRYGVDLGPVPFHQHWLRAKGDGLDRPLSTYSLAAQLAAAGRFAKPVDDPRSILSTLGYAYHFDAGLYARHLRQLAEKRGVVRHEGMLRDIERDPETGFVTALTSDRGERLEGDLFIDCSGFRALLIGETMGAQFEDWSHWLPCDRAVAVPCARIAATTPFTRSTLRPAGWQWRIPLQHRTGNGYVYASSFVSDDEAVATLLSNLDGEALADPRMLRFTAGFRREAWRGNVVAIGLSSGFLEPLESTSIHLIQSGIAKLITLFPDADCDPALARQFNTLFARDMDGIRDFLILHYHATQGHDAPLWQHTRHMTPPPTLVDKMAQYTRAGRLMLSADELFREASWLAVLEGQGVGALGHAPLADTLDAATNRRQLNQIETVIARATPTLPLHDAAIAALVAPQVAAR

SEQ ID NO: 88522 - protein, 502 aa, Sphingomonas sp.
  REGION 1..502: note = tr|A0A520HVG6|A0A520HVG6_SPHSX Tryptophan 7-halogenase OS=Sphingomonas sp. OX=28214 GN=EOP68_06255; PE = 4 SV=1
MGEDSKVRIIVVGGGTAGWMTAATLAMSFAGRVAAVTLVESDEIGTVGVGEATVPHIRFFNQTLGIDEADFVRRTNATFKLGIEFRDWGRIGDSYIHPFGDFGHEIAGLPFHQHWLHAARDGAADVPPLEACSLPIVAARANRFAPPLDDPRAVGSTYSYAYQFDAGLYAAYLRDYAEARGVVRIEGRVDAVEQRDGGIAAIRLAGGERIEGDLFVDCSGFRALLIEGALQAGHEDWSHWLPCDAAWAVPSANTGPLTPYTRATAREAGWQWRIPLQHRTGNGHVFSTRFTDPERARDLLLANLEGEALAEPRMLRFRTGRRTRQWIGNCVAIGLSAGFLEPLESTSIHLIQLAIGKLVELFPSGGVLDPADAAEFNRAMALEYDRVRDFLVLHYCATERDDTPFWRHMRTMALPPSLTETIAAFRDRGVVASYREGMFLPASWLAVCYGQRIVPDRVNPLVATTPVAESRARVAAVAAACRGAADAMPAHDAHLARIRAAA

SEQ ID NO: 88523 - protein, 523 aa, Cellvibrio sp.
  REGION 1..523: note = tr|A0A5J6P313|A0A5J6P313_9GAMM Tryptophan 7-halogenase OS=Cellvibrio sp. KY-GH-1 OX=2303332; GN = D0C16_02290 PE=4 SV=1
MGGGTAGWMTAMLFQHAFQDCTITLVESAATGIIGVGEGSTPALKAFMDALGISESEWMSVCQATYKSGISFRGWSTRNGFEEYFHPFFSHFDRDHIKALIFNSELRRAGKRVHAHPNLFSYASYLAANSLCPITPYAFPFEVQYGYHFNAAMLGSFLKEKAIERGVVWKSAHVENIALNAEGDIAHLAFEGGAILEGDFFVDCTGFASLITGKTLGTPFIPYSDVLFNDRAVTLASPVEKVISTQTVATALNNGWAWKIPLQNRVGNGYVYSSAFCSEAEAEEELRAHLNMNNGEGEARHLKMRVGRAKTMWNRNSLAVGLSQGFLEPLEATALALVQLTLVRFVKLYKAGVYTNQYAEQLNSEIAEAFDNVKDYIHTHYLTSDREDTPYWRACRQNSAAASNRLKLVLQTWLSGADISEALQSTGLNRHYKVNSWVYLLSGMGIFPPEHQLVQASPDDLAKVPLDSIVDFFERCALNHMPQAEALNILRTGASPFSVEGRNKASKEQALARLLGLNFAVSS

SEQ ID NO: 88524 - protein, 498 aa, Sphingomonas sp.
  REGION 1..498: note = tr|A0A520JMY3|A0A520JMY3_SPHSX Tryptophan 7-halogenase OS=Sphingomonas sp. OX=28214 GN=EOP67_07950; PE = 4 SV=1
MKRVQRLVILGGGTAGWMTAAALSATFGDLLQISVLESDAIGTVGVGEATIPTIHWFNQLIGLDEAAFVAATQASFKLGIEFVDWARPGARYFHPFGRYGVDLGPVPFHQHWLRAKADGLEQPLAAYSLAAQLAAAGRFAKPVDNPRSILSTLGYAYHFDAGLYAGHLRALSEKRGVVRYEGLLRDIERDPVTGFVTALTSERGDRLDGDLFVDCSGFRALLIGETMTSRFEDWSHWLPCDRAVAVPCASTRATTPFTRSTLRPAGWQWRIPLQHRTGNGYVYASSFVSDDEATATLLANLDGEALADPRMLRFTAGFRREAWRGNVVAIGLASGFLEPLESTSIHLIQSGIAKLITLFPDAACDPALARQYNTLLARDMDGIRDFLILHYHATQGHGAPLWQHARTMALPDALVDKMAQYRRAGRLMLSPDELFREASWLAVMEGQGVSAQGHAPLADTLDAAINRRQLEQVEAIVARAVPTLPLHDEAIAALVAAR

SEQ ID NO: 88525 - protein, 387 aa, Sphingomonas sp.
  REGION 1..387: note = tr|A0A520AC59|A0A520AC59_SPHSX Tryptophan 7-halogenase (Fragment) OS=Sphingomonas sp. OX=28214; GN = EOP64_12305 PE=4 SV=1
ATFKLGIEFRDWGRIGDSYIHPFGDFGHDIDGLPFHQYWAHASRGDTDGLPTLEDCSLPIVAARDNRFTPPLEDQRSIRSTYSYAYQFDATLYAAYLRDYAEARGVVRIEGRVDAVEQSAGSIEAVRLADGRRIAGDLFIDCSGFRALLIDGALKVKYEDWSHWLPCDAAWAVPTANAGALTPYTRATAREAGWQWRIPLQHRTGNGHVFSTRFTDPETARAVLMDNLEGEALAEPRMLRFRTGRRDLQWVGNCVAIGLSAGFLEPLESTSIHLIQLAIGKLIELFPSGGVFDPADAAEFNRAMALEYDRVRDFLVLHYCATERDDTPFWRYMRTMTLPSSLTEKIAEFRERGIVASYREGMFLPASWLAVYYGQRIMPDRVNPLIA

SEQ ID NO: 88526 - protein, 412 aa, Sphingomonas sp.
  REGION 1..412: note = tr|A0A520HJY6|A0A520HJY6_SPHSX Tryptophan halogenase (Fragment) OS=Sphingomonas sp. OX=28214 GN=EOP68_15240; PE = 4 SV=1
MTIGAPVRRIVIVGGGTAGWMAAAALARLIPTGASITLIESDAIGTVGVGEATIPPIRGFNAMLGIDEAEFLAATAGSFKLGIEFVDWGALGERYLHPFGGFGFDIEGVRFHQYWRRRRAAGIVEDIEAYSLCAVAARAGRFMPPSPDPASVLSQMAHAYHFDAGLYARFLRGRAERDGVVRVEGDVVDVALDGETGHVRHVTLAGDRVIEGDLFLDCSGFRGLLIEQTLGAGYEDWTHWLPCDRAVAMPTANAGPAITPYTRSTARAAGWQWRIPLQHRTGNGYVYSSAHCSDDEAAATLHAGVDGTPLAEPRLLRFTAGRRRKQWIVTAQLLLGAILLVLSTLNPMTSLGWFSLLAGIGAFASATQDVVIDAWRVDVADEVATIDILSTVYQMGYRIAALVGGALALFLA

SEQ ID NO: 88527 - protein, 510 aa, Sphingomonas sp.
  REGION 1..510: note = tr|A0A520J6M4|A0A520J6M4_SPHSX Tryptophan 7-halogenase OS=Sphingomonas sp. OX=28214 GN=EOP67_37455; PE = 4 SV=1
MIDGLGQHIVILGGGTAGWMTACLIAHRWRGRGVRVTLVESPEIGIVGVGEGSTPQLKHFFDTLGIAEAEWMPACDAIYKLGIGFEGWSDREGHERYFHPFPTALDGHTAPQFFYNARARRTGRDVDAHPDQFLLPARLAAANCAPQPAAHFPFEVSYGYHFDAYKVGAFLAKHATERLDVVHLQRRIASVERAQTGDITVLIDTDGEPISGDFFIDASGFRGTIFNALGMPFVSYAGALFNDRAVVMPTAHTPSAPIPSQTRATALSAGWAWHIPLTSRNGNGYVYSSRHLTEAQAEAELRAHIGAEAGEARHLKMRVGRVRDSWSRNALAVGLAQGFLEPLEATALHLVIATVEAFLDMVDQGGATDAVRTAFNTRIAARYDGVRDYIVAHYRLNQRHDDPTGYWAEARGIEALSDDLKMLMSTWFTGADMVAAIDRAGLGRYYSAISWHCLFAGYGTFPDAARLIPPGADIDPIDLPKIDDFLTRCASNFGSHASRLRAAADHKDTV

SEQ ID NO: 88528 - protein, 497 aa, Cellvibrio sp.
  REGION 1..497: note = tr|A0A5J6P731|A0A5J6P731_9GAMM Tryptophan 7-halogenase OS=Cellvibrio sp. KY-YJ-3 OX=454662; GN = D0B88_07935 PE=4 SV=1
MLMSNKPVNHIVIAGGGTAGWMTAAYLARWLEPTNIQVTLVESELIGTVGVGEATVPGIHQFIKHLGVKESEFIAATHATFKLGIEFEGWVAPEQTFFHPFAGYGVPIEDRPFHKTWWSAKQEGYSASLAEFCLCTQLAGAGKFAQPSFDPDSRLAWYNYAYHFDASLFAKYLRGYAEQRRVTRIEGKIQQVTLDPDSGFIQSLQLESGQVIGGDLFVDCSGMSALLIEKALGVGYEDWSQWLLSDSALAVQTRTVAEPDPFTRSTARSAGWQWHIPLQHRVGNGYVYSSQFISEDQARAELLANIEGERLTEPRLIRFTTGMRDHFWHKNCVAIGLSSGFLEPLESTSISLIQTGISKLAAFLVNFEINDQHVAEANRLNRLEYERIRDFIILHYKLNGRPEPLWQHVQAMDIPASLTEKIAHFKATGDIQLLEQESFVEESWISMFAGFGLSPAALTPSRDSAKMHTVMDKMRAAIVKGREYAPSHADFLRTLGS

SEQ ID NO: 88529 - protein, 503 aa, Cellvibrio sp.
  REGION 1..503: note = tr|A0A5J6PCA7|A0A5J6PCA7_9GAMM Tryptophan 7-halogenase OS=Cellvibrio sp. KY-GH-1 OX=2303332; GN = D0C16_20815 PE=4 SV=1
MKPLKKILIVGGGTAGWIAASILSKQLEKANGAASSVQIQLVESEEIGTIGVGESTIPPFLEMLNNLEINEQEFIKYTQASFKLGIQFVDWRVKGESYFHPFGTISAGMKEFTFYQLWLKSLQQGETLGLQDFSPCNLMAQHGRFYLPQLADKTAIGEARYALHLDAKLVAQYLRNYAEAKGVQRTEGKIMQVVQRDDGGIASVVLCTGEEISADFFIDCSGFHALLIEKALGASYCDWTQYLPCDRAVAVQTENVGDTTPYTRATARDHGWTWRIPLQKRTGNGYVYSSRYCSDDEAINTLMGAVDGKALIEPRVIPFKTGVRNEIWKKNCLAIGLASGFIEPLESTAIHLVVRGIIHFVRNFPDQDCDAALIRNYNRGMTREYEEIRDFIVLHYCLTEREDTPFWRYCKTMELPQSLQDFIDYFKVHGGLPEMIDALFHPVSWRSVCEGMGLRPQKYSPVIEEMNYADLYGGMHRYAIALETFVKKLPTHDQFIRDNCSAF

SEQ ID NO: 88530 - protein, 505 aa, Cellvibrio sp.
  REGION 1..505: note = tr|A0A5J6NS48|A0A5J6NS48_9GAMM Tryptophan 7-halogenase OS=Cellvibrio sp. KY-YJ-3 OX=454662; GN = D0B88_00160 PE=4 SV=1
MKPVNNVVIVGGGTSGWMCAAAIARMAPPNASITLVESETIGVIGVGEATIPPLLEFNQFLGLDEHEVLRECQGTYKLGIEFVDWLDLGKRYFHPFGFYGRDTPEFAFHQLWLRLRAVSETGKAPADLAGDINDYNLCAMAARLGRFTQPQGGSDAILSTLRHAYHFDSMRYGQLLRRYAEQRGVRRVEGLVDSVQQHPDHGMIESVTLADGQVLAGELFIDCSGFKSLLIEGAMNSEFIDWSRYLPCDRALALSTTGTGAPDPFTRATADNAGWRWRIPLQTRMGNGYVYSSAFADEDHVHRALLVGAEGEALGEPRPLRFRTGHRRLFWEKNCVAIGLAGGFIEPLESTSIHLAQIGIQRLINLWPGRGINAAEIAHYNRIMTADYERLRDFIVLHYSATQRRDTEFWRYVGHMKIPDTLASKLEIFRGSGRVIAAPDDLFTPHSWLAVMLGQGINPTHYDALVDRVPETALIQNMRHLKESIAKTAAALPSHEAYLKRYCAA

SEQ ID NO: 88531 - protein, 499 aa, Cellvibrio sp.
  REGION 1..499: note = tr|A0A5J6PE39|A0A5J6PE39_9GAMM Tryptophan 7-halogenase OS=Cellvibrio sp. KY-GH-1 OX=2303332; GN = D0C16_07190 PE=4 SV=1
MTEHTAVNSIRKIVIAGGGTSGWLAAAAIAKVLGKNLDITLIESPEIGRIGVGEATIPTLRVFHKLLGINDMELMANVQGTFKLGIEFSNWANKGDKYFHSFGLTGKECWACQFQHFWMAGKKYGINIPFGDYCPESKAARLEKCSGENDGVNYAYHFDANLYADYLKAFSVKLGVKQIEGFIERVNVSPENGYIDSLLLKDGQTIAGDLFLDCTGFKAMLIDGALNTPYVPYSHYLPCDSAIALQTENVHSPRPYTQSIAHDFGWQWRIPLQHRAGNGLVFSSRHVSDDEAINTLMSNLEGRPVTEPRVIKYKTGRRIKAWNKNCIAVGLASGFLEPLESTSIHLAMSTIYRLLRYFPQHEISMSNVDEFNRQSSEEMDRARNFVILHYHATQREDTEFWRYCKNMEIPEILARRIKLFKDTGTIMLEDKELFLNDSWVQVMMGQGIMPAAYHPVVDMMEEKELKGFLAFLRDDVHKKVAAMPSHQELINKYCKAMPV

SEQ ID NO: 88532 - protein, 506 aa, Cellvibrio sp.
  REGION 1..506: note = tr|A0A5J6PGK4|A0A5J6PGK4_9GAMM Tryptophan 7-halogenase OS=Cellvibrio sp. KY-GH-1 OX=2303332; GN = D0C16_20560 PE=4 SV=1
MNKNDALDNIKKMVIVGGGTAGWMAAAAFSKFFKNQFCEVVLIESDDIGTIGVGEATIPQIQVFNKSLNIDEDDFIRRTQGSFKLGIEFVNWGGIGESYIHAFGGVGNDMDSIPFYHYWLKLNKQGGSADIGEYCFNSLASRKNKFMRSIDAGNSPLSNIAYAYHFDAGLYARYLREYSEKLGVKRIEGKISNVNLDSDTGYIKSLSLESGQEIDGEFFVDCSGLHALLIGKALGVEYEDWSHWLPCDTAWAVPSEKLDPLPSYTRATAHTAGWQWRIPLQHRTGNGHVFSRRFTDVDTAKKTLLENIQGEILAEPRLIKFLTGRRKQFWHKNCVAVGLSSGFMEPLESTSIHLVQSAIARIMSVFPRKHISQVEIDIYNEQVGFEYERIRDFLILHYKVTNRNDSEFWNYCRQMPVPDSLVQKIEVFKQNAHVHRFNSELFNEISWVEVMLGQGLYPKGYHPLVDVVPQEEFARRLAHIKRVLETAVDYLPAHESFISQHCKAPI

SEQ ID NO: 88533 - protein, 493 aa, Cellvibrio sp.; identical to SEQ ID NO: 84914
  REGION 1..493: note = tr|A0A5J6P331|A0A5J6P331_9GAMM Tryptophan 7-halogenase OS=Cellvibrio sp. KY-YJ-3 OX=454662; GN = D0B88_16255 PE=4 SV=1

SEQ ID NO: 88534 - protein, 513 aa, Cellvibrio sp.
  REGION 1..513: note = tr|A0A5J6PJL3|A0A5J6PJL3_9GAMM Tryptophan 7-halogenase OS=Cellvibrio sp. KY-GH-1 OX=2303332; GN = D0C16_19885 PE=4 SV=1
MNPGAPARKKIVIIGGGTAGWMAANLMIARWGKLGFDIHLVESPQIGIIGVGEGSTPQLKGFMDSLGIEESEWMPECNATYKVGISFRNWSVIPGFTSYFHPFPAQPDDYTAPGFFHNSFVRRKGIDVEGHPDHFFLASYLAQQKLAPVAAEHFPFEINYGYHFDSSSLGKFLGRKAVARGAVHKEATINQVNLSENGDIASVTTDTGETIAGDIFIDCSGFSGLLIQKTLKVSFKSFGENLFNTSAVVMPTPIGEQIESQTISTALKYGWAWSIPLTSRIGNGYVYSSHFCSKDDAETELRAHLGLLDSDVQARHLQMNVGRVEQHWAKNCVAVGLSQGFIEPLEATALHLVQETVQEFINCFESGQFTDKKRDEFNFSINKRFEAVRDYIVCHYRVNSRKDTDYWVENGRNEKVSDSLRAVLHAWVSGNNLSDELDRQKIDNYYPSISWHCLLAGYGIYPTPAQLKPGNEFANKYNLEKISNFIQRCGMNFKPHRQQLASWSSTVVKPAPV

SEQ ID NO: 88535 - protein, 263 aa, Sphingomonas sp.
  REGION 1..263: note = tr|A0A520D505|A0A520D505_SPHSX Tryptophan 7-halogenase (Fragment) OS=Sphingomonas sp. OX=28214; GN = EOP65_14980 PE=4 SV=1
MRGEDDGAIRRIAIIGGGTAGWMAAAALARVLGPHGPAITLVESEEIGTVGVGEATIPPIQAFNALLGIDENDFVRATGGTFKLGIEFVDWRALGHRYFHPFGVYGIDLGAVPFEALWRRLQAEGAAGPLSDYSICAAAAAAGKFMRPQPGNTPLAHIGYAFHFDAALYARFLRGRAEAAGVVRREGRVVDVVLRGADGFIEAVTLADGGRVEADLFVDCSGFRSVLLGDALGAGFEDWSAWLPNDRAVAVPSAVTGPPPPFT

SEQ ID NO: 88536 - protein, 498 aa, Sphingomonas sp.
  REGION 1..498: note = tr|A0A520DRD5|A0A520DRD5_SPHSX Tryptophan 7-halogenase OS=Sphingomonas sp. OX=28214 GN=EOP65_01700; PE = 4 SV=1
MTASVTTIVIAGGGTAGWMAAAALGGFLESGYRIRLIESDAIGTVGVGEATIPQIRLFNQALGLDEDAFLRATGGTFKLGIAFDGWRAPGHSYMHAFGDVGRDVGLIAFQHYWLRARRLGLARPLDAYCLNDIAARAGRMHRGGPLTAPTIPALPYAFHFDAGLYAAYLRRFAVNRGVERTEGRIAHVERDGESGDVAALLLDSGERIAGDLFLDCTGFGGLLIEGALATGYEDWSRWLPCDRAIAVPSANVGPPPPYTRAIARAAGWQWRIPLQHRTGNGHVYCSAFTSDDAAADTLLADIEGEAQGDPRQLRFVTGRRKRAWSHNVVAMGLASGFLEPLESTSIHLIQSAIARLIKLLPALPVAAALRDAYNRETGTEIERIRDFLILHYWANGRDEPFWRACRDMALPDTLRAKIALWQEAGTIVREQEELFTEDGWLQVLAGQGVEARAHHPLADQIEPGDLGEYMETLELLYRREAAAMPTHAAFIDRHCKVR

SEQ ID NO: 88537 - protein, 506 aa, Cellvibrio sp.
  REGION 1..506: note = tr|A0A5J6P7N8|A0A5J6P7N8_9GAMM Tryptophan 7-halogenase OS=Cellvibrio sp. KY-GH-1 OX=2303332; GN = D0C16_02295 PE=4 SV=1
MLKSHSKKIIVLGGGTAGWVTGAILSKKWETHGYQIVVVDTAEIPTIGVGEASIPTIYDLLNYIEISDQDLVKHCQATFKYGIQFENWSRPGERYMHGFGNMGHNLGQAEFFKIWLSTARYFKNPDLTPYIPSAVAAYSDKFSRGSKAPENTNGLFYPLSNLLYALHFDASLLARLLREKALHNGAIHISKHIVKVETDENGITALIAEDGETLSADLYVDCSGMHGVLNKQALKANFDNWQAYLPCDTAIAAQTTLNKAPRLYTRSIAHAAGWRWEIQLQNRTGNGIVYCSKNMDYDTAKQHLLEGIEGDLLTTPRKIEFITGRLSSPWTLNSVAIGLSAGFLEPLESTSIHLICAYARKLRDSIDNNELNAVGREKFNRAWCSETEGVRDFLMVHYLCNQRDEDSFWKERKSGPRPASLDKLLNEFSKTGWISPPEASIFGTDSWLEVLIGQKFFLNYEKFSMPADIAPHYIQFLQNVSYAIKNEVNKIPDSHQSILGTLRAEI

SEQ ID NO: 88538 - protein, 485 aa, Cellvibrio sp.
  REGION 1..485: note = tr|A0A5J6P1H0|A0A5J6P1H0_9GAMM Tryptophan 7-halogenase OS=Cellvibrio sp. KY-YJ-3 OX=454662; GN = D0B88_13305 PE=4 SV=1
MNDGIKKIVIVGRDLDAWITAFFLKSVLDKSRDSYEVTLVELGTLLTEHDIFAVLPSYKMLHKTLGANEDKLRQTAKARPFFGQRFTGWNPELPEFFHAYDRLGINFNGVDFFQYWMKAVNNGLKLPLEDFSLGVAAAKHGRFVASTGQADFSHLAYGYHLSAIEYVNAIARAAMEVGVKRENGNIITINRNNDVIDSLSLDDGTVLKADFFIDASGADALLINSLTDNNFESWEDWFLCDRIITASSAPLSPAPAFSQVTAFSSGWCGLYPLNNRTAIQTLYSSRHTDFSGVVAEMKMRVGVNISQGVERPIKCGMLSRPWIGNCLAVGTAAANMEPLDALQEHSLVISMVMLKQLFPNSNEYQNERDVYNKKMHSFIENLRDFQIVHYALNSRDELFWEACKNLELPHVLKEKIDIFKCCGYASVREDETFQEENWISVFNGHGLAPEFYSPLVDNMSDDEMIQNFQKILRMIKERINSSPLV

SEQ ID NO: 88539 - protein, 506 aa, Cellvibrio sp.
  REGION 1..506: note = tr|A0A5J6NYA8|A0A5J6NYA8_9GAMM Tryptophan 7-halogenase OS=Cellvibrio sp. KY-YJ-3 OX=454662; GN = D0B88_14240 PE=4 SV=1
MVHAMNYLTKVKKVVIVGGGTAGWMAAASFAKLLGKSVAVILVESDEISTVGVGEATVPPLILLNRYLGINEQELLTFVKGTIKLGISFENWKNINDCYIHSFGHTGKDTWAASFQHFWLRGLDIGVDDPLGDYSLEYAAALHNKFAHMSNPPLTYAYHIDAGFYAKFLRRIAENAGALRIEGKVENVVLDDSGYIKNIRLASGTVVEGDFFIDCSGFRGLLIEEALHTGYEDWSHWLPCDSAIAVQTESVREPVPYTRAIAHHAGWQWQIPLQHRVGNGLVYCSQYMSDEDARTLLLEKIDGQLISEPRVIKFKTGQRLKHWNKNCVALGLASGFIEPLESTSIHLIQRGITRLIQMFPHDGIRACDMDEYNNQMKTEILTIRDFVIMHYHLTEREDSGFWRYCKNMPIPESLEHRIRLFRETGKLFVESPYKLFAESSWLQVMVGQGLVPERYHVVANEMTDAELKTFLSDIRSQVKHSVQKMPGHHDYLQYYCKATAWGDACE

SEQ ID NO: 88540 - protein, 587 aa, Microcystis aeruginosa; identical to SEQ ID NO: 87844
  REGION 1..587: note = tr|A0A5D5B8U1|A0A5D5B8U1_MICAE Tryptophan halogenase; OS = Microcystis aeruginosa KLA2 OX=2605423 GN=FXO09_21380; PE = 4 SV=1

SEQ ID NO: 88541 - protein, 518 aa, Cellvibrio sp.
  REGION 1..518: note = tr|A0A5J6P079|A0A5J6P079_9GAMM Tryptophan 7-halogenase OS=Cellvibrio sp. KY-YJ-3 OX=454662; GN = D0B88_16250 PE=4 SV=1
MSESIKKIIIVGGGTAGWLAAGLLAAEFRHNEAGVSITLIESPDVNTIGVGEGTWPSMRATLRKIGISETDLIRECFASFKQGSKFVGWKTGAADDIYHHPFSIPHGYAECNLAAAWQAQFADRPFAEVVSSQFVVAEQGCAPKQITTPEYAGVLNYGYHLDAGKFAALLQRHCTTALGVIHILDHVTQVVADDSGDIAGVDTKASGVIYGDLFVDCSGLSCLLLGQHFGVPFVDKKHLSLNDTALAMQVPYPEQSSPIESCTVATAQSAGWTWDIGLSSRRGVGYVFSSSYLSEEKAEMELRAHIAKSVGQSVANSLSSKKLSIRAGHRQEFWHRNCVAVGMSAGFIEPLEASALALVELSMNMICEEFPADKVAMKIVAKRFNEVFSYRWDRIIDFLKLHYALTERNDSDYWRDMSAPEALPEHLRELLLLWKHRPPHRSDFIQVEEIFPSASYQYVLYGMGFSMDASRLPRTSDNLPMATARIRETVEKTRKYLSGLPSNRALIDHVMKHGMPLI

SEQ ID NO: 88542 - protein, 517 aa, Cellvibrio sp.
  REGION 1..517: note = tr|A0A5J6PA43|A0A5J6PA43_9GAMM Tryptophan 7-halogenase OS=Cellvibrio sp. KY-GH-1 OX=2303332; GN = D0C16_14100 PE=4 SV=1
MSASKIDILIIGGGTAGWLAAGILAAELKKNSSGQITLVESPNISTIGVGEGTWPTMRDTLRKIGVSEIDFLVECDASYKQGTQFVNWKDNTESDNYYHPFAVPNGYFDANLYAYWNEKQKNIDFASAFATQPKVCHAHKAPKQLSTPEFAAVNNYGYHLDAGKFSAFLKKHCVEKLGVKYIADTITDIISDQEDYIHAVQTTQNGQLKADLFIDCSGTHGVLIKQHFKIPFIDKSDVLFNDRAIAVQVGYPNSTYPIESATISTAQKSGWIWDIGLSSRRGIGFVYSSQHTNQQAAEETLLNYLLKSGSEKNIITEPRTIKILPGFHQQFWHKNCVAIGMSAGFIEPLEASALVLVELAAGMIREELPTTRETMAIVAKRFNNTFLYRWERIIDFLKLHYILSQRRDSDYWIDQQDKSHQSDQLQELLKLWEFRSPSKNDFPQIQEIFPSASYQYILYGMGYKTTSKNILNDKKSLATAEKYFFGNRKLTELHLSGLPTNRELLQKLKERYSCNIK

SEQ ID NO: 88543 - protein, 505 aa, Cellvibrio sp.
  REGION 1..505: note = tr|A0A5J6PDA4|A0A5J6PDA4_9GAMM Tryptophan 7-halogenase OS=Cellvibrio sp. KY-GH-1 OX=2303332; GN = D0C16_20375 PE=4 SV=1
MNKPIKKIVIVGGGTAGWMSAALLKKMLQQRVEIELVESEEIGIIGVGEATIPPIQTFNAVLGLNEAEFLRETRATIKMAIRFDHWKQCGDSYFHTFGAPGATLGYSSFQHYWLRARQQGLSSAGLWEYDLNYLCCNAGVFGKFNSKDPLYQLPYAYHFDSALYGRYLRKLSEQAGVVRTEGKISSVNVHPDSGFVESVQMENGQLIGGDLFIDCSGMRGLLIQGALHTGYEEWGHWLPCDRALAVPSQRFEKTLPYTRAIAHKVGWQWRIPLTHRNGNGLVYSSQYLSDDEAAHMLMSNLDSVALADPKPIQFNTGRTLQQWNKNVIAVGLSSGFLEPLESTSIHLIQSAIVRLAKNFPNAGFSVAQVNEYNQDSKREYETVRDFIILHYHLNERDDHDFWRYLRNMPIPERLAHKMELFRETGAVVNDAGDIFLDSSWLQVMMGQGIMPRDYHASADLPPAAELSAMLEQIAAAKRKPLAQLPSHDDFLFQYAGVTREVTQGG

SEQ ID NO: 88544 - protein, 250 aa, Sphingomonas sp.
  REGION 1..250: note = tr|A0A520I7T4|A0A520I7T4_SPHSX Tryptophan halogenase (Fragment) OS=Sphingomonas sp. OX=28214 GN=EOP67_59665; PE = 4 SV=1
TAVTPYTSAIAMRSGWRWRIPLQHRTGNGYVYASAFVSDDDARHALETAVEGEALAAPRVLRFKAGRRRRSWVGNCVAIGLASGFLEPLESTSIYLVQQAITALIELFPEKRISATDRDEFNRVIDMEYDRIRDFLILHYHATTRSDSPFWDYVRTMPIPDTLSEKLDLWRTCARIVKYREGVFLDPSWVAVYLGQGIVPEGWDPRVDTVATDALLHSLETLRAEIAGDVARRPDHRSFIERYCAMAQAA

SEQ ID NO: 88545 - protein, 502 aa, Cellvibrio sp.
  REGION 1..502: note = tr|A0A5J6NV55|A0A5J6NV55_9GAMM Tryptophan 7-halogenase OS=Cellvibrio sp. KY-YJ-3 OX=454662; GN = D0B88_06805 PE=4 SV=1
MNSIKKIVILGGGVSGWIAASMLAAQVRRDLCEIELIESEDIGSVGVGESTIPPVVRLITSLGIDEEDFIRETQACYKLGIKFVDWRSKNQSYFHPYGALGQRIGTQDFYQCWLKATMAGGDYPLQDFSPCSVMAAQGRFFLPSQAMNTPIGGAGYAIHLDAKLVAAYLRRYAEARGVVRSEGNYVAVERRDNGFISALVLADGRKIEGDFFVDCSGFRALLIDGAMAAGFEDWAQYLPCDRAIVVKTGAAGSRMPYTTATARKAGWSWRIPLRNATGHGYVYSSRFCSDTEAKSTLLGNLDAPRINDPRLISFKAGRRLEFWKNNCLALGLAGGFVEPLESTAIHLIARGMDYFLRFFPDLECEPSLRREYNRRMAADYQEVRDFIVLHYCTSERSDSDFWRWCQTMPLPDSLRERIELFKGHGIVREERDELFRSASWQSVFEGMGIRPAKYSPRVDNIELAQINENLKLARSAILNMVKTLPTHDDYLAGRFGVPAVDQ

SEQ ID NO: 88546 - protein, 499 aa, Cellvibrio sp.
  REGION 1..499: note = tr|A0A5J6PEQ1|A0A5J6PEQ1_9GAMM Tryptophan 7-halogenase OS=Cellvibrio sp. KY-GH-1 OX=2303332; GN = D0C16_07425 PE=4 SV=1
MTEHTAVNSIRKIVIAGGGTSGWLAAAAIAKVLGKNLDITLIESPEIGRIGVGEATIPTLRVFHKLLGINDMELMANVQGTFKLGIEFSNWANKGDKYFHSFGLTGKECWACQFQHFWMAGKKYGINIPFGDYCPESKAARLEKCSGENDGVNYAYHFDANLYADYLKAFSVKLGVKQIEGFIERVNVSPENGYIDSLLLKDGQTIAGDLFLDCTGFKAMLIDGALNTPYVPYGHYLPCDSAIALQTENVHSPRPYTQSIAHDFGWQWRIPLQHRTGNGLVFSSRHVSDDEAINTLMSNLEGRPVTEPRVIKYKTGRRIKAWNKNCIAVGLASGFLEPLESTSIHLAMSTIYRLLRYFPQHEISMSNVDEFNRQSSEEMDRARNFVILHYHATQREDTEFWRYCKNMEIPEILARRIKLFKDTGTIMLEDKELFLNDSWVQVMMGQGIMPAAYHPVVDMMEEKELKGFLAFLRDDVHKKVAAMPSHQELINKYCKAMPV

SEQ ID NO: 88547 - protein, 517 aa, Cellvibrio sp.; identical to SEQ ID NO: 88490
  REGION 1..517: note = tr|A0A5J6PE43|A0A5J6PE43_9GAMM Tryptophan 7-halogenase OS=Cellvibrio sp. KY-GH-1 OX=2303332; GN = D0C16_02500 PE=4 SV=1

SEQ ID NO: 88548 - protein, 503 aa, Sphingomonas sp.
  REGION 1..503: note = tr|A0A1Y2QYE9|A0A1Y2QYE9_9SPHN Tryptophan halogenase; OS = Sphingomonas sp. IBVSS1 OX=1985171 GN=CAP39_03875 PE=4; SV = 1
MPDQPFQRLVIAGGGTAGWMTAAALARFCGPAWQIHLVESDAIGTVGVGEATIPQIRLFNAGLGIDEADFLGATQGTLKLGIEFVDWWQPGHRYMHNFGEVGRGLGVVPFQHWWAAARAAGVAADYGHYSLNERAARMGRFAPFAGDNTLPPLVWAYHFDAGLYAAYLRRYAQQRGVTRHEGRIARVESQGETILALHMDDGRRIAGDVFIDCSGFRSLLLGETLGSGWHDWSHWLPCDRAVAVPCAHAPAAPLTPYTRSTARTAGWQWRIPLQHRIGNGHVFSSAHLSEDEATAVLLANLDGPALAEPRSLRFEAGRRDRVWIGNCMAIGLSAGFLEPLESTSIHLIQSAIARLLALLPGDAGELPVLAAEANRQAAREMEWIRDFIILHYKATARADTPFWAQVQAMAVPPDLVERMALFQETGRIRRDHDELFTELAWAQVLIGQGLPPARPHPLTAGIGRDDLAGFMTSLDRAIAAGAAALPGHEDWLAKHAPAREVRS

SEQ ID NO: 88549 - protein, 499 aa, Sphingomonas sp.
  REGION 1..499: note = tr|A0A520B4U7|A0A520B4U7_SPHSX Tryptophan 7-halogenase (Fragment) OS=Sphingomonas sp. OX=28214; GN = EOP64_05785 PE=4 SV=1
MPGTGPLRSIVIVGGGTAGWMAATLLARRLDRQSVAITVVDSTDIRTVGVGEATVPGIRDFFRQIGVTEQEVMAAAQGTVKLGIEFVDWKRQGERFFHPFGLYGMRSRGVAFHHYWRKMNAAGHPTPLSDFCLATALAERNLFMQPTDSPVHDLLFFDWAVHFDAGLFATFLAKKASEWGVGRVDATITNVRVDRATGFIAGLDTTCGKTIDGDLFIDCSGFRSLLLGDALGVPYEDWTNLLPCDRAVAMPCERSGPLTPFTRSTALSAGWQWRIPLQHRVGNGYVYASRHISDDEAAGTLKGRLEGAALAEPNIIRFRTGRRHAFWQGNCVALGLAAGFMEPLESTSITLIQTGLEKLLALLPDRGFDQALAEEYNRTTGLEYERIRDFLILHYFANDRRGEPLWDRCRDTALPEPLARKMRLFKARGHLVRYEWESFQDPSWLSMYAGFGIDAAAHDPLADHFSVSDLEAAFERMKGSIRDAVALAEPHETFLKASA

SEQ ID NO: 88550 - protein, 387 aa, Sphingomonas sp.
  REGION 1..387: note = tr|A0A520IMM9|A0A520IMM9_SPHSX Tryptophan 7-halogenase (Fragment) OS=Sphingomonas sp. OX=28214; GN = EOP67_47635 PE=4 SV=1
MTACLIAHRWRDRGVRVTLVESPEIGIVGVGEGSTPQLKHFFDTLGIAEAEWMPACDATYKLGIGFEGWSDRAGYERYFHPFPTELDGHTAPQFFYNARARRTGRAVDAHPDQFLLPARLAATHCAPQPAANFPFEVSYGYHFDAYKVGAFLATHATEKLDVVHQQCLIASVERAQTGDIAALIDTDGERISGDFFIDASGFRGTILNALEIPFVSYADALFNDRAVVMPTAHPPGAPIPSQTRATALSAGWAWHIPLTSRNGNGYVYSSRHLTEAQAEAELRTHIGNQAGEARHLKMRVGRVRDSWSHNALAVGLAQGFLEPLEATALHLVIATVEAFLDMVDQGGATEAVRTAFNTRIAARYDGVRDYIVAHYRLNQRHDDPTGY

SEQ ID NO: 88551 - protein, 376 aa, Sphingomonas sp.
  REGION 1..376: note = tr|A0A520I461|A0A520I461_SPHSX Tryptophan 7-halogenase (Fragment) OS=Sphingomonas sp. OX=28214; GN = EOP67_63410 PE=4 SV=1
SLNTHAALAERMQRGPARTARTLPSMPYAYHFDAGLYARYLRRYSETRGVNRIEGKIVSVARDGESGDVSGLVLENGTTMAADLYIDCTGFRGLLIEEALGTGYEDWTHWLPCDRAIAVPSARSEAFTPYTRSTAHAAGWQWRIPLQHRTGNGVVFSSAHMSQDEATATLLAGLDTPAMADPRTIAFRTGRRKRMWNRNVVALGLAAGFMEPLESTSIHLIQSAISRLLKLLPGRVIAEADRTEFNRQSDFEYERIRDFIILHYKATARDDTPFGRQCRDMAVPDTLAAKIDLWRGNGHIVREPEELFTEVGWLQVLAGQGIMPAGHHPLADAISTNDLGEFMDTIDKLNAREAGQMQDHAAFVAQHCASPAGLGA

SEQ ID NO: 88552 - protein, 300 aa, Sphingomonas sp.
  REGION 1..300: note = tr|A0A520ABE6|A0A520ABE6_SPHSX Tryptophan 7-halogenase (Fragment) OS=Sphingomonas sp. OX=28214; GN = EOP64_13030 PE=4 SV=1
MGGLSVTDGAGTTHHSGPLRSIVIVGGGTAGWMAATLLARRLDRQSVTITVVESSDIRTVGVGEATVPGIRDFFREIGVTEQEVMAAAQGTVKLGIEFVDWKREGERFFHPFGLYGMRSRGVAFHHYWRKLNAAGQPTPLSDFCLATALAERNLFMRPTDSPVHDLLFFDWAVHFDAGLFAKFLAKKAGEWGVKHVDAKITDVLVDQVTGFISSVDTQCGKTIAGDLFIDCSGFRSLLLGDALGVPYEDWTNLLPCDRAVAMPCERAGPLTPYTRSTALTAGWQWRIPLQHRVGNGYVYA

SEQ ID NO: 88553 - protein, 506 aa, Sphingomonas sp.
  REGION 1..506: note = tr|A0A520JL13|A0A520JL13_SPHSX Tryptophan 7-halogenase OS=Sphingomonas sp. OX=28214 GN=EOP67_11530; PE = 4 SV=1
MDQAPTRVVVVGGGTAGWMTAAALVRLLPTVCTVHLIESAEIGIVGVGEATLPHIRAFVERLGLDEADFMRATHATFKLGIDFRDFGAIGDSYIHPFGTFGRPLNDIAFHHYWLRLAAEGRAAPIGDYSVAVAAAKRHRFSIPNGTPDDLAASFGYAYQFDATLFGPYMRRFAEANGARRTEARIIGVEQDSISGNVRALRLDTGETVEGDLFVDCSGFRSLLLSDAMAEPWEDWSRWLPCDRAVAMPCTSPDGPIEPYTRATAKPAGWQWRIPLQHRVGNGYVYSSAHISDDAAADALVASVEGAPLADPRFLKFRAGRRANSWVGNVVAIGLASGFLEPLESTSIYLAQMAITQLVELFPQRAGLQGISAIDRTEFNRMVDMEYDRIRDFLILHYHATTRDDSDFWNHVRTMDVPITLADKMELFRSSGRVTQYSEGLFLEPSWIAVYLGQGIIPRSWDQRADRPGLDGLDRAVTNLRDHVAATVTAMPDHAAYIARRNATVAA

SEQ ID NO: 88554 - protein, 426 aa, Sphingomonas sp.
  REGION 1..426: note = tr|A0A520JD79|A0A520JD79_SPHSX Tryptophan 7-halogenase (Fragment) OS=Sphingomonas sp. OX=28214; GN = EOP67_25990 PE=4 SV=1
ATFKLGIEFRDWGRIGDSYIHPFGDFGHDIDGLPFHQYWAHATRCGADGLPTLEACSLPIVAARDNRFTPPLEDPRSIGSTYSYAYQFDATLYAAYLRDYAEARGIVRIEGRVDAVEQKDDGIGAVRLADGRRIAGDLFIDCSGFRALLIDGALKVGHEDWSHWLPCDAAWAVPTANAGALTPYTRATAREAGWQWRIPLQHRTGNGHVFSTRFTDPETARAVLMDNLEGEALAEPRMLRFRTGRRHRQWVGNCVAIGLSAGFLEPLESTSIHLIQLAIGKLIELFPSGGVFDPADEAEFNRAMALEYDRVRDFLVLHYSATERDDTPFWRYMRTMTLPSSLTEKIAEFRERGIVASYREGMFLPASWLAVYYGQRIMPDRVNPLIADIPIATSRAHVTRVAAACASAAKAMSLHEDYIARIKAAA

SEQ ID NO: 88555 - protein, 503 aa, Sphingomonas sp.
  REGION 1..503: note = tr|A0A1Y2QHS5|A0A1Y2QHS5_9SPHN Tryptophan halogenase; OS = Sphingomonas sp. IBVSS1 OX=1985171 GN=CAP39_11605 PE=4; SV = 1
MNKAASPLRVVVAGGGTAGWMTAAALAHTLGPVIELTLVESDAIGTIGVGESTIPPMQLFNRLLGINEAEFMRATQATFKLGIMFENWRDVGHKYFHSFGTTGKDHWSAGFQHFWMHGLTQGHEHPYDDYALELQAAMQSKFAHLPDDRLNYAYQLDSALYARFLRQRAEAGGATRIEGRIAQVELNGENGDIAALVLDGDRRIEGDLFIDCTGFRALLIEGALHAGFDDWSHWLPCDSAIAIQTSSVRPAVPYTRAIAHDAGWQWRIPLQHRQGNGIVYCSRYLSQEAAQERLFATIEGDKLVKPNIIKYQTGVRRRQWHRNCVAVGLSGGFMEPLESTSIHLIQRAVLRICRMLPAGRVSERDIAEFNEQQFTDMEQIRDFLILHYKVTDRRDSPFWRHVASMAIPDSLAHKIELFRETGRVFRKNEELFVENSWVQVMMGQGIMPQSWHPVAAKLRPEELNAFLSGLRDSVARTVAGLPDHHAYVSRYCAAAEPRDNKAA

SEQ ID NO: 88556 - protein, 494 aa, Sphingomonas sp.
  REGION 1..494: note = tr|A0A520DQQ2|A0A520DQQ2_SPHSX Tryptophan 7-halogenase OS=Sphingomonas sp. OX=28214 GN=EOP65_02110; PE = 4 SV=1
MTSIDAPIARIAVIGGGIVGWSAAVALRRRVPGVAVTIVATPPPPDALADRIAQTLPSTIGFHDDLGLGEDDAVLRAGGVWRLGTEFEDWAPGRPPYVHAYGPCGQPFGTASFHHHWLRAARDGTAAPFEAHAPAAMLARAGRMPIPPTGIVAEAQAAVMLDVPRYRAMLEAFARHLGVEVRDGDVATVRLRGEDGFVDAVLLADGSAVTADVFVDAAGPGAVVRGAIDDMWEDWQRWLRCDRLVTAEGAAERSTGLDRVQAMPAGWRWRTPTPDRTSHGCCYASAFMSDADAQQALATAGATVMAPAVAFHQGTRPEPWARNCVAIGDAATVIEPLEFTNLHLAHSAIDRIVAMLPGRACHPLEIADYNRQAQAEVVRVRDFVLCHYATAQRAEPFWRDLPALPDSLARTLAAFRERGRLPFFEEETFSRDDWLTVLIGQGAMPRRIDPLIETTDVADSERAMAAYRAAIGQAVSRCPDLDAYLHSQRKRLGR

SEQ ID NO: 88557 - protein, 329 aa, Sphingomonas sp.
  REGION 1..329: note = tr|A0A520I7G7|A0A520I7G7_SPHSX Tryptophan 7-halogenase (Fragment) OS=Sphingomonas sp. OX=28214; GN = EOP67_60010 PE=4 SV=1
DLVTHVDVGPNGHIAGVATRDHGVLDADLFIDCSGFRAELIGGALGEPVKSVRSHLFTDRAITAKLPYDRARSPLPSFTGATAHEAGWFWDIGLAHAHGVGCVYSSAHIDDARASEILHAYLGMEPGSVPTRMLEFEPGYRERQWIGNCVAVGLAGGFLEPLEATGIVMIEAAVAMIAEMLPHGGPIDAPAARFNALMRARYDNVVTFLKLHYCLSRRREPFWRDNADRASWPVRLGELIDQWRYRAPGRFDLTLDTETFAYFNYQYVLYGMNEDAALPSGLNRLANAEIADRQFARIRSLGDRAKRELLPNRELLETIGGQEARARRG

SEQ ID NO: 88558 - protein, 443 aa, Sphingomonas sp.
  REGION 1..443: note = tr|A0A520AI76|A0A520AI76_SPHSX Tryptophan 7-halogenase (Fragment) OS=Sphingomonas sp. OX=28214; GN = EOP64_09405 PE=4 SV=1
PTARSFHAFLGIDEAAFMRATQATFKLGIAFENWRQVGDRYFHPFGSIGRSVAIADFQHFWLEARARGFGGAYGDYSLEQQAAGAGLFGHDEQHSLAYAYHLDATAYARFLRTLAEPWGVRRVEGCIERVERDGEGGDIAALVLASGERIAGDLFVDCTGFRALLTEGTLETGFEDWSEWLATDRALAVQTETVGPPVPYTRAIAHGAGWRWQIPLQTRTGNGLVYSSAHMSDDEAHETLIGALDGRPLFEPRPLRFRSGMRRQAWNRNCIALGLAAGFIEPLESTSIHLIMNAVIRLIQLFPFRGDDHVALAARFNAQSRHEWEHVRDFIILHYHVTQRDDSPFWRDCAHMTIPDSLAERIALFTKTAGAWQGQDDLFRIDSWVSVMLGQGVVPLAHHRIASIIKEHELQTSFEDLSRGIASTVRALPRHCDFLARYCAADG

SEQ ID NO: 88559 - protein, 494 aa, Cellvibrio sp.
  REGION 1..494: note = tr|A0A5J6P993|A0A5J6P993_9GAMM Tryptophan 7-halogenase OS=Cellvibrio sp. KY-GH-1 OX=2303332; GN = D0C16_15225 PE=4 SV=1
MKKNNRIVIVGGGSAGWMAAAALSNAFGATQQITLIESEAIGTVGVGEATIPAVKSFNKLLGIDEAEFLKTTQGTFKLGIQFENWGAQGDVYMHPFGLVGKDSWMANFQHFWLKAKRMGVAKSYFDYSLNIRTAKANKCMIDPNSGLDYAYHFDAGLYAAYLRKYSEARGVKRIEGFIESVQTRDDGFIESVKLQAGDIIAGELFIDCSGFRALLIEHTLHTGFEDWSHWLPCDRALAVQTESVGEPIPYTRSIAHSAGWQWRIPLQHRVGNGLVYCSRYSSDEDAKKLLLENVEGEVRTEPRLIKFRTGRALKQWNKNCIAIGLSSGFLEPLESTSLHLIQTGIVRLIRMFPGDAINQTEIDEYNRQSRYEYERIRDFIILHYHVTQRSDSAFWNYCRRMSIPETLARKIEVYKNTTSVFKEQDELFHEGSWQQVMLGQGITPTAYHPVVDKLSDEELVKLMNSIENEHNQYLARFPSHQQFINHYCKAIAPG

SEQ ID NO: 88560 - protein, 510 aa, Cellvibrio sp.
  REGION 1..510: note = tr|A0A5J6PAE1|A0A5J6PAE1_9GAMM Tryptophan 7-halogenase OS=Cellvibrio sp. KY-GH-1 OX=2303332; GN = D0C16_16010 PE=4 SV=1
MSHPSAQHTPIRKIVIVGGGTAGWMAAASLSRFAQGRSLDITLIESTTIGTVGVGEATIPSIVQFNNSVGLDELEFIRATRASFKLGIQFENWHKQGSQFFHPFADYGINFNGVEFQHYFYRLKKNNPTADLHDYSIGTQLAKHNNFAQPQENPNNPLADFSYAYHFDASLYAKVMRELSISRGVTHIDQKIEKVNLRNADGFIESVLLDNGELIAGDLFIDCTGFKGLLIEETLNTGYEDWQQWLLCDGAVAVQSLNTNEPTPYTRVTALDAGWMWKIPLQHRTGNGYVFCSRFLDKAQAEETLLQRISGHPITTPKPFAFKAGRRKKVWNKNCYALGLASGFIEPLESTSISLIQTGITHLLTFFPDMSFDPAMIAEVNRRHQHEMERIRDFIVLHYKLTQRTDTEFWRYCQAMEIPESLAHKIELFKSSGHILQHEPEAFERSSWLSIYHGFGIVPARTDNRIDHFSDETIAAQLAKIKQTLDQAGRSATSHAEFIRRHCVAPDFEH

SEQ ID NO: 88561 - protein, 506 aa, Cellvibrio sp.
  REGION 1..506: note = tr|A0A5J6PBV9|A0A5J6PBV9_9GAMM Tryptophan 7-halogenase OS=Cellvibrio sp. KY-GH-1 OX=2303332; GN = D0C16_20550 PE=4 SV=1
MIKKYVILGGGTAGWMTAAAFARFVSSENAQIVLIESDAIGTVGVGEATIPHIRAFNDMLGIKESHFMQSVNATYKLGIRFTGWGNETSDYYHPFGDHGFPIKGVGFHHYWLGAKNAGAGIAPFDSFSVGNVLAREKKFSYPSANPDDVLSTFSYAYHIDATAYAKLLRTYAEDRVTRIEGQVVTVNKNTETGFIESLTLASGQCVEGDLFIDCSGFRSRLLGQELGVEFQSWKKWLPCDSALAVPTEGNVVMQPYTHSTAKTAGWCWKIPLTHRIGNGHVFSSEFTNSEQALRELEANLSGDMIRDPALIKFEAGVREKTWKNNCIAIGLACGFLEPLESTSIYLVEVAILKLLELLPRDCKNCALEEDEFNRQMENEYLKVRDFIILHYALNDRPEEFWRHCANMTLPNSLQEKIDIFKTTAHVVEYDTGLFMPPSWLAVYLGQGLFPGNLDSRLTESNIHEAIGLIRGMPAHLNQIVSQLGESATSVAAHPPASRMSLYGIRR

SEQ ID NO: 88562 - protein, 430 aa, Cellvibrio sp.
  REGION 1..430: note = tr|A0A5J6NVM5|A0A5J6NVM5_9GAMM Tryptophan 7-halogenase OS=Cellvibrio sp. KY-YJ-3 OX=454662; GN = D0B88_07010 PE=4 SV=1
MGGESSDYLHPFGDHGFPIKGIPFHHYWLRARQQAEVEAFDRYSLANVMAAGERFIYPSAKQDSVESTFSYAYHLDAGAYAVFLRDYSEARGVQRVEGEVVSVKLNQDSGFIESLNLSNGEIIAGDFFIDCSGFRARLLGQELKVPFTSWNRWLPCDRAYAMPSELIAAIRPYTRSSAKSAGWCWQIPLQHRMGNGHVFCSSFCSDQQAVDILLAHVQGKPLADPRRIDFEAGMRHRAWEKNCVSIGLASGFLEPLESTSIYLIQVGIYKLLELLPISSDFELDAKEFNRMVADEYEKIRDFIILHYHLNNRTEGFWQQTANMSVPDSLQHKMQVFKESAVVVEYDAGLFMPPSWLAVYLGQGFFPERTDSRVQQIPPQELLPLIQKIPNHLRSLVEKMPSHMAALQKLSAGERAANYVKPRMSLYGGAL

SEQ ID NO: 88563 - protein, 111 aa, Sphingomonas sp.
  REGION 1..111: note = tr|A0A520H8M1|A0A520H8M1_SPHSX Tryptophan halogenase (Fragment) OS=Sphingomonas sp. OX=28214 GN=EOP68_20840; PE = 4 SV=1
AHYRLNARSEPFWRERAAAPVPQGLAEKLALFRAGGRIFREADELFNETSWLALLTGQDAPLVGHDPICDSVPIEAVASRLAQIERVVATSMTHMPPHAQALAPLASKRIV

SEQ ID NO: 88564 - protein, 459 aa, Sphingomonas sp.
  REGION 1..459: note = tr|A0A520IJ30|A0A520IJ30_SPHSX Tryptophan 7-halogenase (Fragment) OS=Sphingomonas sp. OX=28214; GN = EOP67_50130 PE=4 SV=1
LAAAVLSRQLGMILDITLVESEEIGTIGVGEATIPTMRAFQSLLGVDEREFMRATKASFKLGIAFEGWTRPGDRYVHSFGEVGKSTWMGDFQHFWLEARAQGKASDFGDYCFELKAAEAGRFATDENARINYAYHLDAGLYARFLRTRAEADGLARIEGKIATVEQDPENGHIRALVLQSGQRVEGDLFIDCTGFAALLIERTLGIGYEDWGHWLATDSAFAVQTAAVEPARPYTRAIAHGAGWRWKIPLQHRVGNGLVYASAHLSDDEAHARLLASIEGERLIEPGLIRFRTGRRLKTWEGNCIALSLAAGFVEPLESTSIHLIMTGLARLVQAFPFDGISPAVVDRFNAQSREEMERIRDFIVLHYHLNQRDEPFWKAHRENDVPQTLKDRLALFGEQAQAYQAPDELFRVGSWMQVMLGQNLTPRAHHAMARMMPTDQLAGALNDLKGNIDRAVER

SEQ ID NO: 88565 - protein, 189 aa, Sphingomonas sp.
  REGION 1..189: note = tr|A0A520JGF7|A0A520JGF7_SPHSX Tryptophan halogenase (Fragment) OS=Sphingomonas sp. OX=28214 GN=EOP67_21535; PE = 4 SV=1
MTEHPIRRVVIAGGGTAGWMAAAAIARTMGSTIELTLVESDAIGTVGVGESTIPPMITFNRLLGINEAEFMRETQATFKLGILFDDWKDRGERYFHSFGITGKDHWSAGFQHFWLHGLTKGQAQPYDDYCLELRAALQGKFAHLPDDRMNYAYQLDSTRYAKFLRKMAEADGTRRLEGRIAQVELNGES

SEQ ID NO: 88566 - protein, 519 aa, Cellvibrio sp.
  REGION 1..519: note = tr|A0A5J6PEM7|A0A5J6PEM7_9GAMM Tryptophan 7-halogenase OS=Cellvibrio sp. KY-GH-1 OX=2303332; GN = D0C16_14095 PE=4 SV=1
MKNIKNIVIAGGGSAGWLAAAMLAAEYHNSQSQIKITLIESDRIGTIGVGEGTWPTMRTTLKKIGISEKDFLLTCDASFKQGSKFINWRSTDKGDFFYQPFEPPIGFPYVNIAHNWIKEKEQGLSTSFSKSVCFQEAISELHLAPKTPHTPDYDAVANYAYHLDASKFVAMLAKHSINVFGVMRIEGEINKVNVDKEGFIESLSLNDGSRIEGDLFIDCTGLKSLLLGDALDVKFTSKKDILFTDSAIAVQAPYENEDQVIPSPTLSTAQTQGWIWDISLYSRRGIGHVFSSAHSTETQALDNLANYLHKNNGKNVDISSAKTIKFSPGHRKFFWKNNCVAIGMASGFLEPLEASALAMVEYSANLIIKKLPGSKEALHGAAKSFNKEMQYHWEKVIEFLKLHYLLSKRTDSDFWNDNRNLQSIPDSLQNFLEELRYRVIDFDELSHANEVFPAIGYQYVIYGMDFLPVKERQVRNSYINFDASRLFQQNAANKSAATEKLPSNRQYLNWLRQKKMTTE

SEQ ID NO: 88567 - protein, 254 aa, Sphingomonas sp.
  REGION 1..254: note = tr|A0A520HVS9|A0A520HVS9_SPHSX Tryptophan 7-halogenase (Fragment) OS=Sphingomonas sp. OX=28214; GN = EOP67_68245 PE=4 SV=1
ATGTPIPSQTRATALSAGWVWDIPLTTRTGNGYVYSSRHLTPAQAEAELRTHLGVGDAGEARHLKMRVGRVRDSWSHNALAVGLAQGFLEPLEATALHLVIATVEAFLDAVDRGGTTPETRTAFNATIAARYDGVRDYIVAHYRLNQRNDDPVGYWAEARAVAPSDSLKGLMSAWFTGADMAAAIDQAGLGRYYSAISWHCLMAGYGTFPDAARLMPPGADIDRIDMARIDDFLTRCARNFDAHDRHLPHKDFP

SEQ ID NO: 88568 - protein, 176 aa, Sphingomonas sp.
  REGION 1..176: note = tr|A0A520HJD8|A0A520HJD8_SPHSX Tryptophan 7-halogenase (Fragment) OS=Sphingomonas sp. OX=28214; GN = EOP67_74655 PE=4 SV=1
MGKRILIVGGGTAGWLTAGYLAKRLGADLPDGVAITLVESRDIGILGVGEGTFPTIRRTLATIGIDEADLVRRCGATFKQGAKFVHWRHAPGQGATDHYSHPFQVADSSDGLELLPYWLLGHGGTENWDEVSNPQKKAADRHRAPKLATNPDYVGPLNYAFHFDAVALAGLLREQA

SEQ ID NO: 88569 - protein, 499 aa, Sphingomonas sp.
  REGION 1..499: note = tr|A0A520JM86|A0A520JM86_SPHSX Tryptophan 7-halogenase OS=Sphingomonas sp. OX=28214 GN=EOP67_09425; PE = 4 SV=1
MARPVRIVIAGGGTAGWMAAATFARFLEVGFEIDLIESEEIGTVGVGEATIPQIRLFNDALGLDEDAFLRATQGTYKLGIEFVDWLKPGHRYMHAFGAVGRDVGLLPFHQYWLRARTLGIAGDLAAYSLNNQAALADRMQRGPARTARVLPDMPSAFHFDAGLYARHLRRYSETRGVNRIEGRIVRVDQGETGDVSALVLEDGTTHAADLYIDCTGFRGLLIEQTLKTGYDDWTHWLPCDRAIAVPSARSSAFTPYTRSTANSAGWQWRIPLQHRTGNGIVYSSAHMSEDEATATLLAGLDGEPLADPRPIAFRTGKRRRMWNRNVVALGLAGGFMEPLESTSIHLIQSAIARLMTLLPGTTIADADRAEFNRQSDFEYERIRDFIILHYHAQDRTELFWRMCREMQIPDTLAAKIALWRGNGHITREHEELFTEVGWLQVFAGQGVMPAGHHPLADAIPAADLEEFMDTIDKLNAREVAQMPSHADFVARHCAAPVPA

SEQ ID NO: 88570 - protein, 509 aa, Sphingomonas sp.
  REGION 1..509: note = tr|A0A1Y2QFI6|A0A1Y2QFI6_9SPHN Tryptophan halogenase; OS = Sphingomonas sp. IBVSS1 OX=1985171 GN=CAP39_11590 PE=4; SV = 1
MGVTEDGAFRIVIAGGGTAGWLTACVLAARHPQLDITLVESPDIPTIGVGEGTWPTMRETLASIGLGEAEFMAACDASFKQGSRFDGWVTGAEDDICLHPFTLPPPGNMAALLHAWASTAPARRFAEVMTAQAAACAQDLAPRQRGMPDYAGALNYGYHFDAGKFAQLLTRHATSRLGVKHVPAEIVGTIAADNGDVAALVLADGRQLAGDLFIDCTGQAARLIAGHCGVAWIDRSHVSFNDRALAVQVPVAQGSPIASQTIGTAHRAGWIWDIGLPTRRGIGCVYASRFMSDDEAHAVLCAHVAAKVPGADVTALAPRRLAFATGHRARFWQGNVVAVGLSAGFIEPLEASAIVLIELSARALADALPASRAAMDIHARRFDAMFHTRWDRIVDFLKLHYVLSRRSEPYWQAQREPASLSPRLAEDLVLWREQPPSARDFPLHDEMFPPASQHYILYGMGHALPPAPPAPAIAAAAARLAEVQARSRQLGAALPENRIYLAAGAAQAA

SEQ ID NO: 88571 - protein, 484 aa, Cellvibrio sp.
  REGION 1..484: note = tr|A0A5J6PJF9|A0A5J6PJF9_9GAMM Tryptophan 7-halogenase OS=Cellvibrio sp. KY-GH-1 OX=2303332; GN = D0C16_16020 PE=4 SV=1
MAAAKLSQHFSKTDIRITVIESSVIGTVGVGEATIPTLRRFYQSLGMDDMEVMRKTNATVKLGIEFKDWYKPHTSFIHPFGLFGHEANGIRFHHYWLKLQQAGDAAELEKYSLGIAMARANKFTFPAERPSSPLSVFDWALHFDAALFAKLMREHALTKGVTHIDAKITSVNLHPDTGFIDSLTLDDERYIAAELFIDCTGFNGLLIADSLKTPYIDWSQWLLCDRAMAVQSELVGEPAVRTVSIAHGSGWQWKIPLQHRQGNGHVYASNFIDDEQAEATLLQHIDGKVLHAPRKFQFTAGRRAQAWNKNCIALGLAAGFLEPLESTSIALIETGIEKICGSFPYAFFNQEKIDHFNQVTAIEWERIRDFIILHYKLNQRDDSEFWRYCRAMAVPDPLQQKITAYSEQGDLLHYPWEIFHPDSWLAIYSGFNLYPKIYNQNVDRLNADYLKQSLAAMRSSIANAVADLPSHQEFIDQHCKMSMA

SEQ ID NO: 88572 - protein, 507 aa, Sphingomonas sp.
  REGION 1..507: note = tr|A0A520HRX8|A0A520HRX8_SPHSX Tryptophan 7-halogenase OS=Sphingomonas sp. OX=28214 GN=EOP68_10020; PE = 4 SV=1
MDTAITKIVIVGGGTAGWLAACRIAAAAHPAAADPITVTLVESPDVPTIGVGEGTWPTMRATLERIGIGEAEFLLSCDASFKHGSRFRGWANGAPGDVYFHPFTPPVEADPRTLVAAWQAEAAGEPFADVVTPQPHVARQCLAPRQRAMPDFAGALNYGYHLDAGKLAALLQRHATEKLGVRHLRDHVIGSDRADDGTITAVRTRHNGAVAGDLFLDCSGHAALLVGDVPFIDRSDVLFNDRALAVQVPVAPDSPIAAQTDATAHAAGWIWDIGLPTRRGVGCVYSSAHMSDDEALATLAAYLGTPEPIAPRRLRFRSGHRAQFWTGNCLAIGLSAGFLEPLEASAIVTVELSLDALLDDWPTRVTMPLVAERFNTLFRYRWDRIVEFLKLHYVLSRREGRYWRDHRDPASIPPRLAELLALWQHRPPLRTDLPMVDEMFPAASYHYILYGMGASPPATGPLREGALPSLAPIAQRTRSMVAALPPIRAYLDACRAARQPIAMEQFS

SEQ ID NO: 88573 - protein, 355 aa, Sphingomonas sp.
  REGION 1..355: note = tr|A0A520IJD3|A0A520IJD3_SPHSX Tryptophan 7-halogenase (Fragment) OS=Sphingomonas sp. OX=28214; GN = EOP67_49950 PE=4 SV=1
VLSTLFYAFHFDAALYAKFLRDMAEQDGVVRVEGRVVAVERDAGTGFIEAVRLEGDHRIDGELFIDCSGFRSLLLGDALDVPFTSWKHWLPCDRAWAVPSQRQGGLTPYTRATADTAGWRWRIPLQHRVGNGYVYSSANIDDDDARRALLAGLEGEALGEPRQLRFEAGRRDRLWERNCVAIGLSGGFLEPLESTSIHLIQSGITRLMSLFPDLGFGVTEIDEYNRVMLREYEQVRDFIILHYHATERSDSPFWDQCRTMAIPASLSAKLALWSGKARVFREQGELFTPDGWIAVLLGQGIRPASFDPLASALPADESARFLAHVRDMIDKTAAAMPTHEAFIAQNCAARTHQAA

SEQ ID NO: 88574 - protein, 506 aa, Sphingomonas sp.
  REGION 1..506: note = tr|A0A520JNB8|A0A520JNB8_SPHSX Tryptophan 7-halogenase OS=Sphingomonas sp. OX=28214 GN=EOP67_07060; PE = 4 SV=1
MDERARLRIVIVGGGTAGWMTAATLGLTTGTPSAARLADITLVESEEIGTVGVGEATVPHIRFFNQRLGIDEADFVRRTKATFKLGIEFCDWGRIGDSYIHPFGDFGHDIDGLPFHQHWLHATRGKPDETPALAACSLPIVAARAGRFTPPLDDPRSVGSTYSYAYQFDAGLYAAYLRDYAEARGVTRIEGRVEHVERGPSGIAALRLADGQRIEGDLFVDCSGFRALLIEGALKAGHEDWAHWLPCDAAWAVPTANTGPLVPYTRATARDAGWQWRIPLQHRTGNGHVFSTRFTDPERARAVLLDNLEGEVLAEPRMLRFRTGRRHRQWIDNCVAIGLSAGFLEPLESTSIHLVQLAIGKLIELFPNDAVLDPADAAEFNRAMALEYDRVRDFLVLHYCATERDDTPFWRHMRTMDLPPSLAGKIAAFRDRGIVEQYREGMFLPASWLAVYYGQRIMPERIHPLVAALPVADSRARVAAVADACRRTAAGMPSHADYLARIGAAA

SEQ ID NO: 88575 - protein, 508 aa, Sphingomonas sp.
  REGION 1..508: note = tr|A0A520DQQ8|A0A520DQQ8_SPHSX Tryptophan 7-halogenase OS=Sphingomonas sp. OX=28214 GN=EOP65_02100; PE = 4 SV=1
MREDAIRRVVIVGGGTAGWMAAAAMSRVLGEMPGLSIELIESDEIGTVGVGEATIPQIVLFNKMLGLDEAMFMRETRATYKLGIEFVDWVRPGHRYVHPFGTYGLDMKGIEFHHFWLKGQALGDTTPLDAYSLAIVAGMQGRFSHPRPDQPGSPLSKLSYAFQFDAGLYAQLLRRLSEANGVRRIEGRIVGAERDGETGHVSAVSLASGTRVAGDLFIDCSGFRGLLIEGEMQAGFEDWSRWLPCDRAVAVPCAHGGDRQPLTRSTARAAGWQWRIPLQHRIGNGYVYASDHLSDDEAAATLLANLDGAPLGDPRFLRFTAGHRRRAWVGNVVALGLAGGFLEPLESTSIHLVQSAIARLLTYWPTRRFDQVEIDRFNAAHVADYLDIRDFLVLHYKATQRRDTAFWDYCRMLAPPPGLAEKLAVFAANGRVFRENDELFTETSWLSVMVGQGVPAGGYHPAADLLSDAETLSRLDHIRRVVADTAGLLPRQDDLLAQYGCTLTGVAA

SEQ ID NO: 88576 - protein, 507 aa, Sphingomonas sp.
  REGION 1..507: note = tr|A0A525HLR6|A0A525HLR6_SPHSX Tryptophan 7-halogenase OS=Sphingomonas sp. OX=28214 GN=E7773_03540; PE = 4 SV=1
MTQPPRPLKTITIVGGGTAGWMTAALLSHVFKSYRIRLIESDEIGIIGVGEATIPAIRDYLALAGIDQVEMIRATQATFKLGIDFVGWRDGTDRYFHGFGRIGQDFMWLHTHQLWLRARADGEVVEHFDHYALNCLAARQNKFAFPDPRQPQSPLSGLDYAFQFDASLFACFLRTRSEGQGVERIEGRIVDVALDGERGHVSHVVMADGRTVDGDLFVDCSGMRALLIGDALGVEYEDWNHWLLNDRALAVPCERVSPLTPYTRVTAHPHGWQWRIPLQHRTGNGHVYSSNHLSDDEAAATLLANLDARPLADPRPVRFRPGKRARAWEKNVVAIGLSAGFLEPLESTSIHLIQTGIVKLLGLFPHSAFAAPDVAEYNRQHDFEFTDVRDFIVAHYKVTEREDTPYWAYLKHMAVPDSLTERLELFASSGRFYKRAAQELFRVESWTQVLIGQGLGRGHDPLVDTIPGGTIAEFLGDIAEVTADVAAAMPDHAAFIDRHCKAPPLAA

SEQ ID NO: 88577 - protein, 503 aa, Sphingomonas sp.
  REGION 1..503: note = tr|A0A520I180|A0A520I180_SPHSX Tryptophan 7-halogenase OS=Sphingomonas sp. OX=28214 GN=EOP68_00620; PE = 4 SV=1
MNLDKRVRRIVVAGGGTAGWMAAAAIARTMGRTVEVTLIESEAIGTIGVGESTIPPLVTYNRLLGINEAEFMRATQATFKLGILFDGWRDGTDRYFHSFGTTGKDHWSAGFQHYWLHGLTKGHTRPYDDYCMELVAAMRGKFAHLPDEGMNYAYQLDSGLYAKFLRAMAEKDGTTRVEGRIAHVELDPATGDIAALRLDGDRRVEGDLFLDCTGFRALLIEGALHAGFDDWTHWLPCDAAIAVQTENVRAPVPYTRAMAHDAGWQWRIPLQHRTGNGIVYCSRYLSKDDAQARLLGNVEGRVLTEPNVLRFVTGARRRQWHRNCVAIGLSGGFMEPLESTSIHLIQRAILRLIRMMPLRGVSPADVAEFNDQQHQDMLQIRDFLILHYKATSRDDSPFWRYVREMPVPDSLQQKIDLFRETARVFRRNEELFAENSWVQVMMGQGIAPQSHHPIAEKLSDDELTRLLRLLRDQVERTVSGLPDHAAYVAQYCGATAPLSAAAA

SEQ ID NO: 88578 - protein, 199 aa, Sphingomonas sp.
  REGION 1..199: note = tr|A0A520HNY7|A0A520HNY7_SPHSX Tryptophan halogenase (Fragment) OS=Sphingomonas sp. OX=28214 GN=EOP67_72050; PE = 4 SV=1
MTTPPIHRVVIAGGGTAGWMAAAAIARTMGRTVAVTLVESEAIGTVGVGESTIPPIVTFNRLLGINEAEFMRETQATFKLGILFDNWKDRGDTYFHSFGTTGKDHWSAGFQHFWLHGLTRGHHQPFDDYCLELRAALQGKFAHLPDGRMNYAYQLDSGLYARFLRKMAEADGTTRIEGRIAQVELNGESGDIAALTLDS

SEQ ID NO: 88579 - protein, 79 aa, Sphingomonas sp.
  REGION 1..79: note = tr|A0A520HIW4|A0A520HIW4_SPHSX Tryptophan halogenase (Fragment) OS=Sphingomonas sp. OX=28214 GN=EOP67_74960; PE = 4 SV=1
EFRERGIVASYREGMFLPASWLAVYYGQRIMPDRVNPLIADIPMATSGDHVARVAAACASAAKAMPLHEDYIARIKAAA

SEQ ID NO: 88580 - protein, 530 aa, unidentified
  source 1..530: note = Unknown
  REGION 1..530: note = tr|S5UC52|S5UC52_9BACT Tryptophan halogenase; OS = uncultured bacterium esnapd7 OX=1366614 PE=4 SV=1
MNDNRIKKILVLGGGTAGWMAASYLGRALGSSVQITVLEAPAIPKIGVGEATIPNLQRVFFDYLGLSEEDWMPECNASFKMGIRFINWRTPGAGTAQPRPYGTHGDQFDHLFGLLPNHDDLPLSHYWTYKKLTGQTDQPFDRECYAQPAIFDRKLAPRHLDGRRWASYAWHFDADLVADFLRKFATSKQGAVHIEDKFVTAETDQRGHITAVNTEAGRRLEADLFIDCSGFRSLLMNQVMKEPFLDMSDHLLNDRAVATRIQHDDEEHGVEPYTSSIAMSSGWAWKIPMLGRFGTGYVYSSRFASQDEATEEFCRMWNISPDTHPMNHVRFRVGRNRRAWVKNCVGIGLSSCFLEPLESTGIYFTYAALYQLVKHFPDKRFDPAVTKRFNGEIETMFDDTRDFIQGHFSFAPRDDTPFWRACKELELAPEFVDKVARYKAGLGVDLPVTDESNYYGNFEAEFRNFWSNANYYCVFAGLGVTPDHHSTLLDHRPNAVESAEAVFAEVKQRRDELLESLPTMHAYLRHLYGK

SEQ ID NO: 88581 - protein, 326 aa, Pseudomonas fluorescens
  REGION 1..326: note = tr|A0A172WBZ5|A0A172WBZ5_PSEF5 Tryptophan halogenase (Fragment) OS=Pseudomonas fluorescens (strain ATCC BAA-477 / NRRL B-23932 / Pf-5) OX=220664 GN=prnA PE=4 SV=1
DLFIDCSGMRGLLINQALKEPFIDMSDYLLCDSAVASAVPNDDAREGVEPYTSAIAMNSGWTWKIPMLGRFGSGYVFSSKSTSRDQATADFLKLWGLSDNQQLNQIKFRVGRNKRAGVNNCVSIGLSSCFLEPLESTGIYFIYAALYQLVKHFPDTSFDPRLRDAFNAEIVYMFDDCRDFVQAHYFTTSREDTPFWLANRHELRLSDAIQEKVERYKAGLPLTTTSFDDSTYYETFDYEFKNFWLNGNYYCIFAGLGMLPDWSLPLLQHRPESIQKAEAMFASIRREAERLRTSLPTNYDYLRSLRDGAQLSRNQHGPTPAAQERL

SEQ ID NO: 88582 - protein, 521 aa, Xanthomonas euvesicatoria; identical to SEQ ID NO: 84140
  REGION 1..521: note = tr|A0A4U0TDD1|A0A4U0TDD1_XANEU Tryptophan halogenase; OS = Xanthomonas euvesicatoria pv. citrumelonis OX=189396; GN = TP41_07545 PE=4 SV=1

SEQ ID NO: 88583 - protein, 508 aa, Rheinheimera sp.
  REGION 1..508: note = tr|A0A0M0M3B6|A0A0M0M3B6_9GAMM Tryptophan halogenase; OS = Rheinheimera sp. KL1 OX=1635005 GN=WH43_13790 PE=4 SV=1
MSKAVKKLVIVGGGTAGWLSAAIIAAQHRSNTQDGLQVVLVESSDIPTIGVGEGTWPTMKNTLQQIGIKEADLFQRCHAVFKQGGRFVNWVHGNEDFYYHPFTVPMGYGRIDLAPYVQDISQFAVESNFQHQICEAGLAPRGFAEGEYQGQCNYAYHLDAGAFADLLKEHCKNNLGVQHRIGTVERCQLSQDGQIQALYLTDGTAPLEADLFIDCTGFSSLLLGKALGVPFEPVEHLLFNDSALAMQVPYDTPDAAIPCHTIATAQNAGWIWDIGLTHRRGVGHVYAGKYLSDDEAEFNLRRYIGPAAQGISARKISYQTGHRSKFWQHNCVAIGMSAGFVEPLEATAIMLVEISARFVADNLPADLATMPLVATRFNQQMLYRWQRILDFLKLHYLLTKRPEPYWQDHLKPESIPQSLQDDLKIWQHRGPQIQDFHGALELFPAASYQYVLYGMGFKPDFSRQSYLYQQQSQAEQIIRRNQQLTAQLLQTLPSHRDYITGWLSSNRG

SEQ ID NO: 88584 - protein, 520 aa, Sphingomonas sp.
  REGION 1..520: note = tr|A0A520JJY5|A0A520JJY5_SPHSX Tryptophan 7-halogenase OS=Sphingomonas sp. OX=28214 GN=EOP67_13515; PE = 4 SV=1
MPAKPSDGARARASEITSICIVGGGTAGWMTAAALANKLKGLPVTITLIESAEIGTVGVGEATLPHIRAFNVALGIDEAELMRATEATFKLGIEFCDWGRIGDRYIHPFGDFGPAIDGVPFYHYWLRLQAAGATGRLADYSFPIVAAEHSRFQHPSPDLDRVESTFGYAYQFDASLYAAFLRRYAEKHGVERHEGKVVDTVLDGQTGFIDTITLADGRAIKADLFVDCSGFRGLLIEGALASGYDDWSNWLPCNRAVAVPTQSRGPLGPFTRATARTAGWQWRIPLQHRVGNGHVYCNSFISDDDAERQLVENLDAPMQATPRRLSFTTGRRRDFWKRNVVAIGLAGGFLEPLESTSIHLIQDGITELLALFPDRGFDAPSIAEYNRRMGLHYERVRDFLLLHYVATQRDDSPFWRHFRALKLPDSLQQKIDAWTTRGYVIPYEFGLFLPPSWVAVMMGQNLMPTGHDPRAHAIGDAALTARAAAIRDSVAGAVRATPDHADYIRRMGGAGSLSRAATAA

SEQ ID NO: 88585 - protein, 262 aa, Sphingomonas sp.
  REGION 1..262: note = tr|A0A520JGG2|A0A520JGG2_SPHSX Tryptophan 7-halogenase (Fragment) OS=Sphingomonas sp. OX=28214; GN = EOP67_20035 PE=4 SV=1
RPDDPIASYTISTAQKNGWIWDIGLDRRRGIGHVYSSDHGDDETAERVLRDYLGAAGEKADVRHFKFDAGYREVNWYKNCVAVGLSSGFFEPLEATGIAFAEVSAGMIANLFPWGGDYETSARQFNANMLRRYERALDFIKLHYCISERRDTAFWRDNVADASVPDSLLELLDRWRFRPPNELDIDGQVDIFTEASWQYVLYGMGWKTDLSAKAGALRYHEDARRAFAEVQRQARYAIANLPSNRDLVAYAQTHSFGARAAA

SEQ ID NO: 88586 - protein, 149 aa, Sphingomonas sp.
  REGION 1..149: note = tr|A0A520J3I5|A0A520J3I5_SPHSX Tryptophan halogenase (Fragment) OS=Sphingomonas sp. OX=28214 GN=EOP67_38520; PE = 4 SV=1
MTAASLAKQFVDQPVTVTLIESDEIGTVGVGEATVPHIRFFNARLGIDEADFMRRTQATFKLGIEFRDWARLGDSYIHPFGRFGEDLDGIAFHHHWARLRRNERGEDPDRYSLAAMAARQNRFAHPSGDPDSVSGSYSYAFQFDAGLYA

SEQ ID NO: 88587 - protein, 513 aa, Sphingomonas sp.
  REGION 1..513: note = tr|A0A520DPK7|A0A520DPK7_SPHSX Tryptophan 7-halogenase OS=Sphingomonas sp. OX=28214 GN=EOP65_03210; PE = 4 SV=1
MHQIRNIVIVGGGTAGWLTAGVIAARHQGQRPHGFTVTLVESPNVPIIGVGEGTWPTLRSTLKRMGVSETDFFRECDASFKQGARFNRWTTGAVDDGYYHPLMLPQQFGSVNLAPHWLAGDGDGSFCDTVTPQGRICDEGLAPKTMATPEYEGQANYAYHLDAGKFSHFLERHCCETLGVRHVRADVTEVRKDESGDIVGLDTEQGIGIEGDLFVDCTGFAALLIGKAMGVPFRSCADTLFCDTALAIQVPYAQADDPIASHTISTAQSAGWIWDIGLPTRRGVGHVFSSSHIDVDAAERELRAYIGPAGADLPVRRLAIRAGHRTRFWERNCVAVGLAAGFLEPLEASAIVLIELSAKMIAEQLPPCREVMDVVARRFNDTTHYRWGRIIDFLKLHYALTQRTDTDFWRDNVRPETIPDRLRGLMELWQHQSPWLHDEFDRAEEVFPSASYQYVLYGMGARSTVLPGTIEADAELARRARRENAVQTQRMVASLPRHRDLIERIVRHGLQPI

SEQ ID NO: 88588 - protein, 524 aa, Sphingobium sp.
  REGION 1..524: note = tr|A0A521PZC2|A0A521PZC2_9SPHN Tryptophan 7-halogenase OS=Sphingobium sp. OX=1912891 GN=EPO45_12565; PE = 4 SV=1
MRDEKNTLNPNAVRKVVIAGGGTAGWMTAAALSVDLADAGVEIELIESPEIGAIGVGEATVPFIHLFNKMLGIDQADFMKQCNATFKLGIEFINWGNLNESYFHSFAHFGPNFKDVSFYHMYLRQAELMAAKGVETVVEDSNVGAVAARNNRFRHPQTVEKSGLPSHFYAFHFDATLYASYLRDFATQRGVRHVSGRIIDVEQNPENGFIRSVRLQDGREFEADLFVDCTGLYGLLIEKVLKSPYEEWSHWLPCDRAVAVPSARVEAPVPYTKSTAEKSGWRWRIPLQHRTGNGMVYSGAFAESDDAVEAKLLDVLDGKALASPRRLRFTPGRRREVWVKNCVSIGLASGFLEPLESTNIHLVQSSILKLLSYFPDKNFAQAEIDAFNADMQKEIEQIRDFIILHYKVTGREDTPFWKYCKYMAVPDTLQRRIDMFKPHGRLFVKPDEFFNYNSWLSVMHGQGLRANGLVPQLDRLTDQEVLAYFEAFNGRVRSVVGAMPLHGDYLHAFAGASEQTPVPAFGEL

SEQ ID NO: 88589 - protein, 183 aa, Sphingomonas sp.
  REGION 1..183: note = tr|A0A520IZD1|A0A520IZD1_SPHSX Tryptophan halogenase (Fragment) OS=Sphingomonas sp. OX=28214 GN=EOP67_40270; PE = 4 SV=1
RRKQWIGNVVALGLASGFTEPLESTSIHMVQTGISKLLALFPDQGFSPVEIDTYNRLAETQFDQVRDFLVLHYHATRRTDSPFWREAGARAIPDSLAEKIALWRRRGRLFRWEDDLFAEASWVAVLLGQGIVPEGWDRLADTVDPRDVDARFDRLRVMFADAAARMPRHEDYLARTSPARVRA

SEQ ID NO: 88590 - protein, 224 aa, Sphingomonas sp.
  REGION 1..224: note = tr|A0A520HX78|A0A520HX78_SPHSX Tryptophan 7-halogenase (Fragment) OS=Sphingomonas sp. OX=28214; GN = EOP67_67495 PE=4 SV=1
QHRVGNGFVYASRHLSDDEAVASLRAGLEGEPLAEPNLIRFRTGHREQFWRGNCVALGLAAGFMEPLESTSITLIQTGIEKLLALFPDRDFDPALAGEYNRSTTLEYARIRDFLLLHYWANDRRGEPMWDQCRDTALPEMLAHKVRLFEAKGHLVRYEWESFHDPSWLSMYAGFDIAARTHDPAADYFSVPDLQAALARMRESIGKAVALAEPHDSFLAGYGVG

SEQ ID NO: 88591 - protein, 280 aa, Sphingomonas sp.
  REGION 1..280: note = tr|A0A520JBK5|A0A520JBK5_SPHSX Tryptophan 7-halogenase (Fragment) OS=Sphingomonas sp. OX=28214; GN = EOP67_29050 PE=4 SV=1
MERVRKIVILGGGTAGWMTAAALSATYGATASISVLESDAIGTVGVGEATIPTIHWFNELIGLDEAAFVRETNASFKLGIEFVDWTRPGNRYFHPFGRYGVDLGTVPFHQRWLRARADGLDRPLSAYSLATQLAEAGRFAKPTGDPRSILSTLGYAYHFDAGLYARHLRTLAEARGVTRHEGLLARIDRDPLNGFVTALATDRGETLKGELFVDCSGFRALLIGEAMGAPFEDWSQWLPCDRAVAVPCARVAETTPFTRSTRRDAGWQWRIPLQHRTGNG

SEQ ID NO: 88592 - protein, 162 aa, Sphingomonas sp.
  REGION 1..162: note = tr|A0A520I7U1|A0A520I7U1_SPHSX Tryptophan 7-halogenase (Fragment) OS=Sphingomonas sp. OX=28214; GN = EOP67_59670 PE=4 SV=1
MRDGASRLMRGDRLERIVVAGGGITAWCAAAALKRRAPFLDVTILACAPSPDALADRIACTLPSLLGFQEDLGISGADGIVRTGSGYRLGTLFAGWANGLPDYVHAYGRYGASFGPTAFHLHWVRSAQDGTAAPFDSHSPAAALARAGRFVPPTANSPFADH

SEQ ID NO: 88593 - protein, 426 aa, Sphingomonas sp.
  REGION 1..426: note = tr|A0A520IE37|A0A520IE37_SPHSX Tryptophan 7-halogenase (Fragment) OS=Sphingomonas sp. OX=28214; GN = EOP67_53200 PE=4 SV=1
MTTRRTILIVGGGTAGWLTAAYLAKALGPSVGITLLESPDIGIIGVGEGTFPTIRDTLRFLGIDEAAFVRETSATFKQGVRFRDWLRPPGGNGDGHAYFHPFEPPFYAEGTSLVPYWLLQDDASRPPFAEAVTIQNRVAEAQRGPKQSSEGDFEGPLNYAYHFDAIGLSRVLADRARQLGVTHLPGRVGEVAKAENGWIDHLDTDVGRLRADLYIDCTGFRAELIGRAMRSPFRSVADQLFTDRAITCKLPYERPDAPIASYTVATAHEAGWIWDIGLAGARGIGCVYASRYIDDDRAAAILAEYVGAGAGEVSTRRLSFEAGYREQPWVGNCVAVGLSGGFLEPLESTGVVLIEAAVGMIAELFPHHGPADLPARRFNELMTARYATIVTFLKLHYCLSQRPEPFWRDNADPSTIPERLRDLLDQ

SEQ ID NO: 88594 - protein, 455 aa, Sphingomonas sp.
  REGION 1..455: note = tr|A0A520IRW2|A0A520IRW2_SPHSX Tryptophan 7-halogenase (Fragment) OS=Sphingomonas sp. OX=28214; GN = EOP67_44985 PE=4 SV=1
MNHTSEPPRTRVVVAGGGTAGWIAAAAIVRQLGPLVDVTLVESDEIGTVGVGESTIPTARSFHAFLGIDEAAFMRATQATFKLGIAFENWRQVGDRYFHPFGSVGRSVAIADFQHFWLEARARGFAGAYGDYSLEQQAAGAGLFGHDEQHSLAYAYHLDATAYARFLRTLAEPWGVRRVEGRIERVERDGEGGDIAALVLASGERIAGDLFIDCTGFRALLTEGALGTGFEDWSEWLSTDRALAVQTETVAPPVPYTRAIAHDAGWRWQIPLQKRTGNGLVYSSAHMSDDEAHATLIGALDGRPLFEPRPLRFRSGIRRQAWNRNCIALGLAAGFIEPLESTSIHLIMNAVIRLIQLFPFRGDDHVALAARFNAQSRHEWEHVRDFIILHYHVTQRDDSPFWRDCARMTIPDSLAERIALFTKTAGAWQGQDDLFRIDSWVSVMLGQGVEPRAHH

SEQ ID NO: 88595 - protein, 258 aa, Sphingomonas sp.
  REGION 1..258: note = tr|A0A520JJ50|A0A520JJ50_SPHSX Tryptophan 7-halogenase (Fragment) OS=Sphingomonas sp. OX=28214; GN = EOP67_14955 PE=4 SV=1
AWAVPSERRGPLTPYTRATADTAGWRWRIPLQHRVGNGYVYSSAHIDDDDARRALLAGLEGEALAEPRQLRFEAGRRDRLWDRNCVAIGLSGGFLEPLESTSIHLIQSGITRLMSLFPDLGFGATEIDEYNRVMLREYEQVRDFIILHYHATKRSDSRFWDQCRTMAIPASLSAKLALWSGKARVFREQGELFTPDGWIAVLLGQGIRPESIDPLAATLPAGESARFMAHVRDMIDKTATAMPTHEDFIARHCAAPPR

SEQ ID NO: 88596 - protein, 281 aa, Sphingomonas sp.
  REGION 1..281: note = tr|A0A520D4D0|A0A520D4D0_SPHSX Tryptophan 7-halogenase (Fragment) OS=Sphingomonas sp. OX=28214; GN = EOP65_16045 PE=4 SV=1
RSVLLGDALGAGFEDWSAWLPNDRAVAVPSAVTGPPPPFTRATARGAGWQWRIPLQHRVGNGYVFASDHVSEDEATATLLANLEGEALAEPRTLRFRTGRRSALWVRNCVALGLSGGFLEPLESTSIHLIQSGIARLLEMLPTRAFEPADIRRYNRLMATEFDSIRDFVILHFHATGRRDTAYWRRLAEMPIPETLAERIAIYRRTGRVFRETDELFTKTSWLAVMDGQGLTASGYDPLGAALPLAEARAALDRIGKVTAAAAAHMPPHRDFIARHCPAPR

SEQ ID NO: 88597 - protein, 515 aa, Sphingomonas sp.
  REGION 1..515: note = tr|A0A520DTH0|A0A520DTH0_SPHSX Tryptophan 7-halogenase OS=Sphingomonas sp. OX=28214 GN=EOP65_00075; PE = 4 SV=1
MADAAPADHPNPPLKTITIVGGGTAGWMTAALLARLFLGAYTIRLIESEEIGTIGVGEATIPALRTYNGLAGIDEFEMVRATQATFKLGIEFRNWRTPGSSYIHGFGKIGQDLYWLHCHQFWLKEAARGRAKHLDHYALNALAARMNRFAMPDPSNPHSPLADLDYAYHFDAALFARFLRGRAEAAGVERIEGRIVAANRRSHDGFLDHVVLADGRTIDGDLFIDCSGMRGLLIGDAMGVGYEDWDRWLLCDRALAVPSARSGPLTPYTRSTAHGSGWQWRIPLQHRTGNGHVYASRFVSDDAAAATLLAHLDTPALADPRPVRFRPGKRHRAWDKNVVALGLAGGFLEPLESTSIHLIQTGILRLIALFPGRGFNPADIAEYNRQTDFEYRDVRDFIIAHYKVTERDDTPFWRHVRHMDVPDSLTERLDLFAASARFFMHGKAELFREESWVQVLLGQGMRAQYDPMVDMIPDQQTTAFLKDIEAVIGDVAATLPTHEAFIARHCRAPAITVGV

SEQ ID NO: 88598 - protein, 497 aa, Sphingomonas sp.
  REGION 1..497: note = tr|A0A5E8ACD1|A0A5E8ACD1_9SPHN Tryptophan halogenase; OS = Sphingomonas sp. EC-SD391 OX=2038398; GN = SPHINGO391_510064 PE=4 SV=1
MTEQRIKKVVIAGGGTAGWLAAAALSRQLGQLLDITLVESEEIGTIGVGEATIPTMRSFHAILGLDEREFMRATQATFKLGISFENWARDGDRYIHSFGDLGKSTWMGDFHHFWLAAKAAGDPSEIGDYCLELQAAKAERFALPSEGEINYAYHLDAGLYARFLRARSEANGLKRIEGRIASVDRDGETGFIRALVLDSGERVEGDLFIDCTGFRGLLIEGTYAAGYEDWSHWLPTNSALAVQSAATGPAHPYTRAIAHDAGWRWRIPLQHRVGNGLVYASEHLSDDEAHARLLGAIDGAPLTEPRLIRFRTGRRRQVWMGNCVALSLASGFVEPLEATSIHLVMTGVTRLMQAFPFGGIAPAAVTRFNEQAQAELERVRDFIILHYHLNERPEPFWAARRDMPIPDTLVERIALFAEAAQAYQGGDDLFRVASWVQVMLGQRLMPRDHHRLGTIMGGPQLTGVLAKMRSDITDVVAAMPTHQQFLDRHLLRPPRAA

SEQ ID NO: 88599 - protein, 516 aa, Sphingomonas sp.
  REGION 1..516: note = tr|A0A520JJX8|A0A520JJX8_SPHSX Tryptophan 7-halogenase OS=Sphingomonas sp. OX=28214 GN=EOP67_13545; PE = 4 SV=1
MTKRILIVGGGTAGWLTAGYLAKRLGADLPGGVAITLVESRDIGILGVGEGTFPTIRRTLATIGIDEADLVRRCGATFKQGAKFVHWRHAPGQGATDHYSHPFQVADSSDGLDLLPYWLLGLGGTENWDEVSNPQKKASDRHRAPKLPTNPDYVGPLNYAFHFDAVALAALLREQGVKNGVRHLTDTVSEVLLDADGAIGGVRTERNGILDADLYIDCTGFRAELIGKAMKIPFRSCRDVLFCNRAIAAQLPYARPDEPIASYTISTAQENGWIWDIGLDRRRGIGHVYSSDHGDDEAAERVLRGYLGAAGEKADVRHFKFDAGYREVNWYKNCVAVGLSSGFFEPLEATGIAFAEVSAGMIANLFPWGGDYETSARQFNANMLRRYERALDFIKLHYCISERRDTAFWRDNVADASVPDSLLEMLDRWRFRPPNELDIDGQIDIFTEASWQYVLYGMGWKTDLTAKAGALRYGSDARRAFAEVQRQAAYAIANLPSNRDLVDYAQTHSFGARAAA

SEQ ID NO: 88600 - protein, 495 aa, Sphingomonas sp.
  REGION 1..495: note = tr|A0A520DP07|A0A520DP07_SPHSX Tryptophan 7-halogenase OS=Sphingomonas sp. OX=28214 GN=EOP65_03815; PE = 4 SV=1
MKPRRIVIAGGGTAGWMAAAAIARVMGRAAAVTLVESDAIGTVGVGESTIPPLITFNRLLGINEADFMRATQATFKLGIAFDGWKQAGDSYFHSFGLTGTDHWAAGFQHYWLDGQTRGHGQPYDDYCLELIAAREGKFAHLPDERMNYAYQLDSGLYGRFLRRMAEADGARRVEGRIAQVQLDGESGDIAALLLDSGMRIEGDLFLDCTGFRALLIEQALHTGFDDWTHYLPCDAAIAVQTESVAPAVPFTRAMAHDAGWQWRIPLQHRVGNGIVYCSRYLDHDAALARLLGNVEGRVLTEPNRIRFVTGARRRQWHRNCIALGLSGGFMEPLESTSIHLIQRAILRLIRMMPAGDVSPRDIAEFNDQQHTDMLQIRDFLILHYKVTERRDSPFWRQCATMAIPDSLAQKIELFRETGRVFRKNEELFAENSWVQVMLGQGIVPRSHHPIAAKLGDDDMARLLSTLRQNVATTVRGLPPHAAYVAQYCGVAPDAA

SEQ ID NO: 88601 - protein, 88 aa, Sphingomonas sp.
  REGION 1..88: note = tr|A0A520JED1|A0A520JED1_SPHSX Tryptophan halogenase (Fragment) OS=Sphingomonas sp. OX=28214 GN=EOP67_23850; PE = 4 SV=1
MNDTSEPPRTRVVVAGGGTAGWIAAAAIVRQLGSLVDVTLVESDEIGTVGVGESTIPTARSFHAFLGIDEAAFMRATQATFKLGIAFE

SEQ ID NO: 88602 - protein, 150 aa, Sphingomonas sp.
  REGION 1..150: note = tr|A0A520JM00|A0A520JM00_SPHSX Tryptophan halogenase (Fragment) OS=Sphingomonas sp. OX=28214 GN=EOP67_09665; PE = 4 SV=1
RLMSLFPDTAFSAVEIAEYNRQMLREYDQVRDFIILHYHATTRTDSAFWRHCQSMTLPPSLQAKLDLWAGRARIFREQGELFTPDSWIAVLLGQGIWPASVDPLTAGLPVAESAMFLDHVREMVAKTAEAMPRHADFIARHCAAPLRTAA

SEQ ID NO: 88603 - protein, 52 aa, Sphingomonas sp.
  REGION 1..52: note = tr|A0A520ICF5|A0A520ICF5_SPHSX Tryptophan halogenase (Fragment) OS=Sphingomonas sp. OX=28214 GN=EOP67_54630; PE = 4 SV=1
MTAAAMARLVESGVAVTLVESEEIGTVGVGEATIPSLLDYNRMLGIDEDDFV

SEQ ID NO: 88604 - protein, 298 aa, Sphingomonas sp.
  REGION 1..298: note = tr|A0A520I6F7|A0A520I6F7_SPHSX Tryptophan 7-halogenase (Fragment) OS=Sphingomonas sp. OX=28214; GN = EOP67_61005 PE=4 SV=1
RLADGRRIAGDLFIDCSGFRALLIDGALKAGYEDWSHWLPCDTAWAVPTANTGPLTPYTRATARQAGWQWRIPLQHRTGNGHVFSSRFTDPERARDILMSNLEGEPLAEARMLRFRTGRRHRQWIGNCVAIGLSAGFLEPLESTSIHLIQLAIGKLIELFPADGMPDPVDTAEFNRAMALEYDRVRDFLVLHYCGTERDDTPFWRHMRTMPLPPSLTEKITEFRDRGVVAQYREGMFLPASWLAVYYGQRIVPNRVHPLIGDTPAANRARYSSCAGIVAAASRQAAATASTQALDAAA

SEQ ID NO: 88605 - protein, 502 aa, Sphingomonas sp.
  REGION 1..502: note = tr|A0A520J7I2|A0A520J7I2_SPHSX Tryptophan 7-halogenase (Fragment) OS=Sphingomonas sp. OX=28214; GN = EOP67_36475 PE=4 SV=1
LTAGYLAKRLGADLPGGVAITLVESHDIGVLGVGEGTFPTIRRTLATIGIDEADLVRRCGATFKQGAKFVNWRNAPGEGATDHYSHPFQVADASGGLELLPYWLLGEGGTENWDEVSNPQKKAADARRAPKLPSHEDYVGPLNYAFHFDAIALAGLLREQGIANGVRHLIDTVTQVSLDADGAIDSVSTERNGLLTADLYVDCTGFRAELIGKAMNIPFRSCRDVLFCDRAVAAQLPYTGERDPIASYTISTAQQAGWTWDIGLDRRRGIGHVYSSDHTDDETAERVLRGYLGAAGADAEVRRFKFDAGYRETNWHKNCVAVGLSSGFFEPLEATGIAFAEVSAGMIANLFPWGGDYETSARQFNLNLRRRYERALDFIKLHYCISERRDTEFWRDNVAAASIPDSLHEMLDRWRYRWPNELDIDAQIDIFTEPSWQYVLYGMGWKTDLSAKAGALRYYDDARRAFAEVRRQADYAIANLPSHRDLVDYARTHRFGQGRAAA

SEQ ID NO: 88606 - protein, 222 aa, Sphingomonas sp.
  REGION 1..222: note = tr|A0A520DHK9|A0A520DHK9_SPHSX Tryptophan halogenase (Fragment) OS=Sphingomonas sp. OX=28214 GN=EOP65_07715; PE = 4 SV=1
WQWRIPLQHRTGNGHVYASAFTDDDTAERVLLANLDATPTAPPRRLSFTAGRRRQSWAGNVVALGLAGGFLEPLESTSIHLIQEGISKLFALFPDARFSPVERDEYNRLMGNHYTAVRDFIILHYAATRRDDTPFWRHVRTMDLPETLARKIALFREKGRIFRYDDELFTVPSWVAVLLGQGIMPTGYDPIVDALDADRVAGALRQMRRQNAALAQQLPLAG

SEQ ID NO: 88607 - protein, 106 aa, Sphingomonas sp.
  REGION 1..106: note = tr|A0A520IZU5|A0A520IZU5_SPHSX Tryptophan halogenase (Fragment) OS=Sphingomonas sp. OX=28214 GN=EOP67_40005; PE = 4 SV=1
TQGHDAPLWQHTRAMAVPATLLDKMAHYRRTGRLMLEPEELFREASWLAVLNGQGVEAHGHVPLADTLDGANNRAQLEQIETVIARAVPTLPLHDAAIRALTGAAA

SEQ ID NO: 88608 - protein, 422 aa, Sphingomonas sp.
  REGION 1..422: note = tr|A0A520JNN0|A0A520JNN0_SPHSX Tryptophan 7-halogenase (Fragment) OS=Sphingomonas sp. OX=28214; GN = EOP67_06620 PE=4 SV=1
FVDWFKPGHRYMHAFGDVGRDVGLLPFHQYWLRARSLGLAGKLGAYSLNTHAALAERMQRGPARTARTLPSMPYAYHFDAGLYARYLRRYSETRGVNRIEGKIVRVTRDGESGDVSGLVLENGTTVAADLYVDCTGFRGLLIEEALGTGYEDWTHWLPCDRAIAVPSARSEAFTPYTRSTAHTAGWQWRIPLQHRTGNGVVFSSAHMSEDEATATLLAGLDTPAMADPRTIAFRTGRRKRMWNRNVVALGLAAGFMEPLESTSIHLIQSAISRLLKLLPGRVIAEADRTEFNRQSDFEYERIRDFIILHYKATARDDTPFWRECRDMAVPDTLAAKIDLWRGNGHIVREHEELFTEVGWLQVLAGQGIMPTGHHPLADAISTSDLGEFMDTIDKLNAREAGQMQDHAAFVAQHCASPAGLGA

SEQ ID NO: 88609 - protein, 499 aa, Sphingomonas sp.
  REGION 1..499: note = tr|A0A5E7YG57|A0A5E7YG57_9SPHN Tryptophan halogenase; OS = Sphingomonas sp. EC-SD391 OX=2038398; GN = SPHINGO391_370003 PE=4 SV=1
MTEHPIRRVVIAGGGTAGWMAAAAIARTMGSTIALTLVESDAIGTVGVGESTIPPMITFNRLLGINEAEFMRETQATFKLGILFDDWKDRGESYFHSFGITGKDHWSAGFQHFWLHSLTKGHDQPYDDYCLELRAALQGKFAHLPDDRMNYAYQLDSTRYAQFLRKMAEADGTRRVEGKIAQVELNGESGDIAALVLDSGARIEGDLFLDCTGFRALLIEGALHAGFDDWTHYLPCDSAIAIQTESVRPALPYTRAMAHDAGWQWRIPLQHRTGNGLVYCSRYLDRDAALDRLLGNIEGKTLTEPNMIRFVTGARRQQWHRNCIAIGLSGGFMEPLESTSIHLIQRAVLRLLRLFPSGAVSPRDVAEFNDQQHTDMLQIRDFLILHYKATNRRDSAFWRQCAGMPIPDSLDQKIELFRETGRVFRKNEELFAENSWVQVMLGQGIVPQSYHPIATKLRDEELARLLGGLRDGTNATVAGLPEHAAYVARYCATTRPVAA

SEQ ID NO: 88610 - protein, 516 aa, Sphingomonas sp.
  REGION 1..516: note = tr|A0A5E7Y556|A0A5E7Y556_9SPHN Tryptophan halogenase; OS = Sphingomonas sp. EC-SD391 OX=2038398; GN = SPHINGO391_350221 PE=4 SV=1
MTKRILIVGGGTAGWLTAGYLAKRLGADLPAGVAITLVESRDIGILGVGEGTFPTIRRTLATIGIDEADLIRRCGATFKQGAKFVHWRHAPGQGPTDHYSHPFQVADSSDGLDLLPYWLLGHGGTENWDEVSNPQKKAADRHRAPKLASNPDYVGPLNYAFHFDAVALAGLLREQAVKNGVRHLTDTVNEVLLDADGAIGGVRTERNGMLDADLYIDCTGFRAELIGKAMRIPFSSCRDVLFCNRAIAAQLPYARPDEPIASYTISTAQEAGWIWDIGLDRRRGIGHVYSSDHSDDEAAERVLRGYLGAAGEKADVRHFKFEAGYREVNWYKNCVAVGLSSGFFEPLEATGIAFAEVSAGMIANLFPWGGDYETSARQFNANMLRRYERALDFIKLHYCISERRDTAFWRDNVADASVPDSLLEMLDRWRFRPPNELDIDGQIDIFTEASWQYVLYGMGWKTDLSAKAGVLRYGDEARRAFAEVQRQARYAIANLPSNRDLVAYAQSHSFGGRAAA

SEQ ID NO: 88611 - protein, 515 aa, Sphingomonas sp.
  REGION 1..515: note = tr|A0A520JNK7|A0A520JNK7_SPHSX Tryptophan 7-halogenase OS=Sphingomonas sp. OX=28214 GN=EOP67_06730; PE = 4 SV=1
MPLTAGADVRVVVVGGGTAGWMTTAALARLLPGHASVHLVESETIGVVGVGEATLPHIRAFNERLGIDEADFMARTRATFKLGIEFRDWGRIGDSYIHPFGTFGRGNGAVDLHHYWTRLLREGKSLPSLESLSYACAMARGGKFDRPATDGMLAGTYGYAYQFDALLFAPYLRQIAEQSGARRTEGTVASVDRDGESGDIKAIVLDSGERIAGDLFVDCSGFRSLLLGSALEEPFVDWSHWLPTDRAVAMPCCTRTAVTPYTSAIAMPSGWRWRIPLQHRTGNGYVYASAFVSDDDASRALERAVEGEALAAPRVLRFKAGRRRRSWVGNCVAIGLASGFLEPLESTSIYLVQQAITALIELFPERRISTTDRDEFNRVIDLEYDRIRDFLILHYHATTRSDSPFWDYVRMMPIPDTLSGKLDLWRTRARIVKYREGVFLDPSWVAVYLGQGIVPEGWDPRVDAVSTDALLASVEALRAEIAGDVARRPDHRSFIEGYCAMAQAAERYCAMAQAA

SEQ ID NO: 88612 - protein, 346 aa, Sphingomonas sp.
  REGION 1..346: note = tr|A0A520IZD6|A0A520IZD6_SPHSX Tryptophan 7-halogenase (Fragment) OS=Sphingomonas sp. OX=28214; GN = EOP67_40275 PE=4 SV=1
MTDALRSVTIVGGGTAGWMAAVAFGRLLGPAGTRVTLIESDDIPTVGVGEATIPPIRTFHAMLGIDEDAFLRATGGSYKLGIRFEGWTRPGESYVHPFGQIGTDIAGVPFAAQWLRARQAGLAAPLGAYSLEARAAETGRFSRPIANGDSPLSRIGYAYHFDAGHYAAFLRTQAEAYGVVRHEGLVERVERGPAGIAAVHLADGSRIAGDLFIDCSGFRALLIEGAMEAGWTDWSEWLSCDRAVAVPSVADAAPLPLTRAIAERAGWRWRIPLQHRTGNGHVFSSRHMSEDEATATLLAGVEGESLADPRVIRFATGHRNRFWSGNCIALGLSAGFMEPLESTSIH

SEQ ID NO: 88613 - protein, 341 aa, Sphingomonas sp.
  REGION 1..341: note = tr|A0A520HIN5|A0A520HIN5_SPHSX Tryptophan halogenase (Fragment) OS=Sphingomonas sp. OX=28214 GN=EOP67_75050; PE = 4 SV=1
VGGGTAGWLTAGVIAAKHQARRQHGFTVTLVESPNVPTIGVGEGTWPTLRSTLKKMGVSETELFRQCDASFKQGARFNRWTTGAPDDGYYHPLMLPQHFGQVNLAPHWLADEGSATFCDTVTPQGRICDEGLGPKTIATPEYDGHANYAYHLDAGKFSHFLQRHCCDTLGVRHVKADVTEVHLDESGDIASLDTEQGISIAGDLFIDCTGFAALLIGGAMKVPFRSCTDILFCDTALAMQVPYDLPEDPIASHTISTAQSAGWIWDIGLPTRRGVGHVFSSSHISADAAEQELRDYIGPAARDLTARRLAIRAGHREQFWVRNCVAVGLAAGFLEPLEASA

SEQ ID NO: 88614 - protein, 277 aa, Sphingomonas sp.
  REGION 1..277: note = tr|A0A520J9V9|A0A520J9V9_SPHSX Tryptophan 7-halogenase (Fragment) OS=Sphingomonas sp. OX=28214; GN = EOP67_33825 PE=4 SV=1
MTGPQSIVIVGGGTAGWMAAVALGQLLGAGGSRVTLIESDTIATIGVGEATIPPIRTFHAMLGIDEDAFLRATGGSYKLGIRFEGWGRPGESYVHPFGQIGTDIAGVPFSPQWLRARQTGQADALGRYSLEARAAEAGRFSRPIVNGDSPLSRIGYAYHFDAGRYAIFLRAEAEKRGVVRHEGLVDRVETGPNGIAAVHLAGGERIAGDLFFDCSGFRALLIQGAMKAGWEDWSRWLPCDRAVAIPSQPDAAPLPLTRSVAMRAGWRWRIPLQHRTG

SEQ ID NO: 88615 - protein, 510 aa, Sphingomonas sp.
  REGION 1..510: note = tr|A0A5E7Y7N9|A0A5E7Y7N9_9SPHN Tryptophan halogenase; OS = Sphingomonas sp. EC-SD391 OX=2038398; GN = SPHINGO391_350222 PE=4 SV=1
MTDTRPGQITKVVIVGGGTAGWMAAAALSRLVAGGVSVTLVESQEIGTVGVGEATIPSLLDYNRMLGIDEVAFVRATGATFKLGIEFRDWRRLGEAYLHPFGTHGRDIDGVSFHQLWLRQAASGTPDPGPIGDYCLSSVAARRGRFTRPSANPQSVLSTLSYAFHFDAALYARFLRDMAEQDGVVRVEGRVVAVDRDVETGFIEAVRLEGDRRIEGELFVDCSGFRSLLLGETLDVPFTSWKQWLPCDRAWAVPSARQGPLTPYTRATADTAGWRWRIPLQHRVGNGYVYSSAHINDDEAKQALLAGLDGAAQGEPRQLRFEAGRRERLWDRNCVAIGLAGGFLEPLESTSIHLIQSGITRLMSLFPDRGFGSAERDEYNRVMLREYEQVRDFIILHYHATERSDSPFWDHCRTMTVPESLLAKLGLWSGRARVFRDQGELFTPDSWIAVLLGQGVCPDSFDPLTAALPPSETARFMAHIRDMIDKTAAAMPMHEDFIAQHCAAPSRRSA

SEQ ID NO: 88616 - protein, 344 aa, Sphingobium sp.
  REGION 1..344: note = tr|A0A521PF66|A0A521PF66_9SPHN Tryptophan 7-halogenase (Fragment) OS=Sphingobium sp. OX=1912891; GN = EPO45_20760 PE=4 SV=1
MQQLKRILIVGGGTAGWMTAALMSKLFKGLYEITLIESEAIGIIGVGEATIPAIKKYNELLGLDENEFMQRTQGSFKLGIQFVDWWKQGASYIHGFGVIGRDLEWLRCHQYWLKLNAQGAASDFANYSINTAAALENKFMRADPKMTDSPLGHIAHAFHFDAALYAKYLRGLAEASGVRRREGKVADVTLRGEDGFVQSVTMDDGAVIEADLFIDCSGFRGLIIEQAMKTGYEDWTHWLPCDRAMAVPCARVEPFTPYTRSTARASGWQWRIPLQHRTGNGHVYSSRYMEDDEAERFLLSNLDGEQLAEPNRLRFVTGKRKQIWNRNCVAIGLAGGFLEPLEST

SEQ ID NO: 88617 - protein, 441 aa, Sphingomonas sp.
  REGION 1..441: note = tr|A0A520IEK4|A0A520IEK4_SPHSX Tryptophan halogenase (Fragment) OS=Sphingomonas sp. OX=28214 GN=EOP67_53265; PE = 4 SV=1
HIVVCGGGLAAWMTVASLARQLAPAIRITFVDIGGTAESDLFYGNVTAPSAYAFNLAAGVAEPALTLDSDTAFSWGTRYDHWAGGKRSWTQCFALPFPVVDGVLLHQYLAAVGIDRLEPYLVAAMAAKRGAFAHPPRDPAKAAQHPLSRADYGYQFDPASYARLFETAVADAPGRVIRIADALASVEIDADAIAGVRLSDGRALSADLYVDCSGPAGVLLSHLVPQGEAGRRIGIAASDAPAARPGRPVRTVTPTPYGWRSDVPLRGRTRRVTVYDPADRDAGLAAHGPAPELVAEATLHRRAHAWAGNCVGIGHAAHVLEPLTPAPMMLLERDVDRLLSLIPNTGGMAVERAEYNRRYQENTQNAALFACAMFATNGLPETPYWRAAQGEPRPDALVRKLEMFETRGLLVAYDLEPFHPEDWTILHLGMGRRPARHDRLA

SEQ ID NO: 88618 - protein, 498 aa, Sphingomonas sp.
  REGION 1..498: note = tr|A0A520JGE8|A0A520JGE8_SPHSX Tryptophan 7-halogenase OS=Sphingomonas sp. OX=28214 GN=EOP67_20030; PE = 4 SV=1
MTSDGAARVTKVVIVGGGTAGWMTAAALSRLVPSGVSVTLVESEEIGTVGVGEATIPSLLDYNRMLGIDEDAFVRATGATFKLGIEFRDWTRLGDAYLHPFGTHGRDIGGVSFHQLWLRQAALDAATDGAGAGPIGDYCLSSVAARRGRFTRPSANPQSVLSTLSYAFHFDAGLYARFLRDLAESDGVVRVEGRVVDVERNAGTGFVEAVRLAGDRRIKGELFIDCSGFRSLLLGGALDVPFTSWKQWLPCDRAWAVPSARRGALTPYTRATADVAGWRWRIPLQHRVGNGYVYSSAHIDDDAAKQALLAGLDGEAMGEPRQLRFEAGRRDRLWDRNCVAIGLSGGFLEPLESTSIHLIQSGITRLMSLFPDLGFSAVEIGEYNRVMLREYEQVRDFIILHYHATERSDSAFWEHCRTMALPASLEAKLALWSDKARVFREQGELFTPDRPIATQFRSHNRSRRPASKRNWRGSPIASPSSPASSACFVASSSIWALE

SEQ ID NO: 88619 - protein, 397 aa, Sphingomonas sp.
  REGION 1..397: note = tr|A0A520JC59|A0A520JC59_SPHSX Tryptophan 7-halogenase (Fragment) OS=Sphingomonas sp. OX=28214; GN = EOP67_28050 PE=4 SV=1
MTACLIAHRWRDRRVRVTLVESPEIGIVGVGEGSTPQLKHFFDTLGIAEAEWMPACDATYKLGIGFEGWSDRAGYEQYFHPFPTALDGHTAPQFFYNTRARRTGRDVEAHPDQFLLPAHLASANCAPQPAENFPFEVSYGYHFDAYKVGAFLATHATETLGVVHLQRRIASVERASTGEITALINTDGERIGGEFFIDASGFRSTIFGALHVPFVSYADALFNDRAVVMPTAHAPGTPIPSQTRATALSAGWAWHIPLTGRNGNGYVYSSRHRTEAQAEAELRSHVGADAGKARHLRMRVGRVRESWSHNALAVGLAQGFLEPLEATALHLVIATVEAFLDMVDQGGATDAVRTAFNRRIAARYDGVRDYIVAHYRLNQRHDDPTGYWAEARRPRRR

SEQ ID NO: 88620 - protein, 184 aa, Sphingomonas sp.
  REGION 1..184: note = tr|A0A520JGM4|A0A520JGM4_SPHSX Tryptophan halogenase (Fragment) OS=Sphingomonas sp. OX=28214 GN=EOP67_21145; PE = 4 SV=1
VWMGNCVALSLASGFVEPLESTSIHLIMTGITRLMQTFPFGGIAPALVKRYNDQAQAELERVRDFIILHYHLNERPEPFWAARRDMPIPDTLVERIALFTEGAQAYQGGDDLFRVASWVQVMLGQRLTPRDHHRLGSIMGGPQLAGVLGNIRSTIADAVAGMPTHQQFLDRYLAAPVTASHGMR

SEQ ID NO: 88621 - protein, 334 aa, Sphingomonas sp.
  REGION 1..334: note = tr|A0A520GTI9|A0A520GTI9_SPHSX Tryptophan 7-halogenase (Fragment) OS=Sphingomonas sp. OX=28214; GN = EOP68_26405 PE=4 SV=1
MAGGGTAGWMAAAAIARVMGRAAAVTLVESDAIGTVGVGEATLPHIRAFNERLGIDEAEFMARTRATFKLGIEFRDWGQIGDSYIHPFGTFGRGSGAVDFHHYWTRLLREGKPLPSLDSLSYACALARGGRFDRPATDRTLAGTYGYAYQFDAPLFAPYLRAIAEEAGARRTEGTVASVERDGESGDIAAIVLNSGKRIEGDLFVDCSGFRSLLLGSALEEPFVDWSHWLPTDRAVAMPCRTRTAATPYTSAIAMPSGWRWRIPLQHRTGNGYVYASAFVSDDDARRALETAVEGEALAAPRVLRFKAGRRRRSWVGNCVAIGLASGFLEPLES

SEQ ID NO: 88622 - protein, 324 aa, Sphingomonas sp.
  REGION 1..324: note = tr|A0A520JFM5|A0A520JFM5_SPHSX Tryptophan 7-halogenase (Fragment) OS=Sphingomonas sp. OX=28214; GN = EOP67_21500 PE=4 SV=1
VEGRVVAVDRDAETGFIEAVRLEGDRRIEGELFVDCSGFRSLLLGETLDVPFTSWKQWLPCDRAWAVPSARQGPLTPYTRATADTAGWRWRIPLQHRVGNGYVYSSAHIDDDDAKQALLAGLDGAAQGEPRQLRFEAGRRERLWDRNCVAIGLAGGFLEPLESTSIHLIQSGITRLMSLFPDRGFGSAERDEYNRVMLREYEQVRDFIILHYHATERSDSPFWDHCRTMTVPESLLAKLGLWSGRARVFREQGELFTPDSWIAVLLGQGVRPDSFDPLTAGLPPSETARFMAHIRDMIDKTAAAMPMHEDFIAQHCAAPSRRSA

SEQ ID NO: 88623 - protein, 497 aa, Sphingomonas sp.
  REGION 1..497: note = tr|A0A520JNL4|A0A520JNL4_SPHSX Tryptophan 7-halogenase OS=Sphingomonas sp. OX=28214 GN=EOP67_06735; PE = 4 SV=1
MRDGASRLMRGERLKRIVVTGGGITAWCAAAALKRRAPFLDVTILACAPAPDALADRIACTLPSLLGFQGDLGIGVADGIVRTGSGYRLGTLFSGWAAGLPDYVNAYGRYGASFGSTAFHLHWLRSAQDGTVAPFDSYSPAAALARAGRFVQPIAGSPFADHEFGLTLDIPRHVTMLRAFGLHVGVREIVGEIAEVTLDVDKAIAAVALIDGSALSADLFIDATGPEARLRGAIDAVRDDWSAWLPCDRVLLAEPGVEPTVLTTVTAHEAGWHWSSGGQAGFAYAAHTISDAKAERVLCDASGAMPGEPIRIRPGTRPQPWRGNCLAIGDAATEVEPLEWCNLHLALSAIDRLITMLPGRLATPVEISEFNRQTRAEAERVRDFLAMHYRTARRDDPLWRTLAATAPPASLAHTLAQFAERGRLPFHEEETFARDNWAAVLIGQGFLPRRIDPLVSAVPAAAVRAAMARQTAAIAAALPNVPTHAAYLTAQTRHLTR

SEQ ID NO: 88624 - protein, 497 aa, Rheinheimera sp.
  REGION 1..497: note = tr|A0A0M0M948|A0A0M0M948_9GAMM Tryptophan halogenase; OS = Rheinheimera sp. KL1 OX=1635005 GN=WH43_02045 PE=4 SV=1
MNNQHNRIKKVVIAGGGTAGWMTAAGLTKLLGKNLEVVLVESDDIGTVGVGEATIPTMHIFHRLLNIKESEVMAATNATFKLGIQFENWKNLGEDYIHSFGFLGKDCWACGFQHFWVKAKQKGIATEIGDYCVEHLGARQGRFAVLPNQDLNHAYHMDASLYAKFLRRMSEQHGIRRIEGKIREVQQHMDGNISALLLESGELLEGDLFIDCTGFRALLIEQTLNTGFEDWSHWLPCDSAYAVQTKTTQEPVAYTRAIARQAGWQWKIPLQSRVGNGLVFCSKFITEAEAKQMLVDNLEGEMMFEPRLIKFKTGTRRQHWNKNCVAIGLSSGFLEPLESTSIHLIQRSIIRLLQMFPSNGINSADVAEFNRQTKIEMDNIRDFIILHYKATERTDTKFWRYCKDMEIPDTLAHRMELFKQSGKVYKFAQELFGESSWLQVLIGQGLMPEQYHPIVDLMPDSELNDFLMSIKQNVKRTVSQFPTHHEFIQHYCKSSLV

SEQ ID NO: 88625 - protein, 568 aa, Microbispora corallina
  REGION 1..568: note = tr|E2IHC5|E2IHC5_9ACTN Tryptophan-5-halogenase; OS = Microbispora corallina OX=83302 GN=mibH PE=4 SV=1
MARSEESNTLARLFDVLGDDAAAAREWVTEPHRLIASNERLGTAPEAPADDDPEAIRTVGVIGGGTAGYLTALALKAKRPWLDVALVESADIPIIGVGEATVSYMVMFLHHYLGIDPAEFYQHVRPTWKLGIRFEWGSRPEGFVAPFDWGTGSVGLVGSLRETGNVNEATLQAMLMTEDRVPVYRGEGGHVSLMKYLPFAYHMDNARLVRYLTELATRRGVHHVDATVAEVRLDGPDHVGDLITTDGRRLHYDFYVDCTGFRSLLLEKALGIPFESYASSLFTDAAITGTLAHGGHLKPYTTATTMNAGWCWTIPTPESDHLGYVFSSAAIDPDDAAAEMARRFPGVTREALVRFRSGRHREAWRGNVIAVGNSYAFVEPLESSGLLMIATAVQILVSLLPSSRRDPLPSNVANQALAHRWDAIRWFLSIHYRFNGRLDTPFWKEARAETDISGIEPLLRLFSAGAPLTGRDSFARYLADGAAPLFYGLEGVDTLLLGQEVPARLLPPRESPEQWRARAAAARSLASRGLRQSEALDAYAADPCLNAELLSDSDSWAGERVAVRAGLR

SEQ ID NO: 88626 - protein, 350 aa, Sphingomonas sp.
  REGION 1..350: note = tr|A0A520IB71|A0A520IB71_SPHSX Tryptophan halogenase (Fragment) OS=Sphingomonas sp. OX=28214 GN=EOP67_56795; PE = 4 SV=1
MHEIQNIVIVGGGTAGWLTAGVIAAKHQARRQHGFTVTLVESPNVPTIGVGEGTWPTLRSTLKKMGVSETELFRQCDASFKQGARFNRWTTGAPDDGYYHPLMLPQHFGQVNLAPHWLADEGSATFCDTVTPQGRICDEGLGPKTIATPEYDGHANYAYHLDAGKFSHFLQRHCCDTLGVRHVKADVTEVHLDESGDIATLDTEQGVSIAGDLFIDCTGFAALLIGGAMKVPFRSCTDILFCDTALAMQVPYDVPDAPIASHTISTAQSAGWIWDIGLPTRRGVGHVFSSSHISADAAEQELRDYIGPAARDLTARRLAIRAGHREQFWVRNCVAVGLAAGFLEPLEASA

SEQ ID NO: 88627 - protein, 346 aa, Sphingomonas sp.
  REGION 1..346: note = tr|A0A520JAQ4|A0A520JAQ4_SPHSX Tryptophan 7-halogenase (Fragment) OS=Sphingomonas sp. OX=28214; GN = EOP67_30725 PE=4 SV=1
YARFLRKMAEADGTTRIEGRIAQVELNGESGDIAALTLDSGARIEGDLFLDCTGFRALLIEQALHAGFDDWTHFLPCDSAIAVQTESVRPALPYTRAIAHDAGWQWRIPLQHRTGNGIVYCSRYLDHDAALERLLGTVEGPTLTEPNRIRFVTGARRQQWHRNCVAIGLSGGFMEPLESTSIHLIQRAILRLLRMFPSAGISPRDVAEFNEQQHTDMLQIRDFLILHYKATNRRDSAFWRQCASMPVPDSLAHKIALFRETGRVFRKNDELFAENSWVQVMLGQGIVPESYHPIATKMRDDELVRLLGGLRDTTNATVDALPDHAAYVAHYCSTAPSASAGSPHLG

SEQ ID NO: 88628 - protein, 353 aa, Sphingomonas sp.
  REGION 1..353: note = tr|A0A520JHU3|A0A520JHU3_SPHSX Tryptophan halogenase (Fragment) OS=Sphingomonas sp. OX=28214 GN=EOP67_17435; PE = 4 SV=1
LDAGKFAGFLQRHCCEKLGVRHVLADVQHATQAENGDILSVVTEQAGEIPGDLFIDCTGFAALLIGKTLGVPFKSCADTLFCDTALAVQLPHEDPDGPIASHTISTAQSSGWIWDIGLPTRRGVGHVFSSSHISDDAAEEELRAYLGPAGKDLPVRKLAIRAGHRETFWKNNCVAVGLAAGFLEPLEASAIVLIELSAKLIAEQMPVCREVMDIIAARFNATTHYRWGRIIDFLKLHYVLTKRTDSDFWRDNVRPESIPDRLSDLLTLWQYQPPWFHDEFDRVEEVFPAASYQYVLYGMGFQTQVERAAIAGDTRIADQARREAATQTARMRQGLPRHRDLIRKIVERGLPTI

SEQ ID NO: 88629 - protein, 504 aa, Sphingomonas sp.
  REGION 1..504: note = tr|A0A520DDC3|A0A520DDC3_SPHSX Tryptophan 7-halogenase OS=Sphingomonas sp. OX=28214 GN=EOP65_09820; PE = 4 SV=1
MRGRGSVQAEQRIRVVIVGGGTAGWMTAAALATLAPGAAEVALVESQEIGIVGVGEATLPHLRAFVTRLGIDEAAFMAATHATFKLGIEFRDFGAIGDSYIHPFGSYGRPLDGVGFHHYWLRRHHAGATAAIGDYSTAVVAAAAQRFTRPGSDPHDLASAFGYAYQFDATRFAPFLRAHAEARGAVRTEGLVTSVERDAESGDVVAITLADGRRIEGDLFIDCSGFRALLIGGAMDEAWEDWSHWLPCDRAVAAPCASPDGGIEPYTRATAMAAGWRWRIPLTHRIGNGYVYSSAHLSEGAATDALVDALESPPLAEPRHLRFRAGRRRRSWVGNVLSIGLASGFLEPLESTSIYLVQMAITQLVEHFPAARVTDADRDGFNALVDAEYDRLRDFLILHYHATTRDDSPFWDHVRTMTIPDSLAEKMALWRQTAQVSRYSHGLFLEPSWVAVYLGQNVVPDGWDPRADLPDGAALDRALAALRGGIAAAVATMPDHAAYLRAAA

SEQ ID NO: 88630 - protein, 495 aa, Sphingomonas sp.
  REGION 1..495: note = tr|A0A520JGQ2|A0A520JGQ2_SPHSX Tryptophan 7-halogenase OS=Sphingomonas sp. OX=28214 GN=EOP67_19495; PE = 4 SV=1
MTDALRSVTIVGGGTAGWMAAVAFGRLLGPAGTRVTLIESDDIATVGVGEATIPPIRTFHAMLGIDEDAFLRATGGSYKLGIRFEGWTRPGESYVHPFGQIGTDIAGVPFAAQWLRARQAGAAKPLGAYSLEACAAEAGRFSRPIANGNSPLSRIGYAYHFDAGRYAAFLRTQAEAYGVVRHEGLVERVERGPAGIAAVHLADGSRIAGDLFLDCSGFRALLIEGAMEAGWTDWSEWLPCDRAVAVPSVADAAPLPLTRAIAERAGWRWRIPLQHRTGNGHVFSSRHMSEDEATATLLAGLHGEALAEPRVIRFATGHRNRFWSGNCIALGLSAGFMEPLESTSIHLVQSGLQHLLRMLPTGAPPAPALVERYNRIMTAQYTRIRDFLVAHYHLNARAEPFWRDRAAAAIPEGLAEKLALFRAGGRIFREADELFNETSWLAVLTGQNAPVSGYDPICDGIPIETAANRLAQIERVVATSLTHMPSHAHALARLA

SEQ ID NO: 88631 - protein, 83 aa, Sphingomonas sp.
  REGION 1..83: note = tr|A0A520JL07|A0A520JL07_SPHSX Tryptophan 7-halogenase (Fragment) OS=Sphingomonas sp. OX=28214; GN = EOP67_11520 PE=4 SV=1
MPSPSPAVLGAADKFVHPSEEPNAPLSGFGYGLRLDPPRYRDLLRALARHLGIVPTPGIFAAVERAADGSAAALVLADGRRIV

SEQ ID NO: 88632 - protein, 181 aa, Sphingomonas sp.
  REGION 1..181: note = tr|A0A520J848|A0A520J848_SPHSX Tryptophan halogenase (Fragment) OS=Sphingomonas sp. OX=28214 GN=EOP67_35395; PE = 4 SV=1
CIAIGLSGGFMEPLESTSIHLIQRAVLRLLRLFPAGAVSPRDVAEFNDQQHTDMLQIRDFLILHYKATNRRDSAFWRQCAAMPIPASLEQKIELFRETGRVFRKNEELFAENSWVQVMLGQGIVPRSYHPIATKLRDDELARLLGGLRDGTNATVAGLPEHADYVARYCGAAPARPSTVVA

SEQ ID NO: 88633 - protein, 505 aa, Sphingomonas sp.
  REGION 1..505: note = tr|A0A525HFB4|A0A525HFB4_SPHSX Tryptophan 7-halogenase OS=Sphingomonas sp. OX=28214 GN=E7773_12420; PE = 4 SV=1
MSKRAPLEIVIAGGGTAGWTAAATLARFLGNYATVALVESDAIGTVGVGEATIPQIHNLIVGLGLDQAEFLRDTNASFKLGIEFTDWVRPGHKYFHSFGQVGRGVGLIPFRQLWLRARELGQAGDYGDYSNNVAAARLERFAIADGRDGAAPDLAYAYHFDAHLFAQMLRRYAEDLGVNRVEGMIERVERDPESGDIRALRLDRDRAVAGSFFIDCTGFRSLLLGNTLGVPFVDWRRWLPCDTALAVPSENVPAMRPYTQSGARPAGWQWRIPLQHRVGNGHVFCSEFMGVDEASEILLANVEGKALADPRPIRFVSGHREQFWSHNCVALGLAAGFMEPLESTSIHLVQSGIGRLLNVLAGDLTDTTAARDTFNKLSTIEWERIRDFIVLHYVANERVGEPFWDHCRAMELPATLAEKIDLFREAGLFVREEDELFLDDSWGQVMIGQGIMPRGWSPLADNVPAQDIGPFLQAIAKSCRVKAEALPDHRAFIATMTGRALEQFA

SEQ ID NO: 88634 - protein, 501 aa, Cellvibrio sp.
  REGION 1..501: note = tr|A0A5J6PGN6|A0A5J6PGN6_9GAMM Tryptophan 7-halogenase OS=Cellvibrio sp. KY-GH-1 OX=2303332; GN = D0C16_20810 PE=4 SV=1
MREVNSIIIVGGGTAGWMTAASLKQHFKQRIDITLIESSEIGTIGVGEATIPTIRQFYQQLGLSDLDVIRATGATCKLGIQFSDWHKPGSQFIHPFGGYGQSLRGTDFHHYWLKLQQKKRVGRLGDYSLGAVLAQHNKFTFPAQKPPSELSVFDWALHFDAALFAGLMRKHAEANGVRRIDAKITKVNRRADDGFIESLQLGYGASFSADLFIDCSGFKGILIEESLNTGYEHWHHWLLCDRAFAVQSKSVAAPNSYTNVVARPAGWQWQIPLQHRDGNGHVYASQFIRDELARDLLIKNVAGELLHEPRKIMFMPGRRKRAWNNNCIAIGLAAGFLEPLESTSIALIQTGIEKIRHLLAVGKYNDSIVREFNETTALEYERVRDFIILHYKLNARDDTEFWRHCRAMDIPDSLQHKMELFKSSGHVVNYRWEMFGLPSWLAIFEGFDYLPHAYDMQVDQLDENMLAANLERMRESLRATVADTPDHGDFIAQHCAVPEVA

SEQ ID NO: 88635 - protein, 518 aa, Cellvibrio sp.
  REGION 1..518: note = tr|A0A5J6NUD5|A0A5J6NUD5_9GAMM Tryptophan 7-halogenase OS=Cellvibrio sp. KY-YJ-3 OX=454662; GN = D0B88_05690 PE=4 SV=1
MNNKIASVVIVGGGTAGWLTAGRIAAQHRTQTGSTISVTLVESPTIPIIGVGEGTWPTMRSTLMKLGISETDFIRECDASFKQGAKFARWVTGTPDDFYYHPLMLPQGFGKTNMAAHWQALRNEQQLQESFSAATCFQEAICELGLAPKMITTPEFNSVANYAYHLNAGKFSTFLQKHCTEKLGVLHVLADVVSINSADNGDIRSVTTAQAGEISGDLFVDCTGFQSLLLGQHLQVPFVDCSDVLFIDNALAVQIPYDSDDAPIASHTISTAQDAGWIWDIGLIHRRGVGHVYSSRHTSEDQATAKLAAYIGPAFNNASLRKIPLPCGHRDIFWKNNCVAVGLSAGFLEPLEASALVLVELSASMIAEQLPACRALMDITAKRFNETFRYRWDRIIDFLKLHYILSKRTDNAFWIDNRDPATIPASLQELMQLWRYQPPGDHDFTSNNEVFPAASYQYVLYGMGFETCYDYSEHLLRDNQFAQEQFMKNKKTIEQVTRSLPSNRELLQKIHLHGLQTL

SEQ ID NO: 88636 - protein, 492 aa, Cellvibrio sp.
  REGION 1..492: note = tr|A0A5J6PK51|A0A5J6PK51_9GAMM Tryptophan 7-halogenase OS=Cellvibrio sp. KY-GH-1 OX=2303332; GN = D0C16_18210 PE=4 SV=1
MPDKKMKIVIAGGGTAGWITAAALSNQMGELLDITLVESQDIGTIGVGEATIPPMRTFHRLLGINEQEFMRATNATFKLGIQFENWKTIGDKYFHSFGVTGKQTLITDFIHFWLRGRELGIAQEFGDYCLEFKAALLERFSTNSEARMNYAFHLDAGRYASFLRARSEARGVKRVEGKIAKVNLNSDSGFIASLDLESGQNIEGDLFIDCTGMRALLIEQALHTGYEDWDKWLPCNRAIAIQTESTGPALPYTRSVAHHAGWRWKIPLQHRVGNGVVFSAEHMSEEEAKQLLFASVDGKVLTEPNVIKFRTGRRKKGWNKNCIAVGLSAGFLEPLESTSIHMIMTAVTRLLQLFPQGGVSQALVDEYNMQAESEAARIRDFIILHYKATERDDSAFWRYCRDMEVPEELAHRMKLFEEHAKSFQVEGELFRLDSWTQVMLGQGIIPTSYHPIVKLMSAKELHHFLTTIAADVDKNIAMMPYHNDFVNKYCTQ

SEQ ID NO: 88637 - protein, 501 aa, Cellvibrio sp.
  REGION 1..501: note = tr|A0A5J6NT71|A0A5J6NT71_9GAMM Tryptophan 7-halogenase OS=Cellvibrio sp. KY-YJ-3 OX=454662; GN = D0B88_03075 PE=4 SV=1
MKNIVIVGGGTAGWMSALVMAREWIQQGVSIRVIESPDIGIIGVGEGSTPALKLFFDRLNIAESEWMPACNATYKCGIRFDGWSTHAGFESYFHPFSAALDRQTLPMFMHNAQMRLRGADVYAQPDRFFIAARLAQQCLAPVAPEHFPFDVHYGYHFDSTLLGQFLRKKALALGVIHESAHVVAVQQRENGDIASVQSADQRIIAADFFVDCTGFSSLLLQQTLQVPFISYANNLLNNAAVAMPSTIGEKIPSQTLATAMSCGWAWQIPLTNRYGNGYVYSADFCSADQAETELRAHLGLLDADVPVRHLKMKIGRVEQHWAHNCLAVGLAQGFIEPLEATALFLVQQTVAIFAEYFARGEFTNRLQAEFNQRMNNHFDGVRDYIVTHYKTSSRRDTDYWCANTANQQDVSPVMLELYRSWYAGKDLAAEINRLQLGNYYPAPSWYSIFTGMGIVPKGEQLRRATAEEACFDIAAVDEFLRRCSLNFNDHRALLMRWQLSG

SEQ ID NO: 88638 - protein, 504 aa, Cellvibrio sp.
  REGION 1..504: note = tr|A0A5J6NXW2|A0A5J6NXW2_9GAMM Tryptophan 7-halogenase OS=Cellvibrio sp. KY-YJ-3 OX=454662; GN = D0B88_04890 PE=4 SV=1
MNTAAQNTGSQQPVKRVVIVGGGTAGWMAAAALAKKFGDLFSIQLVESDEIGTVGVGEATIPPMRVFHKLLGIDEQEFMRATSATFKLGIRFENWGRDGDNYIHSFGKTGKETWLGDFHHFWLRARELGLPFEFSDFCLELQAAKANKFITGNNVDINYAYHLDASRYAIFLRALSEKNGAQRIEGKIEQVVQDPHSGFVQAVRLQSGQVIEGDFFIDCSGFIGLLIEKTLHTGYDDWSHWLPCDSAQAVQTEAVGPPPAYTRSMAHASGWQWRIPLQHRVGNGLVYCSRYMNDEQARAHLLNNLEGKTLTEPRVIKFRTGRRRKSWNKNVIALGLASGFLEPLESTSIHLVMMGITRFMRFFPFNGIEPTLVQEFNEQSREEVEKIRDFIILHYKTTERDDSPFWRQCKNMDIPDTLAHRMELFKKTGHAYQADGELFRIDSWTQVMLGQRLMPEHYHHIAQLMSERELQHFFSGMKQNILQSVEKMPSHQAFIAQYCAANSA

SEQ ID NO: 88639 - protein, 484 aa, unidentified
  source 1..484: note = Terrabacteria group
  REGION 1..484: note = tr|A0A537K664|A0A537K664_9BACT Tryptophan 7-halogenase OS=Terrabacteria group bacterium ANGP1; OX = 2569760 GN=E6H00_04400 PE=4 SV=1
MTAAALTKSFGKLLQVTLVESEEIGIIGVGESTVPHLRDFNRLLEIDEADFVRRTKGTFKLGIQFRDWRRLGDSYVHGFGTIGRSLGLLDFHQYWLKARKLGLAKDIGHYSINTLAAPQGRFLVPPSDAPPNTPLADIVYAYQFDAGLYARYLRDYAEGRGARRIEGKIVEVKQNGESGFVESVRLESGATVAGDLFIDCSGFRALLIGGTLRSGFQDWTHWLPLDRAIAVPCEKVEPPTPYTRVTAREAGWQWRIPLQHRTGNGHVYSSRFVSDDEAMAVLLKNLDGKPLADATKPIRFAAGKRDKLWHKNVVAIGLAGGFLEPLESTAIFLIQSGIFRLVQLFPRRDFDPTLEQTYNAQAQFEYERIRDFLILHYCATEREDSELWRYCRSMKIPDSLREYIRLFADAGRFFRNGTELFAVTSWVQVMLGQGIRPRSYHPAADWVTDSDLRSFVESVEKLIARCVSIMPSHEDFIARHCAAV

SEQ ID NO: 88640 - protein, 115 aa, unidentified
  source 1..115: note = Terrabacteria group
  REGION 1..115: note = tr|A0A537JSX5|A0A537JSX5_9BACT Tryptophan 7-halogenase (Fragment) OS=Terrabacteria group bacterium ANGP1 OX=2569760 GN=E6H00_17820 PE=4 SV=1
MTTATLFNYSYSPTSGRNPHPAPVPVRRIVIVGGGTAGWMTALILARSLIARGVEITLLESPTVGIIGVGEGSTPWLRGFFDSLGLEESEWMPACHATYKCGIRFDGWSTKPGFG

SEQ ID NO: 88641 - protein, 519 aa, Cellvibrio sp.
  REGION 1..519: note = tr|A0A5J6P9I2|A0A5J6P9I2_9GAMM Tryptophan 7-halogenase OS=Cellvibrio sp. KY-GH-1 OX=2303332; GN = D0C16_15215 PE=4 SV=1
MNNPIKKIMIVGGGSAGWLTAGVIAAEHLVDPDNGLELVLVESPDVPTIGVGEGTWPSMRSTLKKIGVSETEFFRECDASFKQGSKFVDWLKPAGGAYYHPFSLPDGGNDFNLAEQWLAHRDQVNFSDAVCPIRFISDRNLAPKLITSPEYGGASNYGYHLDAGKFSNFLKKHCTEKLGVTYIQDHVIKINSAENGDIASISTKMNGDLVADLFIDCTGFASLLLGEHYQIPLNEERRVLFNDSALAVQIPYGETESPIQSCTVSTAQDCGWIWDIGLPTRRGIGHVFSSAHTSDEQVLKNLQDYLEPAIGKAAAEKIMPRKLTFNPGYRKVLWHKNCVGVGIAAGFIEPLEATALVLIELSAQMIAEQLPATRAVMDTVAKRFNQQFFDHWQRIIEFLKLHYVLSERRDTDYWRDHLADSTQPDGLRELLDLWRYHVPWKHDIRGDEMFPWASYQYVLYGMGFDTQISSVAKRAAAANSEKAGELFNANMKKTQSFINNLPTNRALLNKVREFGFQKI

SEQ ID NO: 88642 - protein, 471 aa, unidentified
  source 1..471: note = Unknown
  REGION 1..471: note = tr|A1XNE8|A1XNE8_9PROT Tryptophan halogenase; OS = proteobacterium AI21 OX=380364 PE=4 SV=1
MRCHFLSIRSKFINWLDKKKHSSNAYHHLFSNPSVRGLDLTSLWLQQQGDYASYVSPQAAVVAANLAPKSITTAEYQCTVPYAYHFDARKFAKLLHANATGSFRVQYMQADVTDIRTDEEGFITHLVTAQQGELAFDFVIDCTGFQASLLGDKLKIPFQSCADQLFTDTALAVQVPYSQEPELPPYTLASAHQAGWVWDIAFDQPARVGFVYSSAHMHEDVAYQKLERYVGKTQLAGLNVRKIPMRVGRREKFWHKNCVAIGLSQGFVEPLEATAILLADFSAELLSQCFPAHRGEMSLVAERFNQRMLHAWDRVLDFIKLHYCISDRTDSDFWHDNRAVSSIPESLQQKLELWKYHAPSREDFFSKFEVFDLDNYLYVLYGMKYPTRKPQLSSSYKTRAEMLAKQVQQQAESIVSELIPHQELLAKIKQYGLQKGISARGKSHRFIINQVVLTASKNFFLSALAGYGNLQ

SEQ ID NO: 88643 - protein, 515 aa, Rhodanobacter sp.
  REGION 1..515: note = tr|A0A5A7VYE4|A0A5A7VYE4_9GAMM Tryptophan 7-halogenase OS=Rhodanobacter sp. T12-5 OX=2024611; GN = CIW53_03260 PE=4 SV=1
MNDPRIRHVVIVGGGTAGWMTAALLSQALGSQVQIRLVESSEIGIVGVGEATIPQIRHVSKFLGIDEDELLKASRGTIKLAVQFNDWRRIGDTYLHAFSDVGLPLGLAGFQHYWLRDLQERTSDASAGAASRRGNSVPDLWAYSINAQAANLNRFARMDKVGDSPLTGIRYAYHFDAARFGQLLRRHAEQRGVVRTEGKVVDVALREIDGFIESIRLESGETVAGDLFIDCSGFRGLLIEGALKTGYDSWQHWLPCDRAVVIASEHGDTIRPYTQASAQKAGWQWRIPLQHLDSNGHVYCSRHVSDDEATATLLSHLEGPALDEPRQLRFHTGMRKNVWNRNCIAMGLASGFIEPLESTSIHLMQSAVGRLLTMFPDKNFDPSLVAEYNRQTRFEYERTRDFIALHYHATERDDTEFWRQCATMELPEGLAHRIELFRQSGHVFRDGEELFTPMGWLQVMIGQGIQPVRYHPLADGLSQVQLDGFLTDIRTLVERAVATMPEHAEFIARHFKADS

SEQ ID NO: 88644 - protein, 508 aa, Cellvibrio sp.
  REGION 1..508: note = tr|A0A5J6NUZ1|A0A5J6NUZ1_9GAMM Tryptophan 7-halogenase OS=Cellvibrio sp. KY-YJ-3 OX=454662; GN = D0B88_07020 PE=4 SV=1
MHSFINNQDNHIKRVIIVGGGTAGWMSAATLSRYLKNNRYEIILIESDDIGTVGVGEATIPQIQLFNKSLNIDEDDFIRKTHATFKLGIEFVNWGQKGDSYIHAFGSVGHDMESLPFYHYWLKLQKQGRSKDIGDYCLNTLASKKNKFMRSIDAGNSPLSNIAYAFHFDAGLYAKYLREYSEKLGVKRVEGKIVEVNLESSTGYIRAVTLASGEQVAGDLFIDCSGFQGLLIAQSLGVGYQNWSHWLPCDSAWAVPSQKLDPLPSYTRATAHSAGWQWRIPLQHRTGNGHVFSSKFMDEEEAKKILLKNIQGEKLAEPRLIKFVTGRRDKFWHKNCIAIGLASGFMEPLESTSIHLVQSALARIMAMFPHKKFNQDEIDSYNEQVGFEYEKIRDFLILHYKVTERNDSAFWNYCREMDIPPSLQQKINVFKANGHVFRFNNELFNEISWVEVMLGQRMTTEGYHPLVDVLPEEEFDRRMAQVKRVIDTAIDYMPSHAEYIEKTCKSTV

SEQ ID NO: 88645 - protein, 536 aa, Cellvibrio sp.
  REGION 1..536: note = tr|A0A5J6NT09|A0A5J6NT09_9GAMM Tryptophan 7-halogenase OS=Cellvibrio sp. KY-YJ-3 OX=454662; GN = D0B88_02155 PE=4 SV=1
MQQNKTQQDAMQQQGLQKKGLQKTVQSIVIVGGGTAGWMTAAALSHFLSAQHYHITLIESDQIGTVGVGEATVPHIRYFNQTLGIDENEFIRQTNATYKLGIEFIDWGKLGDAYIHPFGIYGRTINDVSFHHYWLKAKLAGDSRPIGDYSLAVQAALQSKFSYPSANPESLASKYSYAFHIDASRYAQFLRTYAEQKGITRREGKIQQVNQCTDSGCITSVILDDGSTIGGDLFVDCSGFRGLLIEKTLQVGYDDWSQWLPCDRAIAVPSEKMSPPLPYTKATAKAAGWQWRIPLQNRNGNGQVYCSHYVTEEQVAENLLASLDGKPLANLNHIRFTTGCRKKTWYKNCVAVGLSSGFLEPLESTSIYLIQMAITKLVEYFPRTQNDITLTEEFNRDMRLEYERVRDFLVLHYTATTRDDTEFWRYMRNMKKPASLDEKIALFVEQGHVMQYKKGMFLEPSWVAVYLGQGIVPTGYHPAVESLSKTELDSHMANLRAEINNYCTDMPPHSLAIEKHTNAMSNVWPPAALSLYEVFS

SEQ ID NO: 88646 - protein, 603 aa, Microcystis aeruginosa
  REGION 1..603: note = tr|A0A5D5BAV0|A0A5D5BAV0_MICAE Tryptophan halogenase; OS = Microcystis aeruginosa KLA2 OX=2605423 GN=FXO09_21395; PE = 4 SV=1
MKNMSNRPYDVIIMGAGLAGLCQARHLMLKIPNIRIAMIDPRPENRTEKDLKLGESTVEVATLFFGKDLGLYEYLIENHPPKYGLNFHWPKRNERTKTIDDYFHIWANRQPDLASTQLNRPKFERDLLKMNREMGADFYNGRVVDIDLTPNDQLHTVKVKLPNESIELQGKHLVDAAGRRFLIGKKTNNISFDSKDLYGVNTGSAWVRVQNVDRTIFHSGYDPTGASCSHYYATNHWFGKGHWLWMIPTDIETMELSIGVIHHHDYISSESLNSKEKFYEFLKANHNILYQLVTSAENIDFHYWPRLAHTSKTLYSPDNWYVIGDSACIFDAFYSLGSTMIVSAIDSITEIIRAKLAGEVNAAEKCQAYNQFNLTLINSINLFMHNHSRHLGDASIMSWRIYFENMIWFGILIPIFVGKWHLDLEFIPQFVQTFQTTLRSLVYEIHDQFDQLVDQKKNIGLMDCYRSDQLIWDYHTPKRYTHALENAQYEPKQTSVFTSMKKTFFYLTIWYLKLQWKSGGLSQVCHHRSLGTMAKLLTTSIYIGLGDIIYSLTWNHGSESQSIAEMRQAFQEYQYGDTLQPWIVEGVDTKSLEVEAEKVPLQV

SEQ ID NO: 88647 - protein, 495 aa, Cellvibrio sp.
  REGION 1..495: note = tr|A0A5J6NXM3|A0A5J6NXM3_9GAMM Tryptophan 7-halogenase OS=Cellvibrio sp. KY-YJ-3 OX=454662; GN = D0B88_04320 PE=4 SV=1
MDMSQKIKKVVIAGGGTSGWCTAVALSRQLGTLLDITLIESAEIGTVGVGEATFPTICSFHKIHGIDEQEFLSATLGSIKLGISFENWARKGDRYIHPFGSFGKASWIGDFYHYWLAAKARGYEGELEDTCFELQAAKAHKFSITENPKLNYAYHFDASLYAKFLRRLSEEKGVRRVEGKIVQVKQHADSGFIEYVVLESGACIEGDLFIDCTGFRGLLIEETLKAGYEKWGHWLRNDSAVALQTEFSGDIPPYTRAIAHDSGWQWKIPLQHRQGTGHVYSSAYISDEAARNTLLENLDGDIRAELRLLKFNTGRRKQAWVKNCVAIGLAGGFVEPLESTSIHLIQIGVSRLLQLFPFEGCNEHLIRRYNKMSHAEYENVRDFIILHYKATERDDTPYWRDCRDMTIPDSLAERIELFKQTGHVHHETNEVFGVTSWLQVMIGQRITPQGYSHFPHVISDEQIVAGLMSMKSKIAKTLEKIPSHADFLKSYCAVK

SEQ ID NO: 88648 - protein, 503 aa, Cellvibrio sp.
  REGION 1..503: note = tr|A0A5J6NW77|A0A5J6NW77_9GAMM Tryptophan 7-halogenase OS=Cellvibrio sp. KY-YJ-3 OX=454662; GN = D0B88_02145 PE=4 SV=1
MNDNAKRRIKKIIIVGGGTAGWMTAAAFSKVLGTSCYDIVLIESDDIGTVGVGEATIPLITSFNQILGLDESQFMKKTQATFKLGIEFVNWGNIGDRYIHPFGVYGKGIGSLAFYNFLLKQQKIKPDTDVGDYSINIQAARHNKFMRAPNLPNSPLADIRYAYHFDAGLYALYLRNYAEQQGAIRVQGEITNVSLDDDSGCITSVTLKDGQTHSADFFIDCSGFRGLLIEQALKTGYEDWSHLLLSDTAVTVPSEVIHPLPSFTRSTAHSAGWQWCIPLQHRTGNGHVFSSRFMSEDEATSLLLQHLPTPALAGPRTVKFKTGIRRKLWNKNCVAIGLSSGFIEPLESTSIHLIHSAIHKLLTFFPTGALSQVDIDKYNDVMRTDIEFIRDFILLHYKATSRTDSAFWNHCRTMDVPDGLRKKMELYIKSGRLYRDNNELFTEDSWFAVMEGQGVKVEDYHPLVDSVEQVKFDAMLGDIARAIRESTDVIPSHAEYIARYCKA

SEQ ID NO: 88649 - protein, 518 aa, Cellvibrio sp.
  REGION 1..518: note = tr|A0A5J6NXJ1|A0A5J6NXJ1_9GAMM Tryptophan 7-halogenase OS=Cellvibrio sp. KY-YJ-3 OX=454662; GN = D0B88_11510 PE=4 SV=1
MTNNLIQSVVIVGGGTAGWLTAGIIAAEHQHKIKQGELQITLCESPSIPIIGVGEGTWPTMRATLKKIGVSETAFIRECDVAFKQGSKFLRWKDGSEKDFYYHPFSVPQGQSSINLAEHWLNTNDPMSFSTAFHPQEAICEASLAPKTITTAEYDAIVNYGYHLNAGRFAEFLRKHCLTNLHVHHILAEVTEITQQENGHIQSLITDRAGIITGDLFVDCTGFTAMLLGETLGVEKISISDTLFTNCALATQIAYPYEDSPIASATLSSAQTAGWIWDIGLPTRRGVGHVFAKEYQSIDHATQQLIDYIHETGGDSSQISIREIHFNSGYRKEFWKHNCVAVGLSAGFLEPLEASALVMVELSALMIAEQLPKTTSAIPIIAKRFNERFSYRWERAVDFLKLHYLLSQRNDSPFWQDNRQPSTVPQDLSERLLLWQNTSPQHYDFDRTGEIFHALSYQYVLYGMGFKTNLAFSTPLETQKMATELVMQNNMITRQLLDILPTQRELLQKINLYGLSSI

SEQ ID NO: 88650 - protein, 507 aa, Cellvibrio sp.
  REGION 1..507: note = tr|A0A5J6P740|A0A5J6P740_9GAMM Tryptophan 7-halogenase OS=Cellvibrio sp. KY-GH-1 OX=2303332; GN = D0C16_10855 PE=4 SV=1
MKIKRIAIVGGGTAGWLAANHLGVELSRDPDIEITLIESKDIPIIGVGEGTVPQIKATLKKFGIAEVDLLASCDATFKQGIKFSQWMDVKKHGEKHFYYHPFSSPFPSGYDVTNYWLNNKEDCDFSKLSEIYSIAESNRSPKQKSSPPYVGAVDYAYHFNAVKFAELLANNAREKFAVKHIYETIAQVTTSDDGSLSGFIYGDGRTQQFDFFVDCTGFASLLLGKTLGVPFLNKSDQILTDTALALQEPIAQTDEIQPYTSATAHAAGWIWDIPLTTRRGIGFVYSSEHMSESQAVEGFSAYLGRDLHSANLRKIPMQIGYRESFWQKNCVALGLAQGFVEPLEATSILVTDFAALQLARNFPVFAQDIAAVSDYCNKVVRYTWERVIDFVQLHYYISDRRDSRFWQESTENSMLSDVLRERLALWKIAAPKKSDFFSAFDIFGVENYLFVLYGMHYPTRAGVVGVKEVDRAKELINSVQEKSRHMSGALLSHRRWLTELQQALASR

SEQ ID NO: 88651 - protein, 517 aa, Cellvibrio sp.
  REGION 1..517: note = tr|A0A5J6NSG3|A0A5J6NSG3_9GAMM Tryptophan 7-halogenase OS=Cellvibrio sp. KY-YJ-3 OX=454662; GN = D0B88_00155 PE=4 SV=1
MSKSVLIVGGGTAGWICAAYMARMLAADTPGGVTITLVESDEIGILGVGEGTFPIIRKTMSRIGLDESALIREADATFKQGIRFNNWKKNPADDPQDTYFHPFQVASQHTDMDLLPYWLLGVAGDVPWAEACTVQERVVDAKLAPKLITHPNYNAPLNYAYHFDAGKLAQVVCRQAMAMGVKRLIDTIDDVKVDEQGIASVQGRTHGELKADLYIDCTGFRARLIGEALGSEFTSYKDQLFCNRAVAMQVPYDRPDAPIPSCTYTSAQDAGWIWDIGLHNRRGVGYVYASNYCSDDEALATLKRYIGPAADNLKHRKLAFEAGFRKTQWHKNCIGVGLSVGFIEPLEATGISFAEVAALMLCNLFPWSGDYERSAQQFNQAMTKRFEHVIDFIKLHYYLSERTDTAFWRDNRAPASASDYLKGKLEQWRHRPPSFLDIDASHDIFDENSWQYILYGMGFKTDISARAGALRFYDDAKREFESIRQQSNKAMTAVPSHRDLINEVVARGFRNASGGQR

SEQ ID NO: 88652 - protein, 502 aa, Cellvibrio sp.
  REGION 1..502: note = tr|A0A5J6PJ52|A0A5J6PJ52_9GAMM Tryptophan 7-halogenase OS=Cellvibrio sp. KY-GH-1 OX=2303332; GN = D0C16_18940 PE=4 SV=1
MNSEQQKPKKILIVGGGTAGWMAANLMASRWRDIEVSLLESADIGIIGVGEGSTPHLKFFFDTVGLAESEWMPRCNATYKNGISFAGWSAIPGYESYFHPFPAQTDDMLTVPHFFSSINARMQGHDAVAHPDHYFLETYLTRENLGPIPNETFPFGVAYGYHFDATLLGQFLAETGVSRGVKRIIGTVTEVVLGPYGAIASLRLDDGSFIDSDVFIDCSGFKSLLMQGALKASYKSFSDNLFNNAAVVMPSEISAVIPPETKSTALSNGWAWKIPLTNRFGNGYVYSADYLTPDQAETELRRHLGLLDSDVDARHLQMKVGRVEKHWEQNCLAVGLSQGFIEPLEATALALSLETITRFMSFYERGEFTNEFADAFNKEINAKFDGVRDYIVCHYKVNQRRDTDYWRNNAANMHLSDSLSKILHFWWNSKDFAKDMYMNNLTGSYQPKSWACLLAGYGVFPALSQNSMNDQYASTQNMAQLADFIRRCGLNFKSHNEQLNIR

SEQ ID NO: 88653 - protein, 522 aa, Alteromonas sp.
  REGION 1..522: note = tr|A0A520WMP6|A0A520WMP6_ALTSX Tryptophan 7-halogenase OS=Alteromonas sp. OX=232 GN=EVA22_04455 PE=4; SV = 1
MHQANSPLRRIVVVGGGAAGWLTASIIAVTHKHDDNISVTLVESPDVSILGVGEGTWPTMRSTLLKIGISEETFLAQCNASFKQGTSFHNWRSDTIEHQYYHPFSLPFRYFESDVAAWWQSYAAEQDFAHAVCSQAALCDHHLAPKQRQTPAYAGIANYGYHLDANKFAALLQKHATTVLGVQHIVDHVDDVVGSSSEPIAAIVGREHGNITGDLFIDCTGFAARLIGQHYGVPLTSCSNVLANDSAIAIQAPYIDSSVDIASTTHSTAQDSGWIWDIGLPSRKGVGYVYSSAHCSEDEARATLETYLKHDKKTADVDVSKARKITFSPGYRKTLWVENCVAIGTSAGFLEPLEASALVMIELSATHIAKQLPRTYKECQAAGRQFNQAFEKKWERIVDFLKLHYVLSEREASAYWRDMRNQESCSTQLQDWLTLWKSRSPISSDFELREELFPAASYLFVLYGMGFRSQYNDVYQANLHTPEQRQAYAKHVQSIQQQLSGLPTNRQFLNQVAQSQGLSMHY

SEQ ID NO: 88654 - protein, 487 aa, unidentified
  source 1..487: note = Terrabacteria group
  REGION 1..487: note = tr|A0A537K6A8|A0A537K6A8_9BACT Tryptophan 7-halogenase OS=Terrabacteria group bacterium ANGP1; OX = 2569760 GN=E6H00_04410 PE=4 SV=1
MAAAALAKVLERSCAIRLIESEEIGTVGVGEATVPHLKLYNTILEIDEAEFIREVRGTFKLGIQFVDWGRIGDRYIHGFGTIGHDYGLLPFHQYWLKQFLAGKAADIGAYSLNTAAAPLGKFMTSAQDVPPTSPLANITHAYHFDAGLYAAYLRRYAEARGVRRTEGKVVDVDLRGSDGFIEAVKLEDGERVSADLFIDCSGFRGLLIEQALHTGYENWTHWLPCDRAMAVPCENVGPPTPYTRSTARTAGWQWRIPLQHRTGNGYVYSSAYISDDAARETLMPNLDGRALAEPRILKFTTGKRRKFWNRNCVAIGLASGFMEPLESTSIYLIQSGVARLLNLMPDRSFSPVLIERYNAQAAFEFERIRDFLILHYFATERRDSPFWQYCANMSIPEQLADNIALFRDSGRFFRHAEEMFALTSWVQVMLGQHILPRNYHPAVDLIPEREVNELVSGVRNVIANCVQAMPTHEQFLARYVQAGAAAA

SEQ ID NO: 88655 - protein, 71 aa, Alteromonas sp.
  REGION 1..71: note = tr|A0A520WQQ8|A0A520WQQ8_ALTSX Tryptophan halogenase (Fragment) OS=Alteromonas sp. OX=232 GN=EVA22_00830 PE=4; SV = 1
MTVSGLDSSKNQTPVKNVVIAGGGTAGWMAATALSRLLGKSINVTLVESKDIGIVGVGEATIPPIRTFHKL

SEQ ID NO: 88656 - protein, 369 aa, Citreicella sp.
  REGION 1..369: note = tr|D0D9Q3|D0D9Q3_9RHOB Tryptophan halogenase; OS = Citreicella sp. SE45 OX=501479 GN=CSE45_3262 PE=4 SV=1
MIADTTFESCDVAVLGGGPAGAACAIALARAGVGRVVLCESEEVRPFRLGETIPPDSRAILDRLGVLDAFLADEHMTCHGSCSSWGSDGLGYNDFMLRPYGHGWHIDRPRFEELLLENAAQAGAELWLGAQFAGTERIDGGHRLAFRGAPTLEARFVVDATGCSAAFARRQEAQRTGLDTLHCIAARFRKAAPGLSRLTWLEAVPEGWWYASRLPSDRLLVLFASDADVVRDHGFSDPETWLAALRRTRHIRALLEHVSDAHERPRAGAAPSFCLDRVAGDDWAALGDAASACDPVTARGLWKALSGALVLADAVQAALAGDTAPLDAYAGAVRQDFTTYLAMRRDLYGLETRWPDAPFWARRHASVTA

SEQ ID NO: 88657 - protein, 504 aa, Cellvibrio sp.
  REGION 1..504: note = tr|A0A5J6P0F3|A0A5J6P0F3_9GAMM Tryptophan 7-halogenase OS=Cellvibrio sp. KY-YJ-3 OX=454662; GN = D0B88_18630 PE=4 SV=1
MNNIIKKIVIAGGGTAGWMTAALLKKVLQQRVEIQLVESEEIGIIGVGEATIPPIQTFNSVLGLHEPEFLRETKATIKMAIRFDNWKQQGDSYYHTFGAPGTTIGFSAFQHYWLRAQKQGLNTSIWDYDLNYLCCEAGVFGKFDGKDPLYQVPYAYHFDSALYGRYLRKISEQAGVVRTEGKIREVRLNTDSGFVETLLMENGSEIQGDLFIDCSGMRGLLIQGALQTGYEDWSHWLPCNRALAVPSERFEKTLPYTRSIAHKAGWQWRIPLTHRNGNGLVYSSHHLSDDEATTILLSNLDSTALAEPKPIKFKTGRTLQQWNKNVIAVGLSSGFLEPLESTSIHLIQSAIVRLLKHFPNAGISQTQVDEYNRDSKHEYETVRDFIILHYHLNERDDSEFWRYLRNMRIPERLAHKIALFQETGAVMNDPGDIFLDSSWLQVMMGQGIMPRDYHPTADIPGAEQLQSMLARIASAKRQPLTQLPSHDEFLHQYAGVTRAGINRG

SEQ ID NO: 88658 - protein, 501 aa, Cellvibrio sp.
  REGION 1..501: note = tr|A0A5J6P0F8|A0A5J6P0F8_9GAMM Tryptophan 7-halogenase OS=Cellvibrio sp. KY-YJ-3 OX=454662; GN = D0B88_18680 PE=4 SV=1
MQNQVPKQIVIVGGGTAGWMAASILLHAWKTHQVEITLVESEDIGIIGVGEGSTPALRKFFSYLHIAEKEWMPACNATYKAGIYFDNWGEIPEYESYFHPFYTAWDQEGAHAFVAAANKQRQGLTTSPHPNSYFLAYHLAEANKAPLPTDPQLGNQVNYGYHFDSALLGKFLRDRAKQLGLTHLIDNVEQVTLTAEGDISSIQTRQHGSIGADFFIDCTGFASLLMGKTLLEPFLSFKENLFNDAAVTLPTAIDEEIVPATRSTALGYGWAWKIPLTNRYGNGYVYSRDFISPEQAEQELRNHLGDAAKDSPARHLTMRVGRIHNHWKKNCLAVGLSQGFIEPLEATALAIVQSTLENFVDCFDQPVSETTKENYNNYINELIDGIRDYIVTHYLLNTRTDTTYWRACREQAKPSTKLEALISCWDNQGDFMDLLFKQQRAKVYKPESWFCIFAGMGRFTHLRTTKANITPTNIELTLQEKLNNIGNLYFIDHKKRLNIHY

SEQ ID NO: 88659 - protein, 509 aa, Cellvibrio sp.
  REGION 1..509: note = tr|A0A5J6P0X5|A0A5J6P0X5_9GAMM Tryptophan 7-halogenase OS=Cellvibrio sp. KY-YJ-3 OX=454662; GN = D0B88_17740 PE=4 SV=1
MKIKRIAIVGGGTAGWMAANHLGVELSRDPEIQITLIESKDIPVIGVGEGTVPQIKATLKKFGISEIDLLTSCDATFKQGIKFAQWMDAKKSGTNNFYYHPFSSPFPLGFDVTNYWLHNKSICDFSRLSEIYTIAEQNRSPKQISSPPYVGAVDYAYHFNAAKFSDLLAKNARGKFAVKHCIETIAQVLLHDDGSIRALTYESGTTEEFDFYIDCSGFAALLIGETLGVSFLDKSSQILTDTALALQEPTADTDEILPYTLATAHKAGWIWDIPLTNRRGIGFVYGSNFMSEDEAVQQFSAYVGRDLQQANLRRVPMKIGYRESFWQKNCVALGLAQGFVEPLEATSILVTDFAAQLLARSFPQYQDDIPLLADYCNKVVSYTWERVMDFVQLHYFISDRRDSDFWIENTEKLSLSPLLQERLALWKLAPPKRSDFFSAFDIFGLENYLFVLYGMGYPTRPGRLGVAEAEKSAGLINEVQKKSKHSATSLLSHRVWLTELKKALVSQQR

SEQ ID NO: 88660 - protein, 509 aa, Cellvibrio sp.
  REGION 1..509: note = tr|A0A5J6PA47|A0A5J6PA47_9GAMM Tryptophan 7-halogenase OS=Cellvibrio sp. KY-GH-1 OX=2303332; GN = D0C16_14150 PE=4 SV=1
MSAIQSLVVVGGGTAGWMAAAFFAKRFAGTPLNITLVESATIGTIGVGEATVPAMKVFLSDLGIDEREFMLNTQATFKLGIEFDGWNKPNESFFHPFAMFGAKIASIPFHHYWANLRTQQQAGPIDDYSLATQLARSNKFARPKENALDIARFNYAYHFDAGLFANYLSRFSQRQGVTRIEAQISHATRDATTGNISELVLESGEIISGDFFIDCSGFRGLLIEETLHTGYEHWNQWLPCDRAIALPSSSDEQIPSYTRALACSAGWQWRIPLQHRVGNGYVYSSQQISDEQALAELQKNITGTSLAEPKLIHFATGMRRKIWNHNVFALGLASGFLEPLESTSIYMVQTAINTLFTYFPQTQDCATIAQHANHTLAQHNQRLRDFIILHYYLNQRTGEPFWNECQNMTIPESLQARIEEFRYTANLRFDDLDFFQISSWLSLFSGFNLLPTHHHPKVAFFDKQHVIRELADMRSAIQRAVGDLPSHQHFLNPENATNTRRTAQHELPT

SEQ ID NO: 88661 - protein, 514 aa, unidentified
  source 1..514: note = Alphaproteobacteria bacterium
  REGION 1..514: note = tr|A0A537M920|A0A537M920_9PROT Tryptophan 7-halogenase OS=Alphaproteobacteria bacterium OX=1913988; GN = E6G94_03175 PE=4 SV=1
MTEPAPLEIVIVGGGTAGWMAAAALGSLLPPGRCNIRLIESEEIGTVGVGEATLPHMKSFNDAIGVDEAEMMRRTSGTFKLGIDFVDWGFKGSSYVHPFGIHGNPAAGNSFHHHWLRALQAGEAAPIEDYSFAIVASRRNRFAFPAEDKTAIESTFSYAYHFDASLYAVFLREFSEARGVKRTEGKVLEVVCDPESGDVASLRLESGEIVAGDFFVDCSGFRSLILGQTLGVAFEEWTKWLPCDRAFAVPTQRQGELTPYTRSTCREAGWQWRIPLQHRTGNGYVFSSGFIGEDEAAASLMANLDAPALAEPRMLRFKAGRRANSWERNCLALGLASGFLEPLESTSIYLVQIAIMNLIALLPDRKVDPALREEYNRRQDLEYERIRDFLILHYHATSRDDSELWRYCRAMEVPDSLKAKIEMFRHRGYIEHYKDGLFTPPSWLSVYLGQGIAPEGYHPMAEGMPIERLTADLRTLREEISRGVDAMPAHGEFVERYCPHPAAPSEMSASEARL

SEQ ID NO: 88662 - protein, 506 aa, unidentified
  source 1..506: note = Gammaproteobacteria bacterium
  REGION 1..506: note = tr|A0A2E1ZNU2|A0A2E1ZNU2_9GAMM Tryptophan halogenase; OS = Gammaproteobacteria bacterium OX=1913989 GN=CMQ08_10895; PE = 4 SV=1
  VARIANT 96: note = Xaa can be any naturally occurring amino acid
  VARIANT 277: note = Xaa can be any naturally occurring amino acid
  VARIANT 350: note = Xaa can be any naturally occurring amino acid
MDDSNLKNIVVLGGGTAGWMTASLLQKQWQHLGIKITVVESPDIGIIGVGEGSTPLLKVFFDSLEISESEWMPECNATYKNGISFNNWSTVSGYEXYFHPFPCSLDFATFGLLYKYAALRRKGLDVLAHPNRFSLMAGLTEKKLAPIPSENFPFHFQYGYHFDSVLIGNFLRRRAKEIGVEHIEATVQDVEQNSNGDIKSLKLNNNQTLSGDFFIDCSGFASVLLQKTLKVPFLNFAENLFNDSAIAMPTEIEPNIPSETVSTALTNGWAWKIPLTXRFGNGYVYSSKYCSPDEAETELRAHLGVLDSDIEARHLKMKVGRAEESWRNNCVAVGLSQGFIEPLEATALQXVYATVDEFAKAFEQGEFTPQYRQEFNNRMNKNFEGIRDYIVLHYKTNSRSDSQYWIDNRENQNLSNNLKEMLNCWYGVEDIEAALTRLDIGTYYSQRSWACLLAGVGTFPREENLISADLENAQSLQDDLKYVDNFIEGCSLNFEPHENMLTSKTP

SEQ ID NO: 88663 - protein, 110 aa, Mesorhizobium sp.
  REGION 1..110: note = tr|A0A4R9Y933|A0A4R9Y933_9RHIZ Tryptophan halogenase (Fragment) OS=Mesorhizobium sp. M1C.F.Ca.ET.212.01.1.1; OX = 2500527 GN=EN855_035195 PE=4 SV=1
SVQALVLEDGQVIEGDLFIDCTGFRGLVIEQTLGTGYEDWHEWLPCDRAVAVQTEAVAPPVPYTRAIAHEAGWRWHIALQHRVGCGLVYSSRHLSDDEATAKLLRDVGAP

SEQ ID NO: 88664 - protein, 493 aa, unidentified
  source 1..493: note = Gammaproteobacteria bacterium
  REGION 1..493: note = tr|A0A349X1R3|A0A349X1R3_9GAMM Tryptophan halogenase; OS = Gammaproteobacteria bacterium OX=1913989 GN=DCW52_01125; PE = 4 SV=1
MNKRINKVVIVGGGTAGWMAAASLAKLLGKTINITLIESDDIPTVGVGEATIPTLVTHHELLGINEQEFMARVNATFKLGISFENWRDVDEDYIHSFGFTGRDCWAAGFQHFWLKGRKLGIAKEFGDYCSELVAAKEEKFAVMPKLGLNYAYHMDAGLYAQFLREIAEKHGAIRQEGKVVEVGLNGESGYIENVKLESGKVIEGDLFIDCSGFQGLLIEKTLHSGYDDWSHWLPCDSAVAMQTEAVAEPIPYTRSIARDAGWQWRIPLQSRVGNGMVFCSRYKSDDDAIQMLTDNVEGKPLNDPRVIKFRTGTRRKHWNKNCIAMGLSSGFIEPLESTSIHFIQRSITRLMQMFPFDGIRQPDVEEFNTQMDNEMTHTRDFIILHYHVTNRTDTPFWRFCKSMDIPDSLKHRIELFKQTGRVFKNPTELFGENSWTQVMLGQGLMPEQYHPIVNMMSDEELKVFLDTIEERVAKQLQNMPKHNDFIQHYCRSA

SEQ ID NO: 88665 - protein, 503 aa, Sphingomonas sp.
  REGION 1..503: note = tr|A0A4R2PGQ4|A0A4R2PGQ4_9SPHN Flavin-dependent dehydrogenase OS=Sphingomonas sp. BK235 OX=2512131; GN = EV292_10657 PE=4 SV=1
MLIVGGGTAGWLTAAYLARALGGAVSITLLEAPELGTIGVGEGTFPTIRETLRFLGIDEAAFVRDAGATFKQGVRFAEWQPPVAGVPHSYFHPFDPPYQGAGLVPHWLRQDARARAPFAEAVSIQQRVAAARRAPKQPGEGDFDGPLHYAFHFDAARLAALLATRARALGVAHRSARLRAVVGAADGGIARVETDIGALTADLYVDCTGFRAEMIGEALRSPFHSVADQLFTDRALTCKIPYDSPDTPLESATVATAHAAGWIWDIGLAGARGIGCVYASGYMGDDAAAETLGRYLGRDPAAIAPRRIAFTPGWRERSWIGNCVAVGLASGFLEPLESTGVVLIEAAAAMIAELLPSDGPVDAPAARFNALLAARYENIAAFLKLHYCLSARPEPFWRDHRDPATIPPRLRDWLDQWRHRPPSRFDFQLESETFAHFNYQYILYGMGYATAGGSADAAATERGERLLARVRTFGERAARELPPHRALVEQLAAAPISPARTGS

SEQ ID NO: 88666 - protein, 499 aa, Rheinheimera sp.
  REGION 1..499: note = tr|A0A0U4UYW3|A0A0U4UYW3_9GAMM Tryptophan halogenase; OS = Rheinheimera sp. F8 OX=1763998 GN=ATY27_07595 PE=4 SV=1
MQANKPVREVVILGGGTAGWISASLLVKLLGKSIRITLVESDEIGIVGVGEATIPPIMTFNAALGIDEKAFVRATKGTIKLGIEFENWRQIGDRYMHAFGSIGKEFPSCNFHHFWVRSQKLGMPYDFWDFSLAYQAAVKHKFGHLAKIEGVNLPGLSYAYHFDAGLYAQFLRQFSENLGVRRIEGKVGQVLRHANSGDVATLVLQNGEQVHGDLFIDCSGLHALLIEKTLNTGYEDWSHWLPADSALAVPCASVEPITPYTKSIAHAKGWQWRIPLQHRIGNGFVYSSKYCSDEEAKATLLANLDGEPLAEPRKISFKTGRRRKQWSHNVVSIGLSSGFLEPLESTSIHLIQSGVLRLLKFFPNNGISPAMRDEFNRLSQIEFEQIRDFIILHYKLNERTDSQYWLDCARMDVPETLRRKMAMFRDTGMVQREQDELFSEIAWQQVMIGQGAIPQDYHPLVEALNETQLRDLMDNLKAVMQVTVNRLPPHQDFIDYCVR

SEQ ID NO: 88667 - protein, 520 aa, unidentified
  source 1..520: note = Gammaproteobacteria bacterium
  REGION 1..520: note = tr|A0A3B9NSH5|A0A3B9NSH5_9GAMM Tryptophan halogenase; OS = Gammaproteobacteria bacterium OX=1913989 GN=DCG72_10460; PE = 4 SV=1
MSSAIRNIVIIGGGSAGWLTAGIIASTYAPNSQDKGLRVTLIESPDIKTIGVGEGTWPSMRRTLKRIGLSETDFIRFCDASFKQGTAFYGWMSDPSACYTHPFMPPNNFDALNPVDGYLAAHASARFDDTVCPQVALFANHLAPKQITTPEYAGQANYGYHLDAGKFATMLQRHCTEQLGVHQIVANVTEVLCRPNGDIDRLKTDRTDDLEGDLFIDCSGSQGLLINGLYEVGFIGRDDVLFNNRAIAAQTPYLDETAPIASCTHSTAQSAGWIWDIGLPTRRGTGYVYSAQHQSDAAAEQTLRQYIERTSTSEIAESVQTLTIVFEPGHRERFWHRNCVALGMAAGFIEPLEASALVLVELGATMIADELPADRSDMDSVGKRYNDRFRYRWDQIIDFLKLHYVLSTRTEAYWADHRNPSSIPESLQSLLTTWAYRAPWHHEGYHKDEMFPSASYQYVLYGMGFRPSRALPKHRHVEQDLAAAHHTFAQVTKQANQFRNQMPSNRDLLETLKQHRFQTV

SEQ ID NO: 88668 - protein, 508 aa, unidentified
  source 1..508: note = Novosphingobium fuchskuhlense
  REGION 1..508: note = tr|A0A117UTY0|A0A117UTY0_9SPHN Tryptophan halogenase; OS = Novosphingobium fuchskuhlense OX=1117702 GN=AQZ52_13225; PE = 4 SV=1
MSTAVQHIVIVGGGTAGWLSACVLAARLPDKRITLVEAPDIPTIGVGEGTWPTMRETLATIGIPESEFLATCDAAFKQGSRFDGWRDGSAADSYLHPFSAPPAAEMRALASAWQTGGASGPFAAAITPQHAVCAAHLAPRQRSMPDYAGALNYGYHLDAGKFAALLMRHATQRLGVTRIAAQVGGVTCAANGDIAALVLQDGEQLPGDLFLDCSGQAGILIAGQCGADWVDRSDVSFNDRALAVQVPVEPGSPIAAQTIGTAHEAGWLWDIGLPARRGIGCVYASRFLSDERADEILRAYVAARVPGTDVAALTPRKLTFRTGHRDRFWIGNCLAVGLSAGFIEPLEASAIVLIELSLKALVENVPQTRAAMDIHAARFNEVFRYRWDRIVEFLKLHYVLSARTEPYWQAQRAAETIPARLAECLTLWRDQSPSAWDFPRVDEMFPAASQQYVLHGMGFPVPLSGEDPSPARLAEVAAKARALAAALPTARDYLDRLAAQSAAARIPA

SEQ ID NO: 88669 - protein, 505 aa, Sphingomonas sp.
  REGION 1..505: note = tr|A0A0Q4CU87|A0A0Q4CU87_9SPHN Tryptophan halogenase; OS = Sphingomonas sp. Leaf9 OX=1735674 GN=ASE58_01720 PE=4; SV = 1
MTDRRIASVCIVGGGTAGWMTAAALANRLGGLNVAVRLIESEEIGTVGVGEATLPHIRAFNATLGIAEADLMRATEATYKLGIEFCDWGRLGDRYIHPFGNYGPSDDAIPFYHQWLRLRSMGDTSRLDDYSYPIVAAEQNRFRHPASEPGRVESSFGYAYQFDASLYAAFLRRYAEARGVERVEGKVVDVALDAESGFVRHVTLADGRVVGAELFIDCSGFRGLLIEGALQSGYDDWSRWLPCNRAVAVPTVSHGPLGPYTRATARTAGWQWRIPLQHRVGNGHVYCSDFISDDEAQQQLVDNLDAPMQAEPRRLRFTTGRRRDFWKRNVVAIGLAGGFLEPLESTSIHLIQDGITELLGLFPDQEFAAADIDEYNRRMALHYERVRDFLLLHYVATERDDSPMWRHFRALTLPDSLQHKIDTWRARGYIVPYQFGLFLPPSWVAVMLGQGLVPDAFDPRVAGIEGGALAKRAAALRAEVAGAVRATPDHAEYIRQSPAAAGLAA

SEQ ID NO: 88670 - protein, 489 aa, Sphingomonas sp.
  REGION 1..489: note = tr|A0A0Q4CST9|A0A0Q4CST9_9SPHN Tryptophan halogenase; OS = Sphingomonas sp. Leaf9 OX=1735674 GN=ASE58_01310 PE=4; SV = 1
MMRIVIAGGGTAGWLAAALLTRQLAGLVEVTLVESEAIGTVGVGEATIPTIRSFHALLGLDEREFMAATGASFKLGIAFEHWARAGDRYLHSFGEVGRSTWMGDFQHFWLEAQRQGAAADIGAYCLEHEAAEAGRFLGGPDTPLNYAYHFDAGRYAAYLRGRSEAQGLTRIEGKIAQVERDGDSGDIAALVLDDGQRVAGDLFLDCTGFHALLIEQALGVGFEDWGHWLPTDRALAVQTRATGPALPYTRAIAHDAGWRWQIPLQHRIGNGLVYSSRHLGDDAARDRLMASVEGQPLTEPRLIRFRTGRRLAMWERNCVALSLSSGFVEPLESTSLHLVMIALTRLVQLLPFGHPGAAARTRFNDQSRREIEAVRDFVLLHYHLNQRPEPFWRERREIAPPDSLNERIALFAEGAHTYQSADDLFRTGSWTQVMLGQRLTPASWHPLARAMPPGELGTALDGLRSNIAATVARLPTHQQFLDQYCRSGD

SEQ ID NO: 88671 - protein, 503 aa, Stenotrophomonas sp.
  REGION 1..503: note = tr|A0A4Q7RR82|A0A4Q7RR82_9GAMM Tryptophan halogenase; OS = Stenotrophomonas sp. BK441 OX=2512175 GN=EV592_1847; PE = 4 SV=1
MTPDAHALPDTPVRRVVIAGGGTAGWMAAAAISKILGRQLDITLVESEQIGTVGVGEATIPPLVTFHRLMEIDEREFMSATQGAIKLGILFENWLEIGHRYFHSFGTTGRDHWTAGFQHFWMRGRERGLASEYADYNVESVAAREKRFAHLPKMGMNYAYHFDASLYGRFMRAIAERHGTRRVEGKIAEVLLHEDTGCIRSLRLESGDEIAGDLFIDCTGFRALLIDKALGVPFEDWSHWLFNDSAQAVQTAAVEEAAPYTSAIAEEAGWQWRIPLQRRVGNGIVYSSRHMDDARAREIFEGSLRGEQTSRYLQIRFRPGRRTRSWHRNCIALGLSGSFIEPLESTTIHLIQRGITRLMQCFPKVITAVDIEEYNRQMGEELVHVRDFVVLHYALTRRRDTDYWRACSEMTLPPSLQHRIDLFRETGTVFHQPNELFAENSWIQVMMGQGNLPRQHHPTADLMGDEELARFLNAARDHAARTVAALPSHQAYLDRWCPTAPTP

SEQ ID NO: 88672 - protein, 502 aa, Sphingomonas sp.
  REGION 1..502: note = tr|A0A0Q4CQJ4|A0A0Q4CQJ4_9SPHN Tryptophan halogenase; OS = Sphingomonas sp. Leaf9 OX=1735674 GN=ASE58_07850 PE=4; SV = 1
MTDNRIRTIVVLGGGSAGWMAAAALATYLGRGVSVRLVESEEVGIVGVGESSVPHMKTFNSETLGIDERTFVTRTNATFKLGIRFTDWGRIGDSYIHGFGTIGQGLGPLPFHQLWLRRFLAGKAAPLGDYSLQTVAAPAGRFQWNGPPGSLLSDIAYAYHLDAVLYARFLRELAERRGVERIEGKVVDVEQQGENGHVAAITLADGRRVEGEFFIDCSGFRGVLIEQTLKTGYLDWRHWLPCDRAFAVPSETVGPPMPYTEAAARSSGWQWRIPLQHRVGNGHVYSSAYESDEQAMATLLDTLQGQALDVPRQLRFTAGRRVKAWSGNVVALGLAAGFLEPLESTGIYLAQAGIRRLLGLFPGRDFDPALADRFNRETALEYERTRDFLVLHYKATTRDDTPFWRYCRTMDVPDPLREAIELFRADGRYFRNGEDFFALPSWVQVMIGQGIVPADYHPIVDAMPEGHLDQYLARVRGEIAGAVAAMPPHHQFIDHHCKATVA

SEQ ID NO: 88673 - protein, 503 aa, unidentified
  source 1..503: note = Gammaproteobacteria bacterium
  REGION 1..503: note = tr|A0A2E4JZH7|A0A2E4JZH7_9GAMM Tryptophan halogenase; OS = Gammaproteobacteria bacterium OX=1913989 GN=CMQ32_04965; PE = 4 SV=1
  VARIANT 163: note = Xaa can be any naturally occurring amino acid
  VARIANT 182: note = Xaa can be any naturally occurring amino acid
MKVKSIVILGGGTAGWMTANALQKKWQHLGINITLVESPDIGIVGVGEGSTPKLKHFFDSLGIKESEWMPECNATYKNGISFKNWSTVSGYEEYFHPFGCSLDFVTLKFLYDNATLRRKGVDVIAHPNRFSLMASLAEKKLAPIASKNFPFHFQYGYHFDSVXIGKFLQKKAAEVGGINHIXATVKSVELNSNGDITSLKLNNDQILSGDFFVDCSGFASILLEKTLKVPFISFSDNLFNDSAITIPTEIEPNIPSQTVSTALTNGWVWRIPLTNRIGNGYVYSSQYCTQDEAEKELRAHLGVLESDIEARHLKMKVGRAKESWRNNCVAVGLSQGFIEPLEATALQFVISTIEEFATAFEEGGFTHQFKELFNQRMNMNFEGIRDYIVLHYKTNSRSDSQYWIDNRENKNIPNNVKDMLGCWYNIQSLEDELKRLNIGSYYTKMSWNCMLSGMGLFPPKESLTSADAQTAQADLEFVDKFIGGCSMNFKPHKKMLIGANTST

SEQ ID NO: 88674 - protein, 495 aa, unidentified
  source 1..495: note = Gammaproteobacteria bacterium
  REGION 1..495: note = tr|A0A2A4VKL4|A0A2A4VKL4_9GAMM Tryptophan halogenase; OS = Gammaproteobacteria bacterium OX=1913989 GN=COB35_13510; PE = 4 SV=1
  VARIANT 23..24: note = Xaa can be any naturally occurring amino acid
  VARIANT 35: note = Xaa can be any naturally occurring amino acid
  VARIANT 38: note = Xaa can be any naturally occurring amino acid
  VARIANT 65: note = Xaa can be any naturally occurring amino acid
  VARIANT 74: note = Xaa can be any naturally occurring amino acid
  VARIANT 83: note = Xaa can be any naturally occurring amino acid
  VARIANT 86: note = Xaa can be any naturally occurring amino acid
  VARIANT 117: note = Xaa can be any naturally occurring amino acid
  VARIANT 133: note = Xaa can be any naturally occurring amino acid
  VARIANT 142: note = Xaa can be any naturally occurring amino acid
MVIVGGGTAGWMAANLFANKWSXXQVQVTLVESPXVGXIGVGEGSTPTLKRFFDMLNIAESTWMXRCNATYKMXISFNDWSPXSGXKSYSHPFTSQIDTFTSRAFLVNGRTRRLGLXVNITPSDFLINGVLAXQGKGPLTPXNFPFKMEYGYHFDSNLLGKFLADFAVSKGIFHKRAHVERVERANNGDINAIVTRDGEVIKGDFFVDCTGFSALLIQKTLGVKFNAYKDNLFNDSAVVMPTTVSDKIPVETTSTALSTGWCWKIPLRNRFGHGYVYSSGFISADDAETELRTHLGCLDADIPARHLKMNVGSLDQHWSHNCLALGLSQGFIEPLEATALHLVQLSIEMFITKLEQGGLKSLIARNQVREEYNHFVKERFERVRDYIVAHYKLNTRDDSDYWRANRDNQHLSDSLLHILDVWYKREDLAAEIKRQGLNNHFDAVSWQCLLGGYGAFPPLARNQPNQGDLYVEQNVAQFLRGCALNFSSHQDNLNK

SEQ ID NO: 88675 - protein, 493 aa, unidentified
  source 1..493: note = Gammaproteobacteria bacterium
  REGION 1..493: note = tr|A0A4V2AB65|A0A4V2AB65_9GAMM Tryptophan 7-halogenase OS=Gammaproteobacteria bacterium OX=1913989; GN = EOO52_05285 PE=4 SV=1
MLEKKMKIVIAGGGTAGWIAAAALSNQMGGILDITLVESQEIGTIGVGEATIPPMRTFHRLIGIDEQEFMRATNATFKLGIQFENWKQIGEKYFHSFGITGKQTLITDFIHFWLRGRELGIASEFGDYCLEFKAALMDRFSLTENAKINYAFHLDAGRYANFLRQRAESRGVKRVEGKIAEVQQNPNSGFISLLKTESGEEIPGDLFLDCTGMRGLLIEQCLKTGFEEWGHWLPCDSAIALQTESIAPAVPYTKSIAHHAGWRWQIPLQHRVGNGLVFSSKYMSKDEALNMLLSSVDGKVLTEPNVIKFKTGRRKKSWNKNCIAVGLASGFLEPLESTSIHMIMTAITRLLLLFPHGEIKQSTIDEYNIQAESEYVKIRDFIILHYKATERSDSLFWQYCKDMEVPDELMHRMTLFKEAGKSFQVEGELFRLDSWTQVMLGQGIMPSTYHPIVGLMPAPDLKRFLSNIAADVDKNISMMSLHQDFVTTYCGKM

SEQ ID NO: 88676 - protein, 494 aa, unidentified
  source 1..494: note = Gammaproteobacteria bacterium
  REGION 1..494: note = tr|A0A2D9STD9|A0A2D9STD9_9GAMM Tryptophan halogenase; OS = Gammaproteobacteria bacterium OX=1913989 GN=CMQ11_18105; PE = 4 SV=1
  VARIANT 66: note = Xaa can be any naturally occurring amino acid
  VARIANT 96: note = Xaa can be any naturally occurring amino acid
  VARIANT 128: note = Xaa can be any naturally occurring amino acid
  VARIANT 156: note = Xaa can be any naturally occurring amino acid
  VARIANT 162: note = Xaa can be any naturally occurring amino acid
  VARIANT 174: note = Xaa can be any naturally occurring amino acid
  VARIANT 189: note = Xaa can be any naturally occurring amino acid
  VARIANT 215: note = Xaa can be any naturally occurring amino acid
  VARIANT 276: note = Xaa can be any naturally occurring amino acid
  VARIANT 293: note = Xaa can be any naturally occurring amino acid
  VARIANT 365: note = Xaa can be any naturally occurring amino acid
  VARIANT 493: note = Xaa can be any naturally occurring amino acid
MKNQAVKNVVIVGGGTAGWMTAAALTKLIGKNLHISLVESDQIGTIGVGEATIPTFFALHQLLQIXEAEFLAEVHGTIKLGIAFENWKQLDHQYIXAFGYTGQSCWAAGFQHFWLKAKTLGISEEYSXYSPELMAAVAGKFGLLQQNGLNYAYHIXATRYAXYLRRLAEKSGAXRIEGKIIQVKQTQDXDIASLHLDNGQTVQGDFFIDCSGFAXLLIDKTLNTGFQEWSQWLPCDRAVAVQTRSVSPPIPYTRSIAQACGWQWRIPLQSRVGNGXVYSSDYLSDDQATSLLXTNIQGDTLIEPRVIPFKTGQRHFHWKKNVVALGLAAGFLEPLESTSIHLIQRGIIRLMQMFPYGGINQPDQXEFNQQMSDEYEFIRDFIIMHYHITERTDTEFWRRNSAMSIPGSLQHRLSLFQESGRVFQAEGDVFGENSWTQVMLGQGLTPASYHPIVDMMSDHELRQFMRHQLQRVELVIKQLPDHNAFIAKYCPAXL

SEQ ID NO: 88677 - protein, 504 aa, Sphingomonas sp.
  REGION 1..504: note = tr|A0A4R2PB99|A0A4R2PB99_9SPHN Tryptophan halogenase; OS = Sphingomonas sp. BK235 OX=2512131 GN=EV292_11046 PE=4; SV = 1
MERSERQRVVVVGGGTSGWMTAAALAKLLPARCTVDLVESEAIGIIGVGEATLPHIRAFNERLGVAEAEFMAATRATFKLGIEFRDWARIGDSYIHPFGTFGRGTGEVQFHHYYTRLLHAGVALPPIEAFSMACSLARANRFGAPSVDPRQIASTFGYAYQFDAVAFAPYLRRLAEGLGARRTEGRIVDVARDPLSGDVTAVVLEDGRRVEGDLFVDCSGFVALLIGKTMGEPFDDWSRWLPADRAVALPCRTATAVTPYTSAIAMPSGWRWRIPLQHRTGNGYVFASDFLDEGAAADALVAAVEGTPLAEPRVLRFKAGRRARSWVNNVVAIGLASGFLEPLESTSLYLVQQAITALVELFPERRIAAADRDEFNRLVNMEYDRVRDFLILHYHATQRDDSPFWAYVRNMEIPASLAEKMALFRRRGRVVKYREGAFLDASWVSVYLGQRVLPDGHDPRADGPPLDSLAAGMERLRGEIATAIGGMADHRDFLAGYCPMPAAA

SEQ ID NO: 88678 - protein, 503 aa, unidentified
  source 1..503: note = Gammaproteobacteria bacterium
  REGION 1..503: note = tr|A0A4Q5Q7H5|A0A4Q5Q7H5_9GAMM Tryptophan 7-halogenase OS=Gammaproteobacteria bacterium OX=1913989; GN = EOO53_07920 PE=4 SV=1
MKNTIPKSILIVGGGTAGWMAANILLHAWHAHEVQITLIESADIGIIGVGEGSTPALRKFFSYLKVAEKEWMPACNATYKAGIQFSGWAAENAYKNYFHPFYSQHDIEHSQYFFHNVNLRRHGVDCVTKPDEYFLTAELARQHKDPAPLDRKLTNQIEYGYHFDSVLLGKFLRDRAKSFGLIHIVGNVSDVLLTHDGAIASVNTTDNKLNADFYIDCTGFAGLLINKALQEPIRTFKENLFNDSAVTIATDSDEKILPSLTLSTALPHGWAWKIPLTNRFGNGYVYSSDFISSDQAEIELRNHLGDKAKDKSARHLKMRVGRVENHWKANCLAVGLSQGFIEPLEATALAIVQSTLENFVDRFDHPITPNTIREFNSYINSLIDGIRDYIVTHYFLNTRNDTDYWKACREQVKLPDALQELLDAWDSGGDFMQTLFSQKREKIYKPESWFCILAGMGRFSTLNDQSSKRNLAAPEKIALLNNRIFSEKMFIDHKEYLNRLSQP

SEQ ID NO: 88679 - protein, 558 aa, unidentified
  source 1..558: note = Gammaproteobacteria bacterium
  REGION 1..558: note = tr|A0A2E4Y9M4|A0A2E4Y9M4_9GAMM Uncharacterized protein OS=Gammaproteobacteria bacterium OX=1913989; GN = CMD92_02245 PE=4 SV=1
MKSKLNKLVIVGGGINGWFTAGYMKNKHPWLDVKIIESDTIPIIGVGESVVPQVNDLLETLGLEERDWMSYTNSIYKLGNKFVGWSSPGKRHHVTDHWNAPKEDVQYYSFSFALPEKHLTSSFYNQLTTDDYFTNSKGEAGVDDKWNDYWLQLVREGKRNPKEASQDTHEQHYLMDGNKAPFDMNDNPLLGDWQSYSFHLDANRFPELIRDKVALPKGVQHIIGDVKEIIKDEDGYITKLLLEDGTEHEADLFVDCSGLHKVLVGGMNNEWHDYDFIHTQDAVVGPLKYKDVYNEFRPYTQTYAQDEGWNFIISLYNRMGSGYIFDRTEISPEDAMEKFKKYWEGYEFIKPPKHISWKAGRMVTPWNKNVLSIGMSHSFIEPMEGNAMYISQWGIQLLDRFVNRQQEDDEIISAGSIHAYNKSMNGLEDHVANFIAYHYTLTNREDTNFWKKQKEYGKKHNHKEAIWKEYKNPYNQIGNSLYPDYMWMTVATAMGHFDDTVELNTKKELMNKADIMFEYCRKLSEAQGEMAPHAYDWHRKFLFNGKSHEEVLEEALKK

SEQ ID NO: 88680 - protein, 500 aa, Rheinheimera sp.
  REGION 1..500: note = tr|A0A0U4VKS3|A0A0U4VKS3_9GAMM Tryptophan halogenase; OS = Rheinheimera sp. F8 OX=1763998 GN=ATY27_01525 PE=4 SV=1
MMKKQRVVIAGGGTAGWMTAAALGKLMGKQLDITLIESDEIGTVGVGEATIPTLHLYHRLLNINEADMMAATNATFKLGIMFENWRDVGKDYLHSFGFLGKDCWACGFQHFWLKGREMGLASEIGDYCAEHLAAREGRFAALAGQDQNHAYHFDASLYAKFLRGIAETHGVKRIEGKIAEVQQHVFAPQHPQNGFIKALLLESGQLLEGDLFIDCTGFRGLLIEQTLMTGYDDWTHWLPCDSAVAVQTVSNGTPVPYTRSISHPAGWQWRIPLQSRVGNGLVYCSKYLSDMDAKTLLKANVQGEMLTEPRLIKFRTGTRRKHWNKNCIAIGLSSGFLEPLESTSIHLIQRSIIRLLQMMPAGDVVQADVDEYNLQTKIEMENIRDFIILHYKVTERNDSAFWRHCAAMEIPPSLAHRIEMFGEAGKVYKFAQELFGESSWIQVMLGQGLTPKQHHPIVDLMPQSELAQFLGNIKTNVARQVQAWPPHYDFVQHYCKSRMM

SEQ ID NO: 88681 - protein, 495 aa, unidentified; identical to SEQ ID NO: 85080
  source 1..495: note = Gammaproteobacteria bacterium
  REGION 1..495: note = tr|A0A2D7FW44|A0A2D7FW44_9GAMM Tryptophan halogenase; OS = Gammaproteobacteria bacterium OX=1913989 GN=CMP96_02230; PE = 4 SV=1

SEQ ID NO: 88682 - protein, 502 aa, unidentified
  source 1..502: note = Alteromonadaceae bacterium
  REGION 1..502: note = tr|A0A1Y6BZ09|A0A1Y6BZ09_9ALTE Tryptophan halogenase; OS = Alteromonadaceae bacterium Bs31 OX=1304903; GN = SAMN02745866_01738 PE=4 SV=1
MVFDMQFKVRKIAVLGGGTAGWSAASMLAERFRKHDVQITLVESPRIASVGVGEATVPGILGVHRSLNIDEREFIKATNATLKLGIEFRAWNYSGGRFFHPFSQFGAAIDKVDFHQCWNRLNKEKRYTNIEDYSLCASLAKAGRFALPDNGSNNPLAWYGYAYHFDASLYARFLRDYAESRGVIRLSDTVHAVQKNPDNGFIDTLHLESGEKISADLFFDCSGFRSRLLGAEMAVETIDWSKHLPCDRAVAVQTESEGPLLPYTSSTAMSEGWRWRIPLQNRTGNGYVYSSNYIDDEQAENDFLSQLSEPLRTEPRVIQFKAGMRKKFWEKNCIAIGLASGFIEPLESTSISLMHTGVDKAIVHMPDLLVSDEGIDRANELNRLEYEGIRDFIILHYWASKRDDSQFWRDVRKAPIPDTLATKIAAYMENGALLQYPQESFREPSWLAMYNGFELHARDCDSSAKALPIEQIDTLFSKMRSAIEKGVSHAPSHADFLRSVYD

SEQ ID NO: 88683 - protein, 503 aa, unidentified
  source 1..503: note = Gammaproteobacteria bacterium
  REGION 1..503: note = tr|A0A2A4VQE8|A0A2A4VQE8_9GAMM Tryptophan halogenase; OS = Gammaproteobacteria bacterium OX=1913989 GN=COB35_10100; PE = 4 SV=1
MSKPNHIVIVGGGTAGWMAANLMAQAWQSQGIKITVIESTRIGTIGVGEGSTPYLRQFFHRLNIPEAEWMPACHATFKCGISFPDWSTNKGYENYFHPFYSMIDAPNAPLFFENCSYRRQGSDVFAHPNDFFVTSKLAQAKKSPIAATPPRKPVEYGYHFDAELLGQYLAKKALEKGVNHIDDKVLSVETIADGSISHLITENSGELHADFFVDCSGFSGLLIQQTLGEKITSKKGYLKCDSAVALPTPLNLQNNVPSETVSKALKYGWVWNIPLTKRFGNGYVYCSDYISKAEAEAELRQHLGMENSDAKAVHLHWQPGRLENHWRKNCVAIGLSQGFLEPLEAPMLYLVQRTTENFIAYFQHENFNSDLKTRFNREINLLIDGTVDYLQAHYKANTRDDSQFWIDCRENTCMSPSLSAILSGWDESRNFEMVMQEQANTQVYQRASWYCLLAGMGRFKPISEADNNVNKNRAEQNHQNANQDCTAQSEVFIAHNEHLRTMT

SEQ ID NO: 88684 - protein, 519 aa, Kangiella sp.
  REGION 1..519: note = tr|A0A2G2L2Q2|A0A2G2L2Q2_9GAMM Tryptophan halogenase; OS = Kangiella sp. OX=1920245 GN=COA86_10495 PE=4 SV=1
MAFKKVVIVGGGSAGWITAAYMNAILNSREHQFVEFVVIESPTLPRISVGEATVPTINRLLQTLRINEKDFMKATDATFKQGIKFVNWFKENDHSYYHTFDRRESQASGHLASKNWLNSDRSIPFAETVSIQPQLCEMNYSPKLPTDGHYQSPLTYAYHMDAEKFANYLCTYSKSQGIKHIQDDVVDVMVTADQNISAIITKTGLKIESDLYIDCTGFSSLLIGKKLGVGFKDYSQWLICDRAVTMQIPYQYYYPQEIRPYTTSTALSSGWVWDIGLVNRRGIGYVYSSEFISDADAEKELRQYEGEHSSGIACRTVKFSVGRRESFWKSNCVAIGLSAAFVEPLESTGLNMIEFAATTLAEHFPMGDEMKPLADRYNKIMSNRFDDALDFINLHYCLSRRTDSAFWREVQKPKRILSSVQQQLDLWKLKSPSEADFDNHFILFNHTNYEYILYGMSFMETDAIDNGYSSKDNIKDKARNKSKVPQMIVDNIQAAKNNLVPHERWLQEEIGMKKYTNKK

SEQ ID NO: 88685 - protein, 520 aa, unidentified
  source 1..520: note = Gammaproteobacteria bacterium
  REGION 1..520: note = tr|A0A3C0L0J1|A0A3C0L0J1_9GAMM Tryptophan halogenase; OS = Gammaproteobacteria bacterium OX=1913989 GN=DCL32_05025; PE = 4 SV=1
MSSAIRNIVIIGGGSAGWLAAGIIASTYAPNSQDKGLRVTLIESPDIKTIGVGEGTWPSMRRTLKRIGLSETDFIRFCDASFKQGTAFYGWMSDPSASYTHPFMPPNNFDALNPVDGYLAAHASARFDDTVCPQVALFGNHLAPKQITTPEYAGQANYGYHLDAGKFATMLQRHCTEQLGVQQIVANVTEVLCRPNGDIDRLKTDRTDDLEGDLFIDCSGSQGLLINGLYEVGFIGRDDVLFNNRAIAAQTPYLDETAPIASCTHSTAQSAGWIWDIGLPTRRGAGYVYSAQHQSDATAEQTLRQYIERTSTPEIAESVQTRTIVFEPGHRERFWHRNCVALGMAAGFIEPLEASALVLVELGATMIADELPADRSDMDSVGKRYNDRFRYRWDQIIDFLKLHYVLSTRTEAYWADHRNPSSIPESLQSLLTTWAYRAPWHHEGYHKDEMFPSASYQYVLYGMGFRPSRALPKHRHVEQDLAAAHHTFAQVTKQANQFRNQMPSNRDLLETLKQHRFQTV

SEQ ID NO: 88686 - protein, 495 aa, unidentified
  source 1..495: note = Gammaproteobacteria bacterium
  REGION 1..495: note = tr|A0A4Q5QA73|A0A4Q5QA73_9GAMM Tryptophan 7-halogenase OS=Gammaproteobacteria bacterium OX=1913989; GN = EOO53_08280 PE=4 SV=1
MDTAIKKVVIAGGGTAGWMAAATISHHFSSVLDIRVIESEEIGTVGVGEATVPPMQAFHKLLNIDEQEFLRATQGTFKLGINFENWARKGDEYIHSFGITGKVFWIADFVQFWTKARGMGLENDYGDFCLELQAAKLGKFALTENPAINYAYHFNASLYAKFLRKYSEARGVRRTEGKIVEVATHTDNGFIKSITLASGEVVEGDLFIDCTGFRGLLIEQTLHTGYEDWSQWLLNDSAIAAQTKNPGPALPYTRAVAHQAGWQWHIPLQSRIGTGFVYCSKYISDEDARKTFINNLPGELINEPIVLKFKTGRRKKSWNKNCVALGLSSGFIEPLESTSIHLIMSSALRLVKFFPANGIKEANVAEYNQQTVTEIERIRDFVILHYKATERDDTPYWRYCRDMVAPETLTHRINLFKETGIAYRTEGEIFEKDSWSQVMIGQRIVPEDYHRYVDEVNHKDLLKYMRDYAKGVKDHAMQLPSHEDFVRGYCSENDV

SEQ ID NO: 88687 - protein, 518 aa, Kangiella sp.
  REGION 1..518: note = tr|A0A2G2L8H2|A0A2G2L8H2_9GAMM Tryptophan halogenase; OS = Kangiella sp. OX=1920245 GN=COA86_05545 PE=4 SV=1
MTDDSKNSVTGQNIRNVVIVGGGSAGWMTAAALIKVLGKQNISIKLIESKTIGTVSVGEATIPQIRNFNNMLGINENDFLKHTHGTFKLGIEFVDWNNINHTYMHPFGPYGSSMGGVHFHHFWLKDRDNKDYKGVLETEHYQDDLLEYCLEGYAAKQNRFTRPLNVPNTPLSTVNYAFHFDAILYAKYLRVFAEHLGVNRIVGTVEEVITNQDDGFIQSVRLSNGDIIEGDLFIDCSGFKGLLIEQTLKNGFDDWSHWLPCNSAAAQSSESLEDIKPYTISTAQNCGWQWQIPLQSRIGNGHVYSNAHMSDDEAIAILQKNMPSAPMGEPRILNWRNGRRKKTWIKNCIAIGLSAGFLEPLESTGLQLIQASIERLLSLFPNKAFHQANIDSYNRFANAEIEQIRDFIILHYKQTNRTDTVFWESCKNMDIPDSLQRKINLYQSSGRIIRESSELFSEISWLSVLNGQGIKPKNYHPLVDINSDDNRIEQMQKMKFIIRQCAEKMPLHRDYINKQCAM

SEQ ID NO: 88688 - protein, 603 aa, Microcystis aeruginosa; identical to SEQ ID NO: 88646
  REGION 1..603: note = tr|A0A552BNS1|A0A552BNS1_MICAE Tryptophan halogenase; OS = Microcystis aeruginosa Ma_OC_LR_19540900_S633; OX = 2486261 GN=EWV62_06645 PE=4 SV=1

SEQ ID NO: 88689 - protein, 518 aa, unidentified
  source 1..518: note = Gammaproteobacteria bacterium
  REGION 1..518: note = tr|A0A2A4VUB2|A0A2A4VUB2_9GAMM Tryptophan halogenase; OS = Gammaproteobacteria bacterium OX=1913989 GN=COB35_07055; PE = 4 SV=1
MSKTAVKSIIIVGGGSSGWMSALYLNHLYNQQQQNIQITLIESKDIGTIGVGEATVHSIRFFFAAMGIDEDELLKETNATLKNGILFKNWMKPNKTGEEHQYFHPFEHVQIDSGLDISSRWLLSGREQHERFDQGTSLAAHLIAKGHSPKAANSRAYEGIVPYGYHLDATLMGRYLRRKAIAAGVIHIEGKVNDVVVDNGNIKSLHTEHGEHNADVFIDCSGFKGILINQLKADNWRSFEDALPCNRAVAMQIAYPENVTPKPYTMATALDNGWAWEIDLVNRRGTGYVYDGNRLTKEQAEQALKEHNGVDAKILKTVHLKMNIGCREQFWLGNCITIGLSGGFIEPLESTGLHIVNLGVRLLATHLSSSQVEQSVRDSYNRLMAGVYDDLKQFIVAHYCLTDRDDTEFWRQAQKSVGYCPDLKRNLAVWNHKVCEYFDLAGGYSTTFTDENYRFILYGMQHYPQLNMPIDLNESKQVFEKLGRRAQEVVKHTLSHQDYLQSLHDMPLTDIAAMWKVN

SEQ ID NO: 88690 - protein, 507 aa, unidentified
  source 1..507: note = Gammaproteobacteria bacterium
  REGION 1..507: note = tr|A0A4V1ZR82|A0A4V1ZR82_9GAMM Tryptophan 7-halogenase OS=Gammaproteobacteria bacterium OX=1913989; GN = EOO53_01695 PE=4 SV=1
MNKNTIRKVVIVGGGTAGWMTAAALSKVMGCQNYDITLVESDQIGTVGVGEATIPMIMFFNKVLEINEFEFVRETNATFKLGIEFVNWKNIGSSYFHPFGLMGVDMDGVTFSHFWQRWKNEGGNLDFSKFNIETEAALSCKFMKTDHERGPAILPPINYAYHFDAGLYAAYLKKYSEKRGVIRQEGKITQVKQNPTTGYIESVVLESGVEVKGDFFIDCSGFRGLLIEETLKAGYHDWSHWLPVNRAVAVPCESAGELLPYTRATAQEAGWQWRIPLQHRTGNGYVFCNNFISEDEATSKLMSRLDGAPRAEPRVLKFVTGARKKCWDKNCLAIGLASGFLEPLESTSIHLVQVTIAKLLTMFPRDGFNELLIKRFNDEMHWEYDDIKDFLIAHYKITEREDTEFWRYVKNMPIPDRLQEKLDTFRARGEMMVPLNELFKENSWFSVLAGQGFMPEAYHPVADSISDDELRLRLTKIRSGIQNRLNSMPKHADFIRDNCASAMMKHA

SEQ ID NO: 88691 - protein, 499 aa, unidentified
  source 1..499: note = Gammaproteobacteria bacterium
  REGION 1..499: note = tr|A0A2D6VBU5|A0A2D6VBU5_9GAMM Tryptophan halogenase; OS = Gammaproteobacteria bacterium OX=1913989 GN=CMP82_08825; PE = 4 SV=1
MQHSKVQKVVIVGGGTAGWMAAASLAKLLGKNLHVTLVESDEIGTVGVGEATIPTLLTLHELLKIKEQDFVAAVQGTFKLGISFENWRNVGEDYIHSFGYTGKDCWAAGFQHFWLKGKQLGLSEEFGDYCTELVAAKDQRFAVLPNNGLNYAYHFDASLYAKFLRGIAEDNGAVRQEGKVRQVLQDPSDGFITGVELESGQLIEGDFFVDCSGFRGLLIEQTLHTGYDDWSHWLPADSAVAVQTHSVGEPLPYTRSIAHESGWQWRIPLQHRVGNGLVYCSKFWSDDEATAKLLGNLEGEPLTDPRVIKFTTGTRRKHWNKNCVAMGLASGFMEPLESTSIHLAQRAIIRLMQMFPYDGVRQPDIDEFNSQMTFEIENIRDFIVLHYHVTERDDSRFWRHCRSAQIPDSLQHRIDLFKETGRVFKVPTELFGENSWVQVMLGQGLLPEQYHPIVNMMDAKELEEFLTSIKGSVNNMVRQLPPHQRFIDHYCKAPQPQIA

SEQ ID NO: 88692 - protein, 500 aa, unidentified
  source 1..500: note = Gammaproteobacteria bacterium
  REGION 1..500: note = tr|A0A2E9ZKC0|A0A2E9ZKC0_9GAMM Tryptophan halogenase; OS = Gammaproteobacteria bacterium OX=1913989 GN=CMQ12_11465; PE = 4 SV=1
MKVKNIVILGGGTAGWMTANLLHKKWERLGINITLVESPDIGIIGVGEGSTPRLKAFFDSLDINESEWMPECNATYKNGISFKNWSTVSGYEEYFHPFPSGLDFVTFKFLYNNATLRRKGADVIAHPNRFSLMASLSEKKLAPIASKNFPFHFQYGYHFDSVLIGKFLQKKAAEVGINHIQATVENVELHSNGDIRSLKLNNDQLLSGDIFVDCSGFASILLEKTLKVPFISFSDNLFNDSAVAIPTEIDPNIPSQTISTALTNGWVWQIPLTNRFGNGYVYSSKYCTQDEAEKELRAHLGVLESDVEARHLKMKVGRAQESWRKNCVAVGLSQGFIEPLEATALQFVYSTIDEFARAFEEGGFSNQFREEFNQRMNMNFEGIRDYIVLHYKTNSRNDSQYWIDNRENKNISNNLNDMLNCWYNTQNLETELKRLNIGSYYSQMSWTCLLSGMGLFPPKEKLTSADTKTAQADLDFVDNFIDGCSMNFKPHEQMLTRGLS

SEQ ID NO: 88693 - protein, 515 aa, unidentified
  source 1..515: note = Gammaproteobacteria bacterium
  REGION 1..515: note = tr|A0A2D7BUJ3|A0A2D7BUJ3_9GAMM Uncharacterized protein OS=Gammaproteobacteria bacterium OX=1913989; GN = CMQ75_03900 PE=4 SV=1
MKIKNIVIVGGGSSGWMTASAIAHNLPEINLTLIESPNIPNIGVGESTLGHINRFFRLLDLTDQDWMKECSATYKNSIQFTNFHKIGTRFQYPFGGFVMPPDDDKYKYSTEFDIPIFLDLQRLFPEEISCEDFVRFYNINSLLAEYNKQTTKDVCGFDFFNHTAYHLDADALAIFLKNRYSNRITHILDEVNNIECNELGITKIISTNHTLTADLFIDCTGFKSLLIEKTLDVDWYQFPHLPNNKAVTARIPYTTIEDQKNSIHNVTDCKALSSGWLWDIPLWKRKGAGYVYSSEFLTKDQAEEEFRKETGWNDNVNHISFRHGYHKKAFHKNVLAIGLSYGFIEPLESTGLLTTHENIIKFIKLMQLHEGHVNKLDKILFNTSCEAQMSGLSDFVGVHYALSRRDDTPYWHYVTNEIDQSRYEYDLHVKEENIAQSLHEIFTFDRFDSRKEGMFCILMGNNYNPAERVQFNYSTEQLKNINFKKNFIIDSIKSRIDFVKNLPSSYDFLYNHIYK

SEQ ID NO: 88694 - protein, 499 aa, unidentified
  source 1..499: note = Gammaproteobacteria bacterium
  REGION 1..499: note = tr|A0A2D5L8I8|A0A2D5L8I8_9GAMM Tryptophan halogenase; OS = Gammaproteobacteria bacterium OX=1913989 GN=CMP86_02405; PE = 4 SV=1
  VARIANT 296: note = Xaa can be any naturally occurring amino acid
MQHSKVQKVVIVGGGTAGWMAAASVAKLLGKNLHVTLVESDEIGTVGVGEATIPTLLTLHELLKIKEQDFVAAVQGTFKLGISFENWRNVGEDYIHSFGYTGKDCWAAGFQHFWLKGKQLGLSEEFGNYCTELVAAKDKRFAVLPNNGLNYAYHFDASLYAKFLRGIAEDNGAVRQEGKVRQVLQHPNDGFITGVELESGQLIEGDFFIDCSGFRGLLIEQTLHTGYDDWSHWLPADSAVAVQTHSVGEPLPYTRSIAHESGWQWRIPLQHRVGNGLVYCSKFWSDDEATAKLLGXLEGEPLTDPRVIKFTTGTRRKHWNKNCVAMGLASGFMEPLESTSIHLAQRAIIRLMQMFPYDGVRQPDIDEFNAQMTFEIENIRDFIVLHYHVTERDDSRFWRHCRSAQIPDSLQHRIDLFKETGRVFKVPTELFGENSWVQVMLGQGLLPEQYHPIVNMMDAKELEEFLTSIKGSVNNMVRQLPPHQRFIDHYCKAPQPQIA

SEQ ID NO: 88695 - protein, 532 aa, Rheinheimera sp.
  REGION 1..532: note = tr|A0A0U4X426|A0A0U4X426_9GAMM Tryptophan halogenase; OS = Rheinheimera sp. F8 OX=1763998 GN=ATY27_02830 PE=4 SV=1
MQSQPQHKNNNTAEQPIQTVVIVGGGNAGWLTAGRIAAKHNCQAGAIRVVLIESPGVPPIGVGEGTWPTMRSTLLALGISETEFIRECDATFKQGAKFARWVNGATDDFYYHPLVLPQGFGKADMAAYWLQGKTATDLAGPLSSFSNDLCYQEAICEQGLAPKTIRHAEYAAVANYAYHLDSGKFGLFLQRHCIEKLGVEHIQDDVIAVQSADNGDIAAVQTQNHGPIAGDLFVDCTGFKSLLLGEHYQVPFKRCDDVLFIDTALAVQVPYDSPDAPIASHTISTAQDCGWIWDIGLQHRRGVGYVYASRYCSEQQARDTLAAYVGPKIAELAVRKIPIVSGHRQHFWQNNCVAVGLSAGFLEPLEASALVLVELSAQMIAEQLPATRGVMDIVARRFNETFLYRWDKIIDFLKLHYILSQRTDSAFWRDNRDPATIPQSLKDLMQLWAHRAPGDLDFTSNNEVFPAASYQYVLYGMGFRSDTSRLRHQLTNWDFATAQLQQNRKMIDQALTLLPTHRELINKIRQYGFQTI

SEQ ID NO: 88696 - protein, 511 aa, Porphyrobacter sp.
  REGION 1..511: note = tr|A0A2L0GML7|A0A2L0GML7_9SPHN Tryptophan halogenase; OS = Porphyrobacter sp. HT-58-2 OX=2023229 GN=CHX26_12975; PE = 4 SV=1
MPSGIEENVTIERIIIVGGGTAGWMAAAALSRLKTGGSVEITLIESESIGTVGVGEATIPPFVGFNQLLGIDEREMLAEVGGTFKLGIQFENWGRRGDSYIHPFGAYGYTMGGISFHHVWHRMAQGGDKRPIQVFNLETMAAAFGKFARTEDYQRDDLPPVNYAYHLDAGRYAAFLRKFAEKRGVVRQEGRIADVALDGQSGFVTGVKLEDGREFGGDLFIDCSGFRGLLIEQALKTGYDDWSNYLPCNRAVALPCKRDDGSPPPPFTRATAHSAGWQWQVPLQHRNGNGHVYCSAYMEDQKALDILLGNIAGKPQAEPNWLRFVTGRRKKFWNKNVVALGLAAGFMEPLESTSIHLINTGIDKLISLLSLDGITQVQEDTFNRLTGREYARIRDFLILHYNATQRDDSDFWNYVRTMPVPDTLTEKVELFRANGQIFREEDELFTETSWAAVMMGQGITMGSHNAMADALDPARTRTEVDEMEKSIRYLVQHMPGHGDYLARYCPAPMAA

SEQ ID NO: 88697 - protein, 495 aa, unidentified
  source 1..495: note = Gammaproteobacteria bacterium
  REGION 1..495: note = tr|A0A2E9FJF1|A0A2E9FJF1_9GAMM Uncharacterized protein OS=Gammaproteobacteria bacterium OX=1913989; GN = CMD60_01120 PE=4 SV=1
  VARIANT 182: note = Xaa can be any naturally occurring amino acid
MKRIKRLVIVGGGTAGWITASWFARRWSNHFEVVIIDKSQPERIGVGEATLLSFPNVMKMMGYKPTDWLREVDATFKSGILFPGWGHEDAEIWHPFSFTSVGDSKTPLYDIWQTYQEKYDLKDISPMYNSSLKNKIETNYVHDSYAFQIDCGKLVQFLMRHTTPYCKYIQSDVVDVIRDGQXDDITKSDIKELVLDDGSRITGDIFVDCTGWKQLLVGKDNVDLSDRLYINAALAGRVKYEDYRKEQHPYTACPAQEHGWIWKIPTRSRIGTGYCFNRDVNDPDEVRQAFSDHWNGRIKPDEMRLLDWKPQYVNKFWVGNVVPIGLSAGFIEPLESTGLALMIRGVEYLEESLYGGYFETKVEAPFYDAKMKCSYESAVDYVNMHYSYCRREGKFWDYVRSKYKKSSMQEMFEGYIQDPNVRTPQTGKVGSFFDGTNWQVWLLQLMTEKINPKEYWKKDSSVIPRFHNFVNNDLRENQANSVIQSQYISHLDTLE

SEQ ID NO: 88698 - protein, 519 aa, Sphingomonas sp.
  REGION 1..519: note = tr|A0A4R2PG24|A0A4R2PG24_9SPHN Tryptophan halogenase; OS = Sphingomonas sp. BK235 OX=2512131 GN=EV292_10653 PE=4; SV = 1
MSTPAPVRAVTIVGGGTAGWMTAAALSRLVAAGVSVTLVESAEIGTVGVGEATIPSILDFLAMLGIDEHAFVRATGATFKLGIEFSDWGARGERYMHPFGAAGRDIAGVAFHQLWQRAARAGVADAGTLDDYSLCTVAARQHRFDRASSDPAAVRSTLRHALHFDATLVARFLRAYAEAAGVRRVEGRVDSVALAPETGHIAALRLADGRQLGGELFVDCSGFRALLIGETLGVGFESWRHWLPNDRALAVPSAAASDPAPYTRAMAERAGWRWRIPLQHRTGNGHVYASDVVAEEEAHRLLLAGLTEPALDTARSIRFEAGVRRRWWEGNCVAIGLAGGFLEPLESTSIHLIQLGITRLLALFPDTGFAAPERDTYNRSLRRDYEQARDFIILHYKATRRDDSDYWRHCRTMAVPDTLAERLALWRGAGRVLHDRGELFTPASWIAVLAGQEPPSRAVDPLAATLPLDETERFLRHVRDMVAKTAAAMPRHADYVARHCAAPARPAWGDGGGAQTGAG

SEQ ID NO: 88699 - protein, 495 aa, unidentified
  source 1..495: note = Gammaproteobacteria bacterium
  REGION 1..495: note = tr|A0A4Q5Q1Q4|A0A4Q5Q1Q4_9GAMM Tryptophan 7-halogenase OS=Gammaproteobacteria bacterium OX=1913989; GN = EOO53_19130 PE=4 SV=1
MLHKNSVKRVVIAGGGTAGWMAAAALSKVLGKHIDITLIESDAIGTVGVGEATIPTLLSFHHLLGINEPEFLRATNGTFKLGISFENWETRGKNYIHSFGKTGREFWAGEFQHFWLRGLGLGIDVPFGDYCLELQAAKAGKFAISKNPWTNYAYHMDATAYAKYLRSFSEGYGVKRIEGMIEQVKLNHDSGFIEAIILKDGRVIEGDLFIDCSGFKGLLIEQAMHTGFEDWSHWLPTDSAVAVQTESVTPPLPYTRAIAHESGWQWRIPLQHRVGNGLVYCSRYQSDENAQQTLLSNIEGNTLTEPRLIKYRSGRRLKSWNKNCVALGLATGFIEPLESTSIHLVSSGLIRLMRLFPLGGIRQVEIDEYNRQANLEIENVRDFIILHYCATKRTDSLFWRHCRTMSIPDSLAHRINLFRETGRIFVGADELFRVDSWTQVMIGQGIIPEQYHPAVHEMSDIELTQFLTKERNLIAEMVAKLPSHQDFINAYLRQK

SEQ ID NO: 88700 - protein, 503 aa, unidentified
  source 1..503: note = Gammaproteobacteria bacterium
  REGION 1..503: note = tr|A0A2D8N488|A0A2D8N488_9GAMM Tryptophan halogenase; OS = Gammaproteobacteria bacterium OX=1913989 GN=CMP90_03560; PE = 4 SV=1
  VARIANT 151: note = Xaa can be any naturally occurring amino acid
  VARIANT 154: note = Xaa can be any naturally occurring amino acid
  VARIANT 163: note = Xaa can be any naturally occurring amino acid
  VARIANT 186: note = Xaa can be any naturally occurring amino acid
  VARIANT 196: note = Xaa can be any naturally occurring amino acid
  VARIANT 233: note = Xaa can be any naturally occurring amino acid
  VARIANT 273: note = Xaa can be any naturally occurring amino acid
  VARIANT 375: note = Xaa can be any naturally occurring amino acid
  VARIANT 398: note = Xaa can be any naturally occurring amino acid
  VARIANT 483: note = Xaa can be any naturally occurring amino acid
MKVKSIVILGGGTAGWMTANALQKKWQHLGINITLVESPDIGIVGVGEGSTPKLKHFFDSLGIKESEWMPECNATYKNGISFKNWSTVSGYEEYFHPFGCSLDFVTLKFLYDNATLRRKGVDVIAHPNRFSLMASLAEKKLAPIASKNFPXHFXYGYHFDSVXIGKFLQKKAAEVGGINHIQATVXSVELNSNGDXTSLKLNNDQILSGDFFVDCSGFASILLEKTLKVPFIXFSDNLFNDSAITIPTEIEPNIPSQTVSTALTNGWVWRIPXTNRIGNGYVYSSQYCTQDEAEKELRAHLGVLESDIEARHLKMKVGRAKESWRNNCVAVGLSQGFIEPLEATALQFVISTIEEFATAFEEGGFTHQFKELFNXRMNMNFEGIRDYIVLHYKTNSRXDSQYWIDNRENKNIPNNVKDMLGCWYNIQSLEDELKRLNIGSYYTKMSWNCMLSGMGLFPPKESLTSADAQTAQADLEFVDKFIXGCSMNFKPHKKMLIGANTST

SEQ ID NO: 88701 - protein, 514 aa, unidentified
  source 1..514: note = Gammaproteobacteria bacterium
  REGION 1..514: note = tr|A0A4Q5Q822|A0A4Q5Q822_9GAMM Tryptophan 7-halogenase OS=Gammaproteobacteria bacterium OX=1913989; GN = EOO53_06955 PE=4 SV=1
MNTAIKSIVIVGGGTAGWITAGRIAAKHKSNTSAGIKVTLIESPTINIIGVGEGTWPTMRTTLMKMGISETEFMRECDATFKQGAKFAKWVDGTPNDFYYHPLMLPQGFNKVDLPPYWQTEFSHQSFSDAVCFQEQVCEHGLAPKLITTAEYASVANYAYHLNAGKFATFLQKHCVNKLGVNHILGDVIQINSAENGDIKSVTTAQQGEIFGDLFIDCTGFSSLLLGEHLAVPFVDRSDVLFIDTAIAAQVPYEQEDAPIASHTISTGQAAGWIWDIGLIHRRGTGYVYSSKHTSHDEAEQTLRDYIGPAAKDLNFRKIPIQSGHRKLFWKNNCVAVGLSAGFLEPLEASAIVLVELSAEMIAEQLPACREVMDITAKRFNETFLYRWDRIVDFLKLHYILSKRSDNSFWSDNRNPETIPESLQELMQLWRYRSPGNQDFTSNNEVFPAASYQYVLYGMGFKMDASLIAHTLDAKHLAAEQISQNAATIKKALNMLPTNRELMKKIHEFGFASV

SEQ ID NO: 88702 - protein, 501 aa, unidentified
  source 1..501: note = Gammaproteobacteria bacterium
  REGION 1..501: note = tr|A0A4Q5Q5W8|A0A4Q5Q5W8_9GAMM Tryptophan 7-halogenase OS=Gammaproteobacteria bacterium OX=1913989; GN = EOO53_11505 PE=4 SV=1
MNQINPIKKIVIVGGGTSGWIAASMLSYHLKSELCEIELVESDDLGTIGIGESTIPPVVRLIQNLGIDEREFIKSTQACFKLGIKFIDWRQKNESYFHPFGVIGKRIGSHDFYQCWLKATTQGDTSRLQDFSPCSVMAEQEKFFWPTQLQNTPIGGASYAVHLDAKLVVNYLNKYASERGVKRTEGTVEHVTQTESGAIEKLILTDGREIHGDFFIDCTGFKALLIEKKLGVEFEDWSKYLPCDRAVVVKTSAQEKRLPYTTATARKSGWSWKIPLRNSTGHGYVYSSKFCSDAEAKSTLLKNLDGPRINDPRVIPFSTGRRKNMWEKNCLSLGLASGFVEPLESTSIHLIARGMDFFLRFFPDRDCDPSLIKEFNRRMATDFEEVRDFIVLHYCTTQRTDTEFWRWCKDIELPESLQERIALFKGHGLIREGTDELFRSSSWQSVFEGMGIRPNKYCPRVDNMDYQEISDTLKIARQAIQSMVKTLPTHDDFLRQNCGDE

SEQ ID NO: 88703 - protein, 509 aa, Sphingopyxis sp.
  REGION 1..509: note = tr|A0A095B5J7|A0A095B5J7_9SPHN Tryptophan halogenase; OS = Sphingopyxis sp. LC81 OX=1502850 GN=FG91_00023 PE=4 SV=1
MNSAIERVVIVGGGTAGWLAACLLASARRAAKLDVTLIEAPDIPTIGVGEGTWPTMRATLAAIGIGEAEFLAACDGSFKQGSRFDGWVTGAEGDRYLHPFTSPPTAPTAELLAAWQAGAPDLPFAAAMTAQAHVCDLDLAPRQRAMPDYQGAANYAYHLDAGKFAALLAMHAVQRLGVRHISDHVVDVTRDDDGGIASVATRRNGDISGDLFIDCSGHAALLIGNHLDVEWIDRSDTLFNDRALAAQVPVAPGSPIASQTVSTAHSAGWIWDIGLPGRRGIGCVYASRFIDDDAAEATLRAYIARVLPDAPDVPARRLTFPTGHRARFWEGNCVAIGLSAGFIEPLEASAIVMIELSLKALIDNFPVRHAAMPIHADRFNELFRYRWDRIVEFLKLHYALSRREEPYWRVQRDPAHMPPRLTEMLELWRDQPPSVWDFPRVDEIFSAESHQYILYGMGYPVPADLPASERAAALLAENRQRARALAAALPANRDYLDALAPGAHSAAAR

SEQ ID NO: 88704 - protein, 517 aa, unidentified
  source 1..517: note = Gammaproteobacteria bacterium
  REGION 1..517: note = tr|A0A2D6VBS9|A0A2D6VBS9_9GAMM Tryptophan halogenase; OS = Gammaproteobacteria bacterium OX=1913989 GN=CMP82_08840; PE = 4 SV=1
MEHAIQRIVVVGGGSAGWITAGLLAAEHGHESAADFSVTLLESPNVPIIGVGEGTWPSMRSTLQKLGLSEIEFLRECDASFKQGTEFVNWSNHDAPARYIHPFSLPSEFASLNLANYWLDQRQHSDFADFVSPQAQVALSGLAPKQCQTPEFAFNVNYGYHFDAGKFAQFLQRHVTQALGVEHVLGHFEQVISDEQGDIAALVLSDGRHIEGDLFIDCTGQRSLLIGQHFGTPLEPVDALLFNNRALAVQVPYADAQAPIASTTRATAQQVGWIWDIGLQSRRGIGYVYSDQYQDLQGAESTLRAYIAATSPGVETASLALRPIEFQPGFRQQFWVRNCVAVGLSAGFVEPLEASALALVEQSANIITDHLPRTRQVMDIVAKRFNEKMHYHWQSILEFLKLHYVLSKRSEPYWQDNARRESCPDALVEKLRLWQQQPPWHEDAPRIDELFPSASYQYVLYGMGFEPAQGGSARASHIREQAKAAQVVRMNRERTEKLRQGLPSNRELLTALVGQSG

SEQ ID NO: 88705 - protein, 503 aa, unidentified
  source 1..503: note = Gammaproteobacteria bacterium
  REGION 1..503: note = tr|A0A2A5D371|A0A2A5D371_9GAMM Tryptophan halogenase; OS = Gammaproteobacteria bacterium OX=1913989 GN=COA74_04415; PE = 4 SV=1
MNNQSEKSSNGKIQNVVVVGGGTAGWVTASLLSKVLGKSINITLIESDKIGIIGVGEATIPPIISLNNALGINESDFMKATKATIKLGIQFENWGNKGDSYMHAFGEIGKNFPFCEFHHFWTKSQQLGDQSSFWDYSLNYQAAISGKFSKINNIEGTNLPGISYAYHFDATLYAKFLRQFSENLGVKRVEGLITKVNQDPQNGYIESVDLEEGATVKGDFFIDCTGLAALLIEKTLSTGFDDWSQWLPCNRAVAVPSESTDKIRPFTRAIAHEYGWQWQIPLQHRTGNGLVYSSKHMTDDEAKEKILSSIEGKPLAEPKVIGYRTGRRRKQWNRNVVCIGLASGFFEPLESTNIHLIQTGAIRLLKFFPHNGIKNEEIAEYNRQSTNEYERIRDFIILHYKLTNRNDTQFWRQCQQMEVPDTLAQRMELFRESGKVFREQEDLFTEIAWKQVMIGQGGAPHDYHPLVDSLSEPQITELMANLKTLINRTVDKMPSHDEFIREI

SEQ ID NO: 88706 - protein, 536 aa, unidentified
  source 1..536: note = Gammaproteobacteria bacterium
  REGION 1..536: note = tr|A0A2A4VMH3|A0A2A4VMH3_9GAMM Tryptophan halogenase; OS = Gammaproteobacteria bacterium OX=1913989 GN=COB35_11825; PE = 4 SV=1
MSSSNTNRLTTKKSTTNFTKPFKNIVILGGGTAGWMAANLMALNWQSKGINITLVESPAIGTVGVGEGSTPQLKTFFDKIGVSENEWMPRCNATYKNGILFKNWSTRPSFEQYFHPFASPIDAHSAPAFIYNSVYRRQSADVDSHPDRFFLAAYLAKHHKTAIPDHNFPFPISYGYHFDSNLLGKFLVEKAIARGVKHLQATVSKVHLHTNTANNNELDGCIESLELDDGRKLFADLFVDCSGFRAELIQNKLKVPFISFKENLFNDSAVTLSTPAKNHLNSQTISTAMKHGWAWDIPLRNRTGNGYVYSSDYCSADQAETELRAKLGLLNSDVEARHLKMKVGRVKQHWAKNCLAVGLSQGFIEPLEATALHLVQETIENFIDVFSAGSFTDAHQDSFNDKINERFDGIRDYIVAHYRLNSREDTQYWHDNAANPNISQHLKSIIQAWLNGEDLNKTLAQSRQGQEKNQNEIISYYPPVSWHCILAGYGIFPPSLQKVSADHPAHKYDLKHIDDFIERCGLNFKDHLQFLNTNLM

SEQ ID NO: 88707 - protein, 499 aa, unidentified
  source 1..499: note = Gammaproteobacteria bacterium
  REGION 1..499: note = tr|A0A354VN66|A0A354VN66_9GAMM Tryptophan halogenase; OS = Gammaproteobacteria bacterium OX=1913989 GN=DDZ32_13680; PE = 4 SV=1
MQHSKVQKVVIVGGGTAGWMAAASLAKLLGKNLHVTLVESDEIGTVGVGEATIPTLLTLHELLKIKEQDFVAAVQGTFKLGISFENWRNVGEDYIHSFGYTGKDCWAAGFQHFWLKGKQLGLSEEFGDYCTELVAAKDQRFAVLPNNGLNYAYHFDASLYAKFLRGIAEDNGAVRQEGKVRQVLQDPSDGFITGVELESGQLIEGDFFIDCSGFRGLLIEQTLHTGYDDWSHWLPADSAVAVQTHSVGEPLPYTRSIAHESGWQWRIPLQHRVGNGLVYCSKFWSDDEATAKLLGNLEGEPLTDPRVIKFTTGTRRKHWNKNCVAMGLASGFMEPLESTSIHLAQRAIIRLMQMFPYDGVRQPDIDEFNSQMTFEIENIRDFIVLHYHVTERDDSRFWRHCRSAQIPDSLQHRIDLFKETGRVFKVPTELFGENSWVQVMLGQGLLPEQYHPIVNMMDAKELEEFLTSIKGSVNNMVRQLPPHQRFIDHYCKAPQPQIA

SEQ ID NO: 88708 - protein, 493 aa, Sphingomonas sp.
  REGION 1..493: note = tr|A0A0Q4CDW2|A0A0Q4CDW2_9SPHN Tryptophan halogenase; OS = Sphingomonas sp. Leaf9 OX=1735674 GN=ASE58_07935 PE=4; SV = 1
MSVTRVVVAGGGTAGWMAAAAIARTMGHMVEVTLVESEAIGTVGVGESTIPPLVTYNRLLGINEAEFMAATAATFKLGILFDGWHTPDSRYFHSFGTTGRDHWAAGFQHYWLNGRTRGHDQPYDDYCTELVAALQGRFAHLPNDATNYAYQLDSGRYAQFLRTMAERDGTQRIEGRIARVELNAETGNIAALLLDGDRRVEGDLFLDCTGFRALLIEGALHAGYDDWTHWLPCDAAIAVQTESVGPPLPYTRAMAHDAGWQWRIPLQHRVGNGIVYCSRYLERDAALDRLLGNVEGGVRTEPNFLRFTTGARRRQWHRNCVAIGLSGGFMEPLESTSIHLIQRAVLRLIRLFPQGGVQPADVAEFNDQQLQDMEQIRDFLILHYKVTDRRDSPFWRQCAAMDVPESLQQKIDLFRQSGRVFRRNEELFGENSWVQVMMGQGIVPEGHHPIAGKLSDGELDRLLSMIRRQVADTVATMPPHGDYVARYCPADRP

SEQ ID NO: 88709 - protein, 515 aa, unidentified
  source 1..515: note = Gammaproteobacteria bacterium
  REGION 1..515: note = tr|A0A4Q5V6V1|A0A4Q5V6V1_9GAMM Tryptophan 7-halogenase OS=Gammaproteobacteria bacterium OX=1913989; GN = EOO52_19310 PE=4 SV=1
MKPIKKIVIVGGGTAGWLTACIIAARHKGREASGFSVTLIESANTPIIGVGEGTWPTMRSTLSRIGVSETEFFRQCDASFKQGALFSRWTTGEASDAYFHPLMLPQGFSQINLVPHWLQQNLHKNSEQNFCDTVCAQGIICQKGLAPKTISHAEFEGVANYAYHLDAGKFAPFLQQHACTQLNVKHLIADVTQVKLTDTGDIDKLMLNEEQEISGDLFIDCTGFRALLIGDAMQVPFKDCKDVLFCDTALAVQVPYEDEFAPIASHTISTAQSAGWIWDIGLPTRRGVGHVYSSQHISDEYAERELAAYLGKDSISPRKIKIHSGHRETFWKNNCVAVGLSAGFLEPLEASAIVLIELSAKLIAEQLPVDREVMDIIAKRFNSTTLYRWGRIIDFLKLHYVLTQRRDSDFWRDNLEPSSIPERLKDLLLLWSYQSPWFHDEFNQVEEIFPAASYQYVLYGMKFKTQVETDTLQNTAKYAERLLRENRNLTEKLGLSLPYHRDLIMKIHERGLQTV

SEQ ID NO: 88710 - protein, 519 aa, unidentified
  source 1..519: note = Gammaproteobacteria bacterium
  REGION 1..519: note = tr|A0A349X1R0|A0A349X1R0_9GAMM Tryptophan halogenase; OS = Gammaproteobacteria bacterium OX=1913989 GN=DCW52_01110; PE = 4 SV=1
MSEQVKRVTIVGGGSAGWLVAGVLASRFKEQAQGGIDITLVESPDVKAIGVGEGTWPSMRTTLQSIGVSETEFMRECDVSFKQGSYFKNWRTGDDDYYHPFSPPGEFSQVNLVSPWQQMHNGSSFADAVSPQIEICRQNKAPKQITTPEYAFILNYGYHLNAAKFGEFLKRHCVDNLQVRYISDHVVGINSNDDDSIKSLQTKQNGDLVADIFVDCTGFASILLGEHYKIGLNKVDRILFNDTALATQVVYKDDQQPISSQTTATAQSAGWVWDIALPQRRGCGYVYSSAHIDHDIAQKEFIDYLSQTIPEAQAQDLSFRKIDINSGYRKNFWHKNCLAIGLSAGFVEPLEASALVMVEMSAKMLADEFPVTKELIPIVANRFNKKFTEHWEQIIDFLKLHYCLTERCDSEYWVDNASQSSYTESMLENLALWQYRPPWHMDTPTIDALFPSASYQYVLCGMGYVSDVTQLPTRSYDQQLNIAQQIFNDVHAKKQKMMSALPTNRELIGKVRAHGFNKI

SEQ ID NO: 88711 - protein, 490 aa, unidentified
  source 1..490: note = Planctomycetes bacterium
  REGION 1..490: note = tr|A0A517PQD7|A0A517PQD7_9BACT Tryptophan halogenase; OS = Planctomycetes bacterium HG66A1 OX=2527967; GN = HG66A1_33710 PE=4 SV=1
MQQFDVVILGAGFGGSLTALLLDRIGLSVALFDRGTHPRFAIGESSTPAAGYLLQSLAAQYDLPQFEPFCKYGTWQQAHPDISCGIKRGFSYFAHTPHQPFQTQPAHGSELLVTANLSDTLADTHWYRADVDHWFARQVAASGIVYRDQTEVELQHNAPGWQIQGTRLGECIDLQANFLIDATGAAGIVARALGIEAETEFKTHSSAIFGHFRNVAPWQTILNGQGISQNNYPFYCDHSALHHVLDEGWMWQLRFNNGITSAGFVLDGETGQQNWETLLDRYPSIQAQFVSAECVDPEDGLQTTGRLQRGWKECAGPDWALLPHTVGFIDPLHSTGIAHTLCGIERLVTVLEQHTGQGTLTEALATYSHSLQTERSLIDTLVACCYRSRHDFERFWLSTLFYFAAATSYEHLRFHEQQRPWLLCADDERFRQAVTDWYQLVSRQDHSAGHKTDWLQTARELLAPWDRVGLFEPAVPHMYYYTAAPEAEPR

SEQ ID NO: 88712 - protein, 500 aa, unidentified
  source 1..500: note = Gammaproteobacteria bacterium
  REGION 1..500: note = tr|A0A2E8NPM9|A0A2E8NPM9_9GAMM Tryptophan halogenase; OS = Gammaproteobacteria bacterium OX=1913989 GN=CMQ25_12185; PE = 4 SV=1
MKNIVILGGGTAGWMTANLLQKKWRQRGIQISVVESPDIGIIGVGEGSTPLLKEFFDSLEISESEWMPQCNATYKNGISFNDWSTVPGYESYFHPFPCSLDFATFGFLYKYTELRRKGADVLAHPNRFSLMAGLTERKLAPLPAENFPFHFQYGYHFDSVLIGKFLREKAKESGVSHIEATVEKVEQESDGSIKSLLLNTGQILSGDFFVDCSGFASILLQKTLKVPFVSFAENLFNDSAVAIPTDIETEIPAETLSTALSNGWAWKIPLTNRFGNGYVFSSKYCSPDEAETELRSHLNILESDAEARHLKMKVGRVQETWAKNCVAVGLSQGFIEPLEATALQFVYSTIEQFSQALEEGNFSGKNRDEFNARMNANFEGVRDYIVLHYKTNSRSDSQYWIDNRENQKISDNLRAMIECWYAIEDTQEALTRLNIGSYYSQRSWTCLLAGVGVFPKQENLVIPDKENVGMAMKDLKYVDDFIKGCSMNFESHGKLLSRQV

SEQ ID NO: 88713 - protein, 500 aa, unidentified
  source 1..500: note = Gammaproteobacteria bacterium
  REGION 1..500: note = tr|A0A2A5D3P4|A0A2A5D3P4_9GAMM Tryptophan halogenase; OS = Gammaproteobacteria bacterium OX=1913989 GN=COA74_02955; PE = 4 SV=1
MQNNPIKNIVIVGGGTAGWMTAAALSRYLPPKDYTIKLIESDQIGTIGVGEATIPGIRDFNNKLGIDENEFMRATKATYKLGIEFIDWTKKGHAYVHPFSYFGHDLNGVPFHNYWLKQKQLGDTTNISEYSIGYTAAKLNKFSHPTSDQKSVLSKFFYAFHLDATLYANYLRKFSSKAGVERIEGKVINVSTRKSDGFIEKLTLESGQTIQGDLFIDCSGFRGLLIEQTLKTGYQDWSHWLPCDRAIAVQTVSTEDAIPYTKATAREAGWQWKIPLQSRVGNGYVYSSQYISDEQAKQTLLSNIEGEMITEPKFIPFKAGKRNKLWNRNCVAIGLSSGFLEPLESTSIHLIQTSIMKLITHFPDQAFNPVDIQDYNNQMNRQFEQVKDFLILHYKTTQRDDSPFWKYCKSMAIPKELEHRINLFIETGHIVNCEKEVFVYSNWAAVLLGQELFPKVYHPRVDCINPEQLKILLAQMKLTIAKSVSTMPSHLETINRFCKA

SEQ ID NO: 88714 - protein, 521 aa, unidentified
  source 1..521: note = Gammaproteobacteria bacterium
  REGION 1..521: note = tr|A0A2E1PQP9|A0A2E1PQP9_9GAMM Tryptophan halogenase; OS = Gammaproteobacteria bacterium OX=1913989 GN=CMQ80_03710; PE = 4 SV=1
  VARIANT 34: note = Xaa can be any naturally occurring amino acid
  VARIANT 38: note = Xaa can be any naturally occurring amino acid
  VARIANT 51..52: note = Xaa can be any naturally occurring amino acid
  VARIANT 114: note = Xaa can be any naturally occurring amino acid
  VARIANT 134: note = Xaa can be any naturally occurring amino acid
  VARIANT 162: note = Xaa can be any naturally occurring amino acid
  VARIANT 170: note = Xaa can be any naturally occurring amino acid
  VARIANT 179: note = Xaa can be any naturally occurring amino acid
  VARIANT 190..191: note = Xaa can be any naturally occurring amino acid
  VARIANT 195: note = Xaa can be any naturally occurring amino acid
  VARIANT 201: note = Xaa can be any naturally occurring amino acid
  VARIANT 209: note = Xaa can be any naturally occurring amino acid
  VARIANT 216: note = Xaa can be any naturally occurring amino acid
  VARIANT 233: note = Xaa can be any naturally occurring amino acid
  VARIANT 248: note = Xaa can be any naturally occurring amino acid
  VARIANT 256: note = Xaa can be any naturally occurring amino acid
MNDKAIKDIVIIGGGSAGWLAAGIIAAEHNNPKXDVHXINVTLIESPNISXXGVGEGTWPSMRTTLKKIGISETAFIKDCDVSLKQGTLFAGWKNGSDVYTHPFTVPHGYAEHXLVNEWQESSSHIPFAEAVCXQNTLMLRNQAPKNITTPEYSFNLNYGYXLDAGKFAXKLNTHCTEXLGVIHKRAEVXXINSXENGDLXSLQLDSGXIIQGDLXIDCSGSRSLLLGKHYGXPFSSKQKYLFNDSAXASQVPYSXDDDPIASSTLSTAQSSGWIWDIGLPSRRGIGHVFSSSYTDATLAETELRHYIKNLVGEEVAEQVSTRKIEFSPGHREKFWHKNCVAIGMAAGFIEPLEASALVLVELSANMIAEQLPQNRKIMDIVSKRFNEKFLYRWDTIIEFLKLHYILTERDSSEYWRDNVSRESIPASLQEKMDLWKWQGPYHKDTLHIDEMFPSASYQYILYGMGFKTNPGNFRRSNQETSAVALDLFDENAMRTKQLVSSMPTNRDFIAKVHQYGLQKI

SEQ ID NO: 88715 - protein, 81 aa, unidentified
  source 1..81: note = Gammaproteobacteria bacterium
  REGION 1..81: note = tr|A0A349KJ21|A0A349KJ21_9GAMM Tryptophan halogenase (Fragment) OS=Gammaproteobacteria bacterium OX=1913989; GN = DCS89_03405 PE=4 SV=1
NCWYNTQNLETELKRLNIGSYYSQMSWTCLLSGMGLFPPKEKLTSADTKTAQADLDFVDNFIDGCSMNFKPHEQMLTRGLS

SEQ ID NO: 88716 - protein, 318 aa, unidentified
  source 1..318: note = Gammaproteobacteria bacterium
  REGION 1..318: note = tr|A0A3B9NSN1|A0A3B9NSN1_9GAMM Tryptophan halogenase (Fragment) OS=Gammaproteobacteria bacterium OX=1913989; GN = DCG72_10010 PE=4 SV=1
RIEGRIVDVLQKDNGDIASVVLANGNKISGDLFIDCSGFYGLLIDKTLGVGFDDYGDWLPCDRAIAVQTQSTRPPRPYTRSIAHSAGWQWQIPLQHRVGNGLVFSSQHYSEDEALHRLRQNITGDERTDPRLIKFQTGQRQAHWVKNCVAIGLSASFIEPLESTSIHLIMRAIIRLMQMYPHQQTSASDIQEFNNQMRAEVEFVRDFIILHYHRNDRTRDPFWRDMANLRIPDTLRHRLDLFQETGRVFQAQGDVFGENSWTQVMLGQGLRPKRYHHIVDMMPEAELKAFLNTQRSRVEAMVKVLPSHQDFLSAYLSP

SEQ ID NO: 88717 - protein, 498 aa, unidentified
  source 1..498: note = Gammaproteobacteria bacterium
  REGION 1..498: note = tr|A0A2E1U298|A0A2E1U298_9GAMM Tryptophan halogenase; OS = Gammaproteobacteria bacterium OX=1913989 GN=CMQ00_09490; PE = 4 SV=1
MKNIVILGGGTAGWMAANLLQKRWRQKGVNITVVESPDIGIIGVGEGSTPLLKEFFDSLDISESEWMPQCNATYKNGISFNNWSTVSGYESYFHPFPCSLDFATFGLLYKYTALRRSGVDVLAHPNRFSLMAGLTQKKLAPLPAENFPFHFQYGYHFDSVLIGKFLRGKAKESGVSHIEGTVETVEQDSDGNIKALKLKNGDILSGDFFIDCSGFASILLQRTLKVPFLSFSENLFNDSAVALPTEIEADAPVETLSTALTNGWAWKIPLTNRFGNGYVFSSQYCSPDEAETELRAHLGILDSDVDARHLKMKVGRAQESWAKNCLAVGLSQGFIEPLEATALQFVYSTIDQFAQALEQGDFTNEHREAFNDQMNANFEGIRDYIVLHYKTNSRSDSQYWIDNRENQKISEHLRAMIECWYGIEDMQEALTRLEIGSYYSQRSWTCLLSGVGIFPRQENLAVPSASDALKAKEDLEYVDHFISGCSMNFESHNKFLGR

SEQ ID NO: 88718 - protein, 498 aa, Sphingomonas sp.
  REGION 1..498: note = tr|A0A4R2P718|A0A4R2P718_9SPHN Tryptophan halogenase; OS = Sphingomonas sp. BK235 OX=2512131 GN=EV292_11229 PE=4; SV = 1
MSDGAIRHVVVVGGGTAGWMAAAMLSSRLPRERTRVTLVESAEIGTVGVGEATIPPILDLNRLLGIDEDELIRRTHGTYKLGIEFRDWGAIGQRYFHPFGSYGADIGGVAFHHHWLRLREGELADYSLPTVAAEAGRFAHPAQDPRDVRSKLAYALHFDASLYAAFLGERAIADGTERVEGRIVAVERDGASGDVTRLRLADGRAIDGDLFLDCSGFRGLLIEEALGTGYEDWSRWLPMDRAIAVPTERIAPPVPFTRSTAGAAGWRWRIPLQHRTGNGHVYCSRFLDDDTAERQLLDALDAPALAAPRRLRFTTGRRRRAWNHNVVALGLASGFIEPLESTSIHLVQQGVQTLMSLFPRGAIEPAEVAQYNRLMQRDYEQVRDFVILHYKQTARDDTPFWRMAAAMAVPDTLAERMALFAANGRIVPEPGELFTPTSWAAVMLGQGLSPRGYDGQADLYPEETMGAQLRRMADLVRRGAAALPTHADYLAQPQRASG

SEQ ID NO: 88719 - protein, 498 aa, unidentified
  source 1..498: note = Gammaproteobacteria bacterium
  REGION 1..498: note = tr|A0A2E4G710|A0A2E4G710_9GAMM Tryptophan halogenase; OS = Gammaproteobacteria bacterium OX=1913989 GN=CMQ31_04845; PE = 4 SV=1
MKNIVILGGGTAGWMAANLLQKRWRQKGVNITVVESPDIGIIGVGEGSTPLLKEFFDSLDISESEWMPQCNATYKNGISFNNWSTVSGYESYFHPFPCSLDFATFGLLYKYTALRRSGVDVLAHPNRFSLMAGLTQKKLAPLPAENFPFHFQYGYHFDSVLIGKFLRGKAKESGVSHIEGTVETVEQDSDGNIKALKLKNGDILSGDFFIDCSGFASILLQRTLKVPFLSFSENLFNDSAVALPTEIEADAPVETLSTALTNGWAWKIPLTNRFGNGYVFSSQYCSPDEAETELRAHLGVLDSDVEARHLKMKVGRAQESWSKNCLAVGLSQGFIEPLEATALQFVYSTIDQFAQALEQGDFTNEHREAFNEQMNANFEGIRDYIVLHYKTNSRSDSQYWIDNRENQKISENLRAMIECWYGIEDMQEALTRLEIGSYYSQRSWTCLLSGVGIFPRQENLAVPSASDALKAKEDLEYVDHFISGCSMNFESQNKFLGR

SEQ ID NO: 88720 - protein, 508 aa, Sphingomonas sp.
  REGION 1..508: note = tr|A0A4R2PAI4|A0A4R2PAI4_9SPHN Tryptophan halogenase; OS = Sphingomonas sp. BK235 OX=2512131 GN=EV292_11043 PE=4; SV = 1
MRADSIRRVVIVGGGTAGWMAAAAIARVLGEIPGLSIELVESEAIGTVGVGEATIPQIVLFNKMLGIDEAEFLRETRATYKLGIEFVDWLRPGHRYVHPFGFYGLDMKGIEFHHFWLKGRALGDDTPLDAYSLAVVAGLQGRFAHPRPDQPGSPLSKLGYAFQFDAGLYARFLRRLAEANGARRTEGRIVAVERDGESGHVAAVVLESGARVEGDLFLDCSGFRGLLIEETLGTGFEDWRHWLPCDRAVAVPCANGGDRQPLTRSTARAAGWQWRIPLQHRIGNGYVYASQHLSDDEAAATLLANLDGAPLGDPRPLRFTAGHRRRAWVGNTVALGLAGGFLEPLESTSIHLVQSAIARLLTYWPTRRFDQREIDRFNAAHVADYRDIRDFLVLHYKATERRDSPFWDYCRTLEPPPGLADKLAIFAANGRIFREGDELFTETSWLSVMVGQGIAAGGYHPAADLLSDAETLARLDHIRRVVAETAALLPRQDDHLRGLGCELVGLAA

SEQ ID NO: 88721 - protein, 503 aa, unidentified
  source 1..503: note = Gammaproteobacteria bacterium
  REGION 1..503: note = tr|A0A4V1ZQR1|A0A4V1ZQR1_9GAMM Tryptophan 7-halogenase OS=Gammaproteobacteria bacterium OX=1913989; GN = EOO53_11450 PE=4 SV=1
MTFGQADAIQKIVIAGGGTAGWMTAAALANALGKTCEIHLVESAEIGTVGVGEATIPHIQLFNEMLGVDEDEFMRKTQATFKLGIDFVNWKQKGHRYVHPFGSYGEDIAAVPFHHYWLKLSQAGIAPALEEFSITIQAAYANKFMRPVDIPDSPLSAFNYAFQFDAGLYAAFLRDYAGQRGVQRFEGKIAQVKLRAHDGFIESLALENGQLMSADLFIDCTGFRGLLIEQALNTGYDDWSQWLPCDRAIAVPCANADVLTPYTRATAHTAGWQWRIPLQHRIGNGHVYSSRFMSDDEACAILMKNLDGEAMAEPKQLRFKAGKRKKMWVKNCVAIGLASGFMEPLESTSIHLIQTAIARLISLFPSRAFHQREIDFYNQHGAYEYERIRDFLILHYKATERNDSPFWDHCRNMEIPQYLQDKIDLYQNSGRIYRENDELFGVTSWLAVFEGQGIKARAYHPMVDKLATGEIQARVADYQKVLRKCTSLMPAHIDYIQQHCRSF

SEQ ID NO: 88722 - protein, 493 aa, Sphingomonas sp.
  REGION 1..493: note = tr|A0A4R2P8Q6|A0A4R2P8Q6_9SPHN Tryptophan halogenase; OS = Sphingomonas sp. BK235 OX=2512131 GN=EV292_11045 PE=4; SV = 1
MLDDPIRSVAVVGGGIVGWSAALALRRRVPGLTVTILASPPAPDALADRMPQTLPSTIGFHDDLGLREEDAVVRAGGTWRLGTLFEGWVEGLPPYVHAYGSYGRPFGTASFHQHWVRAARAGAAAPFDSHAPAAALARAGRVGTGATDPLLGDVQPGLVLDVEDYRAMLAAFARHLGVGVREGSVAAVRLRGDDGFVERLVLDDGASLEADLYVDASGPGAIVRGAIDQEREDWSAWLRCDRLVTGEGTPAPLSPLDRVTATDGGWRWRSAAPGRTLHGLCYAGAALSDAAAGKALAAAGATTIAAPVSFRQGTRPAPWARNCVAVGDAATVIEPLDFTNLHLAQSAIDRIVAMLPGRACHPLELADYNRQTSAEVARVRDFVLCHYATARRPGAFWQPPAALPESLERTLRLFAERGRLSFFEEETFARDDWLALLLGQGVLPRRVDPLIDVTAAADSDRAMAAYRAAIAQAVARCPTADDYLATARGRLAR

SEQ ID NO: 88723 - protein, 495 aa, unidentified
  source 1..495: note = Gammaproteobacteria bacterium
  REGION 1..495: note = tr|A0A4Q5Q745|A0A4Q5Q745_9GAMM Tryptophan 7-halogenase OS=Gammaproteobacteria bacterium OX=1913989; GN = EOO53_08285 PE=4 SV=1
MNLPIKKVVIAGGGTAGWMAAATISHHLGPVLDIRLIESEEIGTVGVGEATVPPMQTFHKLLNIDEQEFLRATQGTFKLGINFENWGQKGDEYIHSFGITGKELWMADFVHFWVKAKGMGLKQDYGDFCLELQAAKMGKFAITENPRTNYAYHFNASLYAKFLRKYSEARGVRRTEGKIVEVATHSDNGFIKSVTLASGEVVEGDLFIDCTGFRGLLIEQTLHTGYEDWSQWLLNDSAIASQTKNPGPALPYTRAVAHQAGWQWHIPLQSRIGTGFVYCSKYISDEDARKTFIDNLPGELINEPIVLKFKTGRRKKSWNKNCIALGLSSGFIEPLESTSIHLIMNSALRLVRFFPSNGIQEANVAEYNQQTVNEIERIRDFVILHYKATERDDTPYWRYCRDMAIPETLAHRINLFKETAIAYKAEGEIFFMDSWSQVMIGQRIIPSAYHPYVDAINHQDLCKYMEEFSEDIKKRAMVLPSHEDFVRAYCSENDA

SEQ ID NO: 88724 - protein, 501 aa, Sphingomonas sp.
  REGION 1..501: note = tr|A0A0Q4CQF2|A0A0Q4CQF2_9SPHN Tryptophan halogenase; OS = Sphingomonas sp. Leaf9 OX=1735674 GN=ASE58_10670 PE=4; SV = 1
MHAFDRVRRVVVLGGGTAGWMTAAALSKSFGDTVAITLLESDAIGTVGVGEATIPTIHWFNELVGIDEAEFLRATKATFKLGIEFVDWTAPGHRYFHPFGQFGATLPGVAFHHRWLKAQAEGMDVPLPALSLAAQLAVQGRFAKPAGDARSILSTLGYAYHFDAGLYAAYLRKLSEAAGVIRVEGTLHQVERDGETGFVTALTTDRGDRIEGDLFIDCSGFRALLIAGEMGEGYEDWSHWLPCDRAVAVPCARIAATTPYTRSTARSAGWQWRIPLQHRTGNGYVYASRYLSDDEAAATLLANLDGEALAEPRFLRFTAGTRRRPWRGNVVAIGLSSGFLEPLESTSIHLIQSGITKLLTLFPTRDCDPALADRFNHVFARDMDGIKDFLILHYHATSGRDDPLWRHCRTMALPETLRARVDQYRRSGRIILDPDELFREASWLAVLNGQGIVAQGHNPLADAIDGATNRAQVRQIADVIARAAPTLPLHDAALAALIGTA

SEQ ID NO: 88725 - protein, 501 aa, unidentified
  source 1..501: note = Gammaproteobacteria bacterium
  REGION 1..501: note = tr|A0A4V1ZQA2|A0A4V1ZQA2_9GAMM Tryptophan 7-halogenase OS=Gammaproteobacteria bacterium OX=1913989; GN = EOO53_18385 PE=4 SV=1
MNAKQVLIVGGGTAGWMTALIMARSWIKLGFEISLLESPDVGIIGVGEGSTPALKQFFDKLDIKEEEWMPECNATYKCGISFDNWSTKPGCESYFHPFASTMDMHTLKFFIHNARMRVSGVNVYAHPNRFFLSAQIAEKNLSPIAHYNFPFDVLYGYHFDAVLLGQFLKKKAIAMGIEYRVGHLQDVILNESGDIESIKLDDGDSIGADFFVDCTGFRSLLSQQALKTPFKSFSNNLFNNAAVAMPTAIGDLIPSQTVSTALKHGWAWKIPLTNRVGNGYVYSSDFCSADDAEFELRERLGLLDADVPVCHLKMKIGQVEKHWNHNCLAVGLSQGFIEPLEATALFLVQQTAAIFVEMFEAGKFTAEYRDKFNKRIYDHFEGVRDYIVTHYKTSSRSDTEYWRANTKDQADVSETMKILYSAWMNGLDIQAEVKRLRIENYYTAPSWICIFAGMGIFPSEKRLRAASPGESIFSFDNLDDFLKRCSLNFDDHKNYLEQNFK

SEQ ID NO: 88726 - protein, 501 aa, Sphingomonas ginsenosidimutans
  REGION 1..501: note = tr|A0A2A4I2C8|A0A2A4I2C8_9SPHN Tryptophan 7-halogenase OS=Sphingomonas ginsenosidimutans OX=862134; GN = COA17_03030 PE=4 SV=1
MSTDRRISRIVILGGGTAGWMTAAALSRSFGPTVAITLLESDEIGTVGVGEATIPTIHWFNDLIGLDEAEFLRETKATFKLGIEFVDWTRPGHRYFHPFGQYGAPLPGVAFHHRWLKARAEGSALPLSALSLAARLAGDGRFARPVGDARSILSTLGYAYHFDAGLYARYLRRLAEAGGVVRVEGRLRDIVRDGDSGHVTALVTERGETLEGELFVDCSGFRALLIDGAMGEALEDWSHWLPCDRAVAVPCARVAATTPYTRSTARAAGWQWRIPLQHRTGNGYVYASAHLSEDEATATLLANLDGEPLAAPRTLRFTAGTRRRPWRGNVVAIGLSSGFLEPLESTSIHLIQSGITKLLTLFPDRDMDPALADRFNGLFGRDMDGIKDFLILHYHATSGRDAPLWQHCRTMTLPDTLVARVAQYRRSGRLILDSDELFREASWLAVLDGQGVTASGYNPLADALDADTNRAQVEQIAQVIARAAPTLPMHDDALAQLIGAP

SEQ ID NO: 88727 - protein, 514 aa, Sphingomonas sp.
  REGION 1..514: note = tr|A0A4R2PD31|A0A4R2PD31_9SPHN Glycine/D-amino acid oxidase-like deaminating enzyme OS=Sphingomonas sp. BK235; OX = 2512131 GN=EV292_10652 PE=4 SV=1
MRKRVLIVGGGTAGWLTAGYLAKRLGADLADGVAITLVESKDIGVLGVGEGTFPTIRRTLATIGVDEAELVRRCGATFKQGARFVHWQRAPGTLGRDHYMHPFQVAEAPGGLELLPYWLSGAAGDAEWDEVSTPQKAAADAARAPKLPTHPDYVGPLNYAFHFDAVALAGLLRERAVANGVTHLIDTVTHVALDHSGAIERVETERHGALTADLYVDCTGFRAELIGKAMGVPFRSCRDVLFCDRALAAQLPYEAADAPIASQTISTAQEAGWIWDIGLDRRRGIGHVYSSDHSDDDAAERALRRYLGARGEQAEVRRFRFEAGFREVNWRRNCVAVGLSSGFFEPLEATGIAFAEVSAAMIANLFPWSGDHETSARQFNANLLRRYERALDFIKLHYCLSERRDTDFWRDNVAGSSNTASLLELLDRWRHRWPNELDIDPQVDIFTEASWQYVLYGMGWRTDLSARAGALRYRDDARRAFGEVRRQVGVALANLPAHRALVEAAQHRGFGGGA

SEQ ID NO: 88728 - protein, 504 aa, unidentified
  source 1..504: note = Gammaproteobacteria bacterium
  REGION 1..504: note = tr|A0A2E7DK72|A0A2E7DK72_9GAMM Tryptophan halogenase; OS = Gammaproteobacteria bacterium OX=1913989 GN=CMQ41_03065; PE = 4 SV=1
MDKPSVKNIVILGGGTAGWMTANLLNQKWQHLGVKITVVESPDIGIIGVGEGSTPLLKVFFDSLGISESEWMPECNATYKNGITFNNWSTVNGYEGYFHPFPTSLDFATFGFLYKYSALRRKGLDILAHPNRFSLMANLTEKRLAPLPAESFPFHFQYGYHFDSVLIGKFLREKAKGLGVEHIEATVENVEQGENGDIKFLMLNTGQNLSADFFVDCSGFASILLQKTLNVPFQSFAENLFNDSAIAIPTEIEPNIPSETISTALSYGWVWKIPLTNRFGNGYVYSSKYCAPDEAEKELRAHLGLLDSDIEARHLKMKVGRSEETWRNNCVAIGLSQGFIEPLEATALQFVYSTIDEFAKAFEEGGFTNQHREEFNTRMNLNFEGIRDYIVLHYKTNSRNDTQYWIDNRENQNLSNNLKEMIECWYAIEDIEATLTRLNIGQYYSQRSWTCLLAGMGIFPRQENLDSADAENAKAAQSDLDYVDNFITGCSLNFQAHEKMLVKG

SEQ ID NO: 88729 - protein, 523 aa, Sphingomonas sp.
  REGION 1..523: note = tr|A0A4V2SP87|A0A4V2SP87_9SPHN Tryptophan halogenase; OS = Sphingomonas sp. BK235 OX=2512131 GN=EV292_104227 PE=4; SV = 1
MSDNQRHDDSAVRQVVVVGGGSAGWIAACRLAAQAQRSGSPVTVTLVESARIPTVGVGEGTWPTMRNTLAKIGITETDFVRGCDAAFKQGARFVGWADDSPDDGYYHPLNPPAGATELDLAPHWRAQADTPGAQDFAGWVDFQAALCDAGLAPKAITMPEWVGQANYAYHLDAGKFATLLRDHAVERLGVRHVIGDVARVDQAPDGDITALVLADGDMVAGDLFVDCTGFAALLIGGVYGVPFRGCGDVLFADRAVALQVPYDSEDAPIACHTVATAQPAGWIWDIGLWTRRGVGHVYSSAHTSDDAAEAALRRYIGPAADALVARRITIEGGHRERFWQNNCVAVGLSAGFIEPLEASALMLIEASMDAIADRLPRTRGAMRVAARQFNHAFTHHWARIIEFLKLHYAITRRTDTDFWRDHAAPATWPDGLDERLALWRTHPPAPHDFAHAREVFSWPSYQYVLHGMGFATDYAAVAPAAPESALARRMIARTDRLRAEAVQRLPRHRDLLRAVREHGLQVV

SEQ ID NO: 88730 - protein, 496 aa, unidentified
  source 1..496: note = Gammaproteobacteria bacterium
  REGION 1..496: note = tr|A0A4Q5QA17|A0A4Q5QA17_9GAMM Tryptophan 7-halogenase OS=Gammaproteobacteria bacterium OX=1913989; GN = EOO53_07705 PE=4 SV=1
MNKLIKKVVIVGGGTAGWMSAALLKKTLGSVVEIELVESEEIGRIGVGEATIPPIRYFNQALGVNEADFLRETKASIKLAIKFEGWRVPDESYYHTFGATGKDFVWCPFYHFWIRANQLGHTTNLWDYNLNYLCAEANKFAPLTAKDTALEMPYAYHFDASLYAIFLRKFSENLGVKRTEGLVEQVNVNPDSGYVENLALKNGTKINGDLFIDCSGSRALLIQQKLETGFEDWSHWLPCDRAIAVPSERLDITLAYTRSIAHAAGWQWRIPLQHRVGNGIVYSSNHCSQDEATNILLNSLGSKPMADLNFISFKTGRRLKQWNRNVIAIGLSSGFLEPLESTSIHLIQSALVRLLKLFPRAGIDEANVSEYNKQSKIEFEQVRDFIILHYHVNERTDSQFWRDLRTMKIPESLTHKINLFRSTGKIIREHDDLFSESSWLQVLVGQGIMPRDYHPLADGISEKDLLEMLANMRKIKQSPISHLPSHDEFLKQVCAV

SEQ ID NO: 88731 - protein, 495 aa, unidentified
  source 1..495: note = Gammaproteobacteria bacterium
  REGION 1..495: note = tr|A0A2E1PQV5|A0A2E1PQV5_9GAMM Tryptophan halogenase; OS = Gammaproteobacteria bacterium OX=1913989 GN=CMQ80_03725; PE = 4 SV=1
  VARIANT 467: note = Xaa can be any naturally occurring amino acid
MQVEKDTVKKIVIVGGGTAGWMAAASISSLIGKDFEITLVESDEIGTVGVGEATIPTFFALHQLLKIDEAEFLSEVQGTIKLGISFENWHKLNETYIHAFGHTGKSCWAAGFHHFWLKGKECGYSDDYGCYSAELAAAKAEKFGFLKQNKLNYAYHLNAGLYAKYLRKLAEKNHVVRQEGRIKTVNQDASGNIASVVIESGKTIVGDFFVDCSGFSGLLIDKALKTEYQDWSHWLPCDRAIAIQTKSTQAPVPYTRSIAHESGWQWRIPLQSRVGNGLVYSSRYMNDEVALETLMSNIDGEVLSTPNFIKFKTGQRTQHWNKNCVAIGLSAGFLEPLESTSIHLIQRAIIRLMQMFPFQGVTDSDRDEFNKQMSDEYEYIRDFIIMHYHVSQRDDSKFWRDCRSMEIPSTLQHKLDLFVEAGRVFHGEGDVFAENSWTQVMLGQGLMPNQYHPIVNMMSDSELENFXSSLKTMVDQSVKQLPSHELFLSKYCPAT

SEQ ID NO: 88732 - protein, 498 aa, unidentified
  source 1..498: note = Gammaproteobacteria bacterium
  REGION 1..498: note = tr|A0A4Q5QAJ6|A0A4Q5QAJ6_9GAMM Tryptophan 7-halogenase OS=Gammaproteobacteria bacterium OX=1913989; GN = EOO53_02065 PE=4 SV=1
MPNKKMKVVIAGGGTAGWIAAAALAHQMGEILDITLVESQEIGTIGVGEATIPPMRTFHRLLGINEQEFMRATNATFKLGIQFENWEKIGGKYFHSFGITGKQTIVTDFIHFWLRGRELGIAQEFGDYCLEFKAALKNRFSINEQAKVNYAFHLDAGRYASFLRERAEARGVKRFEGKIAQVKQNPESGFITSLKMESGQDIPGDLFLDCTGMRGILIEQTLQTGFEEWGHWLPCDSAIAIQTESTGPAVPYTKSIAHHAGWRWQIPLQHRVGNGIVFSSQHLSKDEALNMLLSSVDGKGLTEPNVIKFKTGRRKKSWNKNCIAMGLASGFLEPLESTSIHMIMTAVTRLLLLFPHGEIKQSIVDEYNSQAESEFIRIRDFIILHYKATERDDSPFWRYCKDMEIPHDLMHRINLFKDFGRSNQVEGELFRLDSWTQVMLGQGIIPASYHPIVDLMPERDLQLFLNSIATDVDKNIAMMSTHQDFLKKYCPSVVSNIK

SEQ ID NO: 88733 - protein, 497 aa, unidentified
  source 1..497: note = Gammaproteobacteria bacterium
  REGION 1..497: note = tr|A0A4V1ZQN8|A0A4V1ZQN8_9GAMM Tryptophan 7-halogenase OS=Gammaproteobacteria bacterium OX=1913989; GN = EOO53_13620 PE=4 SV=1
MTSEKPKKILIVGGGTAGWMAANLMASRWEDIDVCLLESTEIGIIGVGEGSTPHLKFFFDSIGVSESEWMPRCNATYKNGISFANWSSVPGHESYFHPFPAQTDDFTVPTFFSNAKARIQGNNVNAHPDNYFLETYLTKKNLGPIAAESFPFQIFYGYHFDATLVGQFLAEKAVGRGVKRIFGTVTEVVLGAKGEITAVRLNDDSFLEADFFIDCSGFKSLLLQDALKVTFNSFKENLFNNAAVVMPSAISEIIPPETKSTTLSNGWAWKIPLVNRYGNGYVYSGDYITPDQAETELRQHLGLLESDVAARHLQMKVGRAEKHWEKNCLAIGLSQGFIEPLEATALALSYETITGFIKHYENGFYTNKFAEIFNNEINAKFDGVRDYIVCHYKANQRKDTNYWKDNAVNPKVSDSLNKILYLWRTSQNFANDMRIHNLEGSYQAKSWACLLAGYGVLPPLESSATNAGYTSPHDLDQLADFIRRCGLNFKNHNDLLN

SEQ ID NO: 88734 - protein, 490 aa, Oleiphilus messinensis
  REGION 1..490: note = tr|A0A1Y0I4M3|A0A1Y0I4M3_9GAMM Tryptophan halogenase; OS = Oleiphilus messinensis OX=141451 GN=OLMES_1344 PE=4 SV=1
MDNSECDIVVIGGGPAGSTIARQLARYGYRVCLLEKSRFPRNKVGESLPPGILPVLDSIGLRSRIENAGFLRPSRARVVWSTGTDELRNQAGEPGFQVCRAKYDAILLDEAVQCGVQVMQPVQIESITKLEENHWMVTFSVEGTHHRDSKRSELRARFLVDASGKKGVLKSLVSGRMRRLSTPTLALYGYWSPGREHSIESRIEAGNNAWFWGAVLPDGRINKAVFVSANSLQIQRDERKHEAITRLYLEKLAESRLLHRFGSKCLGPVVACNASSYIAEQSVGDDFIRVGEAGLAIDPLSSQGVQTAMNSAIQGAIVVHTLLQKPEARDQAKQFFEARQTETAQRNMQWSKAMYADQNVVEDSEFWRQRAHYPVSILPDTGHKEDPRFAEPNNTPLSFDVAVKLSDWLVIEPTPVISQNVITERAAAAHPALPRPVAFLEQVELVPLLATVVAGEHLGMIVRRWTNWMPLQKSLDIVLWLWRHHILVPV

SEQ ID NO: 88735 - protein, 157 aa, unidentified
  source 1..157: note = Gammaproteobacteria bacterium
  REGION 1..157: note = tr|A0A3B9NS72|A0A3B9NS72_9GAMM Tryptophan halogenase (Fragment) OS=Gammaproteobacteria bacterium OX=1913989; GN = DCG72_10005 PE=4 SV=1
MTNPNPQSNVVIVGGGTAGWMAAAALSKLLGKTLNVRLVESEEIGTVGVGEATIPTLMTLHRLLKIDEAAFLKATQGTIKLGIQFENWQKEGHQYFHSFGYTGEGCWAAGFQHFWLKGQQLGFGDPDYGQYAPELVAAQAEKFGFLKPAALNYAYHM

SEQ ID NO: 88736 - protein, 517 aa, unidentified
  source 1..517: note = Gammaproteobacteria bacterium
  REGION 1..517: note = tr|A0A2D5L8J6|A0A2D5L8J6_9GAMM Tryptophan halogenase; OS = Gammaproteobacteria bacterium OX=1913989 GN=CMP86_02420; PE = 4 SV=1
MEHAIKRIVVVGGGSAGWITAGLLAAEHGHNSAADFSVTLLESPNVPIIGVGEGTWPSMRSTLQKLGLSEIEFLRECDASFKQGTEFVNWSNQKAPERYIHPFSLPSEFASLNLANYWLEQRQHCDFADFVSPQAQVALSGLAPKQCQTPEFAFNVNYGYHFDAGKFAQLLQRHVTQVLGVEHVLGHFEQVISDHQGDIGALALNDGRHIEGDLFIDCTGQRSLLIGEHFGTPLQAVDTMLFNNRALAVQVPYADAQAPIASTTRATAQQVGWIWDIGLQSRRGIGYVYSDQYQDLQGAESTLRAYIADTSPGVETMSLALRPIEFQPGFRQQFWVRNCVAVGLSAGFVEPLEASALALVEQSANIISDHLPRTRQVMDIVAKRFNEKMHYHWQAILEFLKLHYVLSKRSEPYWQDNARRESCPDALVEKLRLWQQQPPWHEDAPRIDELFPSASYQYVLYGMGFEPGQGGRARASHLREQAKAAQVVRLNRERTEKLRQGLPSNRELLTALVGQTG

SEQ ID NO: 88737 - protein, 525 aa, unidentified
  source 1..525: note = Gammaproteobacteria bacterium
  REGION 1..525: note = tr|A0A2E1IC99|A0A2E1IC99_9GAMM Tryptophan halogenase; OS = Gammaproteobacteria bacterium OX=1913989 GN=CMQ88_03825; PE = 4 SV=1
MKNTINRIVIVGGGTAGWLTAGIIAAEHYIASSLSSGENNFHLVLIESPDIPTIGVGEGTWPSMRSTLKKIGISETDFFRQCSASFKQGTEFHNWTEGKDDTYTHPFTMPHNFHESNLAPHWQQIREKVNFANAVNPQSALFDSQLAPKNIATPEYAFHVNYGYHLDAGKFAELLRQHCVGKLGVEHVSANLTAINSAENGDIASISTDTQGEVFGDLFIDCSGSRALLLGEHYGIPLVSKSQYLFNNSALAAQVPYENPDDPIQSATLSTAQTAGWIWDIGLPTRRGIGHIYSSDYTTEQSARTELLDYIAKTAGKQAAAEATIRKITFDPGHREKFWHKNCVGIGMSSGFIEPLEASALVLVELSAAMIAEQLPANRKIMDLVAKRFNEKFLYRWDRIVDFLKLHYVLTQRTDSQYWIDNCKPSSIPQSLQDLLEIWQFQPPWHRDTQHADEMFPAASFQYILYGMNYKTQIDPSSRRSDRETSGKAMELFAENAKRTQQLMHTMPTNRELINKIYKYGFQKI

SEQ ID NO: 88738 - protein, 511 aa, Massilia sp.
  REGION 1..511: note = tr|A0A4R2W2R9|A0A4R2W2R9_9BURK Tryptophan halogenase; OS = Massilia sp. GV090 OX=2135673 GN=C8K01_11086 PE=4 SV=1
MDQGRGRAICKIVIVGGGTAGWMTAAPLALRLGKACEIVLVESPEIGTVGVGEATLPTIAYYNRALGLDPADFARKTKATFKLGIEFKDWGHVGNRFFHGFGDFGPAIENRSPYMYWLRLAREFKDMPSYEDWSAATAMARANRFMEPYGDQPAVTNAFSYAYHFDAGLYAAYLRDYAMQRGVARIEGMITAVEQHPETGLITAVRLRDGSRVEGDLFIDCSGFRGLLIEGVYQAGYDDWSAMLPCNSAQAVPCARVEPLTPYTRSTAQSAGWTWRIPLQHRTGNGHVYCNGFTSDEEASRVLLAGLDGRALDEPRQLRFTTGRRRKSWVKNCVAIGLSSGFLEPLESTSINIIENSVGWLLQHFPDRDFQPALADEFNRLVSRRYESVRDFIVMHYKITQRDDSEFWRYCASMPVPDTLLHQIELFRETGRVAIYDPEGFQVSSHISIMAGLGITPKTYDPLIDLMDLQALRTHFNRVRDTISRAVQAMPDHGAYASQLAAEPPLSGLAA

SEQ ID NO: 88739 - protein, 519 aa, Kangiella sp.
  REGION 1..519: note = tr|A0A2G2KYP5|A0A2G2KYP5_9GAMM Tryptophan halogenase; OS = Kangiella sp. OX=1920245 GN=COA86_13495 PE=4 SV=1
MSKIIKDIVIVGGGTAGWLTACNLAKQLNVKAKNSFTITLVESPDIPTIGVGEGTWPTMRKTLHRLGIDEAEFMKECDATFKHGTKFVNWRQSPKDGSSEYYYNLFTSYVDPSEFNLAPYWKMGYAGEGKSYPDSVSMQEQVSEHGLAPKKITTPQYDGIVGYAYSLNAGKFGKMLNRLAVEKLGVEHKLANVNSVELDEEGFIESITTDRLGTIKGDFFVDCTGARALLIGEALGIEYIPFTDTILTNQAIFMQVPYENENSPIVPCTVSTAQECGWTWDIGLTNRRGVGYVYSDAYCDAERAEKVLRDYIGPQSEQLTAKQVKVNVGQRKRSFHKNCLALGMAAAFVEPLEASAIFLMEAGSNMLADLFPRHRDALPQVEKTFNESFNYRWAKTVDFIKMHYYLSRRDDNDFWLDNRDLKTVPESIQIKLAHWKTQPISKYDFPNTFEPFAMESYQYILYGMENDIDFSQHSAGFGEVDKAKRIFNEVERATEIALRELPNHRTLINKIHQFGLPRV

SEQ ID NO: 88740 - protein, 501 aa, Streptomyces griseoflavus
  REGION 1..501: note = tr|A0A0L8MQA2|A0A0L8MQA2_9ACTN Tryptophan halogenase; OS = Streptomyces griseoflavus OX=35619 GN=ADK76_31385 PE=4; SV = 1
MPASSEEFDAVVVGGGPGGSTAAALIAMAGHRVLLLERERFPRYQIGESLLPSTIHGIGRLLGVEEELHEAGFMRKRGGTFRWGSAPGTWTFSFADAPGLGETGGYAYQVERMRFDALLLDHAGRVGADVREECAVRAIHHHDGRVTGLTYRSPEGTEAEIRARYVIDASGNTGRLHTAAGGRRVYSPFFRNIAVFGYFEGGRRLPPPNQGNILCAAFDTGWFWYIPLTDRLTSVGAVVNREHADQVQGNPEQALAKLVNQCALIRDHLADARRVTEGTYGRVRVRKDYSYCNTRFWAPGVALVGDAACFIDPVFSSGVHLATYSAMLTARSVNSVLGAGMDEGRAFGEFEARYRREYTVFHDFLAAFYSMQAPKDTYFWQAHKVTGGRAGALASFINLVGGLASGDRVLIDADQLTGRLATASRVLDETADGYQADPAGDPWDESPMLAETFAQSDALAGQGVARGDFAEKTPQFPGGLVATADGMHWAEPAGEPPGGTP

SEQ ID NO: 88741 - protein, 158 aa, Pseudomonas avellanae
  REGION 1..158: note = tr|A0A261WL00|A0A261WL00_9PSED Tryptophan halogenase (Fragment) OS=Pseudomonas avellanae OX=46257; GN = CFN58_10110 PE=4 SV=1
MIPAPLRNIVIVGGGTAGWMAAAAFARVLGPTFKVQLIESEQLGTVGVGEATVPHIKAFNNLLGIDEAEFVRQTQGSFKLGIEFVDWQRPGSTYMHGFGTQIGHPLGLLPFHQYWIKQHARGKAQPLGAYTLNTVAAARGKFMTSAGDVPANSLLANI

SEQ ID NO: 88742 - protein, 502 aa, Alteromonas sp.; identical to SEQ ID NO: 88058
  REGION 1..502: note = tr|A0A010QHG1|A0A010QHG1_9ALTE 2-polyprenyl-6-methoxyphenol hydroxylase-like oxidoreductase OS=Alteromonas sp. ALT199 OX=1298865; GN = H978DRAFT_3365 PE=4 SV=1

SEQ ID NO: 88743 - protein, 507 aa, Porphyrobacter sp.
  REGION 1..507: note = tr|A0A2L0GN21|A0A2L0GN21_9SPHN Tryptophan halogenase; OS = Porphyrobacter sp. HT-58-2 OX=2023229 GN=CHX26_14675; PE = 4 SV=1
MADGLPAPLRHIVIVGGGSAGWMTAAALADAVGQSCAITLIESEAIGTVGVGEATIPPIRHFNQRLRIDEATFVRETQGSYKLGIEFVDWGRKGHRYFHPFGQYGAEFDSVPFYHHWMREHLAGRVDGPIDDFSMCWAMAKAGRFTHPSPDRRMIQSTFDYAYHFDAGLYAAFLRRFAESRGVRRLEGKVVDVSLRGENGFIEAVTLDDGTRVAGEFFIDCSGFRGLLIEEALAAGYDNWQHWLPCDRAVAVPCERGEFTPYTRSTAREAGWQWRIPLQHRTGNGYVHCSEFISEDQATATLLANLDGQPLADPRPLRFVTGRRREFWKRNCVAIGLSAGFMEPLESTSLHLIQYAILRLIALFPDSAMSPLLSREYNAQTAREYELIRDFLILHYKASERQDSELWRYCSAMPIPDSLQYKIDHFKEHGMLVADGQELFANPSWIAVYLGQGIVPQRAPALAHMRGAVPVAERMAQVRAAMSEAVAAMPSHSEFIARHCAAPQVAA

SEQ ID NO: 88744 - protein, 536 aa, Sphingopyxis sp.
  REGION 1..536: note = tr|A0A095B2C2|A0A095B2C2_9SPHN Tryptophan halogenase; OS = Sphingopyxis sp. LC81 OX=1502850 GN=FG91_01208 PE=4 SV=1
MSVVRAANYRLLKALCGSIAFRVAKRSILIVGGGTAGWLTAAYLARFFDLPRNPRLSITLLASDEIGSIGVGEGAFPTIRNTLQFIGIDESAFVRATSATFKQGIRFDDWVRTPADGRSSHYLHPFEAPYHGDGYSLVSYWLLQNEATRRPFAEAMTIQNRVAEAQRAPKRPGEGEFTGPLNYAYHFDAARLAEVLSAEARAMGVTHLSGTLTGVGLDATSGAIDHVVTAEHGTLAADLYIDCSGFRAELIGGALQSPFKGVKHQLFTDRALACKLPYERPDVPIESYTIAAAHEAGWTWDIGLAGARGIGCVYSSDHMGDDRAAEILAAYTGGRSHDVNVRSIPFEAGYRPASWVKNCVAVGLSGGFLEPLESTGLVMIETAAAMIAEMFPLAGPVGAPARRFNDLMAARYDNTINFLKLHYCLSQRKEAFWRDNGDPASIPDRLKELLEEWRYRPPGRFDFILDLESFAFFNYQYILYGMEYRTDLSPVREEFPDTAEAERIFARIKSFGDRAASELPAHRAMIDQINAGAAYA

SEQ ID NO: 88745 - protein, 518 aa, Stenotrophomonas sp.
  REGION 1..518: note = tr|A0A4Q7RRH5|A0A4Q7RRH5_9GAMM Tryptophan halogenase; OS = Stenotrophomonas sp. BK441 OX=2512175 GN=EV592_1850; PE = 4 SV=1
MTHSIRHVVILGGGSAGWLTAGVLAAEHGGPGADDLRITVIESPDVPIIGVGEGTWPTMRDTLRRIGVSEADFIRECEGAFKQGSQFVDWTDAGPHDTYYHPFHLPGGYDEADLVGGWRAHHPGAQFDHLVCAQPHLCDANKGPKQFATPEYASVANYAYHLDAAKLGGFLRQHCVSRLNVRHVPDLVTDVLSHDNGDIAALRTREHGDIAGDLFIDCTGLRALLIGQHLGEPLLPQQHLLFNDRAIPTQVPYTDPRAPIACQTISTAQQFGWIWDIGLQGRRGIGHVYSSAYGSEQDAHDALVRYIVRTGGREQDITWVPRVRIEPGYRLRPWRNNCVAVGLSSGFLEPLEASSLVLVELAAAMIADQFPATRDTMDILAARFNDTFRYRWERVVDFLKLHYVLSRRDDSDYWRDHRRQDTWPERLRELLALWRHQPPSRYDLYRIEEVFPWASYQYILYGMGFVPQGRAGTVQAAAVQRAERCFRQTAEQTARMLAALPGHRELIDHIRARGLPRV

SEQ ID NO: 88746 - protein, 520 aa, Kangiella sp.
  REGION 1..520: note = tr|A0A2G2L1F8|A0A2G2L1F8_9GAMM Tryptophan halogenase; OS = Kangiella sp. OX=1920245 GN=COA86_13500 PE=4 SV=1
MKELVNRVLVVGGGTAGWLTAGILAKQLNSKQLDSVKVTLVESPNIPIMGVGEGTWPSLRATLQKLEIDEGEFMRECDATFKQGTEFVNWMKPNDGKKHSYYHPLSAVFHAAHDFNLSPYWLLGDAGKQSYDLAVSSQANICSLGFAPKKITTPAYDAIQNYSYHLNANKFATFLAKHCVEKLGVEHLIANVNNVDLDEDGYISSVTTDVQEIETINADFFVDCSGSRSILMGDALGVEWKGISDIIFNDTALAVQVPYPEIDTPIATHTIATAFDSGWTWDIGLHNRRGTGYVYSSRHTSDEKAEETLMKYINQTDDNLEVRKIKLNVGYREEFFNKNCVAIGMSAVFIEPLEASAIFLIDAGANMLADQFPRTRESMKWVEKKYNKTFKLRWEKTLDFVKLHYCISNRRDSQYWIDNCQPETIPDSLKERLEHWKSHPPSKYDFDYAYEPFVLDSYLYVLYGMNFNSDIKHNQSTFAEHERAKMMFSDVEKLTEHLSNELPKQRDLVESVYKYGFQTI

SEQ ID NO: 88747 - protein, 497 aa, Massilia sp.
  REGION 1..497: note = tr|A0A4R2W1I4|A0A4R2W1I4_9BURK Tryptophan halogenase; OS = Massilia sp. GV090 OX=2135673 GN=C8K01_11091 PE=4 SV=1
MEAAQHSAYKRIVVVGGGAAGWMAATALATALPASTVELVESEEIGIIGVGEATFPSIRAFHKILGIDEAEFLRATNGTYKLGIEFCGWRAQGERYFHTFGDLGALAGPQALWGQHRRLGSDSLGTLGEQCLPSVMASQGRFQVPPEREQFFNYAYHFDAVLYAGFLRALALKRGVRRTEGRIVEVARRADGGVALLRLGDGRTVAGDLFIDCSGFASLLLGRALDEPFVDFSHWLPVDRAWACPSGRSGPDLAPYTRATALEAGWAWRIPLSNRTGHGHVFASRYIDEERARAQLLQQMDGPALAEPRLLRFTTGHRERFWVHNVVALGLSSGFLEPLESTSIFLVQSGLGRLIELLLPGAAPVAPAVADYNAAMVRQFERVRDFIILHYCLTGRRDSKLWRAMASMELPETLAFKIHAWRQAGALHQYSDEGFDATSWLAIHAGMDHWPERADPALRELAPDAVRQALRQRRDSIAAVVAAMPTHDAYLRSVLGR

SEQ ID NO: 88748 - protein, 510 aa, Rhodanobacter sp.
  REGION 1..510: note = tr|A0A1E4Q513|A0A1E4Q513_9GAMM Tryptophan halogenase; OS = Rhodanobacter sp. SCN 68-63 OX=1660134 GN=ABT19_03825; PE = 4 SV=1
MSDSRVKNIVIVGGGTAGWMAAAAFAKVLGPEYSIRLVESEEIGTIGVGEATVPHLKLFNNLLGIDEIEFVRRVQGTFKLGIQFNDWGQLGDSYIHGFGELGTMLGLLPFHQYWVRAAQLGLAADLGQYSLNTLAAPQGKFMASASDVPATSPLANIAYAYHFDSGLYAKLLREYAEARGVRRTEGKIAQVRQRAEDGFVQSVVLESGDAVEGELFIDCSGFRGLLIEQTLHAGYDNWTHWLPCDRALAVACKKVGPPTSYTRSTARTAGWQWRIPLQHRTGNGYVYSSAHISDDEAAATLLANLDGEAMGDPRPLRFTTGLRRKVWDRNVVALGLASGFMEPLESTSIFLIQSGISRLLNLFPRQSFSPVLIDRYNTQTRFECERIRDFLILHYHATQRSDTPFWNQCRTMDIPASLKDNIALFRDSGRFFREGEEMFALVSWVQVMIGQGIAPRSYHPLVDQLAPKELEAFMQHVQRVIAGCVEAMPAHEAFIARYCQAAPSGAPMAA

SEQ ID NO: 88749 - protein, 502 aa, Sphingomonas sp.
  REGION 1..502: note = tr|A0A4R2PL07|A0A4R2PL07_9SPHN Tryptophan halogenase; OS = Sphingomonas sp. BK235 OX=2512131 GN=EV292_10278 PE=4; SV = 1
MTHAPIRSITIVGGGTAGWMAATWLARRFAHLRLAITVVESAAIGTVGVGEATVPAIRDFLAAVELGEAEVLRQTEGTIKYGIRFRDWQRDGHDFFHPFGLYGVAARGVAFHHYWLKLRQAGDPTPLGAYCVATQLAERDLFLPPAERPANDLGVFNFALHFDASKFAALLKRLALANHVRHVEGRITEVLRHGERGTVAAVRLEDGTRLEGDLWIDCSGFRSLLLGEAMEVPYVDWRRWLPCDRAVAIPCRASGPHRPLTTATARPAGWQWHIPLRHRTGNGYVYCSDFASDDAAEALLRESIEGEALAPANRLRFTAGHRARFWEKNVVGLGLASGFLEPLESTSISLIQSGLDRLAPLFPDQGFDPRLAATYNRQSVLEFERIRDFLLLHYLPNRREGEPFWDAIRAVPPTDGLQAKLDAWRAAGEFVRREWDTFQDPSWLSLYAGFDDLPARPSPLADQYDVATLADSLTRMREAIAGTLRLAEPHQDFLRRVAAGGQ

SEQ ID NO: 88750 - protein, 487 aa, Sphingomonas sp.
  REGION 1..487: note = tr|A0A4R2PIV3|A0A4R2PIV3_9SPHN Tryptophan halogenase; OS = Sphingomonas sp. BK235 OX=2512131 GN=EV292_10359 PE=4; SV = 1
MRTIVIAGGGSAGWMCAAAFSHLLGPGWRVRLVESEAIGTVGVGEATIPQIRTFNQALGLDERAFLDATQGTYKLGIEFVGWGAPGERYLHAFGDVGRDSGLVPFHQRWLRARAAGVVAPLGDHSLNDLAAREGRMQLGRARTAALLPEMPYAFHFDAALYAALLRRFAEARGVERIEGRILGVERAGEALTALRLDGDRRVDGELFVDCTGFAALLIGEAMAVPYEDWTRYLPCDRALALPCARVAPPIPYTRATAHDAGWQWRIPLRHRTGNGIVYSSAHLDDAAAEQVLRAGLDGSTEAAPRAIRFTTGRRREPWCGNVVAIGLAAGFMEPLESTSLHLVQSAIARLIALLPGAAAGPATRDAFNRQSATEWERIRDFLVLHYHANRRDGGFWRDCRELPLPEALAAKLALWREQGVVLREQDELFTEVAWVQVLIGQGVLPDGHHPLADAEPLEEAREFLSLWAQLVRREVAQMPAHATLVGG

SEQ ID NO: 88751 - protein, 501 aa, Alteromonas sp.
  REGION 1..501: note = tr|A0A010PC32|A0A010PC32_9ALTE Tryptophan halogenase; OS = Alteromonas sp. ALT199 OX=1298865 GN=H978DRAFT_3484; PE = 4 SV=1
MTVSGLGSSNNHTPVKNVVIAGGGTAGWMAATALSRLLGKSIKVTLVESKDIGIVGVGEATIPPIRTFHKLLGIDEKAFMRATQATFKLGIEFENWREQGHSYIHSFGITGRECWAGEFHHFWLRAKEYGFGGEFGDYCPELIAAKQNKFATSEAMPLNFAYHFDAVAYGRFLKSLACEAGVTHKEGDIEKVVVCPQSGNIQSLQLASGEVVSGDFFIDCTGFKGLLIEQALHTGYDDWQHYLFCDRAVAMQTELTAPPVPYTKSVAHQAGWRWQIPLQERMGNGLVFCSRFMSDSEAINTLKSQVSGAPINEPRVIRFTPGKRRRGWNKNCVVLGLSSGFIEPLESTSIHLIMTGLIRLMRLFPFDGITQSAIDEYNNKFDSEMSAILDFIVMHYKVTQREDSPFWQQCQRMDIPPSLKHKLALFAESGRVFLDDGDIFRVDSWTQVLMGQGLTPRQYHRVADEMSEQSLKQFMAGLKQQVDNHVAKLPSHEAFLTQYLK

SEQ ID NO: 88752 - protein, 503 aa, Sphingobium sp.; identical to SEQ ID NO: 87904
  REGION 1..503: note = tr|A0A4U6P481|A0A4U6P481_9SPHN Tryptophan halogenase; OS = Sphingobium sp. MP9-4 OX=1761936 GN=A0U87_20845 PE=4; SV = 1

SEQ ID NO: 88753 - protein, 602 aa, Microcystis aeruginosa
  REGION 1..602: note = tr|A0A552G2G3|A0A552G2G3_MICAE Tryptophan halogenase; OS = Microcystis aeruginosa Ma_QC_Ca_00000000_S207; OX = 2486251 GN=EWV91_02355 PE=4 SV=1
MNPTATKSLEYDVIIMGAGFAGLCQARHLMLNIPGIRVAMIDPRPMERTDKDLKIGESLIEVAALFLCKELGLHDYLIENHTPKSGLNFHWPKDTSKTASLDDYYHVWANRQTPVGSFHLQRAKFEQDLLAMNCQMGADFYNGRVKDVDLTQGDDLKTVYAKVGEENITLQAKHVIDAAGRNFIIGRKTDNVLSGPENLLGVNNGSAWLRVKNIDRTIFHSGYHPEGASTSHYYATNHYFGQGHWLWMIPIDKKSMELSIGIIHHHDVIPAKSINNLEKFSSFLDANHTILSRLIDSGEVVDFHYWPKIAHKSKVLFSSDNWYIIGDAAHIFDAFYSYGTTMIAFEVESVTEIIRAKLAEEAAAEQKRSAYNDFNLAYARTVNCLYRDHAYQLGHASVMSWRIYFEYMWWFGVHIPTYIGKWHLDLNFIPRYVKIANGNVDGIFADLCKEFHQLVEEGANIGLMDAYRADQLWGNYGTLKHFDDFLENTKFEPRRCNVFASMKAVYFYIAIWYALFQWKAFGLAGWLTPRHWYYFGRMLSLSVQATIAEVIYKWKTRGIPDNTQMEKMREEFKSYHYQPQDKYSFPVEEVANKAVKIESFAS

SEQ ID NO: 88754 - protein, 495 aa, Colwellia sp.
  REGION 1..495: note = tr|A0A3S9Q100|A0A3S9Q100_9GAMM Tryptophan 7-halogenase OS=Colwellia sp. Arc7-635 OX=2497879; GN = EKO29_00275 PE=4 SV=1
MTDTTLKHVVIAGGGTAGWMTAAAFSKLLGNNIKVTLIESDDIATVGVGEATIPPIKNFHKLLGINEQEVMKATHATFKLGINFENWGQVNDQYIHSFGVTGKECWAGEFHHFWLHGKQKGHHDEFGDYCFELQAAKQNKFALGHDRPINYAYHLDATLYAKYLRTFSEKLGTERIEGKISQVDKCMKTGNISAITLASGQTIAADFFIDCTGFRGVLIEQALHTGYEDWSHWLPCDSAVAVQTKSVSKPIPYTRSIAHDAGWQWQIPLQHRVGNGLVFCSKYLSDDEAKNLLLENIVGETITEPRVIKFKTGRRRKGWHKNCVAIGLSSGFIEPLESTSIHLIMTAIVRLLRLFPYNGVTPSAVDEYNNKLDSELNAVRDFIILHYKVNERADSKFWQHCQHMEVPPSLAHKIRLFKETGRVFLDDGDIFRVDSWTQVMLGQGLMPMQYHQIANIMNDDELTKFLTSLKSAISNAVSELPEHDDFIKQYCSSSA

SEQ ID NO: 88755 - protein, 506 aa, Caulobacter sp.
  REGION 1..506: note = tr|A0A2G5QYS6|A0A2G5QYS6_9CAUL Tryptophan halogenase; OS = Caulobacter sp. X OX=2048901 GN=CSW60_13735 PE=4 SV=1
MADNRIRKLVIVGGGTAGWMAAAALRRHFQGGPLEITLVESSEIGTIGVGEATIPTIRGFYQQLGLSDLEVMRATQATCKLGIRFDGWLREGHAFIHPFGLFGQDLRGIPFHHYWRKLAQAGEPTDIQDYSLGASLAAAGKFRAPPRNPKNSLSIFDWALHLDAGLFAQLMRRVAEDNGVRRIDARITKVNLRPEDGFVASLDLDTGATVEGDLFIDCSGFRGLLIEEALGTGYESWSDLLLCDRAFAVQSEGVGDPAPYTEVKAHTAGWRWRIPLQHRYGNGYVFSSRHISDEAALAELKAAVPDRPLHEPRLIRFNPGRRKQAWNRNVIALGLSSGFLEPLESTSIALIETGIEKILALFPDKDFAPELVDEFNDWSRREMERVRDFIVLHYWANRRGDTAFWRDCNAVALPDSLRRKVELFRQRGHFVRYRWEMFQPASWMAIYAGFELLPEMIDPALDGVDAKALSAPLAEMRKAIAEVVASAPPHAAFLDQYCRPAPVAAQ

SEQ ID NO: 88756 - protein, 514 aa, unidentified
  source 1..514: note = Emcibacter congregatus
  REGION 1..514: note = tr|A0A2G4YW34|A0A2G4YW34_9PROT Tryptophan halogenase; OS = Emcibacter congregatus OX=2043170 GN=CRD36_01340 PE=4; SV = 1
MTYKKIMIVGGGSAGWITAALMNGIMNKNGQKKVDISLIESPDIPRIAVGEATVPNIRQILITLGIDELDFMKSTDATFKQGIKFNNWLHNTGDSYYHQFSRYTPNMVDTFGQEWLKSDRSIPFADTISVQPALCEMNLSPKLIGLRQHQIPVSYAYHLNALKMADYLRDIAVGQGVTHYLDNITKVDMTEQGDIAAVNTEKGSRYEADLFVDCTGFASLLIEKELGIGWEDFSDYLFCDRACVMQVPYETYYPGRVNSVTQATALSAGWIWDIPLTNRRGIGHVYSSAFITDDDAEKELRTYEGAHSDHLSTRVVHFQVGRRKKTWAANCVAIGLSGGFLEPLESTGLYLVQTAALLLAEHFPFDGQMKELSDKFNILMSDRFDEILSFINLHYCLTQRTDTDFWQEVQRPEHILRALQEKLDYWKIKPPSQSDFKDQYTLFTHQNHELVLYGMDFLKDHYRQKYGPELSSPIVPGFIQQRLQAMQSQLPLHDEWLHHSLGMPRYPSAYASGV

SEQ ID NO: 88757 - protein, 512 aa, Shewanella sp.
  REGION 1..512: note = tr|A0A2M7LV89|A0A2M7LV89_9GAMM Tryptophan halogenase; OS = Shewanella sp. CG_4_10_14_3_um_filter_42_91 OX=1975535; GN = COZ42_07055 PE=4 SV=1
MDQTIIKNIVIVGGGTSGWMTAAMLAKLFNKQLNITLIESDAIGTIGVGEATIPPLQIFNSVLGISETDFIKATQATYKLGIEFQNWHQQGEAYMHAFGNIGRDLGFTSFHHYWLSAQANLSPSNPSQANGSQYNANDFWQYSLNYQAAKHNKFQPIQTIAQAQMSGITHAYHFDAGLYANLLRQYSVQRGINRVEGIITSTELSVDGSIKRVTLQNGPCISGDLFIDCSGFSALLIEQALGVEYENWQHWLPCDSAYAVPCESTSPLTPYTKATAHHAGWQWRIPLQHRTGNGIVYSSQHMSDEQAKQHLLANLDGKPLAEPRKINFTTGRRVKQWHKNCVAIGLSSGFLEPLESTSLHLVQSAIIRLTKLFPRNGIQPQHIDEFNRQSQTEFEQIRDFIILHYHLNAKQSADNERGLWQQCRDMDIPESLQHKIDLFKATATVFRHQDELFTEAAWIQVMLGQGIIPEDYHPLTQAVSQDDLTDYLTNIRKVITTTVSQMPNHKDYIAAL

SEQ ID NO: 88758 - protein, 498 aa, Rheinheimera sp.
  REGION 1..498: note = tr|A0A349LR92|A0A349LR92_9GAMM Tryptophan halogenase; OS = Rheinheimera sp. OX=1869214 GN=DCS87_03665 PE=4 SV=1
MNNSIKKVVIVGGGTAGWMAAALLKKVLLNTVDIELVESEEIGIVGVGEATIPPIQIFNQYMGFDEREFLKETNATIKLAIKFENWRVQGESYYHTFGAPGTQLGFTSFQHHWLKAKQLGLAQSVWDFDLNYLCCQQEKFNIIKTPNPLYEVPYAYHFDATLYGRYLRKLAEKAGVVRSEGMISHVQVNEITGDVQSLLLRDGRQIHGDLFVDCSGIRGLLIKQALQVPYENWSHYLPANSALAVPSERHADTKPYTRSIAHHAGWQWRIPLTHRNGNGMVYNSDFLSDDEAASILLGNLDSKALAEPRKISFTTGRTTQQWHKNVVAVGLSSGFLEPLESTSIHLIQSAIVRLLKVFPHHGIDASLQQYYNQDSKAEFETIRDFIILHYHVNERRGEKFWDQMRHMAVPERLAQKIQLFKQTGHVFNDANDIFRDASWLQVMLGQGVMPLDFHPSVNAIPDAALLSSLEQIRQAKWQPLTQMTGHDDFLRRYTSSLT

SEQ ID NO: 88759 - protein, 503 aa, unidentified
  source 1..503: note = Micropelagos thuwalensis
  REGION 1..503: note = tr|U2XQF8|U2XQF8_9PROT Potassium uptake transporter NAD-binding subunit TrkA protein OS=Candidatus Micropelagos thuwalensis OX=1397666 GN=trkA PE=4 SV=1
MTLTMSAENEFKLRKIVIAGGGTAGWMAAAALSKTLGELVDIKLIESEQIGTVGVGEATIPPIITFHRMLDIPENEFMRETQATFKLGISFENWRVDGEKYIHSFGTTGKDHWTSGFQHFWLNGLKRGHKTSYDDYCLELKAALDNKFSHLPNEGMSYAFHLDSSRYAKFLRRFSEKNGVERVEGKINKVNLNGETGFISSLDIDDGTTLEGDIFIDCTGFRGLLIGEALGIEFEDWTDHLPCNGAIAVQTESTQPAVPYTRSIAHEAGWQWRIPLQHRTGNGIVYCNDFLDENGALDKLLQTVEGKTITDPNFIKFRAGTRKKQWHKNCIAVGLSSGFMEPLESTSIHLIQRNILRFIRMMPYNEISQRDIDEFNNQADWDMETIRDFLVLHYIANERDDPFWKMCADINLTDSLNQKIELFRETGRVFRQNEELFAENSWIQVMMGQGIMPVSHHPIASKMTDQELNTFLKTIREGVEKTVKGLPMHHDYVKQYCGVKEIA

SEQ ID NO: 88760 - protein, 500 aa, Luteimonas sp.
  REGION 1..500: note = tr|A0A290XCM5|A0A290XCM5_9GAMM Tryptophan halogenase; OS = Luteimonas sp. 100111 OX=2006110 GN=CNR27_04160 PE=4; SV = 1
MQETPPNTAVRRVVIAGGGTAGWMAAAGISRTLGPMLDIVLVESDEIPTVGVGEATIPTLVTFHRALGLDEREFMAATQATFKLGIRFADWKARGEEYVHSFGTTGKDHWSAGFQHFWHRGRSRGLAGDYGDYCLELRAALEDRFAHLPENGLNYAFHMDAGLYARYLRRFSESHGVRRIEGRIAEVQADRASGNIEALVLASGERIEGDLFIDCTGFRGLLIEQALGVGYEDWSHWLLCDSAIAVQTASVGPAVPYTRSTAREAGWQWRIPLQHRVGNGIVYASRYIDDAQARETLLANLQGERLVEPRTIRFRPGQRERTWHGNCVALGLASGFLEPLESTSIHLIQRGIIRLLQLFPAAGIRQTDVDEYNRQSREEIESIRDFVILHYKVTDRDDTPFWRACREMQVPDSLAHRIALFADSGRVFREGFELFAENSWVQVMLGQGLVPRSHHPTADLMDDAELSRFLGQIRERVARTLAQLPAHETYVRGYCPAAPV

SEQ ID NO: 88761 - protein, 501 aa, Streptomyces sp.
  REGION 1..501: note = tr|A0A0M8VS53|A0A0M8VS53_9ACTN Tryptophan halogenase; OS = Streptomyces sp. AS58 OX=1519489 GN=ADL00_07620 PE=4; SV = 1
MSASYLKAAFGERISVTVVESDRVPTIGVGEATFSTVRHFFEYLGLKETDWMPACNATYKLGIRFQNWSGVGEHFYHPFERLRVVDGFPLTDWWLKQRPSERFDADNFVMAALGDNLRSPRFLDGTLFERGNSDLGPGGAAFRSTLTEQDTQFPYAYHFDAALLAKYLTEYGVSRGVRHVVDDVVDVKLDDRGWISAVATAEHGDLEGDLFVDCTGFKGLLLNKALEEPFVSYQDTLPNNRAVALRVPVDTAERGIPPYTRATAMEAGWIWTIPLFDRIGTGYVYADEYCSPEEAERTLREFVGPGAEGLEANHIRMRIGRSRNSWTKNCVAVGLSSGFVEPLESTGIFFIQHGIEQLVKHFPQQDWSQRLRDSYNRAVNNCMDGVREFLVLHYRGAARNDNQYWQDAKTRKVPDALQGRLEQWQNKLPDAENIFPHYHGFEAYSYVAMLMGLKGIPLRAAGALDLMDGTAAAEEFERVRATAKDLLRTLPSQHEYLAQLH

SEQ ID NO: 88762 - protein, 538 aa, Burkholderia sp.
  REGION 1..538: note = tr|A0A228GCI4|A0A228GCI4_9BURK Tryptophan halogenase; OS = Burkholderia sp. AU15512 OX=2015345 GN=CFB43_33040 PE=4; SV = 1
MSNPIKHIVIVGGGTAGWMSASYLVRALQQQASITLIESEAIPRIGVGEATIPNLQKVFFDFLGIPEREWMPQVNGAFKSAIKFVNWRKSPDRSRDDHFYHLFGSVPNCDGVPLTHYWLRKREQGFQQPMAYACYPQPEALDAKLAPCLLDGTRQMHHAWHFDAHLVADFLKRWAVGRGVKRVVDEVVEVHLNERGDIASLSTKEGRTLEADLFIDCSGMRGLLINQALKEPFIDMSDYLLCDSAVASAVPNDDARVGIEPYTSAIAMNSGWTWKIPMLGRFGSGYVFSSKFTSRDQATADFLNLWGLSDQQPLNQIKFRVGRNGRAWVNNCVAIGLSSCFLEPLESTGIYFIYAALYQLVKHFPDTGFDPRLRDAFNAEIVYMFDDCRDFVQAHYFTASRDDTPFWLANRHDLRLSDAIKDKVERYKAGLPLTTTSFDDATYYETFDYEFKNFWLNGNYYCIFAGLGLLPDRSLPLLQHRPASVDKADAMFARIRREAERLRASLPTNYDYLRSLRDGDAGRARSRPGPAVAAPETL

SEQ ID NO: 88763 - protein, 501 aa, Plantactinospora sp.
  REGION 1..501: note = tr|A0A248YVV1|A0A248YVV1_9ACTN Tryptophan halogenase; OS = Plantactinospora sp. KBS50 OX=2024580 GN=CIK06_16755; PE = 4 SV=1
MVERADVVVIGGGPGGSTVATLLARRGHRVVLLEKETFPRYQIGESLLPSTVHGIGRMLGVTEELEKASFMVKRGGSFRWGTNPVPWNFLFAVAPELSGPTSYAYQVERMKFDEILLRNAARHGVDVRENSPVADVLGDDERVRGVRYTDPDGVEREIHASFVVDASGNRSRVHQHVRGERIYSEFFRNIALFGYFTGGRRLPAPDSGNILCAAFDEGWLWYIPLSDTLTSVGAVISREHAARLQGDQEEALLGFVDRCAIVKDFLADATRVTEGTYGQIRTRKDYSYTNSTFHRPGMVLVGDAACFIDPVFSTGVHLATYAGLLAARSINSVLAGDVTEERAFDEFEGRYRREYRVFYEFLSAFYDMQGSEESYFWRARKVTNVAATNLEAFVSLVGGVHSGEAALTSADALIGEFRESSGALADAVERTGSMQTPSGERMHHLFGTPVVREVMQEMNNIQVRGVQGEQARELPLLDGGLVPAPDGLSWMEPTAVLEEAR

SEQ ID NO: 88764 - protein, 515 aa, Caulobacter sp.
  REGION 1..515: note = tr|A0A2G5R2F1|A0A2G5R2F1_9CAUL Tryptophan halogenase; OS = Caulobacter sp. X OX=2048901 GN=CSW60_20265 PE=4 SV=1
MKRGRSILIVGGGTAGWLTAAYLAKALRIAEQTHLSITVLESPEIGAIGVGEATFPTIRGTLQFLGIDEARFIRQTSATFKQGIRFVDWGDAPAEGRRHSFFHPFEAPFSTDGVSLAPYWLLQDEAARAPFAEAVTIQARVADAARAPKRPHESDFSGPLNYAYHFDAAKLAEVLAERARELGVRHLQGHVGEVALDDAGAIARIASPEHGDLTADLYIDCSGFRAELIGKALNAPFKSARPVLFADRAVACRAPYARPDAPIQSYTIATAHEAGWLWDIGLSGARGVGCVYSSNHIDDARAEAILRDYVGAEVETRRIAFEAGYREKQWIGNCVAVGLSAGFLEPLESTGVVLIEAAVAMIAELFPHTGPVSAPARRFNELMAARYENIIVFLKLHYALSRRPERFWRENTDPATIPERLQELLEQWRHRPPARFDFILDLETFAFFNYQYILYGMGFATDLADGADEFPDTAGAAKLFAKIRGFADRATQDLPSHRDLIAQINRFGFEERALA

SEQ ID NO: 88765 - protein, 484 aa, unidentified
  source 1..484: note = Caulobacterales bacterium
  REGION 1..484: note = tr|A0A1F8IVC7|A0A1F8IVC7_9PROT Tryptophan halogenase; OS = Caulobacterales bacterium RIFCSPHIGHO2_01_FULL_67_30; OX = 1797584 GN=A2795_01160 PE=4 SV=1
MTAAALARLVAPSGVQITLVESEAIGTVGVGESTLPHIRAFNERLGIDEAAFMKATRATFKLGIQFENWGQIGGSYIHPFGDYGAPGGEAPFHHYWLRGRELGDVGPIDDYSLPVVAAREGRFAPPSDDPRSLLSTYRYAYQFDATLYARFLRGMAETEGVRRIEGRIQNVAQDGESGAITKVTLDDGRQIEGDLFVDCSGFRALLIEQTLKAGFTDWSHWLPCDRAAALPCESDQPTVPYTRATALEAGWQFRIPLQHRVGNGYVYSSAFIDEAAALDRLVGRLEGKPLKAPNVLKFTAGQRTRNWAANCVSVGLSSGFIEPLESTSIYLIQIAITKLIELWPTAVIDPATEAEFNRQMDLEYIRIRDFIILHYCATARNDTPFWDYVRTMPLPDTLSEKIELFRARGIVQDYREGLFLHPSWVAVYLGQDILPRRHHPLVDAVSATQLMSSLERLRRMVREASSRLPSQDDYIARYCAHLPL

SEQ ID NO: 88766 - protein, 525 aa, Rheinheimera sp.
  REGION 1..525: note = tr|A0A349LSK9|A0A349LSK9_9GAMM Tryptophan halogenase; OS = Rheinheimera sp. OX=1869214 GN=DCS87_06040 PE=4 SV=1
MNKLKVVIAGGGTAGWMTAAALGKLLGKNLDITLIESDLIGTVGVGEATIPTLHLYHRLLGLQETDVMAATNATFKLGIMFENWRDVGKDYLHSFGFLGKDCWACGFQHFWLKGMQQGLASDIGDYCPEHLAARAGRFAVLPNQDQNHAYHLDATLYAKFLRSFAEQHGVKRLEGMITQVQQWDEQAGDKAGYIKALQLDNGMLLEGDLFIDCTGFKALLIEQTLLTGFDDWTHYLPCDSAIAVQTTQTQALVPYTRSIAHGAGWQWRIPLQTRVGNGLVFSSKFLSDADAIELLKANISGELINEPRVIKFRTGTRRKHWNKNCVAIGLSSGFLEPLESTSIHLIQRSIIRLLQLMPSGPDLVNADIDEFNHQTMIEMHNIRDFIILHYKVTERRDTPFWRHCAAMEVPESLSHRIEMFGESGKVYKFAQELFGESSWIQVMLGQGITPKRYHPIVDQMSPDELASFLQNIRQGVLRHVQNWPAHTDFLRHYAATKVDKEPPSAVSGSDVLKAMPMIKSSMSAG

SEQ ID NO: 88767 - protein, 516 aa, unidentified
  source 1..516: note = Aliiglaciecola sp.
  REGION 1..516: note = tr|A0A553L5D8|A0A553L5D8_9ALTE Tryptophan 7-halogenase OS=Aliiglaciecola sp. M165 OX=2593649; GN = FM019_07945 PE=4 SV=1
MQDDSIKSIIIVGGGTAGWMTAAALSNLLTHTNITLIESDRIGTVGVGEATLPHLRYFIKRLGIDEQEFMRATNATYKTGIEFVNWGKVGDAYIHPFGDFGEPIKGIDFHHYYVKLRQNGHINPIGDYSLPVVASKAQKFDYPDTDERSILSTFSYAFHMDAGLFAKYLREYSTQRGVTRQEGIVTQVKQHQDSGFIQSVTLEDGTQLSADFFVDCSGFKGLLIEDCLNTGYDDWRHWLPCDRAIAIPCQANTPPLPYTRATAREAGWQWRIPLQNRVGNGHIYSSPYMDDNTALDILLKNLDGEPTAEPNFLRFTTGKRKKVWNKNCVAIGLSAGFLEPLESTSIHLIQLGIMKLLDFFPNKHCEAVRVDEYNRMMQLEFERLRDFLVLHYHATQRDDSDFWKYVRTMQLPQGLAHKIDLFKERGRVVQYTEGLFLKASWLAVYFGQGIIPKHYDWQLDALPIEQIKRRLDEVKSQVSLASAQMPMHAESLAKHCDLETGWQTPPPPANLSLYGC

SEQ ID NO: 88768 - protein, 516 aa, Caulobacter sp.
  REGION 1..516: note = tr|A0A2G5QYW2|A0A2G5QYW2_9CAUL Tryptophan halogenase; OS = Caulobacter sp. X OX=2048901 GN=CSW60_13740 PE=4 SV=1
MTHTHPNAIRKIVIVGGGSAGWITAAMLSHYFQAGGCAIELVESEEIGTIGVGESTIPPFLRLLASLGIDEREFIQATQASFKLGIRFEDWKSLGDRYMHPFGVIGGPFGPHEFYQCWLRAKAAGHPSGLHDFAPGAVMAEQGKFMLPFKAERTLIGGANYALHVDARLVARYLRDYAEARGVKRTEGIVSDVITHEDGSVAKVRMKDGREIEGDFFIDCTGFRGLLIGKTLETPFEDWSDMLLCDRAVVVQTENVGAPHPYTLSKAEAGGWRWRIPLQHRAGNGYVFSSRHISDDEARATLLSQLEGRALMEPMFIPFKTGVRQRLWEKNVVAVGLSGGFIEPLESTALHLIYRGVDFLLRFFPDRDFDPALRDEYNRRMVADYEEIRDFIVLHYCKTQRDDTPFWRAVREAPIPDSLKERMALFERSGVLREGVDDMFRNPSWQSVMEGMGVRPQRYQQLVDTIPYEVISQTLDQSAPMLAAQVAGLPSHGEFLAKHCPAPPPEAPMAPFKTVA

SEQ ID NO: 88769 - protein, 506 aa, unidentified
  source 1..506: note = Aliiglaciecola sp.
  REGION 1..506: note = tr|A0A553L4L5|A0A553L4L5_9ALTE Tryptophan 7-halogenase OS=Aliiglaciecola sp. M165 OX=2593649; GN = FM019_08915 PE=4 SV=1
MSEQIKKIVIVGGGTAGWLSAAVIAAQHKSAPGQGLEVLLVESSDIPTIGVGEGTWPTMKNTMQQIGIKESDLFSRCHAVFKQGGKFVEWVHGNGDFYYHPFTVPLGYGRLDLAPYVSNIESYAVESNFQHHICEAGLAPRTMAEREFNGQCNYAYHLDAGAFAELLKEHCKNNLNVTQIIGTVDKVNLTEDGGIKSIQLQAGEEIAGDLFVDCTGLASLLLGKALGVPFKQCNDVLFNDTALAMQVPYPDPASPIASHTIATAQNAGWIWDIGLTHRRGVGHVYSSEYLSDDDALANLQNYLGEQAKGLEPRKITFDSGHRERFWHKNCVAVGMAAGFVEPLEATAIMLVEISARYIAENMPADTDIMAITAKRFNQQMDYRWQRIIDFLKLHYMLTKRSEPYWQAHCNPDTIPESLQEDLAIWKTRGPVSGDFDSAIELFPAASYQYVLYGMGFKPDFEKRQYLYQQSEQAQQIIQRNAKLTQQMLQTLPPHREYIETWLSTAR

SEQ ID NO: 88770 - protein, 542 aa, Streptomyces sp.
  REGION 1..542: note = tr|A0A0H4CIJ8|A0A0H4CIJ8_9ACTN Tryptophan halogenase; OS = Streptomyces sp. PBH53 OX=1577075 GN=QR97_37415 PE=4; SV = 1
MSVSDNIEHIVILGGGTAGWMSAAYLGKALQGAVRITVLEAPAIPKIGVGEATVPNLQRVFFDFLGIPEDEWMRECNASFKMAVKFINWRTPGEGSPTARTLNGRPDHFYHPFGILPQEDGVPITHHWSDRAARGETDLPFDYSCFVDPVLMDRNLAPRHPDGRPATRYAWHFDAHLVADYLRRWSVEKQQVQHVQDRMVDVQLDQNGFIRSLRTESGRTIEGDLFIDCSGFRGALINKVMEEPFLDQSDHLLCDSALACPVPHDDAAHGIEPYTSSIAMKSGWAWKTPLLGRFGTGYVYSSAFATEDEAVRDFTALWGLSADQEFNRIRFRVGRNRRSWVKNCVSIGLSSCFLEPLESTGLYFTYAAIYQLAKHFPDKSFSPIFADRFNKEIAAMFDESRDFLQAHFYFSPRTDTEFWRANKELTLGEEIREKAEMYRKGIPVNLPTADESTYYGNFEAEFRNFWTNGSYYCIFAGLGMLPERPIAPLAYGRDGRASAQRMFDGVAQRQRELVETVPTMYDYLRDFHGAPAGPDDRDRHGR

SEQ ID NO: 88771 - protein, 506 aa, Colwellia sp.
  REGION 1..506: note = tr|A0A5C6QV08|A0A5C6QV08_9GAMM Tryptophan 7-halogenase OS=Colwellia sp. C1TZA3 OX=2508879; GN = ESZ39_08765 PE=4 SV=1
MSKTVKNIIIIGGGTAGWLTAAIIAAHHKDAKKTELKITLVESSDIPTIGVGEGTWPTMKNTFHKIGLKESDVFKKCHAAFKQGAKFVEWVHGNGDFYYHPFTVPLGYGHIDLAPYVSNIENFARESNFQYDICEAGLAPRNLAESEYQGQCNYGYHLDAGALAELLKRHCIDKLNVEHIVDTLDECISENGERIDAVVLNKQGKLTANLFVDCSGSRSLLLGQTLNVPFKKVDHVLFNNRALAMQVPYESEDMPLASHTIATAQNAGWIWDIGLTSRRGVGHVYASDFLTDEEAEQNLRNYLGEAANGLVARKISFEPGHREQWWKGNCVAIGMAAGFVEPLEATAIMLVELSARYVAENLPADESLMPLVAKRFNKQMAYRWQRIVDFLKFHYMLTKRTEPYWQAHCDPTTFPDSLKEDLSLWQYRGPTTNDFTSAMELFPAASYQYVLYGMEFKPDFSRQGYLHNQQQKAEQVINRNEQLTQQMLQSLPPHRDYIEKWLATST

SEQ ID NO: 88772 - protein, 494 aa, unidentified
  source 1..494: note = Catenovulum maritimum
  REGION 1..494: note = tr|A0A0J8GRL1|A0A0J8GRL1_9ALTE Tryptophan halogenase; OS = Catenovulum maritimum OX=1513271 GN=XM47_08895 PE=4 SV=1
MNHINKVVVVGGGTSGWMSAALLKKILGNTVNIELIESKTIGIIGVGEATIPPIQTVNEVLGINEAEFMRETKASIKLAIKFENWWQKGQSYFHTFGAPGQSLPFCHYHHLWTRAESLGLKTNLWDYDLNYLAATAGKFAKLETQDPMYEMKYAYHFDSALYGQFLRKHSEKSGVIRTEGLIENVNLNPATGNVESLTLTGGGTVTGDLFIDCSGMRGLLINQALGTGFEDWSHWLAADRAIAIPSERDTKTLPYTRSIAHSKGWQWNIPLQHRNGNGIVYSSRYCSDDEAQDTLIKNIKNKTLADPNLIKFKTGRTRKQWNKNVIAIGLSSGFLEPLESTSIYLVQSAIVRLLKFFPHKGIQASSVNEFNNQSQREYELIRDFIILHYCATSRTDSQFWRDMKALELPRRLTEKLDMFKENGTLVHDDLDVFWEPSWLQVMLGQGIKPMGYHPLASQYSQAKLTEIFTNTRRAKSAPLEKMPSHDEFLKLYLE

SEQ ID NO: 88773 - protein, 370 aa, Duganella sp.
  REGION 1..370: note = tr|A0A1E7VC04|A0A1E7VC04_9BURK Flavin-dependent tryptophan halogenase RebH OS=Duganella sp. HH105; OX = 1781067 GN=rebH_2 PE=4 SV=1
MAARHNKFMPPRRDLANSPLSDIAYAYHFDASLYARYLRTVSEQRGVRRTEGKIAQVSQRADDGYVDAVVMESGERIEGDLFIDCSGFRALLIEGALKTGYEDWNHWLPCDRALAVPCESVSPLTPYTRATAHRAGWQWRIPLQHRTGNGHVYSSAFMEDEEAQRILLANLDGKPLAEPRMVKFRTGMRKLGWNKNVVAMGLASGFLEPLESTSIHLIQSSIARLVQFFPDRGFNQLEVDEYNRQSRFEYERIRDFVILHYKLNQRDDSDFWKQCAAMPVPDSLQHKLDLFRARGRVVRFDNELFAEAGWLQVMHGQNLKPEGYDPLVDLLPVEEAEKYLESIRDVIGQCVQHMPDHAEYIAQHCAATRR

SEQ ID NO: 88774 - protein, 499 aa, Caulobacter sp.
  REGION 1..499: note = tr|A0A2G5RED1|A0A2G5RED1_9CAUL Tryptophan halogenase; OS = Caulobacter sp. X OX=2048901 GN=CSW60_05975 PE=4 SV=1
MAQQRIRKVVIAGGGTAGWTAAAALVRQLGPLLDITLVESEDIGTVGVGESTIPTARTFNAMLGIDEAEFMRATQSTFKLGISFENWGEIGDRYIHSFGQVGKSTWMGGFHHFWMQAQAQGFGGDLGDYCLELKAAEGERFFTGDNGPLNYAYHLDAGLYGQFLRRMAEADGVKRVEGKIASVRQSAADGSIEALVMESGQAVEGDLFIDCTGFRGLLIEQTLKAGYEDWDHWLPTNSALAVQTRSTEPAKPYTRAIAHKAGWRWKIPLQHRVGNGLVYCNEFMSDDEAHAMLLGEIEGETLIPPRLIRYRTGRRRKTWDKNVVALGLSSGFVEPLESTSIHLIMIGVTRLMQLFPFDGISPSVIDRYNRLADDELEKIRDFIILHYKATERTDSPFWDRVREMEIPDSLAQRIDLFRESAQVYQAPGELFQVDSWLQVLLGQRVQPKSFHAMGRLMPTQQLKQALDDLKRNIAGTVGRLPQHQAFLDAYCAPPVSKSA

SEQ ID NO: 88775 - protein, 510 aa, unidentified
  source 1..510: note = Halieaceae bacterium
  REGION 1..510: note = tr|A0A4R5LV34|A0A4R5LV34_9GAMM Tryptophan 7-halogenase OS=Halieaceae bacterium GH4-78 OX=2547392; GN = E2F43_02900 PE=4 SV=1
MNNAIKSVVIVGGGTAGWMAAASLQSHYANTDITFTVVDSSQIGTIGVGEATIPTIRRFYRNLGLSDREVMQATQATAKLGIQFNDWHSRGSSFIHPFGLYGQELRGIGFHHFWLKMRQNGLQSRLADYSLGASLALNEKFVPPSANPPSSLSVFDWALHLDASRFAAYLKKYALERGCKHVDDVITDVRRRPEDGFITAVRLEGGSDLEGDLFIDCSGFRGLLIEETLGTGYEDWSHWLRCDSAYAVQTENQREPRPYTQVTALESGWQWKIPLRHRTGNGHVFSGRYTDDQRALDLLLSRLEGEPITEPRKLSFVPGRRKQAWNKNCISLGLSAGFLEPLESTSIALIETGIERIKQLFPTQGFSQACIDEFNQVTAEEYERVRDFIILHYKATARRDTEFWRDCAAAEIPTTLEKKIALFKDRGYFLKYRWEMFHPASWLAIYEGFDILPETYDPGVDAFEEGYIANSLAAMQKSLNGAVAAAPSHQNFLDELYDNNEAETERYGTH

SEQ ID NO: 88776 - protein, 499 aa, Colwellia sp.
  REGION 1..499: note = tr|A0A5C6QJP6|A0A5C6QJP6_9GAMM Tryptophan 7-halogenase OS=Colwellia sp. C1TZA3 OX=2508879; GN = ESZ39_11815 PE=4 SV=1
MQSMDVKNVVIVGGGTAGWMSAAGMSKLLGSKKINIRVIESESIGTVGVGEATVPHIQYFNRLLGIDENSFIKKTNATFKYGIEFVDWHKRGESYFHSFGPYGMDMEGIHFHHMWLRQQQAGTAKPIDEFNLQIQAAKAGKYMPARPELQGSPLSALSYAFQFDAVLYAAFLRDFSEKNGVTRTEGKIVNVTQAANTGHIESVTLEDGECIKGDLFIDCSGFKGLLIEETLKTGYDDWSHYLPCDSAVTRLSERMAELPPYTRATAKAAGWQWRIPLQSRTGNGYVYSSQFLSDEDAIESLNKDLDTAPISDPRQLRFKTGIRKQTWNKNVVSIGLSSGFLEPLESTSIHLIQTAIARLMTNFPDMSFNQPDIDYYNERTKAEYMQIRDFLILHYKATTRDDSPFWDYVREMDIPVSLEKRIAIYKENARLYSEDKVLFNHSSWFAVFNGQGIHPQRYHPIANILEEKEMERRMAEIHTVTQKCLSIMPSHDEFLAKLL

SEQ ID NO: 88777 - protein, 516 aa, Caulobacter sp.
  REGION 1..516: note = tr|A0A2G5QXP0|A0A2G5QXP0_9CAUL Tryptophan halogenase; OS = Caulobacter sp. X OX=2048901 GN=CSW60_22160 PE=4 SV=1
MAALLFERAFPGSQITLVESSEVGTIGVGEGSTPALKAFFGALGISEADWMPRCNATYKSGIRFTGWSGAPGFEGYFHPFLTHFDRDHIKALEHNSKLRRAGVDVHAHPDLFCYSYYLADRRLCPATPRSFPFSVQYGYHFSAGLLAAYLREVALARGVVCHDARISSVDQDADGDVTHVTTNDGQVLAADFFVDCSGFASVIAKKALGAGWRSYGDALFNDTAVTIATPREPILSSQTTSTALRHGWAWRIPQQDRVGNGYVFSSKYCSPEDAERELRAHLGLGPEDGEARTVPFKSGRLETFWNRNTLAVGLSQGFLEPLEATALALVQLTLVRFVKAFGEGGGANAQAHLFNQEIAAAFDGVKDYIHTHFITSDRRDTPYWRDCAANGAAVSPRLRAVLETWFAGGDLAETLNAVGLDRHYKLNSWLYILSGMGVYPPHESLRPPRAEELQAVPLDSIRGFFECCSLNHVEQARALENLAAGQPPMAGMAGGMTQAEAMASLLGLGFASSGHR

SEQ ID NO: 88778 - protein, 478 aa, unidentified
  source 1..478: note = Aliiglaciecola sp.
  REGION 1..478: note = tr|A0A553L715|A0A553L715_9ALTE Tryptophan 7-halogenase OS=Aliiglaciecola sp. M165 OX=2593649; GN = FM019_06365 PE=4 SV=1
MTANLLQHTLSQHEFTVTLIESPDIGIIGVGEGSTPHLKVFFDTLGIEEQQWMPKCNATYKNGITFKGWSLEPGFEHYFHPFPSRPDRQTAGGFLINSLLRRQGHDVDPHPNQYFLSAYLAKHFKHPKTQAKFPLSINYGYHFDSALLGEYLKRVAIDRGVKHIEAKIDEVKTHLSGDIQALIDENGHSYTADWFVDCSGFAAVLLQKTLGTEFVEYKDNLFNDAAVAIPSAATKPRNVETISTAMSAGWSWDIPLTNRTGNGYVYSTQYIEPEQAELELRSKLGLLDAEVPVKHLKMRVGCAKQHWVKNCLAVGLSQGFIEPLEATALHLVLYTVETFISAFTSGQFSNQHQAEFNQLISSRFEGIRDYIVCHYKVNSRNKGNYWLDNANNKHLSDSLLHILDCWDKGGDLTQEINRQNIGHYYPAVSWHCLLAGYGRFPPLGASSPATHDVNIAEIQHFIRQCAQGFLEQGIDERC

SEQ ID NO: 88779 - protein, 496 aa, Colwellia sp.
  REGION 1..496: note = tr|A0A5C6QP79|A0A5C6QP79_9GAMM Tryptophan 7-halogenase OS=Colwellia sp. C1TZA3 OX=2508879; GN = ESZ39_10130 PE=4 SV=1
MNSSAIKNVVIAGGGTAGWMAAAAFGKLLGKNLNITLVESDLIPTVGVGEATIPTLHIFHDLLKIKEADVMKATNATFKLGISFENWRDVNQDYIHSFGYLGQGCWAAGFQHFWVKGKQQGMVSEIGDYCPEHVASRRGKFAVVPKQDRNYAYHLDAGLYAKFLRAMAEEHGVKRVEGKINQVNVNEENGFIQSIALDNGKLIEGDLFIDCTGFKGLLIEQALHTGYEDWSHWLPCDSAIAVQTKIQKKTVPYTRSIAHKAGWQWQIPLQNRMGNGVVFCSKHLSDEDAKELLLNNIEGELLNEPRVIKFKTGTRRKHWNKNCVAVGLSSGFIEPLESTSIHLIQQSIIRLMQNLPSKNMEQANIDDFNNKMRFEIDNIRDFIVLHYHVTQRADSPFWRYCKNMEIPETLQQRIDLFIENGNAYKTERELFGETSWIQVMIGQGLMPKYYHQIVNMMSDTELKSFLDNIKMTIERRVNSFPDHNEFIKNYCKSTVA

SEQ ID NO: 88780 - protein, 517 aa, Colwellia sp.
  REGION 1..517: note = tr|A0A5C6QYG7|A0A5C6QYG7_9GAMM Tryptophan 7-halogenase OS=Colwellia sp. C1TZA3 OX=2508879; GN = ESZ39_01640 PE=4 SV=1
MNKPLKKIVIVGGGSAGWLTAGIIAAEHATGQDSGIEITLIESADVATMGVGEGTWPSMRGTLKKMGISETEFLIECDASFKQGSKFTNWITNTDECYYHPFTLPHGFNEINLSPYWQPFRDKISFADAVCEQSHLGAHGLAPKQITTAEYSFAANYGYHLDSAKFGRFLRKHCTEKLHVKHIIDHVSKINSAKNEDIASITTTKHGDISADLFIDCTGSASILLAKHYNIPFISKKHILFNDSALAVHVPHENENSPIASFTSSTAQTAGWIWDIGLPSRRGVGYTYSSAHISDTKAEEELIEYITPLMGKKSANAATIRKIVLNPGHREKFWHKNCVAVGMSAGFIEPLEASALALVELSAKMISEQLPLNRQAMDIVAKRFNSKFLHRWDNIIDFLKLHYVLNKRTDSDYWCDNKNATHIPESLQEQLALWQYQAPYKYDAIHTEEMFPPASFQFVLYGMGFVTQASHKKRTDQSAKADALFNENVQRTKQLLSALPTNRELINKIKKYGLPKI

SEQ ID NO: 88781 - protein, 503 aa, unidentified
  source 1..503: note = Aliiglaciecola sp.
  REGION 1..503: note = tr|A0A553KYP9|A0A553KYP9_9ALTE Tryptophan 7-halogenase OS=Aliiglaciecola sp. M165 OX=2593649; GN = FM019_16805 PE=4 SV=1
MIYMIPQTILIVGGGTAGWMSANLLKKSWPTVKITLVESDSIGTIGVGEGSTPFLKQFFKRIGASEREWMPQCFATYKAGIEFSRWSEKPGFTHYFHPFFSQLDIKPAEPFFHNAKLQRQGIEADAHPDAYFVNAQMAKQCKAPLAKRRLNFDLDYGYHFDAGRLGLWLKDRAIADGVEHIIDDVTQVEVRDSGEIAAVIGAKSGRMAAELYVDCSGFKGLLIQQALSVPFKSYKQNLFNDAAVAIQTPLADEQDIPTRTLSTALTNGWAWEIPLTNRVGNGYVYSSEHISGEQAEVELRRHLGLADDTDISAKHLKMKVGRVEQHWAKNCLAVGLSQGFIEPLEATALMLVQFTLEKFVTAKQSLQQESLVRDNYNADINKMMEGIRDYIVTHYALNSRTDSDYWRRCREDIEVSDNLQALFQAWKSHEQFESELNKQASHLVYLRPSWYVIMAGMGNFPMDLLTPSQGQVAPVNLSKQYCIDLVEDLFPSHKAVLSQLAAG

SEQ ID NO: 88782 - protein, 507 aa, Burkholderia sp.
  REGION 1..507: note = tr|A0A2J6MY00|A0A2J6MY00_9BURK Tryptophan halogenase; OS = Burkholderia sp. WAC0059 OX=2066022 GN=CY652_01310 PE=4; SV = 1
MLNFRAMRDFVVLGGGTAGWFAALELHRLFGERASITVVESPRVSVIGVGEGGILNLPAALQRYGIDEDEFASKTGAVIKLGFEYAGWNTGRDDETFYHLFHHVPQRVDRQSVDSIVPWWAMLVAHGIGVQYAVDSLPLILDNASQDEVRAARASAGERMPASMHFDAHRVAAWLKQVATSRGIALRTANVLGLDVASESGWVRGLRLEGEEALLPVDFMVDASGFARMALQRTYGMPMRSFGEHLILDRAIPFYIAHPRKNPRLVTRSLAMNAGWMWQIPEHERVGCGYVFSSAHIGEDEALAEIEARLGQKVEPERTISFSAGHFEDVWVGNVMAVGLASGFIEPLEATSIGQMLGQVCAFGDTVAASGYVVPRTTIRTFNHRNRLDWEGIRDFLRLHYDVRRRDTAFWRDVTSQALPESYAALKEAWQHRLPRTVDLNAYRAGHVMHFDFTSWMAVGQGVGVIPEQAAAADLAGLPRGVVLEAHEFMKGVTRRFPQAVGGHAPH

SEQ ID NO: 88783 - protein, 425 aa, Colwellia sp.
  REGION 1..425: note = tr|A0A5C6QK32|A0A5C6QK32_9GAMM Tryptophan 7-halogenase OS=Colwellia sp. C1TZA3 OX=2508879; GN = ESZ39_11935 PE=4 SV=1
MRKTQATFKLGIEFSNWGDIGERYFHAFGQIGRSTWMGDFQHLWQHASSLGWGGELQDYCFELQAAKAGKFDKDKANYAYHLDAGLYASFLSELSQKRGVKRIEGTIESIAMDSENGHISNLVLKNGTSVQGDLFIDCTGFKGLLINGALGVGFEDWSHWLPMNSAWAVQTEGKKEIPPYTKSIAHDASWQWRIPLQNRVGNGLVFCSDYTSEQDALQLLTDNLEGDMVSQPRLLKFKTGKRNKTWFKNCVAIGLSSGFLEPLESTSIHLSQISATRLVQMFPFNGMDEVLQTHFNNYVDGEVDSIRDFIILHYNLNRRSEPFWQHVATMDIPDSLQHRLELYKRTSIAFKNDLDLFRVDSWNQVMLGQGIKVEGYHQMGRLIKDDNLRQAFNDLQEHINSTVEGLPMHADFLRQYGVLDLHRKP

SEQ ID NO: 88784 - protein, 497 aa, unidentified
  source 1..497: note = Aliiglaciecola sp.
  REGION 1..497: note = tr|A0A553KYQ5|A0A553KYQ5_9ALTE Tryptophan 7-halogenase OS=Aliiglaciecola sp. M165 OX=2593649; GN = FM019_17040 PE=4 SV=1
MQQPVRKVVIAGGGTAGWMTAALLRKVLQQQIEIQLIESDDIGIVGVGEATIPPIQIFNQYLGLDEKEFLRETNGTIKLAIKFENWRVPGESYYHTFGAPGAQMGFCSFQHYWMRAQQAGLKESMWEFDLNYLCCERGLFNKIKTENPIYDLQYAYHFDSGLYGQYLRKRATKSGVIRTEGIIEHIKTDDASGFITGLQLKSGELVEGDLFIDCTGFRGLLLRKTLGVNYESWADLLPADSAWAVPTERFEKTLPYTRSIAHPVGWQWRIPLTHRNGNGIVYSSKYISDERALEALMNNLDSKPLDEPRKIQFETGRTAQQWHKNVVAIGLSSGFLEPLESTSIHLIQSGIVRLLKMFPNQGITPGVIDLYNAESKFEFETIRDFIVLHYYVNEREDSQFWKDMRNLTLPERLRVKLEAFKESAAIFNDPSDIFKDASWLQVMMGQGAMPKDFHPAAKISTENELLAVMKKILDAKHQPLDKMLSHDEFLARYTGAA

SEQ ID NO: 88785 - protein, 514 aa, Caulobacter sp.
  REGION 1..514: note = tr|A0A2G5RBX5|A0A2G5RBX5_9CAUL Tryptophan halogenase; OS = Caulobacter sp. X OX=2048901 GN=CSW60_01395 PE=4 SV=1
MVRPVKNIVIVGGGTAGWLTAGVIAAKHKARRVSGFTVTLVESPNTPIIGVGEGTWPTLRTTLAKIGVSETDFFRECDAAFKQGAKFARWTTGAEDDAYYHPLVLPQAFAQVNLAPHWLANGGDVSFCDAVCPQGVLCDEGLAPKTITAAPYQGAANYAYHLDAGKFAPFLQRHCCEKLGVRHVLADVQRVDLAEDGDIRAIITEQAGEIEGDLFVDCTGFRSLLLGEALGVPFKDCGDVLFCDTALAIQVPYESESSPISTHTISTAQSAGWIWDIGLPTRRGVGHVFSSRHISDEDAERELRAYVGPAGRDLPVRKIAIRSGHREIFWKRNCVAVGLAAGFLEPLEASAIVLIELSAKLIAEQMPACREVMDVIAGRFNAATQYRWGRIIDFLKLHYVLSQRNDSAFWRDNHDPDTIPERLSDLLRLWRHQPPWLHEEFDRVEEVFPAASYQYVLYGMGFRTEVEREALADEAAVAQRALRENALQTERLRAALPRHRDLIRKIVEHGLQPV

SEQ ID NO: 88786 - protein, 529 aa, Colwellia sp.
  REGION 1..529: note = tr|A0A5C6QNZ2|A0A5C6QNZ2_9GAMM Tryptophan 7-halogenase OS=Colwellia sp. C1TZA3 OX=2508879; GN = ESZ39_10145 PE=4 SV=1
MQSEIKKIVIIGGGTAGWITAGLIAAKHLAANSTSLSITVIESPNVPTIGVGEGTWPSMRETLKTIGINEADLFTYCDASFKQASKFVNWEKLPDEDVATHPLDNAYFHPFSLPAGINKLDLGAYIGEQSSLVSSSQTFAQQVCFQSILCEKNLAPKQITHKVYDYVANYGYHLNATKFAELLKAHCLNKLGVQYISAHITQINNDKVGDISSLSTDIAGVIEGDLFVDCSGSQSLLLGKHYNIEFCSKKSVLFNDSALAVQIPYENPEATIASSTLSTAQTAGWIWDIGLQSRRGVGHVFSSRHTSDENAKQELLQYIKQSGTSVNIDDHSIRKLSFTPGYYKKFWHRNCVAVGMSAGFIEPLEASALAMVEQAAQMISEQLPTTKLTMEITAKRFNEKFTQHWQQIIEFLKLHYVLSKRIDSSYWLDNKDPLTIPQSLQNMLELWKFQSPSSYDIPHNNPLFPAASYQYVLYGMNFTTERLRVNNQNEQLMHQVLSDIQNKRQQLVKAMGTNRDLINKIKQYGLTNI

SEQ ID NO: 88787 - protein, 513 aa, Rheinheimera sp.
  REGION 1..513: note = tr|A0A349LYF1|A0A349LYF1_9GAMM Tryptophan halogenase; OS = Rheinheimera sp. OX=1869214 GN=DCS87_16520 PE=4 SV=1
MSFANSSTGAALPAPHRIVIVGGGTAGWMTAMLMTHHWREQPVQISLIESPDIGIIGVGEGSTPTLRRFFHELNIGEDEWMVRCNATYKVSIRFANWSPATGAASYSHPFISQLDQFSELPFYQNCFARRQGLAVTTAPELFLFNGYLANAKLAPHTPANFPFRIEYGYHFDSALLGQFLRDKASAIGVRHVPHTVQKINQHPDGRIASVVCDNGEQLDGDLFVDCTGFRAELIQKTLGVAFEPFKSNLFNNAAVVFPTEVLTDLPPETRATALSNGWAWQIPLQHRTGNGYVYSRDFQSADAAETELRAHLGLLDSEISARHLQMNVGQVRQHWAKNCVAVGLSQGFIEPLEATALHLVQTAVETFIEDYQQGGFSDRFQQRYNQSIAQRFEATRDYIVAHYKFNSRDDSDYWRANRANENLSDSLQQIMQTWFQLGDLGQTLAKQQRETMFGNTSWHCLLAGYGVFPHLAAAQPTAAQLAERDQFIAQGLQPLFSGCALNFKTQRERFASK

SEQ ID NO: 88788 - protein, 539 aa, unidentified
  source 1..539: note = Aliiglaciecola sp.
  REGION 1..539: note = tr|A0A553L431|A0A553L431_9ALTE Tryptophan 7-halogenase OS=Aliiglaciecola sp. M165 OX=2593649; GN = FM019_07940 PE=4 SV=1
MDVDVHMQQKPIEPLSHTQPSNTPLNTIVVVGCGLYAWTVAACLARRLYKTPTKVMVVEELNAPVDNLGESTLPAIDYFHRVLGLTERQLMAVTKGTYKLATEYVLPDSTLAAETSQSNVFYHAMSPYGSVIDNIAFQHHLTKAKRAGVPIDLNRFSLPAAAAGKGKFGLPQAGAQNLPFSYAIHVDAKRYAAGMKDFAKKLGATSVVGEISAVKTVNIGSENDKQCTHIQSICLDNTQHISADLFIDCTAHSRLIDQALQVGFVDYSDYLPCDNSIQYVTDNKPKPKATTQINPNQAGFNLNFPLQAQTVNEYHYSSAHQTQEEALASLDLDSAALETVIFRQQKSQRVASFWVGNCVAMGDAAGSLGRIAASNFHLVQSAVLRLIDLLPDRSLNEHVECPSRDEYNNLCEEEYARVLDYHCAYFALLAREKAPIDSPFWRAQTQAKCPESLMHKMKLFEQTGRFPFYERETFSEKTWLSLFLGLGLWPKEYDRLLDVGQQNLQDSLDAFEQLAGLIDQISDKMPAHYHFLQQFCGAK

SEQ ID NO: 88789 - protein, 501 aa, Sphingopyxis sp.
  REGION 1..501: note = tr|A0A0W1D8A8|A0A0W1D8A8_9SPHN Tryptophan halogenase; OS = Sphingopyxis sp. H115 OX=1759073 GN=ATE71_08745 PE=4; SV = 1
MGDRFELVIVGGGTAGWMCAAACAAKLDPVRFRVRLVESEEIGTVGVGEATLPQMKDFNDFLGLDEVEFMKATQASFKLGIEFVNWGCEGDRYIHPFGTFGRPIGEADFFSYWIRANRAGTAAPLFDYCFPIVTALQNRFMLPVGDGNDVRSAFAYAYHLDAFLYARYLRGWAEARGIERVEGRIVEVEQDNESGDIAAVKLASGTHVAGDMFVDCSGFRSLLLGQTLGVEIEDWSHWLPCDSAQAVPSVRSADFTPYTRSTRRTAGWQWRIPLQHRTGNGYVYSSADISDDEAAATLLANLDGEALADPRVLRFKAGKREQAWAKNCVGMGLAGGFLEPLESTSIYLVQMAIMHMLTLMPSERATDPALPSEFNRVMDVEYDRIRDFLILHYVANEADAPLWERVTAIDLPDTLAGKIERFRHRGYIEAYRDGLFGPPSWQAVFVGQGVEPAAADRLADVLPAATVNERLANLAATIADAAATLPSHADFIARYCPAPAP

SEQ ID NO: 88790 - protein, 509 aa, Caulobacter vibrioides; identical to SEQ ID NO: 84540
  REGION 1..509: note = tr|Q9A4M3|Q9A4M3_CAUVC Tryptophan halogenase, putative OS=Caulobacter vibrioides (strain ATCC 19089 / CB15) OX=190650 GN=CC_2807 PE=4 SV=1

SEQ ID NO: 88791 - protein, 497 aa, Rheinheimera sp.
  REGION 1..497: note = tr|A0A349LYA0|A0A349LYA0_9GAMM Tryptophan halogenase; OS = Rheinheimera sp. OX=1869214 GN=DCS87_16260 PE=4 SV=1
MQTIKKVVILGGGTAGWLSASLLKKVLGQAVDIELVESETIGIVGVGEATIPPIRLVNQVLGIREADFLRETKATIKLAIRFENWKKPGDMYYHTFGAPGRSMAFCNFHHLWVRAQQLGDSSSLWDYDLNYLCATHGKFAPITAKDTVLELPYAYHFDAGLYAMYLRKLSEQMGVVRTEGLVQQVMQQINGDIKSLVLSDGREVTGDLFIDCSGFAQLLIQKTLGVGYDDWTHLLPCDRAIAVPSERFEQTLPFTRSIAHSAGWQWRIPLQHRNGNGLVFSSNHYTEQQAIDLLMSNLDSKPLGDPRVIKFRTGRMRKQWQRNVIAVGLASGFLEPLESTSIHLIQSAIVRLLQLFPHNGIQPSKVAEYNRQSELEFTQIRDFLVLHYHVQQRDDSQFWRDMRNLEVPATLKQKVAIFADDGSLFRDQNDLFLESSWLQVMLGQGVMPKDYHPIANNYNREQLFDVLAGIKAIKQEPLSKFPSHDEFIQRALQIAPM

SEQ ID NO: 88792 - protein, 520 aa, Rheinheimera sp.
  REGION 1..520: note = tr|A0A5C7TPX9|A0A5C7TPX9_9GAMM Tryptophan 7-halogenase OS=Rheinheimera sp. OX=1869214 GN=E6Q75_03455; PE = 4 SV=1
MTATLSATSQPFHFVILGGGTAGWMAALLFADKWLKPAAANQRAVTITLLEAPDIGIIGVGEGSTPSLKRFFQKLGIPDNEWMPACQATYKTNIRFVNWSPAAQVMGLGADYSHPFISQPDLHSETAFYSNCFKRRLGLAVETSPEKFLLNGYLAAEKLAPLPSANFPFRIEYGYHFDSGLLGQFLKQKALALGVNYHAMTVTQVNQLSDGCIGSLTGETADGGAKVTQVISADFFVDCTGFRSSLLQQTLQVPFESFASNLFNDAAVVLPTDAFAMPPVETRATALSNGWAWQIPLRHRTGNGYVYSSAFIAKDAAELELRQHLGLPDTEVNARHLQMKVGQVSRSWEKNCLALGLSQGFIEPLEATALHLVQSSIEQFIDAFADFTAKGQAEFNRQVHQRFEAVRDYIVAHYKLSSRSDSHYWRANSSNMQLSESLRQILDVWFRQGDLANEIARQQLDSHFGATSWHCLLAGYGVFPPLRQPQPAGVSDAFTELQLAAFFQGCSLNFQPQHLLWRAE

SEQ ID NO: 88793 - protein, 497 aa, Shewanella sp.
  REGION 1..497: note = tr|A0A2M7LYI8|A0A2M7LYI8_9GAMM Tryptophan halogenase; OS = Shewanella sp. CG_4_10_14_3_um_filter_42_91 OX=1975535; GN = COZ42_03455 PE=4 SV=1
MNKTIKKVVIAGGGTAGWMAAAAFSKLLGKNLDIVLVESDEIGTIGVGEATIPTLHIFHRLLGLKEQDVMAATNATFKLGIQFENWHDVNKDYLHSFGFLGKDCWACGFQHFWLKGQQKNMVSEIGDYCTEHLAARQGRFAVLPNQDYNHAYHMDSSLYAKFLRKFAEQHGMRRIEGKIADVLQHEDTGNIRALQLENGEFIEGDLFIDCTGFKALLIEQTLNSGFEDWSHWLPCDSAIAVQTEAVQNPIPYTRSIARESGWQWRIPLQTRTGNGLVFCSKYLSDADATELLLNNIEGQPINKPRVIKFKTGTRRQHWNKNCIAIGLSAGFLEPLESTSIHMIQRSIVRLLQLFPSQGIIQADIDEFNQQTKIELDNIRDFIILHYKVTDREDSRFWRYCKNMPIPTSLQHRIDMFSQSGKVYKYGSELFGESSWIQVMMGQGLQPKEYHPIVDMMDDAELQSFLNSIKATVKRKVDTLPVHHDFVQHYCKSTAMQG

SEQ ID NO: 88794 - protein, 530 aa, Rheinheimera sp.
  REGION 1..530: note = tr|A0A5C7TEU7|A0A5C7TEU7_9GAMM Tryptophan 7-halogenase OS=Rheinheimera sp. OX=1869214 GN=E6Q75_13585; PE = 4 SV=1
MPNCPPAKTEVLIVGGGAAGWLTAAVLSATHNLDEGVLAAQPRVQVTVLESPDVPTIGVGEGTWPSMRQTLKLIGLPETEFFRCCDVSAKQGSLFVDWSEPGSHYLHPFTLPAGWPEFNLATCWLPFAGDIAFADAVTTQYQLSTAGFAPRLPQAPDYQPVLNYGYHLNAGKFTALLQRHCQDKLGVRYVPAHLKEVLLRADGAIDKLLATPAGSAELGAYQADLYVDCTGMQSLLLGKALQTPLTSVKHILFNDRALAVQVLYPDADTPIVSNTISTAQNSGWVWDIGLPTRRGVGFVYASDYCSDDEADACLRNYLKKTAGSTQATLFFAEQAEPRQLQFQPGYRNGCWQHNCVAVGMAAGFIEPLEASALALVEWSAKTLAAALPLDPSLYSLAGAKMNRTFLRHWQQIIEFLKLHYVLSKRDTPYWRAHRDSASIPQTLQDQLQLWQQQVPQPLDFAYQDLLFPAASYQYVLYGMGALTQTLPAKPSQQARARALFAQNYQDLTKLQQLLPDNRQLLQQLALKNQN

SEQ ID NO: 88795 - protein, 479 aa, Altererythrobacter sp.
  REGION 1..479: note = tr|A0A419R3R1|A0A419R3R1_9SPHN Tryptophan 7-halogenase OS=Altererythrobacter sp. Ery12 OX=2306996; GN = D6858_05560 PE=4 SV=1
MAAATLARFLGDHASITLVESDAIGTVGVGEATIPQIHNLLVGLGIDQAEFVDATEATFKLGIEFDGWLREGESYIHSFGTTGRGAGLIPFRQLWLRGRKIGVAESFGAYGLNVVAARKGRFAFGKDANLPYAFHFDASKVAVVLRRYAEERGVKRYEGKISSVTRDAATGDIAALVLDGDRRIEGNLFIDCTGFASLLLGKSLGVGFEDWSHWLPCDTALAVQSENVAPPPPFTRSIARPAGWQWRIPLQHRTGNGHVFCSAYMEQDEAARVLLENLDGKPLTDPRAIRFTTGHRREHWSHNCIALGLAAGFMEPLESTSIHLVQSALARLLNLLPNDLSNLSTARSMFNRLSGAEWERIRDFLVLHYVANDRRGEPFWDHCRQIELPDTLAEKIALFEESGLFVREDDELFLDDSWGQVMLGQGIDPRGYSPLADNVPGEDIGPFLASVAKAARVKAEAMPTHAEALQSLVGERARA

SEQ ID NO: 88796 - protein, 512 aa, Colwellia sp.
  REGION 1..512: note = tr|A0A5C6QK18|A0A5C6QK18_9GAMM Tryptophan 7-halogenase OS=Colwellia sp. C1TZA3 OX=2508879; GN = ESZ39_11825 PE=4 SV=1
MNKNEVHEANSVNSPNSKKLDIVIYGHSIAAFISALTIHNALADHVTLSLILPADQAHSDILYGGTSPPDAYNLHLAMDISEPELFQETNSSFSFGTHYQNWNGEKFDWVQAFSLPFTSQYGMDFHQVLLKHKQNLQAYLVGAQSALHDKFAHPPQNQPASPLSRAEYGYNFDYQNYALFLLSKIKQRKIRLIQSDLLEAKVVDEHITSLRLNDGSCIEADLFIDCSGTDARLMSTLGVKKRVHSKINLSLLTNENDTQMKPCNIVSGHVNAWQSTLYLQNSSQVLKAASFVDSAENSAKETSAENKNSANTIASISADIGAQEQAWVGNCVAISLSAAVLEPFSNAPFRLLKLDIERLLELIPISNNMRIEQKEYNRRYRLDVQHARLFNLALTDTRHFLQHEHSTKNQFLASDVDSDTQALLDRKLAQYLHRGLMVSYDYEPFNTEDWIILHFGMRRFPRRLDSLCDNIDNSDVKQHLLHTKNAIAAMVPKMPPCSLYTQKFLNYLKRQS

SEQ ID NO: 88797 - protein, 505 aa, Rheinheimera sp.
  REGION 1..505: note = tr|A0A5C7TPN9|A0A5C7TPN9_9GAMM Tryptophan 7-halogenase OS=Rheinheimera sp. OX=1869214 GN=E6Q75_03460; PE = 4 SV=1
MHQTPATCSAGKPIRKVVVAGGGTAGWMTAALLKKVLADSVEIELVESDDIGIVGVGEATIPPIQIFNQYLGLDEKAFLRDTHATMKLAIKFENWRKPGESYYHTFGAPGASLGFCNFQHYWLRAKQAGLKQSLWDYDLNYLCCEAGKFNIIKTPNPVYEMPYAYHFDSALYGQFLRKIAEAAGVKRTEGMIEAVEQHGMSGHIEALQLKDGRKISGDLFVDCTGLRALLIRKTLGVAYESWSKYLPANSALAVPSERFAKTVPYTRSIAHKAGWQWRIPLTHRNGNGIVYSSDYLSDDEAHSTLMGNLDSKALAEPRKISFETGRTSSQWAKNVVAIGLSSGFLEPLESTSIHLIQSGIVRLLKVFPNQGITDAVVDYYNADSKQEFETIRDFIILHYHANERDDSAFWRDMRNMTVPERLRDKMALFRQSAQVFNDHNDIFRDASWIQVMLGQGIVPQDYHPAAKVPTETELLATLAKVQDAKQQPLAQMLSHDDFLARYSKA

SEQ ID NO: 88798 - protein, 503 aa, Colwellia sp.
  REGION 1..503: note = tr|A0A5C6QJD5|A0A5C6QJD5_9GAMM Tryptophan 7-halogenase OS=Colwellia sp. C1TZA3 OX=2508879; GN = ESZ39_11830 PE=4 SV=1
MHLCIVGGGSAGWMTAAALAKKFSRQKLQITLVESEEIGTVGVGEATLPHIRFFNQTLGIDERDFMRKTKATFKLGIEFVDWGTKGQSYIHPFGDFGEKINSVDFYQYWLLAQKNNDMGKLEDYAFGIAAAKSNKFTIPELGAPDLKNSFGYAYQFDSSLYAKYLREFSCKLGVNTIEGKVVNTSLNETNGNISALTLENGQRISADLFVDCSGFRGLLIEQSLQSGYQDWSNWLPCDRAIAVPCERTQQLTPFTRSTAKEAGWLWRIPLQHRTGNGHVYCSQFISDDAAQNTLLEQLDGKVLAEPRKLRFKTGRRNHFWKKNVIAIGLSAGFLEPLESTSIHLIQEGITKLIELFPAFDDQQTTSNTLTIDELDITEYNAQMGLEYERIRDFLLLHYVANDRSDSPMWAYFKNMTLPDSLQEKLDSWMHRAYIQRYEIGAFLPPSWVAVLLGQNLIPHNVDPRVQAFGTNDIRSKANAMREDIKLGLHQAEGHQAFLNRYLS

SEQ ID NO: 88799 - protein, 514 aa, Caulobacter sp.
  REGION 1..514: note = tr|A0A2G5RC33|A0A2G5RC33_9CAUL Tryptophan halogenase; OS = Caulobacter sp. X OX=2048901 GN=CSW60_01565 PE=4 SV=1
MQPLKKILIAGGGSAGWMTAALCSRLFQGLYEIVLIESEQIGTIGVGEATIPAIKKFNELLGLDEDDFLRKTQGSFKLGIQFRNWWRKGESYLHGFGVIGQDLGWLRAHQYWLRMRELGKAPPFDHLAINNAMALSDKFMRARADMSESPIGHIAHAFHFDAGLYAKHLSTYAQARGVKRREGKIVDVTLRPEDGFVQSVTLDDGETITADFFVDCSGFRGLIIEQALKTGYEDWTHWLPCDRAIAVPSERSEHFTPYTRSTAHDAGWQWRIPLQHRTGNGHVYCSKFIDDDEAERVLLSNLDGAQRADPLRIRFTTGKRRKIWNKNCVAVGLAAGFMEPLESTSLHLIQSSVIRMVRLLPDASFDQATIDEFNRQTDFEYERVRDFIILHYKATERDDTAFWRHCRDMEVPATLQRKMDLFRANGRVFREDDELFTEESWIQVYLGQGVIPRGYDPLVRVQSDEAIAQYLHNIETVIGKCLAVMPSHAEFVARACEAPPPAALQAAPPLVPTP

SEQ ID NO: 88800 - protein, 498 aa, Colwellia sp.
  REGION 1..498: note = tr|A0A5C6QX33|A0A5C6QX33_9GAMM Tryptophan 7-halogenase OS=Colwellia sp. C1TZA3 OX=2508879; GN = ESZ39_01655 PE=4 SV=1
MKTQNKKIKKVVIAGGGTAGWMTAAALSKLMGKGIDVVLIESDEIPTVGVGEATIPTLHIFHQLLGINEQEFMAATNATFKLGISFENWRDISKDYIHSFGFLGQGCWAAGFQHFWLKGRAKGLVSEIGDYVPEHLGARAGKFAVLANQELNHAYHLDAGLYAKFLRNLAEKHRTTRIEGKISQVNLNKETGYISSITLASDKIIEGDLFIDCTGFQGLLIEGALNTGYEDWSHILPCDSAVAVQTKMVRKPVPYTRAIARDSGWQWQIPLQNRTGNGLVFCSKYMTDEEAKQTLLANVQGELLNEPRVIKYKTGTRRKHWNKNCVAIGLSSGFIEPLESTGIHLFQKAIVRLLQMFPSQGINQSDVDEFNSQARTEVDNIKDFIILHYHLTERTDSPFWRYCKNMEIPETLKHRMSLFKESGQVFKKAEELFGETSWIQVMMGQGLMPEQYHPIVDLMSDEELTSFLNNIKSAVKRKVDNWPDNNDFINHYCKSTTT

SEQ ID NO: 88801 - protein, 493 aa, Altererythrobacter sp.
  REGION 1..493: note = tr|A0A419R3R6|A0A419R3R6_9SPHN Tryptophan 7-halogenase OS=Altererythrobacter sp. Ery12 OX=2306996; GN = D6858_05535 PE=4 SV=1
MSDNGKPPRVVVLGGGSAGWITACLLHKQWAERGGSVTLVESPEIGIIGVGEGSTPQLKALWDHLGIDEAAFMTACDATYKLGIRFTGWSERPGFESYFHPFPSPVDLHTEGAYFAACALARRGVDLPVRPDRWFLAARLAGARKGPHPTPNFPFPPTYGYHFDAYKLGAFLRDWAVPRGVVHRTAKVGEVELSADGDVAALLTENGERIEGDLFVDCSGFAGVIGQRALGVRFTPFAENLFNDRAVVMPTAHAKPYRQQTDAIAMSAGWRWSIPLTTRVGNGYVYSSAHISDEDAEAELRTACNSEADARVLRMKVGRVEETWHCNCLSAGLAQGFIEPLEATALHIVISTALDFVDAFEAGGFTPMHRARFNAKTAARYEGIRDYIVAHYRMNQRTDTAYWRDNRANQALSDNLKAMITAWFTQGDVGRTNATTYGEPAYSAMSWHALFAGYGGFPDATKMAPAPSSMFGAFARVDDLLSASETNFERVST

SEQ ID NO: 88802 - protein, 498 aa, unidentified
  source 1..498: note = Halieaceae bacterium
  REGION 1..498: note = tr|A0A4R5LUT5|A0A4R5LUT5_9GAMM Tryptophan 7-halogenase OS=Halieaceae bacterium GH4-78 OX=2547392; GN = E2F43_02895 PE=4 SV=1
MEPIKKIVIVGGGTSGWIAASVLSNQFRPDVLEVELVESEDIGTIGVGESTIPPFVGLIRNLGIDEQHFIQKVHATFKLGIRFPEWSNLGESYFHPFGSIGVRFGIYEFYQAWLKAKSMGHDSGLQEFAPCSVMADKHKFFLPQEAQKTPIGGASYAMHIDARLAADYLRGYAENRGVTRTEGMVTEVTQKEDGSIASLRLKSGKEVHGDFFIDCTGFFSLLIEKTLGVGFEDWSRFLPCDKAVAVQTENTGEALPYTISTAREAGWTWRIPLQHRTGNGYVYSSEHCSDDEARARLLECVDGKLLTEPMLIPFRTGIRESFWKKNCVSVGLAGGFIEPLEATAIHLVVRGMDFFLRYFPDKSCEPALINEYNRRMRMDYEEIRDFVVLHYCVTEREDTPFWQHCKTMAIPDTLRERIELFKAHGTLREGVDELFRSPSWQSVFEGMGIRPANYSPRIDNLDYKLIEDTLAEARKSIAAMVETLPSHDQFIRQKYLAL

SEQ ID NO: 88803 - protein, 496 aa, Colwellia demingiae; identical to SEQ ID NO: 82639
  REGION 1..496: note = tr|A0A5C6QE34|A0A5C6QE34_9GAMM Tryptophan 7-halogenase OS=Colwellia demingiae OX=89401; GN = ESZ36_13330 PE=4 SV=1

SEQ ID NO: 88804 - protein, 517 aa, unidentified
  source 1..517: note = Aliiglaciecola sp.
  REGION 1..517: note = tr|A0A553L8W6|A0A553L8W6_9ALTE Tryptophan 7-halogenase OS=Aliiglaciecola sp. M165 OX=2593649; GN = FM019_04960 PE=4 SV=1
MMMSNQAINSVVIVGGGTAGWITAGRIAAEHQHNPSIEVTLIESPDISPIGVGEGTWPTMRTTLLKLGISESDFINQCDGSFKQGAKFAKWVTGEDDDFYYHPLVLPQGFHKTNLAKYWHEQHQKSGKSFSELVCYQEAICEQGLAPKTIRHGEFDALANYAYHLDSAKFSAFLQQHCTEKLGVKHVLANVESITSHDNNDIASVITKEAGEIFGDLFVDCTGFSALLIGKHYDVEFVPCDDVLFIDTALAVQVPYELDDSPIASHTISTAQDAGWIWDIGLQHRRGVGHVFSSRHTSKERAYEQLGKYVGEGFEQLQLREIPIKSGHRKIFWKNNCVAVGLSAGFLEPLEASALVLVELSAQLIAEQLPACRQVMDVVANRFNQTFDYRWQRIIDFLKLHYMLSKRTDNAFWVDNRNPDTIPNSLQELMTLWQYHPPADHDFSSNNEVFPAASYQYVLYGMGFVTENLTHAVCDRDHNLALQQFQLNQQAISKASRLLPSNRELINKIRQYGLQSV

SEQ ID NO: 88805 - protein, 544 aa, Rheinheimera sp.
  REGION 1..544: note = tr|A0A349LSL2|A0A349LSL2_9GAMM Tryptophan halogenase; OS = Rheinheimera sp. OX=1869214 GN=DCS87_06055 PE=4 SV=1
MKMQQPQQLIIVGGGTAGWLTACVIAAEHKAQAGIAASVKIQLIESPDIPTIGVGEGSWPSMRQTLQKIGISETEFFRACDVSPKQGSKFVHWLHAPQAAASADEAYLHPFTVPAGYPDTALALSFLHSPVAERGSYAAAMTPQGRLSLAGKAPKTIGTPDYQFMQNYGYHLNAGKFAALLQRHATQVLGVEHIADTVTQVQVSQGQIAGVTTSQHGLLQADFYIDCSGTQSLLLGGALAEPFISCKAMLGNDRALALQLPYDLGGACDAPASAIFSNTVATAQQAGWIWDISLPNRCGIGHVYASEFLSDEQAYANVLAYAERRLSACNHQFASASAQQKHALLDGLMVKKLQINPGHYQRCMVGNCMAIGMAAGFIEPLEASALALVEWSAKTIAKALPLHANARSRVADRINQQFVKHWASIIDFLKLHYVLSQRDEPYWQMQRAMVPASLAKLLDLWQYQVPDVSDFPDAEQLFPAASYSYVLYGMGFEPRWLRPLKSHEWLRSQQLQAQLRHDVQQLSQLLPDNASLVTQIAAQGLSRL

SEQ ID NO: 88806 - protein, 505 aa, Colwellia sp.
  REGION 1..505: note = tr|A0A5C6QKD8|A0A5C6QKD8_9GAMM Tryptophan 7-halogenase OS=Colwellia sp. C1TZA3 OX=2508879; GN = ESZ39_11820 PE=4 SV=1
MNQSSTNRIRKIVIAGGGTAGWMSAAALSSMLRPDDVQIVLVESEEIGTVGVGEATIPDIISFNRMLGIDEAEFLKATNATFKLGIEFSDWGKLGDKYFHPFGNHGADMNGIDFHQYWLHTRQAGNTNSLEEYSMCAVAAKSMKFALPNDNPRSLLSQIGYAYHFDATAYALFLRNYAQKRGVIRIEGRIDQVLLNEQTENISALVMQNNERVEGDFFLDCTGFKSKLLGETLGVPFHDWSKWLPCNSAQAVPSERRGKLLPYTKSMAKTAGWQWRIPTQHRTGNGHIYSTDFMDDQQATDILMQGLDAPALSDPRTLRFTTGCRDKFWHKNCLAIGLASGFLEPLESTSIFLIQQGISRFISLYPSLTPAPKVVEEYNRLMTREFHQVRDFIILHYKATQRTDSEFWRYCKNMLIPDSLQHKMELFQCAGRVFRDDHELFSTSSWVAVMLGQNIYPETADPMLLGVPIQNIEQSLQSMQRAMQQTSLQMPTHAEFIKNYAGSSV

SEQ ID NO: 88807 - protein, 544 aa, Rheinheimera sp.; identical to SEQ ID NO: 83510
  REGION 1..544: note = tr|A0A2D4U293|A0A2D4U293_9GAMM Tryptophan halogenase; OS = Rheinheimera sp. OX=1869214 GN=CML21_14955 PE=4 SV=1

SEQ ID NO: 88808 - protein, 507 aa, Shewanella sp.
  REGION 1..507: note = tr|Q0HS98|Q0HS98_SHESR Tryptophan halogenase; OS = Shewanella sp. (strain MR-7) OX=60481 GN=Shewmr7_3023; PE = 4 SV=1
MTIRKIAIIGGGTSGWLAANHLGRVLQGRSELSITLIESPDIPIIGVGEGTVPSIRKSLQSFGISESEFIRSCDVTFKQSIKFVNWLDKARHGKDNFYHHLFDIINLQGVDTVSAWLGEKQGDFADYVSPQHLVCEAAKAPKLITTPEYAGVLGYAYHLNAAKFAKLLAKNAIEKFNVEHIFATVQDVRLGDDGAISSLLTEQGTLSFDFYIDCSGFESILLAKALKVPFISKAHQLFIDTALVAQIPTQPTDIIPPYTQATAHRAGWIWDIALTQRRGTGFVYSSTHMAQSEAERKFDHYLGGKLADVPHRKIPMTVGHRQQFWVKNCVALGLAQGFLEPIEATSILLTDFSARFLAERFPVHTDDVDYLAKRFNDTVGYAWERVVEFAKLHYCLSDRTDSSFWLDNQASETIPEGLKQRLELWKSYGPIAEDFPSKFEVFNLDNYLYVLYGMKYQTNLRGGSSTTQASLNMYMNKMSKVKQQMRDGLPEHRELLDKICTYGLQSI

SEQ ID NO: 88809 - protein, 492 aa, unidentified
  source 1..492: note = Maliponia aquimaris
  REGION 1..492: note = tr|A0A238KIL3|A0A238KIL3_9RHOB Flavin-dependent tryptophan halogenase RebH OS=Maliponia aquimaris; OX = 1673631 GN=rebH PE=4 SV=1
MGVGEETVPQMPVTLREMGLDDQDFMRRCNASLKMGVMFNDWNVDRKGRPIRYMNPFATAPRIDGIEAGHYFQAYGAGRRDYVTSFSPMPELFEAYKCPFSFGGPADDPMPRAGYAYHLDAVQFADLLCETGTARGVEHILDDVDDVELDDRGLVAALHLRAKGRHPVQLVIDCTGFRGRIIQQALGEPFDSYSDHLGNDRALALQTPHPDPSKIRAATQSTALGAGWSWAVPLFNRIGTGYVFSSAHRTDEEAAREFLAHLGDAAPPGSEPRVIPMRIGRSRRAWVGNCIALGLSGGFIEPLESTAIHMIDLGLRWLLDCFPSQDYEDATRAAYNKLSDDLFNEVRDFICLHYRLNNRSDSPYWIDARGELKISDRLEHLLDLWQYQLPTQRDVPHAHLFSHQVFTAVLLGKRVYDTGYGAGRLNRAHALPETAWKAFLKQSAVRNRAVVAYKADHRRTLLALRGELRGAPPASAQLGTVEAMASAESALF

SEQ ID NO: 88810 - protein, 449 aa, Rheinheimera sp.
  REGION 1..449: note = tr|A0A2D5S2H9|A0A2D5S2H9_9GAMM Tryptophan halogenase (Fragment) OS=Rheinheimera sp. OX=1869214 GN=CML20_23175; PE = 4 SV=1
ASIPPILHLNAALGIPESEFIKATQATIKLGIEFENWRAPQHSYMHAFGEIGKDLPFCEFYHYWLRAKQQGTNADFWDFSLNYQAAKQHKFAHLKHIPNTQLSGLNYAYHFDATLYGEFLKGLTISRGVKRIEGQIADVKQCPESGFVKALELLDGQIISGDLFIDCTGLSALLIEKTLNTGFDDWSHWLPCDSAIAVQTKTTAEPAPYTRSIAHDAGWQWQIPLQHRVGNGLVYSSRHITDEQAKQQLLDNIPGEPITEPRVIRFKTGRRRKQWHKNVVAIGLSSGFLEPLESTSIHLIQTAAIRLIKLFPHQGIKPVLIDTFNKQSKTEVERIRDFIILHYKLTERDDSGFWRQCKQMDIPISLQNKIDLFKQTGKLIREDDELFAEVAWQQVMIGQGLEAHDYHPLADALSDEQLAELFTNLKTLINGTVKQLPTHSEFLARMKNN

SEQ ID NO: 88811 - protein, 519 aa, unidentified
  source 1..519: note = Aliiglaciecola sp.
  REGION 1..519: note = tr|A0A553L4D8|A0A553L4D8_9ALTE Tryptophan 7-halogenase OS=Aliiglaciecola sp. M165 OX=2593649; GN = FM019_07735 PE=4 SV=1
MVDHQIRKIVIVGGGTAGWLTAGVIAAEHLANSEQGISVTLIESPDVSPIGVGEGTWPTMRGTLRKMGISETDFIRECDASFKQGAKFAKWVTGAEDDAYYHPLVLPQGYEQINLAPFWQEQADKVSFADAVSFQGHLCDQHLAPKQNTTPEYAHVANYAYHLDAGKFSTFLTKHCTEKLGVTHILDHVTDINSHDNGDIRSINTKMSGELEADLFVDCTGFNALLIGKHYQIPFINKRHILFNDTALAVHVPYETEQSPIASHTISTGQSAGWIWDIGLPSRRGVGHVFSSDHTTVEHAETELRDYIKQSIGDKADELKVRKIPIVPGHRQVFWHKNCVAVGLSAGFLEPLEASALVLVELSAAMISEQMPATRSVMDIVAKRFNDKFLYRWDRIIDFLKLHYILTKRTDTDYWVDNCDKKTIPEDLRQLMELWRYHSPWHSDFTQIDEVFPSASYQYVLYGMGFKTESAGTQRRSLDKQLAMENFRKNQQLTQKLIKGLPTNRALINKIRQFGLQRI

SEQ ID NO: 88812 - protein, 508 aa, unidentified
  source 1..508: note = Caulobacterales bacterium
  REGION 1..508: note = tr|A0A1F8IVD1|A0A1F8IVD1_9PROT Tryptophan halogenase; OS = Caulobacterales bacterium RIFCSPHIGHO2_01_FULL_67_30; OX = 1797584 GN=A2795_01145 PE=4 SV=1
MTLLASAPLHPDAIREVLIVGGGTAGWMTAAAMTRLPAGIRVRLIESEEIGSVGVGEATIPPLVTFNAMLGIDEASFIKATQGTFKLGIEFVDWGRKGDRYMHPFGEVGMDMEGVKFHQHWLRQAQGGDPTPIEDYCLSAVAARLGRFTPASSDPRTVLASLRHAYHFDAALYAGFLRRFSEARGVERVEGKVVGVSLRDSDGFIESVRLADGRRLDADLFIDCSGFRGLLIEEALATGYEDWSHWLPCDRALAVPSANTGPLTPFTRATADRAGWRWRIPLQQRTGNGHVYASAFTTDEDARASLLAGLEGEPLAEPRPLRFTTGRRRRQWVRNCVSLGLSSGFLEPLESTSIHLIQSGISRLMALFPTRRFDPVLIDQFNRLSQTQFEQVRDFIILHYKATQRDDTDFWRHVAAMDAPESLERRIALFRAGGRFMRDGDELFSEASWVAVFTGQHILPQDHDPLADGVPYAAMARKLAGLRGIIRKTAEAMPTHEAFIARCCQPSA

SEQ ID NO: 88813 - protein, 499 aa, Rheinheimera sp.
  REGION 1..499: note = tr|A0A5C7TJ78|A0A5C7TJ78_9GAMM Tryptophan 7-halogenase OS=Rheinheimera sp. OX=1869214 GN=E6Q75_11385; PE = 4 SV=1
MQANKPVREVVILGGGTAGWISASLLVKLLGKSIRITLVESDEIGIIGVGEATIPPIMTFNAALGIDEKAFVRATKGTIKLGIEFENWRQIGDRYMHAFGSIGKEFPSCNFHHFWVRSQKLGMPYDFWDFSLAYQAAVQHKFGHLAKIDGVNLPGLSYAYHFDAGLYAQFLRQFSENLGVRRIEGKVSQVLRHADNGDVATLVLQNGEQVNGDLFIDCSGLHALLIEKTLNTGYEDWSHWLPADSALAVPCASVEPITPYTKSIAHAKGWQWRIPLQHRIGNGFVYSSKYCSDEEAKATLLANLDGAPLAEPRKISFKTGRRRKQWSHNVVSIGLSSGFLEPLESTSIHLIQSGVLRLLKFFPNNGISPAMRDEFNRLSQIEFEQIRDFIILHYKLNERTGSQYWLDCARMDVPETLRRKMAMFRETGMVQREQDELFSEIAWQQVMIGQGVIPADYHSMANAIDEAALKELLDNLKAVMQVTVNRLPPHQDFINFCLS

SEQ ID NO: 88814 - protein, 517 aa, Colwellia sp.
  REGION 1..517: note = tr|A0A5C6Q5A2|A0A5C6Q5A2_9GAMM Tryptophan 7-halogenase OS=Colwellia sp. C1TZA3 OX=2508879; GN = ESZ39_16440 PE=4 SV=1
MNKLTKKVVVVGGGIAGWLTAGRLAAKHKSNTEQGLTVVLVESPNISAIGVGEGTWPTMRSTLIALGISETDFIRECDASFKQGAKFAKWVDGSEDDFYYHPLVLPQGFSQGDLAAHWLARQGQTGAKSFSEDVCFQESVCENGLAPKTIRTPEFAAVANYAYHLDSVKFSVFLQKHCTEKLGVTHIIDNVTGVNSAPNGDISSVSTENNADVTGDLFVDCTGFSSLLLGKHYQVPFKSCSDILFIDTALAVQVPYDEVDSPIASHTVSTGQEAGWIWDIGLQHRRGVGYVYSSKYSSEAQAREVLAKYVGDKFSSLTVRKIPIVSGHREKMWQNNCVAVGLSAGFLEPLEASALMMVELSAQMISEQLPQSRDIMDIAAKRFNETFLYRWEKIIDFLKLHYILSKRTDNAFWIDNRDAQSIPESLKEAMALWQYRAPADHDFTSNNEVFPAASYQYILYGMGFKSDYSQNTYALDNIDFAQHQFAQNKKLTDKAVSTLPKNRELINKIIEFGFNQI

SEQ ID NO: 88815 - protein, 498 aa, unidentified
  source 1..498: note = Aliiglaciecola sp.
  REGION 1..498: note = tr|A0A553L684|A0A553L684_9ALTE Tryptophan 7-halogenase OS=Aliiglaciecola sp. M165 OX=2593649; GN = FM019_06415 PE=4 SV=1
MKQFKRIVILGGGTAGWMAANLFANKWADKNVHVTLVESPEIGIVGVGEGSTPTLKRFFEMLNISESQWMPQCNATYKVNIRFAGWSPKSGIEDYSHPFICQTDTFTQKSFFVNCRTRRLGLDTNVNPEEFLLNGVLAKQVKGPLAPEHFPMIMEYGYHFDSYLLGQFLAQHAETLDVEHIQAKVSSVKQHANGDIAALITENGDEIDADFFVDCSGFASVLMQKTLNVKFNSFKQNLFNDSAVVMPTPMQDVIPVETRATALSNGWAWKIPLTNRFGNGYVYSSDFINQDQAETELRRHIGTENDPESCRHLKMRVGQLEKHWANNCLGLGLSQGFIEPLEATALHLVQVCIEMFMGDFEKGQFSHRHQAEFNQKIAERFERVRDYIVAHYKVNTRDDSDYWRANRDNTHLSESLIQILNVWYKREDLGAEIDRQKLNTHFDTISWHCLLAGYGAFPPIANNQPGTGDHFIENGIEEFNRRCSLNFSSHQHNLDSLK

SEQ ID NO: 88816 - protein, 482 aa, unidentified
  source 1..482: note = Caulobacterales bacterium
  REGION 1..482: note = tr|A0A1F8IT34|A0A1F8IT34_9PROT Tryptophan halogenase; OS = Caulobacterales bacterium RIFCSPHIGHO2_01_FULL_67_30; OX = 1797584 GN=A2795_09460 PE=4 SV=1
MAAALFSKLFKGLYDITLIESEAIGTIGVGEATIPAIKTFNELIGLDENDFMRRTQASFKLGIQFVDWDRVGSSYIHGFGVIGRDLKWLRCHQYWLKMRAEGKVSDLAAYSINTAAALQNRFMRADPKRPGSPLGHIAHAFHFDAGLYAKYLRGMSEAAGVRRREGKVVSVQLRPEDGFVDSVTLEDGAVVSADLFIDCSGFRGLIIEQAMKTGYEDWSHWLPCDRAMAVPCARTEPFTPYTRSTARPAGWQWRIPLQHRTGNGHVYSSRHMDDGEAEQILLSNLDGAQMAEPNRIRFVAGKRRQIWNRNCVAAGLASGFLEPLESTSLHLIQSVLIRLVRLMPDAGFDPATIAEFNRQTDFEYERIRDFIILHYKATERDDTPFWRYCRDMDVPVTLERKIDLFRANGRIFREDDELFAEESWIQVLLGQGIIPVGYDPLVDVTPEPDIERYLADVETVIGKCVALMPSHADYVAKACPAA

SEQ ID NO: 88817 - protein, 517 aa, Caulobacter sp.
  REGION 1..517: note = tr|A0A2G5QXL8|A0A2G5QXL8_9CAUL Tryptophan halogenase; OS = Caulobacter sp. X OX=2048901 GN=CSW60_22000 PE=4 SV=1
MDRAIQRVLVVGGGTAGWLTAGTLAAMSRGKDARPLEVALVESPNVPIIGVGEGTWPTMRRTLKRMGIKEADFIRECDASFKQGAKFARWVTGEPDDFYYHPLVLPKGYFETNLVPHWLQSNADLSFSRAVCPQEALCENGLAPKKITSAEFEATANYAYHLDAGKFADFLRRHCVDQLGVRHVLADVTQVIPAENGDIAAIETQQAGRIDADLFVDCTGMRSVLLGGHFQVPFKSCKDTLFIDRALAMQAPYAEPQSPIASHTISTAQPAGWIWDIGLQSRRGTGMVYSSAHCSDEQAEERLHAYVQGLGADPRQLSSRTIRIEPGHREQFWVRNCVGVGLAAGFLEPLEASAILLIEIAAQFIGEQMPTTRSAMEVVARRFNNTFRYRWERIIDFLKLHYILSRREDDAFWIDNRATDTIPESLSEALRLYRHQPPWHDDFDRAVEVFPAASYQYILYGMGFQTEPSPRGLSADETLRAQKLMDKVRDETEALVGALDANRDLLAKISRYGLAAI

SEQ ID NO: 88818 - protein, 542 aa, Rheinheimera sp.
  REGION 1..542: note = tr|A0A2D5RY32|A0A2D5RY32_9GAMM Tryptophan halogenase; OS = Rheinheimera sp. OX=1869214 GN=CML20_15130 PE=4 SV=1
MQQRKVLIVGGGSAGWMTAAYLNGALNKQGTEQNVLIELLESPDIPRISVGEATIPSMRHLLAVVGVDELEFMKATDATFKQSIKYCNWVHNDNSFYHHPFTSMRVQPIDRAGSDWLKSDRSIPFMETCSAQPIICEMGLAPLMLGKWDMGSRLNYAYHMNAQKFADYLRDFSTARGVVHTLANLAGVEMQGPDKIVAVTTDQQQRLTADLFVDCTGFKAKLIEEQLGVGFEDCSQWLLCDRAITMHLPYDKFYPGMVRPYTTATALSAGWIWDIPMQNQRSVGYVHSSKFISAEQAEREMRAYQGPGTEQLKARVVDFKVGRRQGNWRGNCVAIGLSGGFIEPLESTGLYLSDLGAVLLAEHFPHDEQDMAVLAGRYNRLMANRFYEILDFINMHYCMTKRTDTEFWREVQKPERITERLKAKLAYWRIKPPSAHDFQDQWYPGMATTINSGAATADNRAAIDTGGLWNHESYECILYGMGFLEDECRQRYGPDLPATGVHPAIIQRLQMARQKLPPHAIWLNRVLAMPEYPTVCRPKGWV

SEQ ID NO: 88819 - protein, 505 aa, Sphingomonas sp.
  REGION 1..505: note = tr|A0A0Q4HS31|A0A0Q4HS31_9SPHN Tryptophan halogenase; OS = Sphingomonas sp. Leaf226 OX=1735691 GN=ASE77_09855 PE=4; SV = 1
MTIGAPVRRIVIVGGGTAGWMAAAALARLIPTGASITLVESDAIGTVGVGEATIPPIRGFNAMLGIDEAEFLAATAGSFKLGIEFVDWGALGERYLHPFGGFGFDIEGVRFHQYWRRRRAAGIVEDIEAYSLCAVAARAGRFMPPSPDPASVLSQMAHAYHFDAGLYARFLRRRAERDGVVRVEGDVVDVTLDGETGHVRHVTLAGDRVIEGDLFLDCSGFRGLLIEQTLGAGYEDWTPWLPCDRAVAMPTANAGPAITPYTRSTARAAGWQWRIPLQHRTGNGYVYSSAHCSDDEAAATLRAGVDGTPLAEPRLLRFTAGRRRKQWIGNVVALGLASGFTEPLESTSIHMVQTGISKLLALFPDQGFSPVEIDTYNRLAATQFDQVRDFLILHYHATRRDDSPFWRETRARAIPDSLSEKLALWRRRGRLFRWEDDLFAEASWVAVLLGQGIVPDGWDRLADAVDAREVDARFDRLRAMFADAASRMPRHEDYLARICPTRVRA

SEQ ID NO: 88820 - protein, 501 aa, Sphingomonas sp.
  REGION 1..501: note = tr|A0A1Y2QP68|A0A1Y2QP68_9SPHN Tryptophan halogenase; OS = Sphingomonas sp. IBVSS2 OX=1985172 GN=CAP40_00290 PE=4; SV = 1
MTENRNIRSILIVGGGTAGWMTAATFARILGPDYAKITLVESDEIGIIGVGEATIPQMATFNRMLGLDEDQFVRETKGSFKLGIQFVNWGRLGHRYFHPFGRYGLDMKGVSFHAYYLRLRQLGEAPDVDAWSLQAMAARDDKFMRGIDAGNSPLSDIAYAYHFDAGLYARFLRRYAEERGVVRREGRIVDVKLRGEDGFVRSVTMQDGSEIEADLFVDCSGFRGLIIEQALKVGYTDWSHYLPCDRAVAVPCASVDAWTPYTRSTAHAAGWQWRIPLQHRIGNGHVFSSSHMSDDEATAILMANLDGEPLADPRTIPFTTGHRNRMWVKNCVALGLAGGFLEPLESTSIWLIQSGLSRFLTMFPDRDFNQADIDRYNRIMTTDYEEIRDFLVLHYHATERTDSPFWDTCRTMAIPERLAEKMRVFRSHGRAFRENEELFNDTSWFAVMLGQLIEPASHDPVADVMPLDETRARLAHIREAVANSAAYMPKHRAFIREHCAV

SEQ ID NO: 88821 - protein, 500 aa, unidentified
  source 1..500: note = Sphingomonadales bacterium
  REGION 1..500: note = tr|A0A1B6Z9E2|A0A1B6Z9E2_9SPHN Tryptophan halogenase; OS = Sphingomonadales bacterium EhC05 OX=1849171; GN = A8B75_12450 PE=4 SV=1
MNGAKSDKPRRRIVVAGGGTAGWMAAAALARTMGEAIELTLVESDAIGTVGVGESTIPPLATYNRLLGIKEEDFMRATQATFKLGIEFENWKIDGEKYFHSFGTTGRDHWSAGFQHFWMHGLTKGHKESYDDYCLELTAAFAGKFAHLPDNRMNYAYQLDSTLYAKFLRKLAEADGTKRVEGKITKVDLDAGNGNIAALVLESGERIEGDLFLDCTGFRALLMEGALHVGFDDWTHYLPCDAAIAIQTKSVRQPIPYTRAIAHDAGWQWRIPLQHRQGNGIVYCSRYLEREDALDRIVSSIEGKPLTEPNFIRFATGARRKQWHRNCIAVGLSGGFMEPLESTSIHLIQRAILRLIRMLPMANVSERDVAEFNDQQMTDMLQIRDFLILHYNATDRRDSPFWRQCADMDIPDSLKQKIELFRETGRVFRKNEELFAENSWVQVMLGQGITPSSYHPIATKLSDEELAHLLGGLKESVSKTVADLPEHHVYVGRYCGAKIS

SEQ ID NO: 88822 - protein, 507 aa, Brevundimonas sp.
  REGION 1..507: note = tr|A0A0N1BMX8|A0A0N1BMX8_9CAUL Tryptophan halogenase; OS = Brevundimonas sp. AAP58 OX=1523422 GN=IP78_11720 PE=4; SV = 1
MAEPIQSILIVGGGTAGWMAAAAIKRSVGPNAEVRLVESADIGIVGVGEATVPPIRDFNAMIDLDEAEFMRETKATIKLGIEFNGWGRADSAYFHPFGTFGRGPTLGEFPGSYFALKARGKAASLEAYSVTSHAARRGKVGERSNDPRSALAGFHTAYHFDAVLYGQYLRKVCAGRGIERIEGEIVEVLQRPEDGFVDHVVLKDGRTLKADLFIDCTGFRGLLIEQTLKAGYEDWSHWLPMNRALAVPCAKVRAVDPFTSSTAREAGWQWRIALQHRTGNGYVYCSDYIDDDRARETLLANLDGEALAEPRPLRFVTGRRKKLWDRNVVALGLSSGFIEPLESTSIHLVQVGIIRLLQHWPDMAFSQPNIDGYNRRLTREIELIRDFVILHYHATQRDDTPFWRHVSQMPVPDSLSERVEMFRDRGLLFQVGADEYFSQGSWMAVMMGQGITPRAYNPLYDYQNLDQVAAGFEQTRQAWAATANALPAHEDYLKAKGMWAEEKAAAA

SEQ ID NO: 88823 - protein, 516 aa, Sphingomonas sp.
  REGION 1..516: note = tr|A0A0Q4I2I5|A0A0Q4I2I5_9SPHN Tryptophan halogenase; OS = Sphingomonas sp. Leaf226 OX=1735691 GN=ASE77_04105 PE=4; SV = 1
MRKRILIVGGGTAGWLTAGYLAKRLGADLAGGVSITLVESQDIGILGVGEGTFPTIRRTLATIGIDEAELIRRCGATFKQGAKFVHWRHAPGQGRPDHYSHPFQVADASDGLDLLPYWLLGHGGAENWDEVSNPQKKAADAMRAPKLATNPDYVGPLNYAFHFDAVALAGLLREHAVRNGVRHLTDTVSEVVLAEDGAIGGVRTKRNGMLDADLYIDCTGFRAELIGKAMKVPFRSCRDVLFCNRAIAAQLPYAKPGDPIASYTISTAQESGWIWDIGLDRRRGIGHVYSSDHSDDETAERVLRGYLGAGGDEAEVRHFKFDAGYREVNWVKNCVAVGLSSGFFEPLEATGIAFAEVSAGMIANLFPWGGDYETSARQFNANMLRRYERALDFIKLHYCISERRDTAFWRDNVADASVPDSLLELLDRWRFRPPNELDIDGQVDIFTDASWQYVLYGMGWKTDLSAKAGALRYAEDARRAFAEVRRQADYAVRNLPSNRDLVAYAQHHHFGARAAA

SEQ ID NO: 88824 - protein, 540 aa, unidentified
  source 1..540: note = Gammaproteobacteria bacterium
  REGION 1..540: note = tr|A0A1G0IM33|A0A1G0IM33_9GAMM Uncharacterized protein OS=Gammaproteobacteria bacterium RIFCSPLOWO2_02_FULL_42_14 OX=1798294 GN=A3I77_06195 PE=4; SV = 1
MNDDSIRRIVIIGAGTAGWMSATYLAQSLNFNAKITVIESAQHAPIGVGEATIPTIKTEFFDRLGISEDAWMPELGGTFKLGIKYANWKTPLESGGDYYYHVFGEIPMIDEIPLSSVWTKQFLEGKTKRNFADSCFASSVAFDFHKSPKLLDGTKVQHYAYHFDAILISRYLKDWGVARGITHVIDKLVNAKQDEQGNVTCVIGESGREYHADLFIDCSGFAGFLIDKLFKEPVISFADCLLTDRAIAINLPNDPKEKTIRSYTTATAMKAGWMWEIPLYERSGNGYVYSSQFISDEEAEKELRQFFGKRADNATLRPIKFQSRRHRNSWVKNCVSIGLSGSFLEPLESSTIYFIYAALYQLVKCFPKKNIDPVLREKFNRKINFMVDDNRDFICMHFKTAQREDTAFWKTNKYETKAPDSLELILRQHKSGLPIRRPTVDNNNIYPTFKSLFQNFWTETNYQCILCGVGYLPNNSYPLLDYRQDVLDAGKMLFQQISKRAKELKKILPDQRVYLKSLHDKRDQAMNTSIKKKRIAKKVC

SEQ ID NO: 88825 - protein, 509 aa, Idiomarina baltica; identical to SEQ ID NO: 83454
  REGION 1..509: note = tr|A0A348WL32|A0A348WL32_9GAMM Tryptophan halogenase; OS = Idiomarina baltica OX=190892 GN=DCR58_00515 PE=4 SV=1

SEQ ID NO: 88826 - protein, 538 aa, Burkholderia ambifaria
  REGION 1..538: note = tr|A0A2S9NZ98|A0A2S9NZ98_9BURK Tryptophan halogenase; OS = Burkholderia ambifaria OX=152480 GN=C6Q14_03725 PE=4; SV = 1
MSNPIKNIVIVGGGTAGWMTASYLVRALQQQANITLIESAAIPRIGVGEATIPSLQKVFFDFLGIPEREWMPQVNGAFKAAIKFVNWRKSPDPSRDDHFYHLFGNVPNCDGVPLTHYWLRKREQGFQQPMEYACYPQPGALDGKLAPCLADGSRQMSHAWHFDAHLVADFLKRWAVERGVKRVVDEVVDVHLDERGYISSLSTKEGRTLEADLFIDCSGMRGLLINQALKEPFIDMSDHLLCDSAVASAVPNDDVRDGIEPYTSAIAMNSGWTWKIPMLGRFGSGYVFSSKFTSRDQATADFLKLWGLSDNQPLNQIKFRVGRNRRAWVNNCVSIGLSSCFLEPLESTGIYFIYAALYQLVKHFPDTSFDPRLSDAFNAEIVYMFDDCRDFVQAHYFTTSRDDTPFWLANRHDLRLSDAIKEKVQRYKAGLPLTTTSFDDSMYYETFDYEFKNFWLNGNYYCIFAGLGLLPDRSLPLLQHRPESIEKAEAMFASIRREAERLRTSLPTNYDYLRSLRDGDAGLSRSQRGSTLATQEIL

SEQ ID NO: 88827 - protein, 511 aa, Pseudoalteromonas peptidolytica
  REGION 1..511: note = tr|A0A510U3U0|A0A510U3U0_9GAMM Tryptophan halogenase; OS = Pseudoalteromonas peptidolytica OX=61150 GN=PPE03_06190; PE = 4 SV=1
MKLQKVIILGGGTAGWLAANHLAKRLNAELSLDIHIELIESESIPAVGVGEGTVPFMKETLKHFGIDEELIFKNAEGSFKHGIKFSDWLYNPESNNGHYYYHPFQPYPSGHEQLIRAWLSNPNRCKFEHFMSTQATVAELGLSPKAITQREYDGVFDYAYHFDAALFTKLLKDNAVNELGVHVSYKTIDDVEISQDGSIKGLIANGERFDADFFVDCSGFESLLLGRAMNVGFKSLSNTLLADTALAVQSPYQDNSTPINPYTTATAKEHGWIWDIQLQSRKGVGYVYSSNHTSDDDAQRCLALYLDVEPQELNVRKIDMRCGYREQFWVKNVVALGLAQGFVEPLEATGLLVFDLTASMLAHALSSGELSFALESQKFNRDVERMWLNISDFIKLHYCLSKRTDSSFWLDNCSTDTIPDSLQQKLEMWKVRAPHKFDFTDKLGVFDISNYLYVLYGMEFLPTQVVTSEASMQIYKGYQEYQTSVLKEVNSNLRPHKELLEKLKLYGIQRN

SEQ ID NO: 88828 - protein, 501 aa, Sphingopyxis sp.
  REGION 1..501: note = tr|A0A095B8Y4|A0A095B8Y4_9SPHN Tryptophan halogenase; OS = Sphingopyxis sp. LC363 OX=1120705 GN=FG95_01171 PE=4; SV = 1
MGDRFELVIVGGGTAGWMCAAACAAKLDPARFRVRLVESEEIGTVGVGEATLPQMKDFNDFLGLDEVEFMQATQATFKLGIEFVNWGREGVRYVHPFGTFGRPIGEADFFSYWIRAHVAGTAAPLSDYCFPIVAALQNRFMLPSGDANDVRNAFAYAYHLDAFLYARYLRGWAEARGIERVEGRIVEVEQHGESGDIAAVKLASGTRVAGDLFVDCSGFRSLLLGQTLGVGLEDWAHWLPCDSAQAVPSARSVDFTPYTRSTRRTAGWQWRIPLQHRTGNGYVYSSADISDDEAAATLLANLDGDALADPRVLRFRAGKREQAWAHNCIGMGLAGGFLEPLESTSIYLVQMAIMHMLTLMPAERAIDPALPTEFNRVMDVEYDRIRDFLILHYIANEADAPLWERVTVIDLPDTLADKIDRFRHRGHVQAYRDGLFGPPSWQAVFVGQGIEPRAADRLADALPAATVEERLATLAATIADAAATLPSHADFIARYCPAPAP

SEQ ID NO: 88829 - protein, 501 aa, Pseudoalteromonas peptidolytica
  REGION 1..501: note = tr|A0A510U2A2|A0A510U2A2_9GAMM Tryptophan halogenase; OS = Pseudoalteromonas peptidolytica OX=61150 GN=PPE03_09170; PE = 4 SV=1
MKTHLPTKTIQSLTILGGGTAGWMCAAYLAKHQPTLSVTVIESPHIASIGIGEGSTPHLQHFMQSLGVKECDWMPACQASYKTGIYFDNWNGDNSGYFHPFFSEMDAKTAEVYFVNANARRRGSEYIDKPEHYFLAAVLADKQQAPIPQQPLPRALEFGYHFDAQKLAQWLSAFSLARGVKHRQSTVTSVQHDSQTVIALTLESGEQIKSDFYVDASGFNGLLIEKTLEVPFISFSDQLLNDSAIAIAGDKITPLPSSTAAIAMPCGWRWQIPLQSRTGHGYVYSSAHISAQQAEAQLRQAAQLDTGPAKHLTMKVGMMARCVEGNVFAIGLAQSFIEPLEATALMVTGYSIELLHRLLSQQLEAQAINQQLSDLVLGIKEYVLAHYATSKRTDTQYWQDAKVAALNVRELDALLTHWRDGGDFDAWLHQHRSQSPYIRPSWYCLLGGMDHRDSCCQMPFEQAPTHIELAAKAYLTQLSDKHFIAHTKALQQLLLSDQRSA

SEQ ID NO: 88830 - protein, 494 aa, Sphingopyxis sp.
  REGION 1..494: note = tr|A0A095C472|A0A095C472_9SPHN FAD dependent oxidoreductase family protein OS=Sphingopyxis sp. LC363; OX = 1120705 GN=FG95_01173 PE=4 SV=1
MSARARPVRRIVIVGGGSAGWMTAAAFGRALAGQPHSIALVESEAIGTVGVGEATVPPIHEFNRYLKIDQAEFLRATHGTIKLGIAFEGWGGSDHRYFHPFGYLGVEMSGIHFHHFWLRHLAAGGDPDHGPYNLETMAAREGRFAPATRHGPVHHAVQFDAAAYARLLRSYAEDKGVVRIEGKVADVRLDPEDGFITALALDDGRTIDGDLFIDCSGFRGLLIEGALQTGYTEWSHWLPCDSAIAMPCEGTGDPAPFTRSTVREAGWQWRIPLQHRDGNGYVYSSAHLGHDEAEALLRSRLPGAPLADANRLRFVAGHRKAIWNRNCVAIGLAGGFLEPLESTSIHLIQTTIIRLLSLLPRDAIDPNVIRRFNRDALHEYAVIRDFVIAHYALANRDDTPFWRDVAAAGLPDSLAERIEAFRATGNILFEPGDLFGPTNWYAVLTGQGMRPQSWHPIADGLSDEELATRLATLRGRVAEQLAELPPHVEFLRRL

SEQ ID NO: 88831 - protein, 609 aa, Fischerella thermalis
  REGION 1..609: note = tr|A0A2N6MUD2|A0A2N6MUD2_9CYAN Tryptophan halogenase; OS = Fischerella thermalis CCMEE 5201 OX=2019672; GN = CEN39_18765 PE=4 SV=1
MTTNNTQSQVYDVVIMGAGIGGVCQARHLLLNIPNIKIALVDPRPEERTDRDMKVGESTVEISTLMICKELGLYDYMIENHPPKFGLNFHWAKEAGKTENTEDYYHIWTVKQPPLASVLINRPKFERDLLRMNQQMGAEFYNGRVVDVDLTPGDELNTVHVKQGDRYLELKTKHVIDSAGRKFLIGRKTDNLITGPENLYGINNGSVWMRVRNVDRTIFHSGYDPEVCTCSHYYAANHWMGHGHWVWMLPTDTQNMELSIGLLYHHDIISPHSVNTKEKFYAFLEANHNVVYRLLKSGEEVDFHHWPRIAHKSKQMYSQDNWYIIGDAAAIFDPFYSQGLTMMSFQIESVTEIIRAKLAGEANAKEKCALYNKFALNMIDRTNVLVSRHEKQIGDASIMTWRMYLENIWWFKMLIPMFVGKWHLDLDFLKNVVAKPGRLYVVQIMNAVYEHLDELVERKANIGFLHTHIADQLPFGFTMSNDFDNFLHLTKYEPQRANIYVSIQWSHFFVALWYLKFLWKAYGLKGVLSPHNLKHVFALFKAFVEAAWDHLIFRIKTKNIPGNSIIANIRQEFKNYRSPAKLEPWLEEVTEASNGNVTTQSRELVKAEV

SEQ ID NO: 88832 - protein, 234 aa, unidentified
  source 1..234: note = Acidobacteriia bacterium
  REGION 1..234: note = tr|A0A321LDS2|A0A321LDS2_9BACT Tryptophan halogenase (Fragment) OS=Acidobacteriia bacterium AA117 OX=2169412; GN = DMG65_21185 PE=4 SV=1
MRESESSHNSYDVVILGAGPAGAATALALKRLDSTLRIALVERSDYSAIRIGETLPPPARTLLTELGVWQAFLATSPRACYGTRAAWGSPQFHENEFIFSPYGYGWHLDRRAFDAMLTAEAARRGVEVIQPATISTASRCENDWILINAEEHGRKIRTRFVVDATGRRSWLASHLGIRRLVYDQLVGIFNFYQFHSGSAPADSYTSIEACEQGWWYAAMLPDEGLAVAFMTDAD

SEQ ID NO: 88833 - protein, 503 aa, Brevundimonas sp.
  REGION 1..503: note = tr|A0A0S9NE93|A0A0S9NE93_9CAUL Tryptophan halogenase; OS = Brevundimonas sp. Leaf280 OX=1736320 GN=ASF31_14005; PE = 4 SV=1
MTPAPLKRILIVGGGTAGWMAAAALAHVTRGTVKIELVESEVIGTVGVGEATIPPILLFNQLLGIDENEFVRATQATYKLGIQFNDWFQKGRSYFHPFGTYGTRIDAASFHQYWLRLNKAGLDDDLDAYSVTTMAARMGRFTRPDTDPRGAGSQMTYAFHFDAGLYARFLRRRAESQGVVRHEGKVADVRLRDGDGFIQSVRLDDGRELEADFFIDCSGFRGLLIEGALKTGYEDWTHWLPADRAVAMPCTRIGDPTPYTQSTALEAGWRWRIPLQHRTGNGYVYCSPFISDDEAQAKLRASLDGEAMAEPNFLRFTTGRRKKTWNKNCLALGLASGFLEPLESTSIHLVQSGISKLLLHFPDTGFAQADIDNYNRMMRLETERIRDFIILHYHATARDDSPLWRHVRAMPIPETLKQKMDQFRSRGRIFRYEDELFQETSWIAVLLGQGVIPERHDPITETIPLEQVQQWLHKMKAMIQQGVARMPTHEAFIAANCKAPPIN

SEQ ID NO: 88834 - protein, 519 aa, Sphingopyxis sp.
  REGION 1..519: note = tr|A0A095AME1|A0A095AME1_9SPHN Tryptophan halogenase; OS = Sphingopyxis sp. LC363 OX=1120705 GN=FG95_03749 PE=4; SV = 1
MNSASAIERIVIVGGGTAGWLAAARLASSPRAMAGRLSVTLIEAPDIPTIGVGEGTWPTMRATLGAIGIGEGEFLAACDGSFKQGSRFDGWVTGAADDRYLHPFTAPPAAPTTELLAAWRSGAADLSFAAAMTPQAHVCDLNLAPRQRAMPDYQGAANYAYHLDAGKFAALLARHAVQRLGVRHVADHVTGIDADGAGGIASVSTHQNGEIAGDLFIDCTGHASLLIGGHLGVDWIDRGDTLFNDRALAAQVPVTPGSPVASQTVSTAHEAGWIWDIGLPGRRGIGCVYASRFMDDDAAEAVLRAYIARALPDAPEVPARRLSFPTGHRARFWEGNCIAVGLSAGFIEPLEASAIVMIELSLNALIDNFPASRAALPIHAARFNELFRYRWDRIVEFLKLHYALSRREEPYWLAQRDAAHIPPRLAEMLALWRDQPPSVWDFPRVDEIFSAESHQYILYGMGFPVPADLPATGGRAAGLLADNRQRARSLAAALPANRDYLDALRPGAHAAAARQEGIG

SEQ ID NO: 88835 - protein, 509 aa, Sphingomonas sp.
  REGION 1..509: note = tr|A0A2T7VKD9|A0A2T7VKD9_9SPHN Tryptophan halogenase; OS = Sphingomonas sp. TPD3009 OX=2171625 GN=DC425_08570 PE=4; SV = 1
MTDAHPNPPLKTITIVGGGTAGWMTAALLSRLLLGAYTIRLIESEEIGTIGVGEATIPAIRTFNGLAGIDEFEMVRATQATFKLGIEFRNWGAPGDSYIHGFGKIGQDLYWLHCHQFWLKERAGGRAKHLDHYALNTLAARMNRFAMPDPSNPQSPIADIDYAYHFDASLFARFLRTRAEGAGVERIEGRIVAANRRGSDGFLDHVVLADGRTVDGDLFIDCSGMRGLLIGDAMGVGYEDWSEWLLCDRALAVPSARGAGPLTPYTRATAHGAGWQWRIPLQHRTGNGHVYASRFVSDEAAAATLLGHLDTPALGDPRPVRFRPGKRHRAWEKNVVALGLAGGFLEPLESTSIHLIQTGILRLIALFPGRGFNAADTDEYNRQTDFEYRDVRDFIIAHYKVTSREDTEFWRYLKHMAVPDSLTERLELFRSSGRFFMHAKAELFREESWVQVLLGQGVQAHHDPMVDMIPAEQTTAFLKDVEEVVADVAAGLPTHEAFIARHCQAPKLS

SEQ ID NO: 88836 - protein, 538 aa, Kangiella koreensis
  REGION 1..538: note = tr|C7RB81|C7RB81_KANKD Tryptophan halogenase; OS = Kangiella koreensis (strain DSM 16069 / KCTC 12182 / SW-125) OX=523791 GN=Kkor_1104 PE=4 SV=1
MIKKVLIVGGGSSGWMTAAYLDAAINKKGTQKKISIELVESPDIPRISVGEATVPSIRHLLATIGVTEVDFMKSTDATFKQAIKYVNWVDNDNSFYYHPFNRFSPKPLDTLAHHWILSDKSIPFGDICSAQPQICELALSPKTLSESGWGSPFSHAYHMNAQKFADYLRDISVSRGVNHVLANVTDVEMKSDKQIKAVNTDNAGRLEADLFIDCTGFRAKLIEEKLGVGFEDCSQWLLCDRAVAMHVPYDKYYPGMVRPYTTATALSNGWVWDIPMQSQRSLGYVHSSAFISKEAAERELRAYQGGSCDELPARFVDFKVGRRHKAWEGNCIAIGLSGGFIEPLESTGLYLSDTGVVMLAEHFPFDESTIDDMSFRYNRILSNRFYEILDFINMHYCLTRRVDTEFWRTVQKPEHITDRLKAKLEFWKIKPPSPLDFEDQSFMGYDSKHLLQGGDNRSPIDNAGLWSHLSYQNILFGMKFEEQMHQANSHSSIPSVIHPMVRRRLEVAKSMLPTHEHWLRHSLDMPEYSVSSFPDGWV

SEQ ID NO: 88837 - protein, 495 aa, Rheinheimera sp.
  REGION 1..495: note = tr|A0A0X3YB79|A0A0X3YB79_9GAMM Tryptophan halogenase; OS = Rheinheimera sp. EpRS3 OX=1712383 GN=AR688_12170 PE=4; SV = 1
MQSNTVKKVVIAGGGTAGWVAAAALSKRLKGLIDVVLIESEEIGTVGVGESTVPPVQLFHNLLGINEQEFMQATDATFKLAISFENWGQQGDHYFHPFGVTGKGSFLTDFQHYYLHGLNQGIAAPFGDYCYELQAAKQHKFAKTEQSTINYAYHLDAGRYARFLRRFSEDLGAVRIEGKIAQVQQHVNGDIRALVLESGQEIIGDLFIDCTGFRALLIEQTLKTGYERWDHWLPCNKAVVVQTEPGPTVPPYTRAIAHDSGWQWKIPLQHRVGNGLVYASDYLSDDKARQRLLDGLEAPAIMEPRVLSYQTGRRKKLWHKNCVAIGLSSGFIEPLESTSIFLFMSGIIRLLRLFPFNGVTPALTDEYNQQSITEVEKIRDFIILHYHQTERTDSPFWDYCRTMTIPDSLAHRIALFRESAHAFQTGDEMFRLESWSHVMLGQRLQPQSYHQLVAGLGSGELSRHLQQIRETINSAVHRLPSHRDFLRQYCPSNLT

SEQ ID NO: 88838 - protein, 421 aa, Amycolatopsis keratiniphila
  REGION 1..421: note = tr|R4T2Y4|R4T2Y4_9PSEU Tryptophan halogenase; OS = Amycolatopsis keratiniphila OX=129921 GN=AORI_6627 PE=4; SV = 1
MSATLHGMPERFDVIVIGGGPAGATCAGLLAKEGRTVLVLERERFPRYHIGESLIPVGMRPLQELDLLDRMEARGFERKYGGSLVWGNRDVPWNFSFMKAAEGTYAYHTRRADLDTLILDRARELGAYVVEETTVKDVIQSDTGRVTGVRFTLRGSAGDYEASASLVVDASGQSRVIGRKFSDITWHNELRNVAVWTYYDNCDRLPGDEWTNILIEGTADGWFWGIPIDKGTMSVGYVTKSDLANADDQSLEQLFLRERDKTTRLKGLLANARQHAGYRTARDWSYTNETFYGDGWVLVGDAAAFVDPLFSTGVALATLAGSSLSKVVNRILEHPAIEEKALDRYAGNYRAFFDEIRNFVERFYDRTKYKEYYYDLAQEIVDPEQLHAPSTDFVTLISGLSGKHPLLKINLDDLVANVTEP

SEQ ID NO: 88839 - protein, 535 aa, Saccharopolyspora antimicrobica
  REGION 1..535: note = tr|A0A1I5C4W9|A0A1I5C4W9_9PSEU Tryptophan halogenase; OS = Saccharopolyspora antimicrobica OX=455193; GN = SAMN05421805_10766 PE=4 SV=1
MTQTDAAAKNLGDPGKTRRVVVVGGGTAGWMTASYLTAAFGDKIDVTVVESAQIGTIGVGEATFSDIRHFFEFLRLAESDWMPACNATYKLAVRFENWREPGHHFYHPFEQMGSIDGFPLSDWWLRYPRTDRFDKDCFVMASLCDAQRSPRYLDGTPVDQGVFETGHGEETARATMAEYQGAQFPYAYHFEAHLLAKFLTKYATDRGARHVVDNVVDVALDEHGFISHVKTAEHGELAGDLFVDCTGFRGLLMNKALGEPFISYQDTLPNDSAVALQVPLDMDREPLRPCTTATAQEAGWIWTIPLISRIGTGYVYASDYCEPEEAERVLREFVGPEAADVEANHIRMRIGRSRRSWVNNCVAVGLSSGFVEPLESTGIFFIHHAIEQMVKYFPSGRDNDRLRNMYNRSTANVMDGVREFLCLHYRAAKRADTQYWKDTKTRPVPEALEERLENWKYKVPDAETVYPYYHGLPPYSYNCILLGAGGFDIRHSPALDMADETAALAEFERIRLKAEKLVQELPTQNEYFAKMRENA

SEQ ID NO: 88840 - protein, 497 aa, Pseudoalteromonas sp.; identical to SEQ ID NO: 88439
  REGION 1..497: note = tr|A0A1Z9WXS0|A0A1Z9WXS0_9GAMM Tryptophan halogenase; OS = Pseudoalteromonas sp. TMED43 OX=1986613 GN=CBC03_16955; PE = 4 SV=1

SEQ ID NO: 88841 - protein, 500 aa, Rheinheimera sp.
  REGION 1..500: note = tr|A0A101M6D7|A0A101M6D7_9GAMM Uncharacterized protein OS=Rheinheimera sp. EpRS3 OX=1712383; GN = AR688_01170 PE=4 SV=1
MVSALKKMNKVVIVGGGSAGWITACLLRKQLAADITIELVGAPEIATIGVGEGSTPQLRGLFNTLGIPEAEWMSACNATYKLGIEFTGWTDTAGYSRYFHPFVAQTDLHTQDVFIHSCYYRRLGLDVDANPDHYFLNAALAQQGRQPLADASFPFSVEYGYHFDSTLLGQFLATYAKSQGVTYREFSVSDVVIAEDGSINALVSAQHGVLEADFFVDCTGFSARLISQALGVKFISYSANLFNDAAVVMQTPCLPDEKLMTQSTALRNGWAWRIPLTSRVGNGYVYSSKYCSAEQAEQELRAHLGVDDSVAARHLKMKVGRLEQHWYKNCLAVGLSQGFIEPLEATALHLVQTTVEMFADCLVKGNYSDALQPEFNQRINSRFEGIRDYIVGHYRLNNRTDSQYWRDNAANEDLPLHLKGLTRAWLSREDIGPYLTANKLDSYYSINSWHCLFSGYGIYPSQLVPADSTKPEVQSFLRRIDDVGHFNRMCSQHYPLNKQR

SEQ ID NO: 88842 - protein, 500 aa, Rheinheimera sp.
  REGION 1..500: note = tr|A0A101M6U9|A0A101M6U9_9GAMM Tryptophan halogenase; OS = Rheinheimera sp. EpRS3 OX=1712383 GN=AR688_01175 PE=4; SV = 1
MHQNGIRHIVIAGGGSAGWMAASALAKVFKDKIRLTLVESTDIGTVGVGEATIPPIQSFNQLLGIDERYFIQQTDATIKLGIEFAGWGQASSQYMHAFGDVGSNVGLTHFINYWLRQSPKNASDYWRYSLNFLAAKANKFSPAKTLPGTTIPGLSYAYHFDASAYARVLRDYAVKLGVHRIDAKISRVNICPASGNIRDLILDDNQVVAADFFIDCSGFRGLLIEEALNTGYESWQHWLPADSAIAIQTRQGNTTQPYTRSIAHAAGWQWHIPLQSRTGNGMVYSSTFMQQEQALDTLLQHLPEGERSDPKFLRFTTGRRKKQWHKNCLALGLSSGFLEPLESTSLHLIQSGIGRFLKLFPQNPADTCLADEFNRQADAEMEAIRDFIILHYHLNQRSEPFWKRCREMAVPDTLTERIALFADSGRVFRRSDELFSEMGWYQVLLGQGIMPHSYSPLANTLPEAECSDFMSNISAVFSGYVSQLPTQESYLHGISAKKNE

SEQ ID NO: 88843 - protein, 509 aa, Shewanella sp.
  REGION 1..509: note = tr|A0A2N7CLR6|A0A2N7CLR6_9GAMM Tryptophan halogenase; OS = Shewanella sp. 10N.286.51.B7 OX=1880836 GN=BCU84_20390; PE = 4 SV=1
MEVQHIVIIGGGTAGWLAANHIGKAAQLLPNVKVTLIESPDIPTIGVGEGTVPAIKQSLQSFGIRETDFIRDCDVSFKQSIKFCNWLDKHKHGVGNSYHHLFDVPSPLGTDLTDYWLNQASEQAFSQAVSPQHYICESLKAPKLITTPEYSGKVSYAYHLNAAKFAKLLAGNAITKFGVKHLHANVLDADIDQQGNLTQLKTDKFGDLKFDFYIDCSGFESILLAKKLKVPFVDKSKQLFVNKAIVAQVPITTKDAIPPYTIATAHQAGWIWDIALPERRGTGFVYSDNHMSSAEAEKKFDRYLGGKLANLESREIPMKVGYREQFWFKNCVALGLAQGFLEPIEATSILLTDFAAGYLAKRLPQTMGQMLSLSARFNDTMTYAWERVVEFAKLHYCISDRTDSDFWIDNRHPDSIPEALKQKMMLWQDYSPITDDLFSRFEVFNIDNYLYVLYGMKYQTQSSQLDRLYCNTAKQQVARIQQIGQSLAAELPEHRALLNKINQFGLKTI

SEQ ID NO: 88844 - protein, 498 aa, Microbulbifer sp.
  REGION 1..498: note = tr|A0A510IUN0|A0A510IUN0_9GAMM Tryptophan halogenase; OS = Microbulbifer sp. GL-2 OX=2591606 GN=GL2_26880 PE=4 SV=1
MTCIKRVVIAGGGTSGWLTAAAIAKLYGKQVKVTLVDCAEIGKIGVGEATIPPLRNFHRLLGIEESEFMAATQATFKLGIEFNNWARQGDKYIHSFGVTGKDCWACDFHHFWLAGYNKDLADSFGEYNVERQAAIQNRLLPGDSGKLNYAYHLDSGLYAEFLRSHALKHGVRHINGKIEHVDMSVSDGSIQALILNDGSKIDGDLFIDCSGFRAILIGEALNISYEPYGHFLPCDSAIAIQTESASELPPYTESIAHEFGWQWRIPLQHRFGNGLVYCSRHVSDGLAEERLLQSLQTDPVSEPRRFQYQTGRRIQAWHKNCVAIGLSSGFLEPLESTSIHLAMSAILRLLKFFPRESIVEEAVLSFNRQTQDEMEMIRDFIILHYKATERNDSDFWRYCARMEIPETLEHRIKLFNSNGGLLIANKELFQVDSWAQVMLGQRILPKDHHPIVDLMGDDELDRFLKSYKNFVSDRVGAFPLHKKAIENYCRSCVTEESS

SEQ ID NO: 88845 - protein, 506 aa, Shewanella sp.
  REGION 1..506: note = tr|A0A2N7CX26|A0A2N7CX26_9GAMM Tryptophan halogenase; OS = Shewanella sp. 10N.286.51.B7 OX=1880836 GN=BCU84_03880; PE = 4 SV=1
MQKQASEKANASNKPIRKVVIAGGGTAGWMAAAALTKLLGKNLEVVLVESDQIGTVGVGEATIPTLHIFHRLLGIKEQDVMAATNATFKLGISFENWHDVGKDYIHSFGFLGKDCWACGFQHFWLKGQQRGIVSEIGDYCTEHLAAREGRFAVLPNQDYNHAYHMDATLYAKFLRAIAEQHGITRIEGKINDVLQYEDSGNIKALQLDSGEIVEGDLFLDCTGFRAMLIEGTLNTGFDDWSHWLPCDSAIAVQTKTTEKPIPYTRSIARDSGWQWRIPLQSRTGNGIVFCSKYMSDEDAKTTLMNNIEGEPLTDPRVIKFRTGSRRKTWHKNCIAIGLSSGFLEPLESTSIHLIQRGIVRLLQMFPSQGIVEEDINEFNEQTRTETENIRDFIVLHYKVTDRTDTRFWRYCKNMSVPSSLQHRIDMFDASGKVYKHGNELFGESSWIQVMMGQGLAPKQYHPIVDMMEDEELEHFLGSIKAKAKQKVSNLPDHYDFVQHYCKSKML

SEQ ID NO: 88846 - protein, 589 aa, Fischerella thermalis
  REGION 1..589: note = tr|A0A2N6MUD6|A0A2N6MUD6_9CYAN Tryptophan halogenase; OS = Fischerella thermalis CCMEE 5201 OX=2019672; GN = CEN39_18795 PE=4 SV=1
MNTIAQQLEYDVVVMGAGYAGVCQARHLLLKIPNIRLAIIDPRSQDPSEVNHRPGESTLEAASMFLFSELGLHDYLLEEHTHKAGLNWHWPKDVDKTESLDDYYNIWVNRQLTIPSFHLNRLKFDLDVLEMNKQMGAHFYNGRVVDVDLTPGDEHNTVKVKLHNDYIHLKAKHLIDAAGRKFIIGRKTDNLLLNPKELPVNIKPSSGWVLVRNVDRTIFDNSVYSTESLESRYYATNHWMGKGHWLWMIPVDSQSKELSVGLLHHPDVIPCELVNTKEKFYAFIKANHNLVYKVLQSGEHVEFNYWPRIAHTSKKMFSRDNWYVIGDAASNFDALYSTGTTMSCIAIESVTEIIRAKLANEKDAEKKREAYHHFNLALARFMNVAVSSQEKQVGNASIMSWRLYGNYMAWFNTLLPIYVGKWHLDLLFSRLALIFFKLNGSFWVDTYKQLSYLAERGTNIGFMDQLRADQLIGGYHPDKFFDNFLENAKLEPSKLNVFAGLRAYCFYIVIWFVMWQWKGFGPIGLLRPRNIFQIVRLLLTGVVMAIAELTHKLKLLGQPTNSIVAKTREEFKSYHYQSRLQNWVGSSEV

SEQ ID NO: 88847 - protein, 606 aa, Fischerella thermalis
  REGION 1..606: note = tr|A0A2N6MU96|A0A2N6MU96_9CYAN Tryptophan halogenase; OS = Fischerella thermalis CCMEE 5201 OX=2019672; GN = CEN39_18760 PE=4 SV=1
MLMNNTQSQVYDVVIMGAGMAGICQARHLLLNIPNIKIALVDPRPEERADKDMKVGESTVEISTLMICKELGLYDYMIENHPPKFGLNFHWPKDPAKTENTDDYFHLWATRQPPLASVLINRPKFERDVLKMNKEMGVGFYNGRVVDVDLTSGDELNSVQVKVGDQQLELKTKHVIDAAGRKFIIGRKTDNLVFGPENLYGVNNGSAWMRVRNVDRTIFHSGYDPANATCSHYYATNHWMGHGHWVWMIPTDTESMELSIGLVHHHEVIPAQSVNTKEKFSAFLEANHNVVYQLLKSGEEVDFHYLPRLAHKSKQMYSRDNWYVIGDAAAMFDPFYSMGMTMMSFQIENVTEIIRAKFAGEADVERKRVVYNNFAVNMIARNNHLVSHHEKQLGNASIMSWRIFLENMWWFGVLIPMYIGKWHLDLPFLHKFGKQGRGAVVAETLEEAYKLFDKLLEKKQNLGFMYTHRTDELPFGYSITKDVSKYIGLSKYEPKHCNIYAEMRNTYFFVALWYLKLLWKGFGLPGLLAPKNLKRVFTLLKISAQSYVDELIFDYQTRNIPTNSAVAKQREEFKTYQPRTELQSWQNLATVDANDIKLPELAEVGS

SEQ ID NO: 88848 - protein, 507 aa, Microbulbifer sp.
  REGION 1..507: note = tr|A0A510IWF8|A0A510IWF8_9GAMM Tryptophan halogenase; OS = Microbulbifer sp. GL-2 OX=2591606 GN=GL2_18110 PE=4 SV=1
MSNHNKKIIILGGGTAGWITANLMAAHWQDKGFDITLVESPDIGIVGVGEGSTPPLKGFMDTIGVSEAEWMPECNATYKVGITFKGWSTKPGFSEYVHPFVGQPDQFTVPAFFHNSFLRRKGVDLEGHPDHFFLATEMIRQKLSPVAPENFPFEIAYGYHFDSGLLGKYLRRVAERKGVKYKVATVTGAMLDNLGNIDYLKTTDGEVLKADLYVDSSGFRGNLIQQTLKVPFISCAESLFNDSAVVFATEQEEDYAPHTISTALKYGWAWKIPLTNRNGNGYVYSSNFVDDDKAETEFRAHLGLLDSDAEARRLKFKVGRVAQHWAKNCLAVGLSQGFIEPLEATALDMVQETVVRFIEAYNNGDYTDKFRDEFNNRINARFDAVRDYIVCHYRISSRTDTDYWIANGTNEKISPSLRSIIMSWMAGKNLTDELMNQKLDVYFPNVSWNCLLTGKGIYPIQEQLRPGNELAHKYKIEEIRGFNRRCALNFKPHSQQLNLLSLGVIGD

SEQ ID NO: 88849 - protein, 517 aa, Catenovulum sp.
  REGION 1..517: note = tr|A0A2S0VNR4|A0A2S0VNR4_9ALTE Tryptophan halogenase; OS = Catenovulum sp. CCB-QB4 OX=2172099 GN=C2869_05055 PE=4; SV = 1
MTTPVRNIVILGGGTAGWLTAGTIAAKLKKEFEQGYSITLVESPNVPPIGVGEGTWPTMRRTLKNMGVRETDFIRECQVSFKQGAKFAQWVTGKPDDFYYHPLVLPQDFEQTNLVPHWQSIAQAPSFAQAVSPQETVCEMGLAPKKITTPEYQADINYAYHLDAGRFSTFLKNHCTSQLGVRHVLADVTQVVSATNGDIQSLKTQQGKEVSGDLFVDCSGFQSLLLGQHYQVPFVSCADVLFVDNAIAVQVPYQAPDTPIASHTISTGQSAGWIWDIGLTQRRGVGHVYSSRHISQDQAHHELLSYIKPFCQDPTQLNFKQIPITSGHRKVFWQNNCVAVGLSAGFLEPLEASALLLVEISANFIAERLPTGRQAMDWVAKRFNQTADYRWQCIVDFLKLHYMLSQRQDTAFWRDNRDEATIPERLLERLALWKYQTPWQDDFDQTTEVFPAASYQYVLYGMGFETLASPFGLSAASKKIAMTSFNKNIALTQSLLSSLPSNRELINQIKQYGLQPL

SEQ ID NO: 88850 - protein, 519 aa, Microbulbifer sp.
  REGION 1..519: note = tr|A0A510IWV9|A0A510IWV9_9GAMM Tryptophan halogenase; OS = Microbulbifer sp. GL-2 OX=2591606 GN=GL2_26890 PE=4 SV=1
MGRVTKRVVVLGGGTAGWLTAGVIAAEHCAADKSGLDVVLVESPDIPIIGVGEGTWPTMRNTLRKIGLSETQLFRECDASFKQGAKFCGWVNGGEDDFYYHPLSVPEGYGEIDFAAMWCQENTAETFSDRINYQSHLCERGLAPKLITTPEYTAIANYAYHIDAVKLGKILASHCVEVLGVGHHRVKIIGVRSHENGDISSLLKEGGGEICGDLFIDCSGMSSRLLGQHYNIPVIPCGDQLFNDRAIATQVPYIYESEPITSHTISTAQTAGWIWDIGLSSRKGIGHVYSSAHISDSSALGELHTYLARNLNECEINRLNFRKLKFSPGYRAKFWHRNCVAVGMAAGFVEPLEASALVLVEQAAEMISADFPAHRAIMDIIAERFNSRFKYRWSSIIDFLKLHYAITHREDTQYWRDHACVDTASTRLSEWLKLWAVQPPCKYDFPHIDEVFASASWQYILYGMGFETEHRSIKSRSYDSIAYQNYVSSNKEFVEQCISSLPSNRELIDKIKYYGFQQV

SEQ ID NO: 88851 - protein, 535 aa, unidentified
  source 1..535: note = Acidobacteriia bacterium
  REGION 1..535: note = tr|A0A321LZQ9|A0A321LZQ9_9BACT Tryptophan halogenase; OS = Acidobacteriia bacterium AA117 OX=2169412; GN = DMG65_04705 PE=4 SV=1
MAKNFKVVIVGGGTAGWMTAAYLSKALEQGVEICLVESSNINTIGVGEATFSTIHLFFDFLGLTEDDWMHECNGSYKVAIKFVNWNAEHRDFYHPFQRFDTVQGRSLAEWWLKCSDGRVPFDRACFVVPSICEAKRSPRYLNGQVFDNKADSYLTSPDPNRALLLDDLQIQYPYAYHFNASLLAKFMSRYAQNRGVDRIDDEVQEVHLSENGHIHSIDTKEHGRIEADLFIDCTGFRGLLINKALKEEFISFSDSLLCDSAVAMQVPRDGEAHGIQPYTTATTLSAGWVWNIPLYDRTGAGYVYSSAFLSSDEAEKEFRNHLGKDSDECKALHIKMRIGRQRNSWVKNCVAIGLSSGFVEPLESTGIFFIQHGIEQLVNHFPSKEFDEDNIKSYNQAVAGCIDGVREFLTIHYVASTREDTAFWRASKREIKIPRELAERLNLWKHCLPTDRTINQNYHGFESYSYSVMLLGLGHRPEYSLPLLNHMHDSKALAAFDMIGEQSLHLTSTLPSLYEYLSARYKLLRPRAESVLLAV

SEQ ID NO: 88852 - protein, 499 aa, Alishewanella jeotgali
  REGION 1..499: note = tr|H3ZDZ6|H3ZDZ6_9ALTE Tryptophan halogenase; OS = Alishewanella jeotgali KCTC 22429 OX=1129374; GN = AJE_07890 PE=4 SV=1
MNNTHLNAVRRVLIVGGGTAGWMTAAMLARILGEQIELRLVESDAIGTVGVGEATIPAIQHFNAALGINEAEFLRETKGSIKLGIQFENWGGLGESYMHAFGPVGRQLGMASFHHFWLAARAKGEQSSFWDYSLNYQAAKAGKFSPQSQLPGSPLPGLQYAYHFDAGLYAAFLRRYSEQRGVTRVEGLIAHVEQQPSGDIATVVLTDGRVLAADLFIDCSGLRALLIEQTLAAGYDNWQHWLPCDSALAVPSEARYPIVPYTRSIAHGGGWQWRIPLQHRTGNGLVYSSRFLADEQAKQILLGNLDAPALAEPRKISFVTGRRKQQWRRNCVAIGLSSGFLEPLESTSIHLIQSAVVRLVQCFPATRDMAALSAEFNRQSQHEFEAIRDFIILHYHLNQRTDHPLWQYCREMTLPAGLAQRLELFQQSGQVFRQQDELFTEVAWQQVMLGQNLLPVSYHPLANSLSYEQLQGFFTDLRQVITKTVTAMPTHQNLLQQLG

SEQ ID NO: 88853 - protein, 518 aa, Pseudoalteromonas sp.
  REGION 1..518: note = tr|A0A1Z9XQ00|A0A1Z9XQ00_9GAMM Tryptophan halogenase; OS = Pseudoalteromonas sp. TMED43 OX=1986613 GN=CBC03_02640; PE = 4 SV=1
MNQQNKKIKTVVVVGGGIAGWLTAGRLAAHHKSNPPDGLNVVLVESPNVPIIGVGEGTWPTMRSTLIALGISETDFIRECEASFKQGAKFAKWVDGSNDDFYYHPLVLPQGFSKTDMAGHWLNNTAESTSFSNAVCYQEAICEQGLAPKTIRTPEYAALANYAYHLDSAKFAVFLQKHCTQELGVKHFLADVTQVNSAKNGDIASVTTKQQGEISGDLFVDCTGFSSLLLGEHYKVPFMPCDDVLFIDTALAVQVPYENEDESIASHTISTAQEAGWIWDIGLQHRRGIGYVYSSKYSSEAQAREKLKEYVGDKIESLTIRKIPIKSGHRSHFWQNNCVAVGLSAGFLEPLEASALVLVEMSAQMISEQLPHTRDIMDITAKRFNETFSYRWEKIIDFLKLHYILSTRDDNAFWRDNRDPKTIPQSLQDLMKLWQYRAPADHDFTSNNEVFPAASYQYVLYGMGFKSDYSTTSYMLKDTDFAKSQFDKNKSMINQAVTNLPSNRELLNKIKSHGFSTI

SEQ ID NO: 88854 - protein, 504 aa, unidentified
  source 1..504: note = Altererythrobacter aquimixticola
  REGION 1..504: note = tr|A0A4V4U8X8|A0A4V4U8X8_9SPHN Tryptophan 7-halogenase OS=Altererythrobacter aquimixticola; OX = 2489173 GN=E5222_04560 PE=4 SV=1
MTDTAVNDFVIAGGGTAGWMTAAALSRFAPPGTSVTLVESEAIGTVGVGEATIPQIHLFNSALGLDEAEFLRETRGSFKLGIEFDGWRREGESYMHAFGDVGRPLGLLPFQHYWLRAQHAGFAKPLQRYSLNELAARTMRMYRGKTAAGREMPYAYHFDAGLYAAYLRRFAEARGVTRVEGRIAKVARHGESGDIAALELEGGERVEGSFFIDCTGFRALLIEGALGAGFDDWSNFLPCDRAMAVPCEGGGDFTPYTRAIARKAGWQWRIPLQHRIGNGLVYCSDFLSDDEAAETLLANLDGAPQAEPRPIRFTTGKRCVHWKNNCLAIGLAAGFMEPMESTSIHMIQSAISRFLAVLPRGRGEPATVDWFNAQSSFEWECIRDFLVLHYTANEREGRPFWDHVRSMELPATLTARMEQWRAGGFIHREHEELFTEIAWFQVFAGQGVEARGYNPMADTLPEAELRALLDETEASLVEQVKPMPRHLDFLQGFVTGKTNEKVTA

SEQ ID NO: 88855 - protein, 508 aa, Brevundimonas sp.
  REGION 1..508: note = tr|A0A0S9NSC1|A0A0S9NSC1_9CAUL Tryptophan halogenase; OS = Brevundimonas sp. Leaf280 OX=1736320 GN=ASF31_02355; PE = 4 SV=1
MMIQNDAGPIRKIVILGGGTAGWMTAAALSHRLAGGAVSIELVESDEIGIVGVGEATLPHIRAFNTAMGIDEQTLIDQTQATFKLGIQFVDWGRPGDSYIHPFGAYGEPIEGIDFHHVWAARRAMGDAADISDYSYPVRAAEANRFQRPVSDPGSMLSTFSYAFQFDASLYAAFLRQVSCGRGVVRTEGRVVDHVLNGATGDVDAVVLSDGRRVSGDLFVDCSGFRGRLINQALETTFEDWSHWLPCDSAFAVPCRTTAPVGPYTRATARAAGWQWRIPLQHRTGNGHVFSSAHISDEDAVATLMSTLEGPALAEPRRLSFKTGRRHKLWSRNVVAIGLSGGFLEPLESTSIYLIQLGITTLLDLFPDRVGMAADAQEYNRIMALEFDRIRDFLVLHYVANQRDEPFWREMRTMAWPDSLSAKVEAFKSRGLLPDYDIGVFLPPSWLAVLVGQNIVPNGWDPRVDRLEPHVLFDKLAALRDDVRSTVDRTPDHMTFIRQAAQRAGGVR

SEQ ID NO: 88856 - protein, 543 aa, Kangiella koreensis
  REGION 1..543: note = tr|C7RB80|C7RB80_KANKD Tryptophan halogenase; OS = Kangiella koreensis (strain DSM 16069 / KCTC 12182 / SW-125) OX=523791 GN=Kkor_1103 PE=4 SV=1
MNKRRRLLIVGGGSSGWIVAAYLNSALKALKAPIDVEITLVESPDIPRISVGEATIPSIRHLLATIGINETDFMVATDATFKQSIRYVNWEKLNSFYHHPFTRVRKQPLDDLAENWLKSDRSIPFMETCSEQPIICEMGLAPVMYSPWDMGTPLSYAYHMNAQKFADYLRDISVSRGVNHVLANVTDIEMKSDKQIKAVNTDNAGRLEADLFIDCTGFRAKLIEEKLGVGFEDCSQWLLCDRAVAMHVPYDKYYPGMVRPYTTATALSNGWVWDIPMQSQRSLGYVHSSAFISKEAAERELRAYQGGSCDELPARFVDFKVGRRHKAWEGNCIAIGLSGGFIEPLESTGLYLSDLGAVALAEYFPYRDEDIEALSFRYNRILSNRFYEILDFINMHYCLTRRADTEFWRTVQKPEHITDRLKTKLEFWERKIPSMSDFDDQFFLNQNTGSLGNLGANFDSRAPVDTAGLWNHESYQCILYGMHFKSKIPSIDISTASQLNVHPYILNRLQQAKNKLPKHADWLQRTLGMRQYRYSSKPAGWVV

SEQ ID NO: 88857 - protein, 508 aa, Pseudoalteromonas sp.
  REGION 1..508: note = tr|A0A1Z9XI44|A0A1Z9XI44_9GAMM Tryptophan halogenase; OS = Pseudoalteromonas sp. TMED43 OX=1986613 GN=CBC03_07160; PE = 4 SV=1
  VARIANT 33: note = Xaa can be any naturally occurring amino acid
MNKAIKTIAVIGGGTAGWLSAAIIASYHQGNKXDGLKVMLVESSDIPTIGVGEGTWPTMKNTLQQIGLREVDVFKACNATFKQGGKFVNWTHGNNDFYYHPFTVPLGYGRIDLAPYLDNVENFAQQTNFQHDICEANLAPRGIAQGEYQANCNYAYHLDAGAFAELLKQHCKSKLGIEHIIGTVDQVKLDESGAIDTLTLTDQTRTINADLYIDCTGFSSLLLGQALNVPFKKMDHVLFNDSALAMQVPYDEGDESLASHTIATAQNAGWIWDIGLTHRRGVGHVYSSKFLSDEEAEQNLRNYLGDAAKGLTARKISFESGYREKFWHKNCVAVGMSAGFVEPLEATAIMLVEISSRFVAEHMPADTQVMPIVAKRFNEQMDYRWQRIIDFLKLHYMLTKRPEPYWQAHVQPQSIPQSLQEDLLLWGTRGPLIQDFHGALELFPAASYQYVLYGMGFKPDFTKQAYLYSNDAQANQIIERNSQLTQQMLQTLPPHRAYIEQWLAANPV

SEQ ID NO: 88858 - protein, 522 aa, Streptomyces sp.
  REGION 1..522: note = tr|A0A1A9CX06|A0A1A9CX06_9ACTN Tryptophan halogenase; OS = Streptomyces sp. OspMP-M45 OX=1115570 GN=YUMDRAFT_01468; PE = 4 SV=1
MARSVVIVGGGTAGWMTASYLKATFGDKLAVTLVESKNVPTIGVGEASFSTIRHFFSYLGLAETDWMPECHATYKLGIRYDNWRAEGHHFYHPFERPRIVEGVSLADWWLHKRPSADYDRDCSVIAALCDAKRSPRRLEGSLLELDAVEHEAEHASRSTMAEQNTQFPYAYQFDATLLAKLLTRYGTDRGVRHVLDDVVHAEVDERGDVTHVRTKESGDLAGDLFIDCTGFRGMLLNKRLEVPFLSYQDSLPNDSAVALRVPMEMSDQGMGPYTRSTAQDAGWIWTIPLSDRIGTGYVYASDYCTPDEAERTLRSFVGPGSEDLTANHIKMRIGRSENSWVNNVVAIGLSSGFVEPLESTGIFFIQNGIEQLVKHFPGGRDDHQLRRSYNRQVANVMDGVREFLVLHYIAAKRDNNAYWQDAKTRTVPDALAERIEQWKVKLPDADTVFPYYHGFEPYSYTAMILGLGGLDVRARPGLALMDDTAASKELRQVRDQAASLVERLPSHWDYLAHVARLKKARS

SEQ ID NO: 88859 - protein, 516 aa, Novosphingobium sp.
  REGION 1..516: note = tr|A0A4R1VYX2|A0A4R1VYX2_9SPHN Tryptophan halogenase; OS = Novosphingobium sp. ST904 OX=1684385 GN=EDF59_11522; PE = 4 SV=1
MAKNAIRSILIVGGGTAGWMTANLLATRLRRLPIEITLVESPDIRTVGVGEATVPAIRDYFKAIGVTEFEVMRATQGTVKLGIEFQDWARPGERFFHPFGRYGVDAFAVPFHQFWLKRRMAGDETPLSAYCLATEAASRGLVLLPPDQPANDLGVFDWAIHFDAGLFARFLSRRARDDLGVRHVEGTIAGVNRDGETGRIASVTLEGGAELAADLFVDCSGFRSLLLGQALDVPYEDWTHLLPCDRAVAVPCTHGEELAPFTRSTALSAGWQWRIPLQHRVGNGYVYSSRHISDDEATATLLSRLEGETLAEPNMLRFRTGHRQRLWEKNCVAVGLAAGFLEPLESTSITLIQSAVERLLDHFPDRDFDPSLADEFNRITRLEYARIRDFLLLHYWANRREGEAMWDECRALELPETLAARIRAFTGGGKLPRFEWDSFQSPSWLSMYAGFDIWPPRHDPLADQLTVEELGASFAKMREAIGRAAALAVPHARFIAENCAAPAAPHDHGRVPAHSA

SEQ ID NO: 88860 - protein, 510 aa, Shewanella violacea
  REGION 1..510: note = tr|D4ZH41|D4ZH41_SHEVD Tryptophan halogenase, putative OS=Shewanella violacea (strain JCM 10179 / CIP 106290 / LMG 19151 / DSS12) OX=637905 GN=SVI_1019 PE=4 SV=1
MNINKIAIIGGGTAGWLAANHLGKVLCKQAGVSITLIESPDIPPIGVGEGTVPDIKKTLASFGISETDFIRQCDVTFKQSIKFVNWMDKETHGKGNFYHHLFDVPSREDSEVLTAHWLAENSDAPFAQQVSAQHQVCEQGKAPKGITTPEYQGELAYAYHLNAAKFAHLLADNAQTKYGVKHHLTHVSRVNLADDGSIRSLVTSEDDDLEFDFYIDCSGFESLLISKAMNVPFIDLSDKLLVNRALVVQVPTYEGADIPPYTLATAHKAGWIWDIALPTRRGVGFVYSSNHMTDEEAETKLDYYLGGKDPKLVYKKLPMKIGYREKFWHKNCVALGLAQGFLEPLEATSILLTDFSASFLANRFPVKKSELAVLEKRFNYAMGYAWERVIDFVKLHYCLSDRHDSHFWNENRDLSTIPNSLQEKLKLWESSVPITDDFFSQFEVFYLENFLFVLYGMKFKTKPLALLPEVRESALVGLRKREEVNNYLQSKLPKHRELLDKINRYGLQSV

SEQ ID NO: 88861 - protein, 513 aa, Saccharomonospora cyanea
  REGION 1..513: note = tr|H5XI16|H5XI16_9PSEU Tryptophan halogenase; OS = Saccharomonospora cyanea NA-134 OX=882082; GN = SaccyDRAFT_1748 PE=4 SV=1
MIRSVVIVGGGTAGWMTASYLKAAFADRVDVTLIESARVGRIGVGEATFSTVRHFFDYLGLDEREWLPKCAGSYKLGIRFENWRKPGEHFYHPFERLRTVDGFNLAEWWLAVGDRSQPFDRQCFITTALCDAQRAPRMLDGSLFASGLDDSFGKSTMEQQRAQFPYAYHFDADGVAAFLAEYGIARGVRHVVDNVSGVGQDERGWITRVHTEEHGSVEGDLFVDCTGFRGLLINQTLGERFESFEDVLPNNRAVALRVPRDDATDMNPYTTATAMTAGWMWTIPLFRRNGNGYVYSDAFQTPEEAERELRAAVAPGRDDLEANHIRIRVGRNERSWVRNCVAIGLSSAFVEPLESTGIFFIQHGIEQLVKHFPDRDFDERLIDDYNRRVAHAVDGVKEFLVLHYRAAERADTPYWKDVKSRPLPEGLRYRLELSESHLLDEETVYPYYHGFESYSWITMNLGLGRIPPTARPAVRQLDPTNALAEFARSRTEADKMVAALPSCYEYLAALNER

SEQ ID NO: 88862 - protein, 604 aa, unidentified
  source 1..604: note = Legionella clemsonensis
  REGION 1..604: note = tr|A0A222P684|A0A222P684_9GAMM Tryptophan halogenase; OS = Legionella clemsonensis OX=1867846 GN=clem_13955 PE=4; SV = 1
MLRPKKHHIAIVGSGPIGLYAAILLKKRYGENIHVTVLDSRANSYERPGIIAKQAVQIINSSFQSKGIPEISVPDSRGEPANSVFIADLQRALLESAINHGVTLIQSSFAELEKNQIKTKEGETLSCDLLIDCSGESRAVARFTTQKFGEDSTFSIQTIAENPLKNHFIAYVHMDEENSKRCKILDLNSQDPLVYAKAMEDLREKHGWKEFAEPEMVVSKWTKEGEDARYCFYFEIPEKIAREDIKVQEAYLKDLLLLKTGQSIVFKREEGRLKFLPFDVDPKYVPNPVNTKNYAIPVVVCGDALMSPEYRFGTGVANGVRCAIELVDAIRVTPLELSIHAGQYNTAISQVIQSHLKEVTSSYQFKRNELANRDLLEAFSMYKKGFIKAKETGGEQLEDLEKIERGLISLADRLKKSADEKFRSAIEKKNKQQHFKSDMKEAELLYKSALEIYENYTPSHQSSSLLHAEKSKIYSNQAKVFFHTDRIEDAIEHAELALKIAVQYEVPTIIKNASLALENAYNKMLSDHKQNFPNDKWLEKIELNEKIANIATKYLEKDAKPYLEEIEKLRQKLKEAQEAIKKEVSTLKKETEMNDSPLDLGNLL

SEQ ID NO: 88863 - protein, 507 aa, Sphingomonas sp.
  REGION 1..507: note = tr|A0A2U0VGX2|A0A2U0VGX2_9SPHN Tryptophan halogenase; OS = Sphingomonas sp. CF311 OX=2135485 GN=C7501_0411 PE=4; SV = 1
MGKRRILIVGGGTAGWLTAAYLARFLDLADQAQIEITLLEAPELGIIGVGEGTFPTIRSTLKFLGIDETRFIRATSATFKQGIRFNDWLHAPQADGTRHHYLHPFEAPFYTEGTSLVPYWLLQDAGTRPAFAEAVTIQNRVAESRRAPKKQGEGEFSGPLNYAYHFDAARLAKVLEARAIELGVRHVTGLLTGVELGEDGAIARVHTRELGALEADLYVDCSGFRAELIGKALGAEFRSARHVLFTDRALACKIPYADPDAPIESFTIAAAHAAGWTWDIGLERARGIGTVYSSAHMSDDEAATVLRGYIGHDDYKARIIPFEPGYREAQWVKNCVAVGLSGGFLEPLESTGVVLIEAAVGMLAELFPHNGPVDAPATRFNELIVGRYERIINFLKLHYCLSRREEPFWRDNADPASIPEALQELLRQWRHRPPNRFDFLLDLESFAFFNYQYILYGMDYRTDLSGGRGDFPNVAAAEKLFARIRGFSERATEDLPTHRALIAAINR

SEQ ID NO: 88864 - protein, 589 aa, Microcystis aeruginosa
  REGION 1..589: note = tr|A0A552G2E0|A0A552G2E0_MICAE Tryptophan halogenase; OS = Microcystis aeruginosa Ma_QC_Ca_00000000_S207; OX = 2486251 GN=EWV91_02360 PE=4 SV=1
MNTTQALHYDVVIMGAGFAGLCQARHLKLKIPNIKVALVDPRPEQRTDKDLKIGESTIEIAALFLAKELGLHDYLIENHAPKQGLNFHWPKNPAKTETIDDYYHAGSNRQVPIPSFQINRAKFEQDLLKMDKAMGITFYNGQVVDVDLTPGDAIKTVKIKVGDERIDLQAKHVIDAAGQKFIIGRKTDNLLFGPENLMGLNTGSAWVRVKNVDRTIFHSGYDPLNASTSHYYSTNHYFGEGHWLWMIPIDTQTMELSIGVIHHHDVINSTQVNSQEKFHDFLRNNHQILANIIDSGEVVDFHYCPQISDKSKTLFSPDNWYVLGDTDYIFDAFYSYGTTTIALAIEGITEIVRAKLAGEESAEQQRIAYNEFNLAYSRSVNRLYWGHAKQLGHASVMSWRIYFEYMWWFGVQVPMYVGKWHLDLTYIPIFLKTLNSNIDGLFADLNQQFTQLAEADVNIGLMDCYRGDQLFNGYHTLKHFDDFLENTKLEPRRCNVFAGLKATCFYAALWYALFQWKAFGLRGCLNPRHIYHFFRLLGLSGQATIGELIYKFKTKGLPANSEIEAMRQEFKTYQYQPTLQPWLTEASHS

SEQ ID NO: 88865 - protein, 505 aa, Sphingomonas sp.
  REGION 1..505: note = tr|A0A0Q4HPN2|A0A0Q4HPN2_9SPHN Tryptophan halogenase; OS = Sphingomonas sp. Leaf226 OX=1735691 GN=ASE77_16025 PE=4; SV = 1
MNEHSIREVVIVGGGTAGWMAAAALSKFLGGRQGQGQPRIRLIESEEIGTVGVGEATIPTIATFNQMLGIDENDFIAKTQGTFKLGIEFVDWRRIGERYFHPFGQFGHDIEGLNFHQFFLKLAKQGQCADIWHYAPCAVAAAAGRFARQSPDPRSPFGTLPYAFHFDAGLYARYLRSYAEARGVERIEGRIVDVGLRSEDGFVESLTLDDGRRIEGELFVDCSGFRGLLIEGALKTGYEDWRHWLPCDRAVAVPTANIGDPVPFTRSTARSAGWQWRIPLQHRTGNGYVYSSAHISDEDAEATLLATVEGPPIADPRRLAFVTGRRKRFWNRNVVALGLAGGFLEPLESTSIHLIQTGIAKLLALFPDRRFLQVEASEYDRLMSSAYDGVRDFIILHYHATTRDDSPFWNHVRTMTVPDSLRRKTELFRAKGRFFRYDDELFSLASWVAVMLGQGITPEGYDPIVDGLDEQKLVEAVERMRLGIRQTIAQMPSQADYIRANCAAI

SEQ ID NO: 88866 - protein, 496 aa, Colwellia sp.
  REGION 1..496: note = tr|A0A3Q9GC31|A0A3Q9GC31_9GAMM Tryptophan 7-halogenase OS=Colwellia sp. Arc7-635 OX=2497879; GN = EKO29_08280 PE=4 SV=1
MAGKIKKVVVLGGGTAGWMSASLIKKLMAKSVEVELVESDDIASVGVGEATIPPIQLFNSVLGINEADFLRETKATIKLGIKFEHWKNTEESYFHTFGAAGKSSPFCQFHHYLKRAQDAGLKNNLWDYDLNYLCATQGKFAQIKSKDPIIDIPYAFHFDAGLYAQFLRKFSEKIGVKRTEGTVESVKQCQQSGNVSALVLKDGTEITGDLFIDCSGFRGLLIQQTLNTGYEDWGHWLPCDRAVAVPSKRFDETLPYTRSIAHAGGWQWRIPLQHRNGNGLVYSSKYYTDEQAKALLLANIESEPLAEPRVIKFTTGRRRKQWHKNVIAIGLSSGFLEPLESTSIHLIQSAVVRLIHMFPQNGISEAQVDEYNRQSKVEYEQIRDFIILHYHVNQRDDSLFWRDLRAMDIPETLARKIKLFKESGKIFREQNDLFNEGSWLQVMLGQGIKPEDYHPLANDIELEQLNLMLEKIKNIKHEPLSKLPSHDDYLKNFCRL

SEQ ID NO: 88867 - protein, 484 aa, Sphingomonas sp.
  REGION 1..484: note = tr|A0A1Y2QKL3|A0A1Y2QKL3_9SPHN Tryptophan halogenase; OS = Sphingomonas sp. IBVSS2 OX=1985172 GN=CAP40_07450 PE=4; SV = 1
MSRPFTVIVAGRDAPLWLAAAALSRGLGASGVQVEAVELPSALASVDAHATFPALEALHNQLRIDEAMLLGATGGSLTLGRNFTDLAGARPAFLHAYGSAGTQIGGRDFFAHWVKARAHGLGVPLDDFSLTAAAARQGRLMLPDEESEIYGRCDYGYHLPAIPYAAMLRDVAARHGVRIHPAASVTVVPGEGAVAALDLGEGRRLRADLFVDAGGALPLGDNFLSWRDYFPVDRLLAAAAPPFANLPVYAECRAGPTGWTALHPGRPATFVTHGWSSAHGDDAEALTAAGAASGLPLAGAVVRAVVPGRPIQPWRGNLVTLGASFDPVHGVELLGFQIGLVQLLASFPAGSDFAAERDEYNRAATAALDRIRDFQSAHYALARYAGPFWDAARAGLVSSDLAHAVALFRARAELAPFEEENLPPDSWRALFLGHGVEPERWPPAIDRVPPEEVKAQFRRMLGFVREQVLRQPTQEAYLAGLAHG

SEQ ID NO: 88868 - protein, 511 aa, Sphingomonas sp.
  REGION 1..511: note = tr|A0A0Q4IFR7|A0A0Q4IFR7_9SPHN Tryptophan halogenase; OS = Sphingomonas sp. Leaf226 OX=1735691 GN=ASE77_04110 PE=4; SV = 1
MTDPGPARITKIVIVGGGTAGWMTAAAMARLVESGVAVTLVESEEIGTVGVGEATIPSLLDYNRMLGIDEDDFVRATGATFKLGIEFRDWGRLGDAYFHPFGTHGRDVEGVAFHQLWLRQAGLAQPGMPEAIGDYCLSTVAARNGRFTRPSANPQSVLSTLSYAFHFDAALYARYLRDLAEVAGVVRIEGRVVAIDRHGGTGFVEAVRLADGRAIDGDLFIDCSGFRSLLLGDAMDVGFTSWQHWLPCDRAWAVPSAPRDAPAPHTRATAEAAGWRWRIPLQHRVGNGHVYASDHVDDETALRVLLDGLDGPPLADPRQLRFVAGRRDRLWERNCVAIGLAGGFLEPLESTSIHLIQSGIARLMSLFPDTGFSAVEIAEYNRQMLREYDQVRDFIILHYHATTRTDSAFWRHCQSMTLPPSLQAKLDLWAGRARIFREQGELFTPDSWIAVLLGQGIWPASVDPLTAGLPVAESALFLDHVREMVAKTAEAMPRHADFIAGHCAAPLRTAA

SEQ ID NO: 88869 - protein, 447 aa, Streptomyces sp.
  REGION 1..447: note = tr|A0A0H4CAI3|A0A0H4CAI3_9ACTN Tryptophan halogenase; OS = Streptomyces sp. PBH53 OX=1577075 GN=QR97_34400 PE=4; SV = 1
MSNNSADVVVIGGGPAGAVSAYVLAKEGHSVVLLEREENPRFHIGESLLPYMMGLFDRIGIREAVETKGYVPKFGGEFIDPTETKFFSGVFRADFGKQGEGRYDRAFQVERAKFDRMLVEEAGRAGAEIHFGAAVGELLMEGDRMVGVRYTKDGEEHEVRSTYVVDASGRSGRIANKFGLRKTLDKLRMVAVFRHYDGLDEKHNLGVEGDIQVGAHADGWVWAIPLSKDVISVGTVMPRDVFRASTPEKVFEEHLARVPRITTRLTGTRPIMDLKIETDYCYHTDTVTGPGWLMVGDAGCFGDPMFSGGVLVASATAVRAAENLSRALKNPQDADRLIAEYENFFKTGYDTYIRLIHAFYDGELVAVAADAGRTTDRDTLERYLIRLIGGDFWSEHNAVAQEMRRRTEWDTFAPFERVYGCPSYPHLDEQDRKERAESRIRRVTAGQ

SEQ ID NO: 88870 - protein, 519 aa, Sphingomonas sp.
  REGION 1..519: note = tr|A0A1Y2QHK4|A0A1Y2QHK4_9SPHN Tryptophan halogenase; OS = Sphingomonas sp. IBVSS2 OX=1985172 GN=CAP40_13545 PE=4; SV = 1
MSTDNRIRNIVVVGGGSAGWMAAAVLATYLGRGASVRLIESEEVGIVGVGEASVPHMKTFNTEMLGIKEVDFVVETQASFKLGIQFNDWGRIGDSYVHGFGKIGQGIGPLPFHQFWLKQYLAGRAAEIGAYSLQTVAAPLNKFMPSPANAPEGSPLADIAYAYHFDASLYARFLRNLSEHRGVQRTEGKIVEVIQRAGDGFVEAVVMESGERIEGELFVDCSGFRGLLIEQALDTGYVDWTHWLPCDRAMAVPCENVGPLTPYTRATARGAGWQWRIPLQHRCGNGYVYSSQHVSEDEAAATLLANLDGKALADPRPLRFTTGMRRKSWHKNVVAAGLAAGFLEPLESTSIYLAQSAIQRLIGLFPNKDFDPLLAERFNRESAFEWERVRDFIILHYHATERADTPFWDHCRTMSVPAPLEETMALFRSDGRYFRNGEDFFALPSWVQVMLGQRIVPHGYHPIVDEMPEDQLAEYIERTRATLANCAGAMPLHQTFIDEHCKAPPDLAGADAVPHRVKA

SEQ ID NO: 88871 - protein, 507 aa, Colwellia demingiae
  REGION 1..507: note = tr|A0A5C6QDA5|A0A5C6QDA5_9GAMM Tryptophan 7-halogenase OS=Colwellia demingiae OX=89401; GN = ESZ36_14890 PE=4 SV=1
MTIKKIAIVGGGTAGWLAANHLGKALCKNSELSITLIESPDIAPIGVGEGTVPDIKKTLASFGISETDFIRECDVTFKQSIKFVNWLDQDKHGKDNFFHHLFDVPSREDSENLTAHWLTQNDGVPFAERVSSQFKACEQGKAPKKITTPEYQGDLAYAYHLNAAKFAGLLADNAKVKYGVKHLLTHIRDVNLADDDSIRSLVTKEGDDLAFDFYIDCSGFESLLISKAMKVPFIDVSDQLLVNTALVVQVPTDKDSAIPPYTIATAHQAGWIWDIALPNRRGVGFVYSNNHMSDEEAQVKLDYYLGGNNPELKYKKLPMKIGYREKFWHKNCVALGLAQGFLEPLEATSILLTDFAANFLAERFPSEKDELLILEKRFNHAMGHAWKRVVDFIKLHYCLSDRQDSSFWLENRDPNTMSEELKNKLAMWEKFIPISDDFFSQFEVFYLENFLFVLYGMKYKTLLNNIEVTGSEERILALKEITDNLMDNLPEHRALLEKINKFGLQQF

SEQ ID NO: 88872 - protein, 505 aa, Sphingomonas sp.
  REGION 1..505: note = tr|A0A0Q4I1V2|A0A0Q4I1V2_9SPHN Tryptophan halogenase; OS = Sphingomonas sp. Leaf226 OX=1735691 GN=ASE77_11325 PE=4; SV = 1
MTTPPIHRVVIAGGGTAGWMAAAAIARTMGRTVAVTLVESEAIGTVGVGESTIPPIVTFNRLLGINEAEFMRETQATFKLGILFDNWKDRGDTYFHSFGTTGKDHWSAGFQHFWLHGLTRGHHQPFDDYCLELRAALQGKFAHLPDGRMNYAYQLDSGLYARFLRKMAEADGTTRVEGRIAHVELNGESGDIAALTLDSGARIEGDLFLDCTGFRALLIEQALHAGFDDWTHFLPCDSAIAVQTESVRPALPYTRAIAHDAGWQWRIPLQHRTGNGIVYCSRYLDHDAALERLLGTVEGPTLTEPNKIRFVTGARRQQWHRNCVAIGLSGGFMEPLESTSIHLIQRAILRLLRMFPSAGISPRDVAEFNEQQHTDMLQIRDFLILHYKATDRRDSAFWRQCASMPVPDSLAHKIALFRETGRVFRKNDELFAENSWVQVMLGQGIVPESYHPIATKMRDDELARLLGGLRDTTNATVDALPDHAAYVAHYCSTAPSASAGSPHLG

SEQ ID NO: 88873 - protein, 489 aa, Sphingomonas sp.
  REGION 1..489: note = tr|A0A0Q4HUN6|A0A0Q4HUN6_9SPHN Tryptophan halogenase; OS = Sphingomonas sp. Leaf226 OX=1735691 GN=ASE77_16745 PE=4; SV = 1
MAAAALAAKLAGLPIAITLVESDEIGTVGVGEATLPHIRAFNLALGIDEAEMMRATEATYKLGIEFCDWGRRGDRYIHPFGDFGPTTNDVPFYQYWLKLRQSGDRSRIDEYSYPVIAAEQGRFRRPSGDLDAVESTFGYAYQFDAGLYARFLRGFAEKRGVSRTEGRVVRVVQDGETGFVRDVVLTNGTTISADLFIDCSGFRGLLIETALQSGYDDWSAWLPCNRAIAVPTQSNGALRPFTRATARTAGWQWRIPLQHRVGNGHVYCSSFISDDEAHDQLVAGLDAPMQAEPRRLSFTTGRRREFWKKNVVAIGLAGGFLEPLESTSINLIQDGITELLAVFPDKGFAARDIAEYNRRIGLHYERIRDFLLLHYVATQRDDSEMWRHFRNLRLPDSLSERIDAWRSRGHLIQYEFGLFLSPSWVAVFLGQNLVPDRHDPRVENMSVDALTAKASDVRAKVDAAVQRTPDHTVFIRESGGAARLAVAGT

SEQ ID NO: 88874 - protein, 335 aa, unidentified
  source 1..335: note = Xanthomonadales bacterium
  REGION 1..335: note = tr|A0A1G4A5R6|A0A1G4A5R6_9GAMM Tryptophan halogenase (Fragment) OS=Xanthomonadales bacterium RIFOXYA1_FULL_68_6; OX = 1802655 GN=A2213_09010 PE=4 SV=1
TQGTFKLGIEFRDWARIGDRYMHGFGMVGHDPGPAAFHHYWLRLLLAGKDVGDIGSYQLQTAASRQDRFLPGAKDVPSTSPLASVAYAYHFDATLYARYLRGFAEGQGVERIEGKVVDVELRPEDGFVSAVVMADGRRVEGDLFIDCSGFRGLLIERALKTGYEDWSHWLPCDRAVAVPCERVGDPTPYTRSTARTAGWQWRIPLQHRTGNGLVYCSRFLSDDEAASTLLTNLDGEAQAEPRPLRFVTGKRKQFWNRNVVAVGLASGFMEPLESTSLLLIQTAILRLLDMFPRQGIDPGLVARYNQRTHFEYDHIRDFLILHYKAVERDEPFWRE

SEQ ID NO: 88875 - protein, 507 aa, Sphingomonas sp.
  REGION 1..507: note = tr|A0A1Y2Q5P0|A0A1Y2Q5P0_9SPHN Tryptophan halogenase; OS = Sphingomonas sp. IBVSS2 OX=1985172 GN=CAP40_18050 PE=4; SV = 1
MGKRRILIVGGGTAGWLAAAYLARFLDLADQAQIEITLLESPELGIIGVGEGTFPTIRSTLKFLGIDETRFIRATSATFKQGIRFNDWLHAPLPDGTRHHYLHPFEAPFYTEGTSLVPYWLLQDAATRPPFAEAVTIQNRVAESRRAPKRQGEGEFSGPLNYAYHFDAARLARILRERAEELGVRHVAGLLTDVQLGEDGAIARIVTREQGALEADLYVDCSGFRAELIGKALGARFKSVRDILFTDRALACKIPYAEPDAPIESFTIAAAHQAGWTWDIGLEGARGIGTVYSSTHMSDDEAAQVLRAYVGHGDYKARIIPFEPGYREAQWVKNCVAVGLSGGFLEPLESTGVVLIEAAVGMIAELFPHNGPVDAPARRFNELIVGRYERIIAFLKLHYCLSRRDEPFWRDNADPASIPEGLQELLRQWRHRPPGRFDFLLDLESFAFFNYQYILYGMDYRTDLSGGRGDFPNVEAAERLFARIRNFSERATEDLPTHRALIRAING

SEQ ID NO: 88876 - protein, 520 aa, Duganella sp.
  REGION 1..520: note = tr|A0A0Q7WEQ6|A0A0Q7WEQ6_9BURK Tryptophan halogenase; OS = Duganella sp. Root1480D1 OX=1736471 GN=ASD58_10340 PE=4; SV = 1
MVPIPTQRILIVGGGSAGWLCAAYLAKMFGDSKEITLVEAPEIGAIGVGEGSFPSLRATLAALGIPEAEFVRESSATFKQGITFQNWLYGGDHYFHPFSMPSQRPGAPELLPYWLQGLAGDTPFAEAVTMQKRVVDAQRAPKRPGDSDYNGPMNYAYHFDAIRFAGLLARHARKLGVRHVQDHVEGVQRDLDGAIASVETREHGALTADLYIDCSGFRALLIGGALGSPFRSVSDVLLCDTALAVQVPHPALDTPIASATISTAHEAGWTWDIGLQERRGIGYVYSSRHTSDERAEQVLRAYAGPAADGLNVRKIPMRVGYREQHWIKNCVAIGLAGGFLEPLEASGIGLVESAVHMLGALFPHNGEMAPVARHFNQFMSERYARIVDFIKLHYCLSKRREQFWIDNCDPATWTDSLRDKLAMWRCRPPQRMDFLTDFEMYPPTSWQYVLYGMGFPKTMPPLAGLQGLADVARQEFANIAAVSARAVADLPDHRAFVTQLCQHENAFRNDFHAIRATLSH

SEQ ID NO: 88877 - protein, 502 aa, Colwellia sp.
  REGION 1..502: note = tr|A0A5C6QU29|A0A5C6QU29_9GAMM Tryptophan 7-halogenase OS=Colwellia sp. C1TZA3 OX=2508879; GN = ESZ39_09000 PE=4 SV=1
MPKSKIKNVVIVGGGTAGWMTASLLAKVLGKTLNITLVESDDIGIVGVGEATIPPIVNFNRAIGIDEKEFINVTKGTIKLGIEFNHWHKDGERYMHAFGSIGKKFPFCDFHHFWQKHQQLQNGSDHIDGSSFWDYSLNYQAAKQGKFVPISHIPKTNLPGLAYAYHFDAGLYAKFLRKHAESLGVKRIEGTITDIAQDHQSGDIKNLTLEDGTTITGDLFIDCTGLAAILIEKTLSTGYDDYSHWLPCNRAIAVPCEKTDTIEPYTRSTAHKVGWQWRIPLQHRTGNGLVYSSKHMSDEEAKTLLLKNIDGKPLADPKIISFQTGRRRKQWNKNVIAIGLSSGFFEPLEATNIHLIQTAATRLVKFFPHHGINLEEVNEFNRQSKTESEGIRDFIILHYKLNNRGDSEFWRACQRMDVPKSLINKIQLFKKTGKVFCHPNDLFTEIAWQQVMIGQGNVPEDHHPLVDTLSKAQLDDLMKDLKTLINRTVEKMPSHNEFLHSL

SEQ ID NO: 88878 - protein, 431 aa, Thioalkalivibrio paradoxus
  REGION 1..431: note = tr|W0DGU7|W0DGU7_9GAMM Tryptophan halogenase; OS = Thioalkalivibrio paradoxus ARh 1 OX=713585; GN = THITH_04260 PE=4 SV=1
MPVRADVVVIGGGPSGSTAATMLASKGYEVALLDRQTHPRATVGESLLPQAWRFFDLLGVTDTITDAGFVVKSGGTVIWNDEINQIAFRDFGYTRPGLHVERDRFDWLLLDHARRQNVQVFEQVAVRNVDLDAPTGPRVRYSGADTGTGEIRCRFVVDASGQAAVLSRQMGTRVIDEDFRFVAMWGYFDDSRYVAGDGCAYPFERLREIPPTTLVTSLGDWGWSWHIPQRDTTSVGLILPLEQFKAAKVAGDRLEQYFLDTCTRTPYLGRLLEQARYRQGSLGVIRDYSYVPTRLTGPGYFIVGDAAAFVDPIFSLGVVLGMYSGHAAAWAIDRSLRQPENTEHNQGIYAQQFRGRYEVARAMALPGRDAGDTSLQRARRFMGFQPSREQELTYTAALLTTRARNFQAVADLDDAAVARWNKSRKLDAIRF

SEQ ID NO: 88879 - protein, 496 aa, Rheinheimera sp.
  REGION 1..496: note = tr|A0A2D5RPU3|A0A2D5RPU3_9GAMM Tryptophan halogenase; OS = Rheinheimera sp. OX=1869214 GN=CML20_00080 PE=4 SV=1
MNNAVKKVVVLGGGTAGWMTAALLKKVLAGAIDIELVESEDIGTVGVGEATIPPIRLFNNVMGINEAEFLRETIATIKLAIKFDNWRVPGEGYFHTFGAPGKSLAFCHFHHLWLRARQQGDKTDLWQYDLNYLCAMAGKFAPINAKDSILELPYAYHFDAGLYARFLRKLSEQMGVVRHEGKVQQVFQHTNGDIKCLVLEDGRELSGDLFIDCSGFRGLLIQDKLNAGYDDWSHFLPCDRAVAVPSERFEKTVPYTRAIAHSAGWQCRIPLQHRNGNGLVYSSAHYTDEQASDLLMANLDRKALAEPKFLRFKTGRRRQQWQRNVVAVGLSSGFLEPLESTSIHLIQSAVVRLIQLFPHNGICQSAIDEYNRQSELEYTQIRDFLILHYHVNERSDSQFWRDMQQLAIPDSLRQKMAIFADNGQLFRDQNDLFLESSWLQVMLGQGIEPKDYHPIANNFSAEKLREMLVSIQAIKQEPLGKLPDHDTYIETMISRS

SEQ ID NO: 88880 - protein, 505 aa, unidentified
  source 1..505: note = Aliiglaciecola sp.
  REGION 1..505: note = tr|A0A553L556|A0A553L556_9ALTE Tryptophan 7-halogenase OS=Aliiglaciecola sp. M165 OX=2593649; GN = FM019_07935 PE=4 SV=1
MADEQVRDVLIVGGGTAGWMAAAALSKSFYKKGRRIRLVESDEIGTVGVGEATIPAIRTFNEVLGIDENEFIRETKGTFKLGIEFVNWGNLGERYIHPFGVYGSPMADNIPFHHYWLKLRDAGYDTDLSDFSLSIAAAKRERFSRPKNIPNSPLAQMAYAFQFDAGLYAKYLRKFAEKRDVQRIEGKVSSVSLRQDDGFVESITLENGEVLTADLFIDCTGFRGLLIEGALKTGYEDWTHWLPCDRAVAAPCESNGPPIPYTRSTARKAGWQWRIPLQHRIGNGHVYSSQYMSDDEATSILLDNLEGKLLAEPKLLRFTTGRRNKFWNKNCIAIGLSGGFMEPLESTSIHLIQTGVTKLMSLFPDKRFSQSLIDRYNELTVFEYERVRDFLILHYKVNQRTDSTFWEYCRNMPIPDYLSNKLELYKTGGHIFRDNEELFGIPSWLAVMEGQNFRAQGHHPLSDAREASRLNEHLSKMKQVIAHCAESLPTHAEFIAQHCAHTDQD

SEQ ID NO: 88881 - protein, 506 aa, Rheinheimera sp.
  REGION 1..506: note = tr|A0A5C7TFW1|A0A5C7TFW1_9GAMM Tryptophan 7-halogenase OS=Rheinheimera sp. OX=1869214 GN=E6Q75_13570; PE = 4 SV=1
MMKKQRVVIAGGGTAGWMTAAALGKLMGKQLDVTLVESDEIGTVGVGEATIPTLHLYHRLLNINEADMMAATNATFKLGIMFENWRDVGKNYLHSFGFLGKDCWACGFQHFWLKGREMGLASEIGDYCAEHLAAREGRFAALAGQDQNHAYHFDASLYAKFLRGIAETHGVKRIEGKIAEVQQHVYEQQHVNGLQHPQNGFIKALLLESGQLLEGDLFIDCTGFRGLLIEQTLMTGYDDWTHWLPCDSAVAVQTVSTGTPVPYTRSISHPAGWQWRIPLQSRVGNGLVYCSKYLSDMDAKTLLKANVQGEMLTEPRLIKFRTGTRRKHWNKNCIAIGLSSGFLEPLESTSIHLIQRSIIRLLQMMPAGDVVQADVDEFNQQTKVEMENIRDFIILHYKVTERSDSAFWRHCAAMEIPPSLAHRIEMFGEAGKVYKFAQELFGESSWIQVMLGQGLTPKQHHPIVDLMPQSELAQFLSNIKTNVARQVQAWPPHYDFVQHYCKSRMM

SEQ ID NO: 88882 - protein, 514 aa, Caulobacter sp.
  REGION 1..514: note = tr|A0A2G5QXN6|A0A2G5QXN6_9CAUL Tryptophan halogenase; OS = Caulobacter sp. X OX=2048901 GN=CSW60_22155 PE=4 SV=1
MMGPRAKRIIILGGGTAGWVCGSILARNARSLGLDVVVVDTAEIPTIGVGEASIPTIYDLLRHVGIDDRELVSRAGATFKYGIEFEGWSVPGDRYMHGFGSMGAPLGELEFFNAWAAAANYFTSRDLGPFVPAVAAARKGRFGRVRSRPADALDHQYFPLCELSYALHFDASLLARLLREKAMADGARHLSLQVAGVETDETGIVALTTSDSGRLDADLFVDCSGLYGFLSRKALGGRFDDWRAYLPCDRAIAVQSRRHTEPRPYTRSVAHRAGWRWEIQLQDRTGNGNVYCSDFMNDDQAETLLRDQVEGELIGQPRKIEFATGRLSAPWHANCIAIGLSAGFLEPLESTSIHLIYKYALRLEEALRGGELSPVVRERFNAAWRAETEEIRDFLMAHYVVNQRSEDGFWSSMRAARRPTTLEDKLESFARTGWIALPDEALFGHDSWFQVLIGQKFQVDYKGLATSPQRASSLLQFLENVGRAVDIETSSLPHSHGQYLQQLRLQTDPSPVAG

SEQ ID NO: 88883 - protein, 494 aa, Rheinheimera sp.
  REGION 1..494: note = tr|A0A3D5BJI8|A0A3D5BJI8_9GAMM Tryptophan halogenase; OS = Rheinheimera sp. OX=1869214 GN=DF774_07785 PE=4 SV=1
MQQVVIAGGGSAGWMAAAMLAKVLGHSVKITLVESDEIGIVGVGEATIPPILFFNKALGIDEAEFIQATQGSFKLGIQFENWARQGDSYMHAFGEIGSPIGLSAFHHLWLRAKAAGHPSDFWDFSPTFQAAKAGKFAPSVQLTGTPFSQFSYAYHFDASLYAKLLRQKAEQNGVRRLEGKISQVEQAVNGDIAALVMENGERIAGDLFIDCTGFRALLIEQTLKAGYENWSHWLPCDRAMAVPSANISAPVPYTRAIAHQAGWQWRIPLQHRTGNGLVYCSAFLQDDAAKSQLLANLEGEALAEPRPIRFTTGRRKQQWSHNCVSLGLASGFLEPLESTSLHLIQSGIIRLAKLFPSGSDMALLRNEYNRQSQLEFEQIRDFIILHYHQTERSDSEFWNYCRTMTVPDSLSRKIELFRHSAVLQREQDDLFTELAWQQVLLGQRVLPQHYQPLADKLNPAQLSELLENLRLIVQGIVKPMPTHAETLARMTQRS

SEQ ID NO: 88884 - protein, 493 aa, Sphingomonas sp.
  REGION 1..493: note = tr|A0A1Y2Q5N7|A0A1Y2Q5N7_9SPHN Tryptophan halogenase; OS = Sphingomonas sp. IBVSS2 OX=1985172 GN=CAP40_18000 PE=4; SV = 1
MDQAPIRRVVIAGGGTAGWIAAAALAKLLGPLLDIALVESDEIGTIGVGESTIPTARTFHQLLGIDERAFLRDTRSTFKLGIAFEDWAREGDRYIHSFGQIGKSTWMGDFHHFWLEARAEGWGGDLGDYCFELQAARAGRFAIPEQGHINYAYHLDAGLYARFLRDFAEPLGVRRIEGRIDAVEQHPETGFVTALRLASGARIEGDLFLDCTGFRGLLIEQALRAGYEEWGHWLPTDSAIAVQTASTGPALPYTRAAAHRAGWQWRIPLQHRVGNGLVYASDFLDDDGARALLDARIEGERLIEPRIIRFKAGRRRKLWDRNVIALGLASGFVEPLESTSIHLIMIAVTRLVQLFPFGGIGEGVAARFNALGRVEIERIRDFIILHYHLNQRADGGFWDRCRTMAIPDSLAERIAAFRDGAIAWQASDDLFRVDSWVQVMLGQRLAPGSHHHMGRMIVEGELRSALGALRSGIADAVARMPAHQQFLEGYIAA

SEQ ID NO: 88885 - protein, 505 aa, Sphingomonas sp.
  REGION 1..505: note = tr|A0A4P7QW90|A0A4P7QW90_9SPHN Tryptophan 7-halogenase OS=Sphingomonas sp. PAMC26645 OX=2565555; GN = E5673_04055 PE=4 SV=1
MSEHTIREVVIVGGGTAGWMAAAALSKFLGGGQGQGQPCIRLIESEEIGTVGVGEATIPTIATFNQMLGIDEDDFVAKTQGTFKLGIEFVDWRRIGERYFHPFGQFGHDIEGLNFHQFFLKLAQQGQCADIWHYAPCAVAAAAGRFARQSPDPRSPFGTLPYAFHFDAGLYARYLRSYAEARGVERIEGRIVDVGLRGEDGFVEALTLEGGRRIEGELFVDCSGFRGLLIEGALKTGYEDWRHWLPCDRAVAVPTANIGDPVPFTRATARSAGWQWRIPLQHRTGNGYVYSSAHISDEDAQATLLATVEGSPIADPRRLAFVTGRRKRFWNRNVVALGLSGGFLEPLESTSIHLIQTGIAKLLALFPDRRFLQVEAGEYDRLMGSAYDGVRDFIILHYHATTRDDSPFWNHVRTMTVPDSLRRKTELFQAKGRFFRYDDELFSLASWVAVMLGQGVTPEGYDPIVDGLDERKLVEAVERMRLGIRQTIAQMPSQSDYIRAHCAAI

SEQ ID NO: 88886 - protein, 508 aa, unidentified
  source 1..508: note = Thalassotalea sp.
  REGION 1..508: note = tr|A0A1Q6CI23|A0A1Q6CI23_9GAMM Tryptophan halogenase; OS = Thalassotalea sp. PP2-459 OX=1742724 GN=BI291_14320; PE = 4 SV=1
MEAHKEKVNSIVIVGGGTAGWMTAAALSHHFTNKNVSITLVESSQIGTIGVGEATIPTLRRFYRRLGLSDLDVLKATAATCKLGIEFQDWHKLDGSFIHPFGLYGQGTKEVDFHHYWMRQKQTDNASPLADFSLGVQLAKENKFTLPNTKPESQLEIFDWALHFDAALFAKLMREYSENNGTTLVDGKIVDVITCEESGVIKQVVLENNTTVEGDLFIDCSGFKGLLIDKALKVGYQDWSEWLFCDRAVAVQSESTSAPSARTVSKAHQAGWQWKIPLQHRQGNGHVYASNYIDDQSALDTLLANIDGKLLHDPRSFTFTPGRREKAWHKNCVAIGLSSGFLEPLESTSIALVETAIEKLIPSLDALNYDSDTVEQFNQKTVLEYERVRDFLILHYQSTQRTDSPFWRDCQQMKLPETLQEKVDIYKQTGEIKPYPFEIFGKDSWLAIFDGFEIYPQSYNKKADNMPIEYLNKNLAYMQQRVRQSADNALSHGVFLKKYCHFEAKISS

SEQ ID NO: 88887 - protein, 525 aa, unidentified
  source 1..525: note = Citromicrobium sp.
  REGION 1..525: note = tr|A0A2D9IBE7|A0A2D9IBE7_9SPHN Tryptophan halogenase; OS = Citromicrobium sp. OX=2024827 GN=CL805_07465 PE=4 SV=1
MAEPRDIVTSNRIEKVVVVGGGTAGWMAAAAISRFFADGKRTITLIESSEIGTVGVGEATIPPIRNFNGMLDIPENEFLRETRATFKLGIEFVDWGRVGDRYIHPFGNLGRDFHGISFHQLFLREVFRGAADPSSFADYSMSAVAAGLKRFGRPSADARSPVSEINYAFHFDATLYADYLRRLAERQGTVRREGKIVQVHRHGETGDVASVALEDGVVIEGDLFIDCSGFRGLLIEQELETGYEDWSHWLPMDRAIAVPTQNVASPDPFTRATAHSAGWQWRIPLQHRTGNGHVFSSRYMEEDEARSILLDNLEGKPLADPRTLRFTTGMRKKAWSHNVVSLGLSSGFIEPLESTSIHLVQNGIARLFALFPDKPISPAERDEYNRGMRDVYEDVRDFVILHYKATQRDDSAFWRDVRAMDVPESLARKMELWRLHGRVFRENAELFALPSWVAVMLGQNMRPEAYDAIADTLDEAKVRTAMEQMREGYRATAERLPTQDDFLRRAGAWFQDQPDTPSVRFGSFS

SEQ ID NO: 88888 - protein, 495 aa, Marinicella litoralis
  REGION 1..495: note = tr|A0A4R6Y049|A0A4R6Y049_9GAMM Tryptophan halogenase; OS = Marinicella litoralis OX=644220 GN=C8D91_0334 PE=4 SV=1
MKNQEINSIVIVGRGITAVTVASAIAKSMPQIKITLIGADDEQSAALSMLPQIHEFHRLLGIDEKALMQATQATFKLATIYQDWNKPGHSYTQPLGPHGAATEFVGFHHFATKMHQSGDNTAYSEYALSAVAAENNRFMHPQSDPNSIFSTMAYSLHIDATAYKQYLLNHVLQDKAHFKTENIVDVSLDENNGFINSVTLEKGENLKADLFIDCSGNAASLIEKVMGVGREDWSCWLPANRVLSTTIKSKGEVMPYTQVAGKTKGWFRHVPLLNTIVREFVYNSDEVSLAEAKNIITTGLSPNTFSEPSLRELHSGQRQQHWSKNCIAFGSAAADFEALEMSNLQWVQVAVQRFINLFPDQSCHPALVNEYNRLTQLELDNIRDYNLLHYLSVTKQESMMWNQWRQQPLPDSLKHKTALFSIHGQSASYELETFLEGSRASTFLGLGMWPDKYDPFLDSFDIEDLKQRFDYMRAAIRDTVIKMPSHRLYLEKYCE

SEQ ID NO: 88889 - protein, 509 aa, Sphingomonas sp.
  REGION 1..509: note = tr|A0A4Q7T7I4|A0A4Q7T7I4_9SPHN Tryptophan halogenase; OS = Sphingomonas sp. BK036 OX=2512122 GN=EV283_0307 PE=4; SV = 1
MIDGLGQHIVILGGGTAGWMTACLIAHRWRARGMRVTLVESPEIGIVGVGEGSTPQLKHFFDTLGIAEDVWMPACDATYKLGIGFEGWSDRAGYERYFHPFPTALDGHTASQFFYNTRALRTGRDVEAHPDRFLLPARLAAAHCAPQPAESFPFEVSYGYHFDAYKVGAFLAAHATGTLGVDHLQRRIASVERIPTGRIAALIDTDGLRIEGDFFVDASGFRSTVFAALDVPFVSYADALLNDRAVVMPTAHAPGAPIPSQTRATALSAGWAWHIPLTSRNGNGYVYSSRHLTEAQAEAELRAHVGTEAGEARHLKMRVGRVRDSWSHNALAVGLAQGFLEPLEATALHLVIATVEAFLDGVDAGGATDAVRSAFNTRIAARYDGVRDYIVAHYRLNQRHDDPTGYWAQARGIEALSDDLKTLMSAWFTGADMVAAIDRAGLARYYSAISWHCLFAGYGTFPEPARLIPPGADIDPVDMTRIDDFLTRCAMNFGSHASRLRLADLKDIA

SEQ ID NO: 88890 - protein, 532 aa, Sphingomonas sp.
  REGION 1..532: note = tr|A0A4Q7T5Q6|A0A4Q7T5Q6_9SPHN Tryptophan halogenase; OS = Sphingomonas sp. BK036 OX=2512122 GN=EV283_1436 PE=4; SV = 1
MVEKNGAGNAACADQPITTIVVVGGGTAGWLAACLIAARADRGAEQPLSVTLIESPDVATIGVGEGTWPTMRRTLERIGITETDFLLACEGAFKQGSRFDGWRTGAADDSYLHPFTAPVDGDPRDIVAAWAEHGGRFADTVGAQGAICHRDLAPRQRAMPDYAGTLNYAYHLDAGKLATMLMRHATERFGVRHIRDHVVGIDGKADGDIAAVRTRASGAIAGDLFLDCTGHAALLIEGHYGIGTVDRGGTLFNDRALAVQVPVAADSPIASQTNATAHGSGWIWDIGLPTRRGVGCVYSSAHLSDDAAADTLTRYLRATAPDAAPPSFRQLTFQSRHRETFWHRNCLAVGLSAGFLEPLEASAIVLIELSLDALLDNFPSHRGAMDIYAMRFNALFRYRWDRIVEFLKLHYVLSERDEPYWRDHRDAASIPPRLTELLQLWRHQPPSRADFPMVDEIFPAASYQYVLYGMEFPAPTRGPILTPDRSRAQSLLAQVEQRRRMLAAGLPTNRAYLDALRHANAPAPAPVMEPIA

SEQ ID NO: 88891 - protein, 497 aa, Sphingomonas sp.
  REGION 1..497: note = tr|A0A4Q7TCL7|A0A4Q7TCL7_9SPHN Tryptophan halogenase; OS = Sphingomonas sp. BK036 OX=2512122 GN=EV283_1005 PE=4; SV = 1
MTEQRVKKVVIAGGGTAGWLAAAALSRQLGQLLDITLVESEEIGTIGVGEATIPTMRSFHAILGLDEREFMRATQATFKLGISFENWARDGDRYIHSFGDLGKSTWMGDFHHFWLAAKAAGDPSEIGDYCLELQAAKAERFALPSEGEIHYAYHLDAGLYARFLRARSEANGLKRIEGRIASVDRDGETGFIRALVLDSGERVEGDLFIDCTGFRGLLIEGTYAAGYEDWSHWLPTNSALAVQSAATGPAHPYTRAIAHDAGWRWRIPLQHRVGNGLVYASEHLSDDEAHARLLGAIDGAPLTEPRLIRFRTGRRRQVWMGNCVALSLASGFVEPLESTSIHLVMTGVTRLMQAFPFGGIAPAAVTRFNEQAQAELERVRDFIILHYHLNERPEPFWAARRDMPIPDTLVERIALFAEAAQAYQGGEDLFRVASWVQVMLGQRLMPRDHHRLGTIMGGPQLTGVLAKMRSDITDVVAAMPTHQQFLDRHLLRPPRAA

SEQ ID NO: 88892 - protein, 498 aa, Marinicella litoralis
  REGION 1..498: note = tr|A0A4R6XJH1|A0A4R6XJH1_9GAMM Tryptophan halogenase; OS = Marinicella litoralis OX=644220 GN=C8D91_2636 PE=4 SV=1
MENQLIKKIVIVGGGSAGWMTAAALSRYLGTHCEISLVESDQIGIVGVGEATIPGIREFNQKLGIDENDFMRATHATYKLGIEFNDWTQLGDSYMHPFSYFGHDMNGVSFHDYWLKLNQLGDETPISAYSPGYVAAKQNKFIHPNQDPKSVLSRYFYAFHFDATLYGQYLRQVAEKAGVRRIEGKVVAVSLNNAGGIKDVALESGQVIEGELFIDCSGFRGVLIEQALKTGYQDYSRWLPCDSAVAVQTESVAAPTPYTQSNAQAAGWQWRIPLQNRVGNGYVFCQQYLSDDEAIDTLLKHVEGEVLTEPRVLRFNTGRRNQFWNKNCVTVGLSSGFLEPLESTSIHLIQTSIMKLINLFPDQGFNQADIDEYNRQMIEQFEQVKNFLILHYKTTQRSDTPFWAYCKNMEIPEALSYRIELFKKTGQIARCDDEIFVHENWLAVLLGQKLMPEQYHPKVDMIDTAQLKMIMQQMKGVVNQAVAGMPNHQETINRWCKS

SEQ ID NO: 88893 - protein, 442 aa, unidentified
  source 1..442: note = Caballeronia fortuita
  REGION 1..442: note = tr|A0A157ZQF7|A0A157ZQF7_9BURK Tryptophan halogenase; OS = Caballeronia fortuita OX=1777138 GN=AWB77_00965 PE=4; SV = 1
MSETTQTWDVVVIGGGPAGSTAATLLAKRGYRVRVLEKARHPRFHIGESLLPANLRLFDKLGVADEVRAIGMVKLAAEFVSPQHGNRTQRFMFADAWDKSMPSAYQVRRSELDDILLRNAAKQGAHVSEGCRARDVAFAADGSFATIDAEHDDGRIENVRTRFVVDASGRDTLLANRFKTKRRNERHNSSALYGHFSGARRNEGENEGNITVFWFEHGWFWFIPLADGATSVGAVVWPAYLKRRPKGTTVEAFFRETIALCGPLAERLKDAELISEVHATGNYSYTGDMTHGRNFLLLGDAFAFIDPVFSSGVMLAMQSAFAGAEAIDAALTNPANAPAALAKFDRDVRHGPREFSWFIYRMTSPTMRNLFMGPKNPLRMKEALLSLLAGDIFGNTPIWHSLRAFKGVYYVAAALDWRNSLRAYRQRRRNLSDAQRAEPSVN

SEQ ID NO: 88894 - protein, 505 aa, unidentified
  source 1..505: note = Marisediminitalea aggregata
  REGION 1..505: note = tr|A0A1M5EMB6|A0A1M5EMB6_9ALTE Tryptophan halogenase; OS = Marisediminitalea aggregata OX=634436; GN = SAMN05216361_0450 PE=4 SV=1
MSEHRIKKIVIVGGGTAGWMAAAAMSKLLHDDSITIELIESEQIGTVGVGEATIPHILYFNRLLGINENDFVKFTNGTFKLGIEFVDWGQTGESYIHPFGPYGMDMEGIHFHHMWLRQQKMGQAKPIDEFNLQILAAQANKFQRAQVELQGSPLSTIAYAFQFDAMLYARHLRGIAEANGVVRTEGKITRVNQHPENGHIASVDTDNGHHIEGDLFIDCSGFKGLLIEQTLNSGYEDWSHYLPCDRAIAVASNKLDELTPFTRATAKSAGWQWRIPLQSRTGNGHVYCSKFMDDDTALQSLYADLNSEPISEPNYLRFKAGIRKKPWNKNVVSLGLASGFLEPLESTSIHLIQTAIARLMTNFPDKLFNQHDIDYYNERTRLEYEQVRDFLILHYKATRRNDSPFWHYCRTMDIPDSLHKRIEIYKQNARLYRHDNELFNHVSWFAVMHGQGIHPERYHPIADMLPDDELHRRMEEIHTVTGKCLQVMPGHEDFIAQHCKASSSG

SEQ ID NO: 88895 - protein, 518 aa, unidentified
  source 1..518: note = Marisediminitalea aggregata
  REGION 1..518: note = tr|A0A1M5HKJ3|A0A1M5HKJ3_9ALTE Tryptophan halogenase; OS = Marisediminitalea aggregata OX=634436; GN = SAMN05216361_1511 PE=4 SV=1
MTSASQPVRKVVIVGGGTAGWLTAGRIAAEHATKAHHPVEVVLVESPNIPTIGVGEGTWPTMRNTLIKLGIRETDFIRECDASFKQGAKFAGWVTGDANDFYYHPLMLPQGFSQGNLGPYWQQHQDTIEQSFSNAVCFQEALCEHNRAPKSIRHAEFGAVANYAYHLDAGKFTAFLTRHCTEKLNVRHVLADVTGVIAHDNGDIRAIQTQQAGEIDGDLFVDCTGFQSLLLGKHYKVPFVPCDDVLFIDRALAVHVPYDSPDAPVATHTISTAQQAGWIWDIGLQSRRGVGHVYASRYQSEQQALDQLAQYVGPQFNDFSVKQIQIQSGHREHFWHNNCVAVGLSAGFLEPLEASALVLVELSATMLAEQLPVNRATMPIIAKRFNQTFQYRWQRIIDFLKLHYMLTKRTDTAFWRDNCDPATIPDSLQELLDLWRYHPPYDHDFTSNNEVFPAASYQYVMYGMGFESDLSFGQQQVAKAFAQQQLQMNQQARQKVLSALPTHRDLLNKINQYGLQPV

SEQ ID NO: 88896 - protein, 500 aa, Sphingomonas sp.
  REGION 1..500: note = tr|A0A1H7UN98|A0A1H7UN98_9SPHN Tryptophan halogenase; OS = Sphingomonas sp. JS21-1 OX=1855283 GN=SAMN05216382_3043; PE = 4 SV=1
MRDAPPLSPRVVVLGGGTAGWMAACLFAARWPRARVTVVEAPEIGIVGVGEGSTPQLRALFARLGIAEDAWMPAADATYKTGIRFDGWSARAGYSSYFHPFASAIDLHTAGAFHACALARRTGRAVDAHPDRFFLNTRLAEAHRAPIAPEHFPFEVGYGYHFDAHKVGAVLRDHALAQGVVHVAARVDTVELGDGGDIAALILAGGERLTGDIFVDASGFRSVIAQGALGVRFVPFARNLFCDRAVTLPTPRKAGAPIDAHTTATALSSGWAWAIPLTSRTGNGYVYASDHLSADAAETELRRHLGLLDADVAARHLTMKVGRVEEAWHANCLAIGLAQGFIEPLEATALHLTQTTVERFIDAYEEGQGTPARRDTFNAEIARRFEGVRDYIVAHYRLNQRHDTDFWHANAANNHLSDDLKAIMTAWFTGRDVAAEVTRRDLAGFYSALSWEVLFAGYSTFPDDARLRPALAPTNTAAIDRLLDGCLLNFGDHAAALARR

SEQ ID NO: 88897 - protein, 515 aa, unidentified
  source 1..515: note = Marisediminitalea aggregata
  REGION 1..515: note = tr|A0A1M5Q727|A0A1M5Q727_9ALTE Tryptophan halogenase; OS = Marisediminitalea aggregata OX=634436; GN = SAMN05216361_3765 PE=4 SV=1
MNTASKKTRVVIVGGGTAGWLTAGIIAARHPLLGENSNTELVLLESPDVKNLGVGEGTWPTMRDTLKQIGLSERAFLSCCDASFKQASKFAGWRQDPAQHYYHPFTAPAGYGLLSLADAWIEAGYPQDFESWVSAQGHACERQLSPKLPQLPEYAFTYNYGYHLNAGKFVALLQAHCTEKLGVTYRQGHVAHIVSHDSGAIKALQLEDGNTVEGDLFIDCSGFAAVLMGKHYQIPFVSQRGVLFNDTAIAAQVNHAEPQTPIASATVATAQTSGWIWDIALQHRRGIGHVFASEFCAVEDAEQTLRNYIANDPNLQQDDLTTRIIKFDPGHRKYFWHHNCVAIGVSAGFVEPLEATALVLIEKSAEWVAEQLPRSPSAMPVLAKRFNQLTNERWQEIIDFIKLHYVLSDRSDSAYWRAHQQHESWTDSLSEALQLWQSQPPGLYESSNRQELFSSASKQYVLFGMGFRAEQWQSCGRLALQQPLIERFRREVQQQVNRVNAQLLTNREYLQKLRK

SEQ ID NO: 88898 - protein, 390 aa, Corallococcus sp.
  REGION 1..390: note = tr|A0A3A8T045|A0A3A8T045_9DELT Tryptophan halogenase; OS = Corallococcus sp. AB038B OX=2316718 GN=D7Y04_28600 PE=4; SV = 1
MSEDSCDVAVIGGGPAGAAMAVALRRKAPSLSVTLVERTTYDAPRLGETLPPDVRLSLSRLGVWEGFLLDGHLASRGTASCWGRAEPGFNDTMMSPWGSAWHLDRTRFDERLSVEAAGQGARVLRATTLVDSESLGRSGYRLRLSHGAADPSTLRARFVVDATGGKATFAAARGARRLVSDRCFAVYGAFQLQGGAAFPTHALVESCPEGWWYSALLPRGRVVVALVGDGDSLRGLRWATPEPWMNLLKQAPVTWARLDACDFVGEALIAVPVLVGQLDRPRGEQWLAVGDAACTYDPLSSQGITKALDSALLAADALERCLSGDADALQDYESMLNARFQDHQRTRGVYYRQEQRWPQAPFWMNRWEALPAPAASPAQSRRSHSTEVNP

SEQ ID NO: 88899 - protein, 483 aa, unidentified
  source 1..483: note = Paraglaciecola sp.
  REGION 1..483: note = tr|A0A2N1DDV0|A0A2N1DDV0_9ALTE Tryptophan halogenase; OS = Paraglaciecola sp. MB-3u-78 OX=2058332 GN=CXF95_08680; PE = 4 SV=1
MAANLLHHYLAQYGFTISLIESPDIPTVGVGEGSTPQLRQFFKTLGIAEQDWMPACNATYKNGISFVNWSEKPGFDEYFHAFPSAPDRQTAAGFLQNCMSRRRGFNVDAHPNRYFLSATLAQQALSPKPKGQATVAINYAYHFDSVLLGKYLAKIAINSGVNYIQARCDKCHNHANGEIKSVELHTGEQIEGQLFIDCSGFRSVLLQQHLAVKFNSYQDSLFNDSAIAMPSNSEHVIQSQTLSTALSNGWAWKIPLTNRIGNGYVYSSQFISADEAEQELRTKLGLLDHADSAKHLSMKIGRVQQHWAKNCLAVGLSQGFIEPLEATALHLVQETIESFVSAFSAGRFTQQHQQQFNQRLNARFDGIRDYIVCHYKINSRDGNEYWRANRHNSNISDSLQNILQCWDQGGDITTEINRQQIAGYYPAVSWHCLLAGYGRFPEMHTAQRQTTTTDDNLQLIDGFIQECANNFQPHASALKFGSN

SEQ ID NO: 88900 - protein, 521 aa, unidentified
  source 1..521: note = Paraglaciecola sp.
  REGION 1..521: note = tr|A0A2N1DCH8|A0A2N1DCH8_9ALTE Tryptophan halogenase; OS = Paraglaciecola sp. MB-3u-78 OX=2058332 GN=CXF95_08380; PE = 4 SV=1
MHKPLKKIVIVGGGSAGWLSAGIIAAEHAIDHATDSATGLEVTLIESPDIAPIGVGEGTWPSMRSTLKKMGISETDFLLECDASFKQGSKFSNWHTNTNEHYYHPYTLPHGFNDTNLAPFWQPFRDKISFADAVCTQSQLGEHGLAPKQISTAEYDFNANYGYHLDASKFAIFLQKHCTKNLGVKHIIDHVTQVNPSETGDIASITSKNHGEISGDLFIDCTGTSSLLLGKHYGIPFVSKKHILFNDSALAVHVPHQRPDSPIASFTCSTAQTAGWIWDIALPSRRGVGYTYSSSHITDDKAEKELRDYITPIMGASAAESINIRKISFSPGHREKFWHKNCIAVGLSAGFIEPLEATALALIELSAKMISEQLPANRQTMDIVAKRFNTKFLHRWQNIVDFLKLHYVLSQRTDSDYWREISDHKQCPDTLQEQLLLWKTQPPYHYDATHTEEMFPSASYQYILYGMGFVTDPPLEKRLDSSKKADNLFSENLKHTKHLLSTLPKNRELINKIKQYGLPKI

SEQ ID NO: 88901 - protein, 491 aa, unidentified
  source 1..491: note = Marisediminitalea aggregata
  REGION 1..491: note = tr|A0A1M5EZV3|A0A1M5EZV3_9ALTE Tryptophan halogenase; OS = Marisediminitalea aggregata OX=634436; GN = SAMN05216361_0616 PE=4 SV=1
MNQPDQQRVVIAGGGTAGWMAAAAISRLLHGRVEVTLVESSDIGTVGVGEATIPTLLFFHKLLKIDEQAFMAATNATFKLGINFENWRSLNHAYLHAFGATGKDCWAAGFQHFWRRGLDLGLSEDFGQYCLERVAAEAEKFAHLPGNGLNYAFHIDATRYAGFLRELAGQAGVTRIDATIERVNVREQDGFIESLTLDNGQTLSGDLFIDCTGFRGLLIEKALHTGYEDWSQWLLCDSAVAMQTESVEAPLPYTRCIAREAGWQWRIPLQSRVGNGLVYCSNYLSDERATEILQQNINGNPLNSPRVIKFRPGRRLKQWNRNCVAIGLSSGFIEPLESTSIHLIQQGIVRLLRMFPHEGIEQAVVDEYNKQTVFEMERIRDFIILHYKVTERTDSPFWQHCKQMDVPDSLAQRLALFEKTGQIHRENNELFDDSWQQVMIGQGMVPKGYHPIADTMTERELADFLGHIKHNIHQTVARLPLHQQYLNSYCR

SEQ ID NO: 88902 - protein, 490 aa, Caulobacter sp.
  REGION 1..490: note = tr|A0A0Q7U5E7|A0A0Q7U5E7_9CAUL Tryptophan halogenase; OS = Caulobacter sp. Root1455 OX=1736465 GN=ASD21_19330 PE=4; SV = 1
MAAAFFSKLFAPHQMRITLVESAEIGTIGVGEATIPPITFFNELAGVDEAEMLSATQGSFKLGIEFVGWRDPDHRYLHPFGSYGGPINGVSFHAYWLRARKLGYRPDLSEFSLSALAAKGGRFDWRVDDPRDPRTTMAHAYHFDASLYAKLLRRIAEGRGVRRLERTIRAVNLDPLDGTIASLLLDDGQALEGDFFIDCSGFRALLIEGALGVGHDDWSALLPADRAVAAPSTRYEDPVPYTRATALTAGWQWRIPLRHRTGNGYVYCSDHIGDDEAADVLLANLAREHPDNRPEAEPRFLRFKTGRRKQSRVKNCAAIGLASGFLEPLESTSIHLIQHGLIKLAASFPQARNDPAAADLYNRIMGQEMEQIRDFLVYHYHANGRVGEPFWDRLRHMPIPDSLREKIELFRTRGLTIFPDQTIFQEPNWLAIMMGQGQEPEGYDPLADLMDERALYATLEHMRAVCRRVVDQMPRHGRVLERYADKPVTA

SEQ ID NO: 88903 - protein, 507 aa, Caulobacter sp.
  REGION 1..507: note = tr|A0A0Q7T960|A0A0Q7T960_9CAUL Tryptophan halogenase; OS = Caulobacter sp. Root1455 OX=1736465 GN=ASD21_11895 PE=4; SV = 1
MSDGTWIQNIVIVGGGSAGWMTAAALARGLDRRYRIQVVESQDIGVVGVGEATIPPIRLFNAMLGLDEAEFMRETRATYKLGIEFRDWGGLGQSYFHPFGVYGLNAEMGHFFQYWLKLNHEGGSLALADYSLCAQAAKAGRFDRQSDDPRDPMSTFGFAYHFDTILYGQYLRRFAQGLGVARIEGEVVQVDQDSETGFVTALRLKSGASVEGDLFIDCSGFKGLLIEQTLKAGYEDWSAYLPMDRAAAVPCALRGPLSPYTTSTAREAGWQWRIPLQHRVGNGYVYSSRFISDEDAVSTLMGNLETEPLADARLLRFATGRRRKMWDKNVVAIGLSSGFMEPLESTSIHLIQASINKLLQHFPDRRFSPANREAYNRRIAVDMETIRDFLILHYKSTTRDDAALWSYVRQMPIPDSLADRIELFHERGQLVIHPDEMFTPTSWLAVLLGQGVQPQGYSPLVADQDSRAIADGFRNMKALIARRVDAMPGHADYMKRHGMWAAEAMVA

SEQ ID NO: 88904 - protein, 499 aa, Caulobacter sp.
  REGION 1..499: note = tr|A0A0Q7UBB5|A0A0Q7UBB5_9CAUL Tryptophan halogenase; OS = Caulobacter sp. Root1455 OX=1736465 GN=ASD21_19205 PE=4; SV = 1
MTDNRIGSVVVVGGGTAGWMSAALLARALGDTVRIRLVESEEIGAVGVGEATIPQIRHFNAFLGLDENTFLAATQGTIKLGIEFVDWRSPGQSYLHAFGDIGRPLGAVPFHHYWLAGRPKGDDHSLWDYSLNARAAFAGRFDRTVRKAGGAAEPLTHAFQFDAALYARFLRAHAERLGVVRTEGKILSTALREPDGFVRSVTLESGEVVEGDFFIDCSGFRGVLIEQALKTGYEDWSDLLPCDRAIAVPTANVEPPRPYTQAIARPAGWQWRIPLQHRTGNGHVFCSRFISEDEAVAQLTANLEGEMLAEPRTLKFVTGRRNKFWNKNVLALGLASGFMEPLESTSIHLIQSGLSRLLNLFPDKGFAQRDIDEYNRQAGLEYERIRDFLVLHYWANQRQEPFWKACRETAVPADLIRKVELFRAHGRLFKEPDDLFLEASWLQVLVGQGIMPDGCHPMTGQLTDDQLLGFLADLRKITADGAAALPAHGDFIRQQCAAR

SEQ ID NO: 88905 - protein, 488 aa, Streptomyces rimosus
  REGION 1..488: note = tr|L8EWC6|L8EWC6_STRR1 Tryptophan halogenase; OS = Streptomyces rimosus subsp. rimosus (strain ATCC 10970 / DSM 40260 / JCM 4667 / NRRL 2234) OX=1265868; GN = SRIM_10371 P E=4 SV=1
MVIVGGGPAGSTLGALVARQGHRVLILEKEFFPRYQIGESLLPSTVHGVCRLTGVADDLAAAGFTRKRGGTFRWGATPEPWTFSFSVSEHMAGPTSYAYQVERSKFDEILLRHAGRCGAEVREGCAAADVIADEERVRGVRYTDADGAEREAYGTFVIDASGNKSRLFQRVGGQRTYSEFFRSLALFGYFEGGKRLPEPNSGNILSVAFDSGWFWYIPLSPTLTSVGAVVRREMAEKIQGDQEEALRALIAECPLISEYLADARRVTTGQYGQLRVRKDYSYHQTTFSRPGMLLVGDAACFVDPVFSSGVHLATYSGLLAARSINSVLAGLVDEAVALREFEARYRREYSVFYEFLLSFYEMHHSEQSYFWQAKKVTHHKRSEMEAFVDLVGGVSSSETALTDADAMAERLRADSAEFAGAVDQLAHSEDGSMLPLFKSSVVSQVTREGSQVQMRALLGADAEPETPLLPGGLVSSPDGMFWLPASSG

SEQ ID NO: 88906 - protein, 501 aa, Sphingomonas sp.
  REGION 1..501: note = tr|A0A4P7R236|A0A4P7R236_9SPHN Tryptophan 7-halogenase OS=Sphingomonas sp. PAMC26645 OX=2565555; GN = E5673_11520 PE=4 SV=1
MAEQRIRKVVIAGGGTAGWLAAAALSRQLGQLLDITLVESEEIGTIGVGEATIPTMRAFHSILGLDEREFMRATQATFKLGISFENWARDGDRYIHSFGDIGKSTWLGDFHHFWLAAKADGDSSEIGDYCLELQAAKAERFALPSEGQINYAYHLDAGLYARFLRARSEANGLKRIEGRIASVDRDGETGFIRALVLESGERVEGDLFIDCTGFRGLLIEGTYAAGYEDWSHWLPTNSALAVQTAAAGPAHPYTRAIAHDAGWRWRIPLQHRVGNGLVYASDHLSDDEAHARLLATIDGAPLTEPRLIRFRTGRRRQVWMGNCVALSLASGFVEPLESTSIHLIMTGITRLMQTFPFGGIAPALVKRYNDQAQAELERVRDFIILHYHLNERPEPFWATRRDMPIPDTLVERIALFTEGAQAYQGGDDLFRVASWVQVMLGQRLTPRDHHRLGSIMGGPQLAGVLGNIRSTIANAVAGMPTHQHFLDRYLAAPITASHGMC

SEQ ID NO: 88907 - protein, 491 aa, unidentified
  source 1..491: note = Marisediminitalea aggregata
  REGION 1..491: note = tr|A0A1M5H3B5|A0A1M5H3B5_9ALTE 2-polyprenyl-6-methoxyphenol hydroxylase; OS = Marisediminitalea aggregata OX=634436; GN = SAMN05216361_1290 PE=4 SV=1
MNASPLNIVIVGGGTAGWMAANLLAKRWQHKAVSITLVESPDIGIIGVGEGSTPTLKRFFEDMNIAESDWMAACNATYKVSIQFDGWSPESGVGSYAHPFISQLDTFSERPFYVNCLTRRMGLDVNVTPGDFLFNGWLAKHKRSPQTPANFPFRIEYGYHFDSGLLGAFLQRHAHTLGVNHKSRNIERVQCHPNGDIASLHTREGEIIEGDLFIDCSGFRSLLLQQTLKVPFKSFKDNLFNDAAVVCATDALEDRPVETRSTALSTGWAWQIPLTNRTGNGYVYSSAFISPEDAEKELRAHLGVNDDDAQTRHLTMKVGQVSEHWSRNCLALGLSQGFIEPLEATALHLVQTSVEIFMDHYEKGGFNDQYRAAYNKVIGERFERVRDYIVAHYKLNTRNDSEYWRANRNNDVLSESLLQLLDVWFRRGDLQQEIQRQKLDSHFGATSWHCLLAGYGAFPRLAAQQPNQGDLYKDNNLAQFFSGCLLNFSAQ

SEQ ID NO: 88908 - protein, 509 aa, unidentified
  source 1..509: note = Paraglaciecola sp.
  REGION 1..509: note = tr|A0A2N1CVV3|A0A2N1CVV3_9ALTE Tryptophan halogenase; OS = Paraglaciecola sp. MB-3u-78 OX=2058332 GN=CXF95_27535; PE = 4 SV=1
MSSEIKRIIVLGGGTAGWITAGLLAKKHAGGVKVTLIESPDISTIGVGEGTWPTMRQTLAKLGVPEAKFLQKCHATFKQASKFVNWINPENDTYYHPFTEPQGFNKVDLSPYWREATQSECSFSQAATFQHYLCENGLAPKTIANKQYEAVANYGYHLDAGQFIELLREHCTAELKVELISDTVSHVLMAENGDIKSLVTKENGELSAELYVDCSGMRSKLLGESLKVPFLPCDDIFFSDTALATQIPYTDTHSPIPSCTISTAQDAGWIWDIGLQHRRGVGYVYSSQFSTQEQAYDTLVQYLGDKCKIDKIKKIEFTPGHREIFWKNNCVAVGLSAGFLEPLEASALMLVETSANFIAEQLPANTQQMPMVAKRFNASMLMKWRGVIDFLKLHYVLSKRDTPFWVKNREPSSVPDTLKELLELWRFRSPSEYDFTDNMEAFSAASYQYILYGAGFQTDFSSKAYLYEKSALATKQIMLNRQRLEQLKYSLPRHRELLDKVNQVGFSTI

SEQ ID NO: 88909 - protein, 503 aa, Massilia sp.
  REGION 1..503: note = tr|A0A0Q6SLV2|A0A0Q6SLV2_9BURK Tryptophan halogenase; OS = Massilia sp. Root335 OX=1736517 GN=ASC93_20935 PE=4 SV=1
MQVPHLNTIVIVGGGTAGWMTATALATALRGRYRIRLVESDEIGIVGVGEATIPMIQRFNTVAGIDEAEFLKATNGTFKLGVEFVNWGRLGDRYMHGFGRLGQDLWMVGFEQYWHKMHALGRARDLADYSITRAAARANKFMLPRTDLGNSPLAEITYAYHFDAGLYARHLRKLSESRGVERIEGKIVRATQRAGDGHVDAVVMENGDRIEGDLFIDCSGFRGLLIEQTLQAGYEDWTHWLPCDRALAVPCESVSEITPYTRATAHQSGWQWRIPLQNRIGNGHVYCSRFISDDEAAAVLLANLDGKPLADPRPIRFTTGMRKKAWDKNVVAIGLSSGFLEPIESTSIHMIQDAIQRLLDYFPDQGFSQPDVDAFNRLSRFHYERTRDFIILHYYANQRDDAAFWRACAHMEIPATLREKIDLYRTHGRLRRVDNELFTEVGWRQVLIGQNIHPQAYHPLVDVQSEQGIQEYMDSVADVIGKCVDFMPGHAEFIAGYCKAPGM

SEQ ID NO: 88910 - protein, 504 aa, Massilia sp.
  REGION 1..504: note = tr|A0A0Q6TH18|A0A0Q6TH18_9BURK Tryptophan halogenase; OS = Massilia sp. Root335 OX=1736517 GN=ASC93_05655 PE=4 SV=1
MTVNDRRLRGIVIVGGGSAGWMAAAALSAVVNDGCTVTLIESEEIGTVGVGEATIPPIKVFNQTLGLDEAEFLRRTQGTFKLGIEFVDWARVGRRYFHPFGPHGMQFDAVPLHQYWLRGRTAPGAPALDEYAMAWAAASRGRFDKPSRDPRHIASTFDYAYHFDAGLYAAYLREVAQGRGVRRLEGRIVGVDLRGADGFVEAVRLADGRAVAGDLFIDCSGFRGLLIEGALHTGYEDWSDFLPCDRAMAVPSAPDGDPAPYTRSTARAAGWQWKIPLQHRVGNGYVYAGKYLSDDEAAATLLANLDGPALAEPRALRFVTGRRKRFWNRNVVALGLASGFMEPLESTSLHLVQSGISRLLALFPDRDFDPFVIDEYNRIGVNEYERIRDFLILHYKLTERADTPLWRACAAMDIPDTLARKIEHFRRYGRLVSEGPELFGNASWLAVHVGQLNWPQRHDPLADLRGVDGAAMLARQREAMVRAADAMPTHADFIARYCAAPRRP

SEQ ID NO: 88911 - protein, 519 aa, unidentified
  source 1..519: note = Marisediminitalea aggregata
  REGION 1..519: note = tr|A0A1M5ELN8|A0A1M5ELN8_9ALTE Tryptophan halogenase; OS = Marisediminitalea aggregata OX=634436; GN = SAMN05216361_0447 PE=4 SV=1
MNRNDIKRVVIVGGGTAGWMTAAALANKLQGLAIDIELIESDSIGTVGVGEATLPHIRFFNSALGIDEAAFMRETEATIKLGIEFCDWGNVGESYIHPFGDFGLPINNVDFYQHWLKHFQSGAITTPLHEYAAGVMSAKHNKFRIPEPSSSNIEQHYGYAYQFDSSLYAKFLRRYAQAKGVIRTEGKIVEVKQHNDTGEVVSLALDNQAIIEGDFFVDCSGFRGLLIEQTLHAGYDDWSEWLPCNRAVAIPCESTNPLMPYTRATAKAAGWQWRIPLQHRTGNGFVYWSEHISDDEACSQLLSALDGKPLAEPNQLYFKAGRRNVCWEKNVVAIGLSSGFLEPLESTSIHLIQEGITTLIELFPQQRVQQQDADEYNRRMALNFERVRDFLLLHYVATKRDDSDMWRYFRNLTLPDSLQTKIELWLSRGYIQRYEFGVFLPPSWIAVLLGQNLMPTGFDPRVNNTSDAEFIQTSERMRKAILNSVNNTPLHREFLTGYGAASNSKPLKSAMASTTSGGN

SEQ ID NO: 88912 - protein, 531 aa, Streptomyces sp.
  REGION 1..531: note = tr|A0A0X3X4W8|A0A0X3X4W8_9ACTN Tryptophan halogenase; OS = Streptomyces sp. NRRL S-1521 OX=1609100 GN=ADL30_01325; PE = 4 SV=1
MDQRVKEIVILGGGTAGWMSAAYLAKKLGETVRVTVLEAPSIPRIGVGEATVPNLQRVFFDQLGLSEEEWMPECNAAYKVAVKFINWCTPGKGEARAREIDGRPDHFHHPFGLLPEHEGLPLSHYWVYNRKHGVTGKPFDYACFPGVAIMDALKAPRDHAGEPVTRYAWHFDAHLVADFLRRHATEKQNVTHVQDEMVEARRDGRGFVTALRTKSGAVIEGDLFIDCSGFRGLLINQAMEEPFVDMSDHLLCDRAVAYALPNDDEANGVEPYTSAIAMESGWTWKIPMLGRFGTGYVYSDAFADQDRATTDFCRMWGLDPDEVGDRLNHVRFRVGRNRRAWVKNVVSVGLASCFLEPLESTGIYFITAALHHLAKHFPDQRFDAVLADRFNAEIEAMFDDTRDFIQAHFALSPRTDTPFWKANKDLHLPEGIKEKVAMYRAGLPINQPASTEGAYYDNFDVEFRNFWTNGSYYCVFAGLGLEPDHPLPALMHHPDAAEGAQHLFDRVAEEQRKLADTLPSNHEYLRRLHGA

SEQ ID NO: 88913 - protein, 521 aa, unidentified
  source 1..521: note = Marisediminitalea aggregata
  REGION 1..521: note = tr|A0A1M5EZY0|A0A1M5EZY0_9ALTE Tryptophan halogenase; OS = Marisediminitalea aggregata OX=634436; GN = SAMN05216361_0617 PE=4 SV=1
MQQSNAITQVIVVGGGAAGWLTAGILAATAAQPCAVTLVESPDVGILGVGEGTWPTMRGTLQTLGIDEAAFLAQCDGAFKQGTLFKQWQHNQASDQYYHPFSLPVGYGDGDLYAWLRSLGEGPSFAHEVSTQPWLCDNHLAPKQIQTPAFAGVTNYGYHLDAYKFAALLKQHATTRLGVKHIVDHVESVDGAPGEAIRAIVGKQYGAIHGDLFVDCSGFSARLIGQHYNQPLISCGEQLVNNRAVAIQARYKSPDTPIASVTRSTAQKNGWIWDIALPERKGTGYVFCSDYCDDDTALDTLLKYLNDDPIIADVDKASARFFSFKPGYRESPWQANCVAIGTSMGFLEPLEASALVMVELAASHLARHMPFTTEQLGPAARQFNRIFSQRWSRVVDFLKLHYVLSKRDDSAYWRYMRNPDSGSEQLQDWLSMWRNRSPDPLDFNLREEIFPTASYLYVLQGMGFTPALSGGEKNAAADLSKVRQRLQQHQQNVHMQLNGLPTNRALLNHLTGAHNINKEYS

SEQ ID NO: 88914 - protein, 491 aa, Massilia sp.
  REGION 1..491: note = tr|A0A0Q6RQA4|A0A0Q6RQA4_9BURK Uncharacterized protein OS=Massilia sp. Root335 OX=1736517 GN=ASC93_29165; PE = 4 SV=1
MTYERIVVLGGGTAGWMTAAALATGLKGTTVELVESEDIGIVGVGEATFPSIRAYHQILGIPEADFLRATNGTYKLGIKFRDWRVRGEDYYHTFGDFGQLDGPNALWGQYRRHVNAGLPAFGEQCLPTVMALNDRFCAPGKDAAHFNYAYHFDANLYARFLRDIAIGRGVRRTEGKVVDVARRQDGGVASLKLDDGRVVGADLFIDCSGFTSLLLGRTLGEPFVDFSRWLPVDRAWACPSARVGTGLTPYTRATALDAGWAWRIPLQDRTGNGHVFSTRFIDEDKAREQLLQQLDGEALAEPRLLRFTTGHRARFWSHNVVGIGLATGFLEPLESTSIYLVQVGIGRLMTLLQRGGAVPAAAIDAYNTGLVRQFERIRDFILMHYCLTARRDTPFWTAMAATELPETLAYKLHAWRQTGALHQYEEEGFDGHSWLAIHAGMHHWPERSDPTFNQLPAEKSLEWVRERARQLAEAVAPVSTHEAYLAQVLGR

SEQ ID NO: 88915 - protein, 537 aa, Burkholderia contaminans
  REGION 1..537: note = tr|A0A3N8RBM8|A0A3N8RBM8_9BURK Tryptophan 7-halogenase OS=Burkholderia contaminans OX=488447; GN = DF051_16425 PE=4 SV=1
MSNPIKHIVIVGGGTAGWMSASYLVRALQQQASITLIESEAIPRIGVGEATIPNLQKVFFDFLGIPEREWMPQVNGAFKSAIKFVNWRKSPDRSRDDHFYHLFGSVPNCDGVPLTHYWLRKREQGFQQPMAYACYAQPEALDAKLAPCLLDGTRQMPHAWHFDAHLVADFLKRWAIGRGVKRVVDEVVEVHLNERGDIASLSTKEGRTLEADLFIDCSGMRGLLINQALKEPFIDMSDYLLCDSAVASAVPNDDARVGIEPYTSAIAMNSGWTWKIPMLGRFGSGYVFSSKFTSRDQATADFLKLWGLSDQQPLNQIKFRVGRNGRAWVNNCVAIGLSSCFLEPLESTGIYFIYAALYQLVKHFPDTSFDPRLRDAFNAEIIYMFDDCRDFVQAHYFTASRDDTPFWLANRHDLRLSDAIKDKVERYKAGLPLTTTSFDDATYYETFDYEFKNFWLNGNYYCIFAGLGLLPDRSLPLLQHRPASVDKADAMFARIRREAERLRASLPTNYDYLRSLRDGDAGRARSRPGPVAAPETL

SEQ ID NO: 88916 - protein, 511 aa, Pseudoalteromonas tetraodonis
  REGION 1..511: note = tr|A0A290TH48|A0A290TH48_9GAMM FADH2 O2-dependent halogenase I OS=Pseudoalteromonas tetraodonis OX=43659; GN = prnA PE=4 SV=1
MDIKKVAIVGGGTAGWLAANHIGKEMLNRKGISVTLIESPDIPPIGVGEGTVPDIRNTLKSFGIREDEFIRQCDATFKQSIKFINWMDKKKHGEGNFFHHLFDVPSSYDAKHLTSYWLNNKEKSQSYAQGLSSQHVICEAGLAPKNITNAQYEGELAYAYHFNAGKFAQLLACNAKEKFSVEHIHTHVTQVKLGDDGAIAALITDNNEELEFDFYIDCSGFESLLMSKALKIPFVDVSESLLINSALVVQVPTKADDAIPPYTLATAHQAGWIWDIALTNRRGVGFVYSDNHMTDEQAHEKLDRYLGDSKQDLTYRKIPMRVGYRKKFWHKNCVALGLAQGFLEPLEATSILLTDFSAKFLTLRFPSSTTQLEQLEERFNHAMGYAWERVIDFIKLHYCISDRTDSAFWIANKNQDTISTSLKEKLNLWKEFTPVRDDFFSQFEVFYLENFLFVLYGMNYNTKASNSPDKEQAHCLARLKQRAEIDHYLINKLPDHRALLNKIKQYGLQSI

SEQ ID NO: 88917 - protein, 515 aa, Sphingomonas aquatilis
  REGION 1..515: note = tr|A0A511Q0J1|A0A511Q0J1_9SPHN Tryptophan halogenase; OS = Sphingomonas aquatilis NBRC 16722 OX=1219039; GN = SAQ01S_06060 PE=4 SV=1
MLSEPSMTDAHPNPPLKTITIVGGGTAGWMAAALLSRLTLGAYTIRLIESEEIGTIGVGEATIPAIRTFNGLAGIDEFEMVRATQATFKLGIEFRNWGAPGDSYIHGFGKIGQDLYWLHCHQFWLKERAAGRAKHLDHYALNTLAARMNRFAMPDPSNPQSPIADIDYAYHFDASLFARFLRGRAEAAGVERIEGRIVAANRRGSDGFLDHVVLADGRTVDGDLFVDCSGMRGLLIGDAMGVGYEDWSEWLLCDRALAVPSARGTGPLTPYTRATAHGAGWQWRIPLQHRTGNGHVYASRFVSDEAAATTLLEHLDTPALGDPRPVRFRPGKRHRAWEKNVVALGLAGGFLEPLESTSIHLIQTGILRLIALFPGRGFNAADTDEYNRQTDFEYRDVRDFIIAHYKVTAREDTEFWRYLKHMAVPDSLTERLELFRSSGRFFMHAKAELFREESWVQVLLGQGLPAHHDPMVDMIPAEQTTAFLKDVEDVVADVAAGLPTHEAFIARHCQAPKVG

SEQ ID NO: 88918 - protein, 527 aa, Streptomyces sp.; identical to SEQ ID NO: 88148
  REGION 1..527: note = tr|A0A495T213|A0A495T213_9ACTN Tryptophan halogenase; OS = Streptomyces sp. 1114.5 OX=1938830 GN=BX285_6141 PE=4; SV = 1

SEQ ID NO: 88919 - protein, 324 aa, Bradyrhizobium betae
  REGION 1..324: note = tr|A0A4Q1UJ55|A0A4Q1UJ55_9BRAD Tryptophan halogenase; OS = Bradyrhizobium betae OX=244734 GN=B5V03_37950 PE=4 SV=1
MSPLVQPVLRQLSLWPAFLAQDFAPSHRTLTSWDEEGLTSSELLLEARGPSWRVDRAAFDGWIATEACRGAERVDAKVLRLERAADGWSVACEDGTSHSARLIIDATGRARALADRQGFRAKARDRLIAAYAEATTSGPAAPELLVEAFENGWWYTLALGEGRRAFACMTDSDLARGLRLNTTDGWRAALAKTQFVSAVASRVIQFEPPRLIPAGGRTAATATGFRFLCAGDCASAFDPISGHGVVKAMRSGVFAAYAASDCLARGDAAALGRYDSWVTREAAVYTTTLGEHYDSVSRWADRPFWQRRRAGMSSSNSLSSLSEQ

SEQ ID NO: 88920 - protein, 501 aa, Inhella sp.
  REGION 1..501: note = tr|A0A3S2UHK8|A0A3S2UHK8_9BURK Tryptophan 7-halogenase OS=Inhella sp. CCP-18 OX=2499851; GN = EOD73_04470 PE=4 SV=1
MQPQEPLQSLVICGGGTAGWMAAAALAKTLRGKVQIRLVESEEIGTVGVGEATIPMIRRFNQVLEIDEDEFLRATHGTIKLGIEFVNWGRVGDRYMHGFGRLGPDLWAVPFDQYWQKQYQAGKAKDLGDYALSRLAAYDNKFMRPRPDLEGSPLADIHYAFHFDASLYAQYLRQKAEAWGVQRVEGKIVEVEQADGLVHALRLQSGERVAADLFVDCSGFRGLLIEEALKTGYDDWTHLLPCDRALAVPCSNAPRLLPYTRSTAHRAGWQWRIPLQHRIGNGHVYCSQYMSDDEATAILLKNLDGEPLADPRPIKFKTGMRKKAWNGNVVALGLACGFMEPLESTSIHLIQTGIQRLLDFFPNKAMSAPDVDEFNRQARWEWERIRDFIVLHYHVNQRTDSPFWQHCQTMEVPATLKARMALYEAHGRIVRDGNELFAEVGWLQVMHGQNLRARGYQPLVDVVPEPDIQAYLDNVAQVMRKCADFMPTHEAFIAEHCASAR

SEQ ID NO: 88921 - protein, 512 aa, Sphingomonas sp.
  REGION 1..512: note = tr|A0A0Q4QF24|A0A0Q4QF24_9SPHN Tryptophan halogenase; OS = Sphingomonas sp. Leaf67 OX=1736230 GN=ASE90_17245 PE=4; SV = 1
MPDRGVSVRADGPLRRIAIVGGGTAGWMAAAALSRLLGPHGPTITLIESEEIGTIGVGEATIPPIQAFNAMLGIDEDDFVRATQGTFKLGIDFHDWGRVGHRYFHPFGVYGIDAGAVPFESTWRRLRAAGQAGPLADYSICAAAAHAGRFQRPQPGNTPLAQIGYAFHFDAGLYARFLRTRAEAAGVVRIEGRIVDVARDDASGFIDAVVLADGRRIDADFFIDCSGFRALLIEGAMNAGFENWSHWLPNDRAVAVPSANAGPPCPFTRSTARAAGWQWRIPLQHRTGNGYVYSSQHVSDDEAAATLLANLDGPALADPRPLRFRTGRRDRFWVGNCVALGLSGGFLEPLESTSIHLVQAGIARLLEMLPTRACDPADTARYNRLMAAEFDQVRDFVILHFHASDRRDTGYWRDQAERPIPETLAERLAIYARTGRVYREGDELFTKTSWLAVMDGQGLGAWTHDPLADAMPLDAAAARLQRIGAVVAAAAAQMPAHDAFIARHCAAGGRRG

SEQ ID NO: 88922 - protein, 517 aa, unidentified
  source 1..517: note = Burkholderiales bacterium
  REGION 1..517: note = tr|A0A257H8C5|A0A257H8C5_9BURK Tryptophan halogenase; OS = Burkholderiales bacterium PBB4 OX=2015566; GN = CFE44_00130 PE=4 SV=1
MHEAVKHIVIVGGGSAGWLVAGVIAAEHRSASPDGLQVTLLESPDVPPIGVGEGTWPTMRDTLRRIGVSEADFFRECDASFKQGSRFNGWVNGAVEDHYFHPFVLPQGYGETDLVSGWLQRCPELPFADVVSYQPHLCVHGKAPKQKATPEYAAVANYGYHLDAGKFGQFLRKHCTAKLGVHHVLDHMTGVRSHENGDIAAVHTQAHGALEGDLFIDCTGLHSLLLGQHYQVPFLSQKQVLFNDTALALQVPYADAHAPIASQTLSTAQHSGWIWDIGLPTRRGTGYVYSSAHTSDEEAQEALQRYIAQTGGPAPTGSARKLSFEPGYRGKFWHRNCVAIGLSAGFIEPLEASALALVELSAQMLCDDMPATRAVMDIASRRFNDAFTYRWERVIDFLKLHYVLTQRTGSDYWRDNCRTESIPMRLQELLMLWKHQSPSRYDLTRIDEVFPAASYQYIMYGMGFKPQMRLTERKVDEPTIAMAYFQDAAMLTRKMLSALPDNRTLITHIQQHGMPKI

SEQ ID NO: 88923 - protein, 503 aa, Brevundimonas sp.
  REGION 1..503: note = tr|A0A0Q7EGB1|A0A0Q7EGB1_9CAUL Tryptophan halogenase; OS = Brevundimonas sp. Root1279 OX=1736443 GN=ASC65_06570; PE = 4 SV=1
MAEPIRSVLIVGGGTAGWMAAAALQRTLGPHAKVTLVESEEIGIVGVGEATVPPIRDFNVMIGLDEAEFMRETKATLKLAIALENWGALGHRYLHPFGTFGPGPTLADFQQTYFALKAQGLADDLERYSICWCAAEAGKVGVRSPDPRNPLNGLFTAYHFDATLYARYLRRVCETRGVTRVEGKVVDVVQRAGDGFVESITLEDGRSLAADLFIDCTGFRGLLIEGALKAGYEDWSHWLPCNRAMAVPCAKVGPVSPYTLSTAREAGWQWRIQLQHRTGNGYVYCSDHITDDQARETLLANLDGEPLAEPRGLKFVTGRRKKYWDRNVVTLGLSSGFIEPLESTSIHLVQAGITRLLQHFPDKDFSPVNIAAYNRRLGREVELIRDFVILHYHATQRDDTPFWRQVAAMPIPDSLAERVDAFRDRALLYQVGADEYFSQGSWLAVMYGQGVVPRGPNPLYQYQDAQRSAAGLRNIAEVIDRTVAALPDHEAFLKANNMWSGDA

SEQ ID NO: 88924 - protein, 505 aa, Xanthomonas citri
  REGION 1..505: note = tr|A0A2K2R8T2|A0A2K2R8T2_XANCI Tryptophan 7-halogenase OS=Xanthomonas citri OX=346; GN = xavtCFBP7764_05310 PE=4 SV=1
MTQAQIRKVVIAGGGTAGWIAACALSHQFRNLLDITLIESEQIGTVGVGESTVPPIRTFHRFLQIDEQEFLRAVAGTFKLSISFEHWRRHGERYIHPFGITGQSTLVCAFHHLWLESQRRGMPGSFGDYCLETVASRVDRFALHGEPAVNYAYHLDAALYAKFLRARSEACGVKRVEGRIQQVTVQPHSGDVASLVLEDGQTIEGDLFIDCSGFRGLLIEQTLHTGYEDWSHWLPCDRAVAVQTEALGPPVPYTRAIAHEAGWRWHIPLQHRVGNGLVFSSKHLSDDQAHAKLLRDVAAPAVKEPWMVPFRTGRRLKAWNKNVVSLGLASGFIEPLESTSIHLTISAVVRLLALFPAEGIAPSQVQLFNDVSRAEMEHVRDFVTLHYHATQRDEPLWQQCRQMELPESLALRLRAWRERAHAWQGADELFRVDSWTHVLMGQGIAPEQHHPLTRAFSDHDLRRLLDGIAQPIQHAVQQMPSQQDFIERYCKAGEQVWGMRNPVPA

SEQ ID NO: 88925 - protein, 496 aa, Sphingomonas sp.
  REGION 1..496: note = tr|A0A0Q4Q4I8|A0A0Q4Q4I8_9SPHN Tryptophan halogenase; OS = Sphingomonas sp. Leaf67 OX=1736230 GN=ASE90_08845 PE=4; SV = 1
MTDPIRTVVIIGGGTAGWMTAAAAGRYLDDGQRRITLVESDAIGTVGVGEATIPSILNFNKLLGIDEVEFLRETRGSFKLGIEFTGWHTADSRYFHPFGNFGRDIEGVNFHQLWAKLKGQDGIGPIGDYSPATVAARANAFGPPHPDPRSPLSGIAHAYHIDATLYARFLRRRAEADGVARIEGRIVAVEHHDDGHVAAVRLDDGRRVEGDLFIDCSGFRSLLLGEAMGVGFEDWSHWLPCDRAIAVPTERTEPVLPYTRATAHTAGWQWRIPLQHRTGNGVVYASRYMDDDAAEALLLSRLDAAPTATPRRLSFTAGRRDAMWAGNVVAIGLSGGFLEPLESTSIHLIQQGISKLFALFPDRGFSAVERDEYNRQMADNYRTIRDFIILHYHATARDDSPFWNHVRTMDVPDSLTRKIELFRQKGRIFRYEDELFATPSWVAVLLGQGIEPVGYDPVADALDEERLLPAIRQMRSATAAAVATLPQHGAVLTRLK

SEQ ID NO: 88926 - protein, 515 aa, Pelomonas sp.
  REGION 1..515: note = tr|A0A2R7S6F0|A0A2R7S6F0_9BURK Tryptophan halogenase; OS = Pelomonas sp. HMWF004 OX=2056841 GN=DBR42_23380 PE=4; SV = 1
MNSALIQDIVIVGGGTAGWMTAAALSAVLRGRYRLRVVESDEIGTVGVGEATIPMIQRFNRVVGIDENEFVRETNGSFKLGIEFVNWGRVGDRYMHGFGRLGQDLWTVQFEQYWHRMRKAGRAQPLEQYSISRMAALANKFMPPRSDLGNSPLAEIAYAYHFDAGLYARYLRKLSEQRGVLRTEGKITHATRRGEGAHAGHVDAVVLESGERIAGDLFVDCSGFRGLLIEQTLQAGFEDWTHWLPCDRALAVPCESVSPLTPYTRATAHRAGWQWRIPLQHRTGNGHVYCSQHISDDEAAATLLANLDGKPLADPRPIRFKTGMRKLAWKENVVAIGLSGGFLEPLESTSIHLIQTAIQQLIDFFPDRGFSANDIAEFNRHSRFHYERIRDFVILHYHLNQRDDSKFWQDCAHMSVPESLQEKLDLYRSHGRVVRRDNELFAEVGWIQVMEGQNLTPQRHHPLADLQSEQDTHDYLEGVREVIAKCVEVMPGHADYIARHCMAAGGGFQRPPSAL

SEQ ID NO: 88927 - protein, 512 aa, unidentified
  source 1..512: note = Cellvibrionaceae bacterium
  REGION 1..512: note = tr|A0A545TLT0|A0A545TLT0_9GAMM Tryptophan 7-halogenase OS=Cellvibrionaceae bacterium R142 OX=2591008; GN = FKG94_14000 PE=4 SV=1
MNTAKPVSSILIVGGGTAGWLTAAILAGKHPYSEGGGLQITLIEAPDIPIIGVGEGTWPGMRATLHTAGIKEVDFLKACDASFKQGSKFVGWKTGEAQDYYYHPFELPQGFFEGNLAQHWVDTQPSVSLSKLVCVQEYLCERDLSPKLRSSGNYSGVANYGYHLNAGKFSDFLKNHCTENLGVRLVYDKVTGVVSQSDGDIAGVCTEKSGELQADLFVDCTGFRSLLLGQHYGVRFIDKCAQFPINSALAVQVPYADHEPVKSTTIATAREAGWIWDIGLSSRRGVGYVYSNSHLPPEQAAAQLQAYLGIDNQAFEQLEPRRIPINPGHREKFWHHNCVAVGLAAGFLEPLEASAIMLIEASATMLADQMPTTRAAMDIVSKRFNKRFLYRWERVIDFLKLHYVLSDRQQPFWREAASRSTLSARLQEDLSLWRYQAPWKTDFDSLEEAFPAASYQYVLYGMQFETQSNPRRNSPSVSEFSRKAIDTVSRNAGLLASKVESNRALLDLIRAQ

SEQ ID NO: 88928 - protein, 485 aa, Sphingomonas sp.
  REGION 1..485: note = tr|A0A0Q4Q3Y7|A0A0Q4Q3Y7_9SPHN Tryptophan halogenase; OS = Sphingomonas sp. Leaf67 OX=1736230 GN=ASE90_07930 PE=4; SV = 1
MSPSFVILGGGTAGWITAHLLERAWPDATITVVESPEIGTIGVGEGSTPSLKRFFEIIGAAEADWMPRCGATYKAGIRFVDWSPAAPWRDYRHPFTTQIDVHTEDAFILNCRNRRLGHDVPVRPDDFLLNGVLSAKGLAPVAPPNFPFRIEYGYHFDAGLLGQYLRELAVTRGVVHRPATVTTVRRAENGDIAALVTDREETIAGDIFVDCSGFNGLLIERTLGVPFHSFKDNLFNDAAVVVPTEMTGRPPVETVATALSNGWCWSIPLRHRVGNGYVYARDCQSPDAAETELRRTLGVSDAVPARHLTFRVGQVARHWERNCVAVGLSQGFIEPLEATALHLVLGTVEQFIRHYRDGGCTDRHRAAFNTVAAERMDGVRDYIVAHYKLNTRTDTDYWRANAANEALSDPLLHILDRWFRRGDIAEELARQGQRSHFGTLSWHCLLAGYGAFPPVSEARRDDMDFYAARRVGAFLEGCSRNFAPA

SEQ ID NO: 88929 - protein, 498 aa, Sphingomonas sp.
  REGION 1..498: note = tr|A0A0Q4QAI0|A0A0Q4QAI0_9SPHN Tryptophan halogenase; OS = Sphingomonas sp. Leaf67 OX=1736230 GN=ASE90_07925 PE=4; SV = 1
MAAAIKRVVIVGGGTAGWMTAALIAKVIGPQVRITLIESDEIGIIGVGEATIPPIQHVNAVLGIDEAEFLRETRATIKLAIRFDDWGAIGQSYYHSFGAAGRNTAFCSFHHYWNRAKRAGIAADYWDYDLNYLCAREGKFAKIQVDDPLWHLPYAYHFDSALYGQYLRRYSEARGVERVEGLVEQVARDGETGHVTALTLRDGRVVNGDLFIDCSGGRGLLIQRQLNVGYEDWGHWLPCDRAMAVPTARHDDTPPYTRSTARSAGWQWRIPLQHRVGNGLVYSSRHLTDDQAADLLLGNLDGDVLADPRIIPFRTGRARRQWHHNVVAIGLSSGFLEPLESTSIYLIQSAIVRLLHLFPHAGFDDRQIAEYNRQSRTEFETVRDFIILHYHATQRDDSDFWRHVRTMPLPDRLADKIALFRATGTLTQDPLDIFMEASWVQVLMGQGIEPADYHPLADGPTDAELAEQLRQLAAMKREPVPNMPAHDRWLRGFGGTAG

SEQ ID NO: 88930 - protein, 504 aa, Sphingomonas sp.
  REGION 1..504: note = tr|A0A0Q4PU03|A0A0Q4PU03_9SPHN Tryptophan halogenase; OS = Sphingomonas sp. Leaf67 OX=1736230 GN=ASE90_15340 PE=4; SV = 1
MAIDQVPVRSVAIVGGGSAGWMTAAALARFLPADTRVTLIESDAIGTVGVGEATIPQLRLFNQHLGIDEDDFVARTGGSFKLGIEFAGWNGTDSRYLHAFGTIGRSLGLVPFHHYWLAAGGGDAPESLWSHSACAAAASANRFDRDPGNPQAPSGIAWAYHFDAARYAAYLRERAEAGGVERAEGRVVAVGLNDVGIDTVTLDDGRTIAADFFVDCSGFAALLIGRLAGDRWDDWSALLPCDRALAVPCAATQPVTPYTRATARSAGWQWRIPLQARTGNGLVYSSAHLSDDEAAATLLGNLDGAALADPRPLRFTTGRRHAPWIGNCVALGLAAGFLEPLESTSIHLVQSGIARLLSLWPASRPRPADIAAFNRQSEREWLGVRDFLIAHYALNGRDEPFWQERRATPLPDSLAERIALFRESGRIVRDEHELFAEVAWVQLLVGQGVRAGGYHPLADALPAERRSQFLDMSSKHVAATVARMPTHDQFLRAHCPAPDVKVAA

SEQ ID NO: 88931 - protein, 595 aa, Hapalosiphon sp.
  REGION 1..595: note = tr|A0A0M0SFF4|A0A0M0SFF4_9CYAN Tryptophan halogenase; OS = Hapalosiphon sp. MRB220 OX=1704290 GN=AMR41_28330 PE=4; SV = 1
MNTIEQQLEYDVVIMGAGYAGVCQARHLLLKVPNIRLAIVDPRSQDPSEVNHRPGESTLEAASMFLFSELGLHDYLLEHHTHKAGLNWHWPKDVDKTESLDDYYNIWVNRQLTIPSFHLNRLRFDQDLLEMNKQMGAHFYNGRVVDLELTPGDELNTVKVKLHDDYIQLKAKHLIDAAGRKFIIGRKTDNLLLHPKELPVNIKPSSGWVLVKNVDRTIFDNSVYSTESLESRYYATNHWMGKGHWLWMIPLNTETKELSVGMIHHPDVIPSELVNTKEKFYAFLKANHNLVYKLLQSGEHIEFNYWPKIAHTSKKMFSADNWYVIGDAASNFDALYSTGTTMSCIAIESVTEIIRAKLVNEKDAEARRDAYNNFNLAVARFMNLAVSNQGQQVGNASIMSWRLYGNYMVWFNTLLPIYVGKWHLDLLFSRLALIFFKINTSFWLDTLQQLNYLAERGTNIGFMDQLRADQLIGGYHPDKFFDNFLENAKLEPGKLNVFAGLRAYCFYIVIWFTMLQWKGFGPIGLLRPRNIFHIVRLLLTGLVMLIAELMHKLKLSNQPSNSLVAKTREEFKSYRYQSRLRDWVGTNEISTARNN

SEQ ID NO: 88932 - protein, 421 aa, unidentified
  source 1..421: note = Caballeronia arationis
  REGION 1..421: note = tr|A0A158E3F6|A0A158E3F6_9BURK Tryptophan halogenase; OS = Caballeronia arationis OX=1777142 GN=AWB81_06037 PE=4; SV = 1
MRTTFDALIIGAGPAGSTAAILLALAGWSVALVEKQRFPRRKVCGECIAPSALPLFAALGIEQDLTLRAGPHLRRLALMRGSDRVVSDFPVAPDSDYYWGRAVGRETLDTLLADQAHKVGVQLLQPCAVLGLLGGPGAWRCDIRDLNTSATQTLRARVAIAAHGSWEALPSVPPQPRRPRRPSDLLAFKANFTGASLEEGLLPVLLFDGGYGGMVVAEGGVTTMAGCLRRDKLDVLRRENPGASAGECLEAMLRGQCSGVGETLNTASRQGAWIGAGPINPGIRLSSGDGLLRVGNAAGEAHPIIGEGISMAVQSAWLLCVQLLSVDTSPDRETVGEAWQRLVARRYAREWRLHFVPRIRLASAFAHASMHARSSALLLALAKRWPAFLPLGSRWAGKIRCAIDPAEVARLAQQRSDYEAL

SEQ ID NO: 88933 - protein, 506 aa, Xanthomonas perforans; identical to SEQ ID NO: 86133
  REGION 1..506: note = tr|A0A0G8XDB5|A0A0G8XDB5_9XANT Tryptophan halogenase; OS = Xanthomonas perforans OX=442694 GN=BJD13_17590 PE=4 SV=1

SEQ ID NO: 88934 - protein, 517 aa, Paucibacter toxinivorans
  REGION 1..517: note = tr|A0A4R6QNY9|A0A4R6QNY9_9BURK Tryptophan halogenase; OS = Paucibacter toxinivorans OX=270368 GN=DES47_102461 PE=4; SV = 1
MKPIQEVLIVGGGTAGWLTAAFLAKTLGTAAGGVKITLIESSEIGIIGVGEGTFPSIKGTLAAIGIDEACFIRACNATFKQGIRFDHWVRPPGTAGHDHYFHPFSAPSQRPGGPELLPYWLLGAARGNTAFAEAATLQKRVADASHGPKRFTDADFIGPLNYAYHFDAGRFAALLCEHGQSLGVQQLIGTVERVELAEDGAIGSVVTREHGSLTADLYIDCTGFRAALIGTALGSPFRNINDQLFVDRAVAVQVPYEGPDSQNHPIASYTISTAHEAGWTWDIGLQQRRGVGYVYSSRHTDDGRAEDVLRGYIGPAAETLSPRLLKLNVGYREVQWVKNCVAVGLSGGFLEPLESSGIGLIETAAYLVGFLFPADGNIAPAARQFNDQMKARYERIVDFVKMHYCLTQRSDTDFWRDNADPRSVPDSLREKLAMWRCRPPHRLDFVTDLEMYPPSSWQYVLHGMEFGCDISASRAAYPRIDDARKEFQMIRQLSEHALGDLPTHRALVERMCARAAV

SEQ ID NO: 88935 - protein, 507 aa, unidentified
  source 1..507: note = Cellvibrionaceae bacterium
  REGION 1..507: note = tr|A0A545SY65|A0A545SY65_9GAMM Tryptophan 7-halogenase OS=Cellvibrionaceae bacterium R142 OX=2591008; GN = FKG94_22380 PE=4 SV=1
MPDPVEKIVIVGGGTAGWLTAAIVAAHHQSKQPGGLQVTLVESSDIPTIGVGEGTWPTLKNTMQQIGIKESEFFNSCHAAFKQGGKFVDWVHGNGDFYYHPFTVPLGYGRLDLAPYIEDIANYAPDANFQHHVCEAGLAPRTMAESEFKGPCNYAYHLDAGAFADLLKRHCKANLGVEHIVDTVQEVKLAADGGIGSVVLAGRGALTADLYVDCTGFASLLLGDKLAVPFVNTDDVLFNDTALAMQVPYATDDSPLACNTIATGQRAGWIWDIGLTHRRGVGYVYSSDYISDDEAESDLRRYLGAAAEGLNARKIRFSSGHRAQYWKKNCVAVGLAAGFVEPLEATAIMLVEISARYIAENLPPDNGVMPITAKRFNAQMEYRWRRIIDFLKLHYMLSQRPEPYWRAHRREETIPESLREDLALWAHRGPTREDFDSAVELFPAASYQYVIYGMGFKPDFTRQTYLYRRQQEAEKIIQRNRQLTEQMLQTLPPHREYIEQWLATANK

SEQ ID NO: 88936 - protein, 506 aa, Xanthomonas alfalfae
  REGION 1..506: note = tr|A0A1S1XHP2|A0A1S1XHP2_9XANT Tryptophan halogenase; OS = Xanthomonas alfalfae OX=366650 GN=BHL63_05585 PE=4 SV=1
MIPAPLRNIVIVGGGTAGWMAAAAFARVLGPTFKVQLIESEQLGTVGVGEATVPHIKAFNNLLGIDEAEFVRQTQGSFKLGIEFVDWQRPGTAYMHGFGTQIGHPLGLLPFHQYWIKQHARGRAQPLGAYTLNTVAAARGKFMTSAGDVPANSPLANIAYAYHFDATQYAHFLRRYSQQRGVTRIEGLVEQVQLHPESGHVQSLQLASGQTVHGDLFIDCSGFRGLLIEEALHTGYHDFTHWLPCDRALAVPCEKVGPPTPYTRSTARAAGWQWRIPLQHRTGNGYVYCSAHISDDEAAATLLANLDGKPLADPRPLRFTTGRRKQCWNRNVVALGLASGFLEPLESTSIHLIQSGISKLLELFPREGISPVLVQRYNDRLAFEFDRIRDFLLLHYHATERDDSAFWRHCRHMPITPELQTTLDLFRDSGRFYRNAEEMFAEISWVQVLVGQGILPQGYHPLVDQVPDTDAEGFLASVAQTISHCVDVMPSHQQFIDRYCKAAALP

SEQ ID NO: 88937 - protein, 518 aa, unidentified
  source 1..518: note = Dokdonella immobilis
  REGION 1..518: note = tr|A0A1I4ZRH7|A0A1I4ZRH7_9GAMM Tryptophan halogenase; OS = Dokdonella immobilis OX=578942 GN=SAMN05216289_12810; PE = 4 SV=1
MLRSILIAGGGTAGWLCACYLAKTLNSGAQGAVRISLVESPDIGILGVGEGTFPSIRAALSQIGISESRFIRETQATFKQGIRFVDWVRPAGSPGRNHYFHPFNLPSSRVDGLDLLPYWLLGEAGEGASFADAVTLQTAVADAGRAPKRRGDADYDGPMNYAYHFDAMQVARLLAEQGRALGVSHHLGTIVDVPLDAQGAIAGVTTKELGTLHADLYVDCTGMRAALIGKALGQRFKPVGDVLFVDRAVAIQVPYAQPDAPIPSYTISTAHEAGWTWDIGLQERRGVGYVYSSRHTSDDRAEEVLRQYIGPAADGLNARRLPFETGYRPVQWKHNCVAIGLSAGFLEPLESTGIGLIEMGTYLLAHLLPMDGQFERASTHFNTMMRERYTRIVDFLKLHYCLTQRRDSAFWTDNADPASIPETLRDRLAEWRHRAPHRLDFITDLEMFMPASWQFILYGMEFQTDLSAQRAIYPRTAEARREFEMLRAVSPHAIRDLPGHRALVDDLCATTAPRLAVV

SEQ ID NO: 88938 - protein, 501 aa, Brevundimonas sp.
  REGION 1..501: note = tr|A0A0Q7DNF5|A0A0Q7DNF5_9CAUL Tryptophan halogenase; OS = Brevundimonas sp. Root1279 OX=1736443 GN=ASC65_15700; PE = 4 SV=1
MTEALVRDIVIVGGGTAGWMTAAALAKVVGTETYSITLIESEEIGTVGVGEATIPPILLFNKLLGIDEDEFIRETQATFKLGIEFVDWARLGHTYMHPFGLFGAEMNGIGFAHYWLRALKGGGDPGNHRFVAEAEAIRLGRFMRTPRPTPEMPSIHYAFQFDASLYAGFLRRYAEKRGVVRREGRIVTVEQDGQDGSIRSVTLADGKAVRGDFFIDCSGFRGLLIEDKLKAGYEDWSRWLPCNRAVAVPCERIGDPEPVTRSTAREAGWQWRIPLQHRTGNGYVFCDSYVSEAEATDALMSRLDGAAQAEPRVLRFLSGRRKKGWVANCVALGLASGFLEPLESTSIHLTQAGISKLLGMFPRRRLDPAMADRFNAEMDLQYESVRDFIIAHYKVSQRDDTPFWRYCRDMEIPDSLAAKLETFRARGEVMVENHELFRETNWFAILYGQGLVPDDYHPIADALADDDLRVRLARIRAAIQARVDGMPSHAAFLGRCVNGAA

SEQ ID NO: 88939 - protein, 494 aa, unidentified
  source 1..494: note = Cellvibrionaceae bacterium
  REGION 1..494: note = tr|A0A545TLX0|A0A545TLX0_9GAMM Tryptophan 7-halogenase OS=Cellvibrionaceae bacterium R142 OX=2591008; GN = FKG94_13995 PE=4 SV=1
MVQTVRKVVIAGGGTAGWIAAATLSSQLSRLLDITLIESDAIGTVGVGEATIPTQKAFHRLIGIDEQAFMRATRASFKLGIAFENWGQLGDRYIHSFGKIGRSTWMGDFQHMWHYAKSQGWAGDMDDYCFELQAAEAGKFATSPDSQISYAYHLDASLYAKFLRTFSEERGAKRLEGKIKQVHTHPDTGFIESLDLEDGQSVAGDLFIDCTGFRALLINGALGVDYEDWSHWLPMNSALAVQTKLSGDILPYTRSIARKAGWQWRIPLQHRVGNGHVYCSDHLSDDEAHAILMDNLDGELVSQPRPIRFLTGKRKEAWAKNCIALGLSSGFLEPLESTSIHLIQIGATRLVQMFPFNGVSEALRNHYNSYSTAELESIRDFLILHYKLNRRQDSAFWQERAALEVPDTLKHRMELYADAAIAYQDDSDLFRVDSWNQVMRGQGLDSHGYHPMGRLVANGQLQAALADLKAGIDRSVKNMPTHADFLRQYCAVEV

SEQ ID NO: 88940 - protein, 500 aa, Sphingomonas sp.
  REGION 1..500: note = tr|A0A0Q4QDR1|A0A0Q4QDR1_9SPHN Tryptophan halogenase; OS = Sphingomonas sp. Leaf67 OX=1736230 GN=ASE90_17305 PE=4; SV = 1
MPNEPVRSIVIAGGGTAGWMAATYLARRLTHLNLSITVVDSAAIGTVGVGEATVPAIRDFLSAIELGEPDVLRETGGTIKYGIRFDGWGGEGHRFFHPFGLYGVGAQGVAFHQYWLKLNAVGRAGPLADYCLATQLARNGLFLPPADQPANDLGVFNFALHFDAAAFAAMLRRLALANRVAHIDGRIGAVATDPARGHVTGVTLDDGRTIEGDLWIDASGFRSLLLGDALGVPYVDWRHWLPCDRAVAIPCTAAPGDPTPYTVATARKAGWQWRIPLRHRIGNGSVYCSAFQSDGDAEDALLATLEGAPLADPNRLRFTTGHRARFWSGNVVGLGLASGFLEPLESTSISLIQSGLERLIALFPDRDCDPRLAATYNRQSVLEFERLRDFLFLHYLANGRTEPFWQAIRAVEPPEPLQIKLDAWRSGGEFVRNEWDTFQDPSWLSLYAGFGDLPARHSPLADAIGDDALADSFARMRDAIGKTLAHAEPHGCFLARVTGA

SEQ ID NO: 88941 - protein, 496 aa, unidentified
  source 1..496: note = Salinimonas sediminis
  REGION 1..496: note = tr|A0A346NPY3|A0A346NPY3_9ALTE Tryptophan 7-halogenase OS=Salinimonas sediminis OX=2303538; GN = D0Y50_15220 PE=4 SV=1
MPNPIRKVVVAGGGTAGWMSAALLKKVLPQLEIELVESPDIGTIGVGEATIPPIQTFNQFLGLDEKAFLRETHGTIKLAIAFENWRVPDETYYHTFGAPGATLGFCGFQHFWLRAKQAGLSQSLWDFDLNYLSCKAGKFNKIQTDNPVYQMGYAYHFDSSLYGQFLRRLAEQAGVKRVEGTIAHVAQNAQTGFIEALQLQDGTQLKGDLFIDCTGMRGLLLQQALGVPYEDWSHWLCADSALAVPSQRHATSAPYTRSIAHKVGWQWRIPLTHRNGNGIVYSSSYMDESTAHDTLMGNLDTEALDTPRTIRFKTGRTTRQWAKNVVGIGLSSGFLEPLESTSIHLIQSGIVRLLKMFPNQGINPSAQTLYNQDSQQEYETIRDFIILHYHLNERTDSDFWQDMQRLTLPDRLAQKIAAFKDTATVFNEHNDMFRDASWVQVMMGQGITPTGYHPSADEHSDTAILDIMGKIYHAKQQPLSQMLSHDDFLARFTTVK

SEQ ID NO: 88942 - protein, 494 aa, Nonomuraea sp.
  REGION 1..494: note = tr|A0A1V0AG93|A0A1V0AG93_9ACTN Tryptophan halogenase; OS = Nonomuraea sp. ATCC 55076 OX=1909395 GN=BKM31_54195; PE = 4 SV=1
MAIEDFDVVVAGGGPAGSTLAALTAMRGHKVLVLEKERFPRYQIGESLLPSTVHGVCRLLGLTEELAEAGFTVKRGGTFRWGATPEPWTFSFSVSPHISGPTSFAYQVERSRFDELLLNNARRKGAEVREECAVTEVIEGEEGRAAGVRYTTADGAEHEVRAQFVVDASGNRSRLHSKVGGERKYSDFFRSLALFGYFEGGKRLAAPNSGNILSVAFDSGWFWYIPLSPTLTSVGAVVRRELAEKIQGDREKAMTALIAECPLISEYLADATRVTSGPYGELRIRKDYSYHQTSFWRPGMILIGDAACFVDPVFSSGVHLATYSGLLAARSINSVLSGDLDEKAALTEFEARYRREYGVFYEFLVSFYEMHRDEESYFWQAKKVTRNNHTELESFVDLVGGVSSGEQALTSSTSGRLRSRSAEFAAAVEEVAASDDGNMVPMFKSTVVKQVMAEGGQVQMRAMLGQDAEPEVPLFPGGLVASPDGMSWQPYRPA

SEQ ID NO: 88943 - protein, 497 aa, Streptomyces rapamycinicus
  REGION 1..497: note = tr|A0A0A0N9F2|A0A0A0N9F2_STRRN Tryptophan halogenase; OS = Streptomyces rapamycinicus (strain ATCC 29253 / DSM 41530 / NRRL 5491 / AYB-994) OX=1343740 GN=D3C57_134430 P; E = 4 SV=1
MSNEDREQYDVVVVGGGPGGSTLAALVAMRGHRVLILEKETFPRYQIGESLLPSTIHGVCRMTGVADKLAAAGFTPKKGGTFRWGANAEPWTFSFSVSPKIAGATSHAYQVERSKFDNILLEHAVEKGAEVRFRVSVTDVIEDAERVTGVRYTDADGTEHEVRAAYVVDASGNGSRLHKRVGGTREYSQFFRSLALFGYFEGGKRLPAPNSGNILSAAFESGWFWYIPLTPDLTSVGAVVRRENADKIQGDPERALLALIDECPLIKEYLSDATRVTDGQYGQLRVRKDYSYHQTKFWRPGLVLIGDAACFVDPVFSSGVHLATYSALLAARSISSSLAGIVSEEAAFTEFEARYRREYGVFYEFLMSFYDMHVDEDSYFWSAKKVTRNQHTELESFVELVAGVSSSEFDLDGAESAALRMKSKSAEFVSAIDEMSADAEGNMTPLFRSSAVRQAMQEGAQVQSRAFLGEDLGPDVPMFPGGLITSDDGMLWQPGPA

SEQ ID NO: 88944 - protein, 496 aa, Sphingomonas sp.
  REGION 1..496: note = tr|A0A0Q4Q0T7|A0A0Q4Q0T7_9SPHN Tryptophan halogenase; OS = Sphingomonas sp. Leaf67 OX=1736230 GN=ASE90_08855 PE=4; SV = 1
MKNGERRKVRVVVVGGGTAGWMTAAGLVGLLPAACDVTLIESEAIGIVGVGEATLPHLRLYLERLGIDERAFMAATDATYKLGIEFRDFGRIGDRYIHPFGTYGRPLAGVAFHHYWLRRDRAGAVPPIGAFSAGVVAAERRRFERPGSDPGDPTTSFGYAYQFDATRFAPFLRDWAEARGVTRIEGRIVRADRHGDSVAAVEMDDGRRIGGDLFVDCSGFRSLLLGETLAEPWEDWSHWLPCDRAVAVPCASPPGTIEPYTRATAMPAGWRWRIPLRHRVGNGYVYTSAYCSDDEATAALLAGLDGEPLADPRPLRFGAGRRRRSWAGNVVAVGLASGFLEPLESTSIYLVQAAITSLIEHFPDTRVAQADRDGFNTAIDAEYDRIRDFLILHYHATDRADSPFWNHVRTMTIPDTLADKLALWRGSAQVARYGHGLFLEPSWVAVYLGQRVVPTGWDPRADQPDAAGLDRALGSLAQAIADRVRAMPGHDAALGL

SEQ ID NO: 88945 - protein, 506 aa, unidentified
  source 1..506: note = Actinomadura syzygii
  REGION 1..506: note = tr|A0A5D0U0P3|A0A5D0U0P3_9ACTN Tryptophan 7-halogenase OS=Actinomadura syzygii OX=1427538; GN = FXF65_30285 PE=4 SV=1
MKTEEYDVVVVGGGPGGSTAATLVARHGHRVLLLEKETFPRYQIGESLLPATVHGICRLLGVEQEVERAGFTVKRGGSFRWGTNPLPWNFLFALSPEMSGPTSFAYQVERMKFDDILLRNAAARGVEVRENASVGEVLSDQERVRGVRYTGASGQVREVRARHVIDASGNRTRISGAAGGERVYSEHFRNLALFGYFEGGGRLPAPDSGNILCAAFDEGWLWYIPLSDTLTSIGAVISHTAAQEVQGDQDAREKALLGFIDRCEIVRDLLGDATRVTTGTYGELRVRKDYSYANTRFWRPGMALVGDAACFIDPVFSTGVHLATYGGLLAARSINSVLDGSVPEDRAFTEFEGRYRREYGVFYEFLSAFYDMQASEDTYFWKAKKVTLFDASAMEAFVALVGGVASGEAALTDAPALTARFAGSSRALGAAVEATGSMQTESGERMNHLFGVPAVASVMQEMNDIQRRGVLGRATAESPLLRGGLVPSADGLSWTDPETDPRTDPA

SEQ ID NO: 88946 - protein, 500 aa, unidentified
  source 1..500: note = Salinimonas sediminis
  REGION 1..500: note = tr|A0A346NRA9|A0A346NRA9_9ALTE Tryptophan 7-halogenase OS=Salinimonas sediminis OX=2303538; GN = D0Y50_17935 PE=4 SV=1
MNKPLSKIVIVGGGTAGWMCAAALAKVLKHPCQVQLIESDEIGTVGVGEATIPQLQIFNDLLGIDENEFMRATGATFKLGIQFVDWYKQGQDYFHAFGEVGKNFEGIQFYHYWLRLQQAGLASSIEDYTLASKACRLNKFSRPSKAGNSPLSSIAYAFHLDAGLYAKFLQNLAKTNGVTRTEGKIEQVLQHPNGNIKAVQLTNGDCHEGDFFIDCSGFSALLIGKTLGSPYENWQHWLPCDSAVTVPSTALSKLPPYTRATAHHAGWQWRIPLQHRTGNGHVYSSQFISDEQAQNTLLQHIDTPATDSPRTLRFTTGYRPQPWRKNCLAIGLSGGFLEPLESTGLYLIQTAIAKFFTFFPHTGENPYDQQAFNRQMQDEYVSIRDFLVCHYVLNTRNDSPFWQHCRHLPQPDSLKEKLGLFQENGRIFRDNNALFSDISWFEVMLGQGLVPRGYHAFTETFSTPALLERMASVRSVIQRCSEVLPDHAEYIRQHCAMKNR

SEQ ID NO: 88947 - protein, 496 aa, unidentified
  source 1..496: note = Salinimonas sediminis
  REGION 1..496: note = tr|A0A346NPY4|A0A346NPY4_9ALTE Tryptophan 7-halogenase OS=Salinimonas sediminis OX=2303538; GN = D0Y50_15225 PE=4 SV=1
MTQPHHIIIAGGGTAGWMAANLLAHQLAAHPVRITLLESSDIATVGVGEGSTPTLKQFFRELGITDEQWMPACQATYKVGIEFRGWSPQSGIDSYRHPFISQLDSYSERPFQVNCHTRRLGLDVTTRPDKFLFNSYLGQAGFSPSTPPNFPFRIEYGYHFDAALLGAFLKQHALHQGVEHINCTIEAAQTHPDGSLKTLIDTKGQRHSADMFIDCTGFRGLLLQQTLKVPFEPFAANLFNNKAVVIATAAPARPQVETRSTALSSGWAWQIPLQHRTGNGYVYSDDYLSADAAETELRQHLRVVDGQAEARHLSMKVGQVKQHWFKNCLALGLAQGFIEPLEATALHLVQLSINAFCKHYIKGNFTHQEADAFNQYIRGQFANVRDYIVAHYKLNTRHDSAYWVDNRNNMQLSEPLLQLLDTWYRGKDLAAHLQQRHQHSHFNSTSWHCLLAGYGTFPPLAAQQPGGADMFSEHQLATFFDGCLLNFGPPLTASVG

SEQ ID NO: 88948 - protein, 506 aa, unidentified
  source 1..506: note = Salinimonas sediminis
  REGION 1..506: note = tr|A0A346NN86|A0A346NN86_9ALTE Tryptophan 7-halogenase OS=Salinimonas sediminis OX=2303538; GN = D0Y50_11920 PE=4 SV=1
MAQTPSKQRIVIVGGGSAGWLTAAIVAAKHNIAKGQCGVDIVLIEASDIPTVGVGEGTWPTMRNTLSEIGLSEKEVFRRCHAAFKQGGKFVNWVTGNDAYYHPFTVPLGYGRIELAPYLEDITEFANASNFQQHVCEHNLAPRALSENEYSSAQSNYAYHLDAGEFATLLKEHCLENLAVVHQVATVEEVNVEASGHIAQLILNDGSVVEADLFVDCSGFRARLLGEALGSPLTRTDNVLFNNAALALHVPYECDYEIKPYTQATAQEAGWIWDIGLSSRRGVGHVYSTDFTDDDAAETLLRNYVGDTQGNLCARVIKFDSGYRKTVWKGNCVGVGLAAGFVEPLEATALMLIEISARYIAEQIPAPSSAMPIISERFNQQMQYRWQRIIDFLKLHYIFNQRSEPYWQANREAASIPESLRQDLAIWQYRGPQISDFSAAIELFPAASYQYVLYGMGFSPDFSLHGHRHTQSAMAQSVIKQNQLITEQKLTNLPNHRDYIAQWLAS

SEQ ID NO: 88949 - protein, 506 aa, Porphyrobacter sp.
  REGION 1..506: note = tr|A0A1D7NPD1|A0A1D7NPD1_9SPHN Tryptophan halogenase; OS = Porphyrobacter sp. LM 6 OX=1896196 GN=BG023_112711 PE=4; SV = 1
MTEGSVRKLVIVGGGTAGWITAAAFARLLGQRLEIELVESEAIGTVGVGEATIPQIIRLNTILGIDEHDFLRRTSGTFKLGIEFVDWGSLGSRYLHTFGDTGLNLAGVAFHHYWRRSMASGAQSSLWDFSLHQAAADQARFGKLDRVGNTAMTGLAYAYHFDASRYALYLRDYSEQRGVTRTEGIVESVERDGTSGDITAISLKGGKRVAGDFFIDCTGFRALLLGQELGVGYDDWSRWLPCDRALAVPSERLPTIVPYTRATAKKAGWQWRIPLQHRTGNGHVYSSGFISDEAAADTLLAGLDTKALDDPRPIRFTTGRRQAFWSHNCVALGLASGFLEPLESTSIHLIQSHVSRLIQLFPRSAHAEVERAEYNRRCTAEFEQIRDFLILHYHQTAREDSEFWRYCKNMDVPDSLTHKLALFAASGRVGRDVDDLFRDASWVQVMLGQGIVPADYDPMADQIEPAQLSEFLANLKTLIARSVAGLPSHEDYLRQHCAADPASLAA

SEQ ID NO: 88950 - protein, 507 aa, Sphingomonas sp.
  REGION 1..507: note = tr|A0A2T5GZC4|A0A2T5GZC4_9SPHN Tryptophan halogenase; OS = Sphingomonas sp. PP-CE-3G-477 OX=2135660 GN=C8J45_10229; PE = 4 SV=1
MTEIERTRVVIVGGGTAGWMTAAALVRLLPSACTVHLIESAEIGIVGVGEATLPHIRAFVERLGLDEADFMRATHATFKLGIDFRDFGAIGDSYIHPFGTFGRPLGDVGFHHYWLRLTAAGRTGPIGDYSVAVAAATADRFAIPDGPTDDLAASFGYAYQFDATLFGPYLRRFAEAQGARRTEGRIVAVDQHAETGNVRAVRLDSGETIEGDLFVDCSGFRSLLLGDAMAEPWEDWSNWLPCDRAVAMPCASPQGPIEPYTRATAKSAGWQWRIPLQHRVGNGYVYSSAHLDDQAAADSLVASVEGKPLADPRFLKFRAGRRRNSWVGNVVGIGLASGFLEPLESTSIYLAQMAITQLIELFPQRAGSEGISPTDRTEFNRMVDMEYDRIRDFLILHYHATIRDDSDFWNHVRTMDVPDTLAEKMDLFRRAGRVAQYSEGLFLEPSWLAVYLGQGIVPRGWDQRANGPALDGLDRAVANLRAQVAATAGAMPDHAAFLAQRNATIPA

SEQ ID NO: 88951 - protein, 390 aa, Corallococcus coralloides
  REGION 1..390: note = tr|H8MVI2|H8MVI2_CORCM Tryptophan halogenase; OS = Corallococcus coralloides (strain ATCC 25202 / DSM 2259 / NBRC 100086 / M2) OX=1144275 GN=COCOR_02747 PE=4 SV=1
MSEDSCDVAIIGGGPAGAAMAVALRRKAPSLSVTLVERTTYDAPRLGETLPPDVRLPLSRLGVWEGFLRDGHLASRGTASCWGRAEPGFHDTMMSPWGSAWHLDRTRFDERLSVEAAQQGARVLRATTLLDSESLGRDGYRLRLAHEAADPSTLRARFVVDATGSKATFASARGARRLVSDRCFAVYGAFQLQGGAAFPTHALVDACPEGWWYSALLPRGRVVVALVGDGDSLRGLRWATPASWMNLLRQAPATWARLDVCDFAGEALVAVPVLVGQLDRPWGEQWLAVGDAACTYDPLSSQGITKALDSALLAADALERCLRGDAEALQAYASTLNARFQDHQRTRAAYYRQEQRWPQAPFWKNRWESLPAPAAPPAQLRRPHSTEVNP

SEQ ID NO: 88952 - protein, 521 aa, Xanthomonas alfalfae
  REGION 1..521: note = tr|A0A1S1XJE9|A0A1S1XJE9_9XANT Tryptophan halogenase; OS = Xanthomonas alfalfae OX=366650 GN=BHL63_03770 PE=4 SV=1
MPDTTPSDPQQRPVRRVVIAGGGTAGWMAAAALSKLLGRHLQITLVESDEIGTVGVGEATIPSLVTFHRLLEIDEAAFMAATQATIKLGIAFEHWRDVDQHYIHSFGHAGTDHWSAGFQHFWLKGCQRGVARDFGDYCLELRAAQEGRFAHLPNGGMNYAYHLDAGLYARFLRRFSEGFGVTRIEGRIGQVETDAQSGFLTALTLQDGTRVEGDLFLDCTGFAGLLIGKTLGVGSDDWSRWLFADSALAVQTESVGPPVTYTRSRADQAGWMWRIPLQHRVGNGIVYSSRYMDQDGARAVLERNLTGRALTEPRPLRFTPNQRHRVWEKNCVALGLASGFLEPLESTNIHLIQRGIIRLLQTFPQVINAVDIAEYNRQAAQEITHIRDFVILHYHATDRRDTPFWRDCAAMDIPDSLRHRVELFRQSGRVFHQANELFAENSWVQVMLGQGVVPQQHHPVADLMGDAELGRFLETIRARVEAALVRLPAHADFLQRYCPAPPLPEPAARVPAPPVMATPAG

SEQ ID NO: 88953 - protein, 502 aa, unidentified
  source 1..502: note = Salinimonas sediminis
  REGION 1..502: note = tr|A0A346NJ49|A0A346NJ49_9ALTE Tryptophan 7-halogenase OS=Salinimonas sediminis OX=2303538; GN = D0Y50_03705 PE=4 SV=1
MTPHPNEQKCAVVIAGGGTAGWLTAFSLVSRLGPLLDITLIESDAIGTVGVGEATIPTMRTFHRLLGIDEKEFMAQTQATFKLGIQFDNWANQGDRYIHSFGEIGQRSWMAEFHEFWLEAKAQGFGGELSDYCLELQAAQAQKFCLEVDKRPVNYAYHLNATAYAAYLRKKAEGAGVKRIEGKIAHTALDAVSGNIEAVQLEGGRLVEGDFFIDCTGFHGLLIGKALGVGYEDWSHWLAADRAVAVQTELTSAPVPYTKSIAHPAGWQWQIPLQHRMGNGLVYSSRFMDAQQAQDVLLDNLPGAPVADVRHLAFKTGRRHKAWHKNCVAIGLSSGFLEPLESTSIHLITTAILRLMKLFPFGNEYTQQAARFNAETSFEVEAVRDFIILHYHATQRTDSDFWNFYRMLDIPDSLRHRMQLFSENAYVWPDEVGLFRTDSWVQVMLGQGLYPKQHHGAGRLLDQHGLEQQLANIRQAIQKMVTKMPQHHDFITQYCATDGWER

SEQ ID NO: 88954 - protein, 502 aa, unidentified
  source 1..502: note = Photorhabdus heterorhabditis
  REGION 1..502: note = tr|A0A0M9CW67|A0A0M9CW67_9GAMM Tryptophan halogenase; OS = Photorhabdus heterorhabditis OX=880156 GN=AM629_18120; PE = 4 SV=1
MTAAYLAKAFAQNVNITVIESKKVKKIGVGEATFSTVRHYFDYLGLDESEWLAECAGSYKLGIRFENWDGKGNHFYHPFERWEVVKGFPISEWWLKKGITDQSFDYATFLTPHLCEAKRSPRRLDGSLFVQNSDMRLGQSTLAEQRAQFPYAYHFDADGVASFLKRYAMNRGVSHIEDDVTYIEIDENGNIGFLETKIHGKLKADLYIDCTGFKGLLINKTLNEPFVSFSDVLKNNRAVALRVPREDTRDIEPYTTARTMSNGWRWTIPLYKRNGYGYVYCDKYQSPEEAEAELRKSIPYENADCAANHIRMRIGRSNRSWVKNCVAIGLSSAFVEPLESTGIFFIQHGIEQLVRFFPRSSDSELLIEEYNTRVNRVVDGVKEFLLLHFSLARRNDTVYWKEWKNVKLPKELLKKIMLAEDHLLDKETIYPFYHGFEEYSWNTMILGLSSSSLSGKPALSLMASDEADEILLQHHIKAKNMVSGLPTCHEYLQYLHDSQNKN

SEQ ID NO: 88955 - protein, 538 aa, Pseudomonas sp.; identical to SEQ ID NO: 85204
  REGION 1..538: note = tr|A0A1H7KWQ0|A0A1H7KWQ0_9PSED Tryptophan halogenase; OS = Pseudomonas sp. NFACC41-3 OX=1566194; GN = SAMN03159414_1635 PE=4 SV=1

SEQ ID NO: 88956 - protein, 496 aa, Sphingomonas sp.
  REGION 1..496: note = tr|A0A2T5GX07|A0A2T5GX07_9SPHN Tryptophan halogenase; OS = Sphingomonas sp. PP-CE-3G-477 OX=2135660 GN=C8J45_10433; PE = 4 SV=1
MTDTQRSRVVIAGGGTTGWLAAAAIAQQLGALVDVTLVESEEIGTIGVGESTIPTARAFHRLIGIDEQRFMAETGATFKLGISFENWARIGDRYIHAFGETGQSTWMGAFHHFWLQAREDGFGGDLGDYCLELQAAQAERFAIGGNAPELSYAYHLDAGRYARHLRTLAEGAGARRIEGFIDRVEQDGESGDIAALVLRSGERIEGDLFIDCTGFRAMLIGQTLGSPFENWRHWLPTDSAVVTQTRSVGPAVPYTRAIAHGAGWRWQIPLQHRVGNGLVYDSRHLSADEAHAQLLAEVEGEVLFDPRLIRFQPGRRQDVWRGNCVALGLAGGFVEPLESTAIHLAMIGITRLLQVFPFGGNHAATAKRFNEQAAADIERIRDFIVLHYVLTERDDTAFWNACRTMEIPETLSDRIALFRESGMAYQDGEEIFRVASWAQVMTGQRLSPRQHHRMGRIMGEPRLRQVLGDMKTTIAKQVAVLPTHQQFLRTYCPADV

SEQ ID NO: 88957 - protein, 504 aa, unidentified
  source 1..504: note = Niveispirillum lacus
  REGION 1..504: note = tr|A0A255Z5J3|A0A255Z5J3_9PROT Tryptophan halogenase; OS = Niveispirillum lacus OX=1981099 GN=CHU95_05175 PE=4 SV=1
MTRSPDPIRQIVIVGGGTAGWMAAAALSRLSANGTTRITLVESDEIGTVGVGEATIPPIQQFNALLGLDENDFVSQTQGSMKLGIAFEGWTMARPRYLHPFGSFGFDMEAIKFHQFWLKLHAQGLASGIDDYNLCATMANREKFARPVPDPSSVLSQITYAYHFDAGLYAAYLRRYAEARGVTRIEGKVASVPLRATDGFIEAVVLTDGRRLEGDLFIDCSGFRGLLIEEALNSGYEDWTHWLPCDRALAVPSANVGPPKPYTRAIARDGGWQWRIPLQHRTGNGYVYCSQFVSDEQAANTLLSNLEGPALADPRPLRFTTGRRRKMWNRNCVALGLASGFLEPLESTSIHLIQAGISKLLALFPDRSFNPTNEDAYNRLSAMQFEQVRDFIILHYVANDRPEPFWLRAAAMDIPDSLRQKIDLFRACGRLFRFEDELFSENSWIAVLLGQGVLPARWDPLVDTIDPGLVRHNLDRLRAVFARAADAMPGHGDFLARTAPVRKS

SEQ ID NO: 88958 - protein, 376 aa, Corallococcus sp.
  REGION 1..376: note = tr|A0A3A8IA87|A0A3A8IA87_9DELT Tryptophan halogenase; OS = Corallococcus sp. CA054A OX=2316733 GN=D7V88_34720 PE=4; SV = 1
MSDAHCDVAVLGGGPAGAGVALALRAQTQGSVTLVERASHDAPRIGETLPPDARRPLAKLGVWGGFLRDGHLASRGTASSWGSATLGHHDTLMSPGGSAWHLDRARFDASLRAQVAERGGTVRVGTTLTGCESLGAEGFRLHLSHPSEGLSTLCARFVVDATGWKADFATSQGARRQVVDRCFALYGDFRLREGAAFSTQALVEARPEGWWYSALLPGGRVVVALMGDGESLRGVRPSTPEAWLSLLERTTATRERLDVCDFTGEPLRAVPANVGLLDRPHAGHWLAVGDAACTFDSLSSQGISKALDSALLAAEALDQHLRGRAEALGAYAARVRQGFVEHLRTRDHYYREERRWPDAPFWRNRREALASDALAA

SEQ ID NO: 88959 - protein, 491 aa, Amycolatopsis sp.
  REGION 1..491: note = tr|A0A429CZA5|A0A429CZA5_9PSEU Tryptophan halogenase; OS = Amycolatopsis sp. WAC 04169 OX=2203197 GN=DMC61_18005; PE = 4 SV=1
MSVEDFDVVVAGGGPGGSTVATLVAMQGHRVLLLEKEVFPRYQIGESLLPATVHGVCRMLGVADELANSGFPIKRGGTFRWGARPEPWTFHFGISAKMAGSTSHAYQVERAKFDDILLKNAKSKGVVVREGCSVNDVVEDGERVTGARYTDADGNAHEVSARFVIDASGNKSRLYTKVGGSRNYSEFFRSLALFGYFEGGKRLPEPVSGNILSVAFDSGWFWYIPLSDTLTSVGAVVRREDADKIQGDREKALNTLIAECPLISEYLSNATRVTTGRYGELRVRKDYSYQQDSYWRPGMVLVGDAACFVDPVFSSGVHLATYSALLAARSINSVLAGDLDEKTALNEFEARYRREYGVFYEFLVSFYQMNVNEESYFWQAKKVTQNQSTDIESFVELIGGVSSGETALTAADRIAANSAEFAAAVDKMATGDGDDMVPMFKSTVVKQAMQEAGQVQMKALLGEDAEPELPLFPGGLVTSPDGMKWLPHHPA

SEQ ID NO: 88960 - protein, 531 aa, Actinoplanes italicus
  REGION 1..531: note = tr|A0A2T0JLZ0|A0A2T0JLZ0_9ACTN Tryptophan halogenase; OS = Actinoplanes italicus OX=113567 GN=CLV67_1392 PE=4 SV=1
MDQRIKRVVILGGGTSGWMAGAYLGKALQGTAEVTVLEAPAIPRIGVGEATVPNLQRVVFDFLGIPEEEWMRECNASFKTAVKFINWRTPGTGDPAAREWQGRPDHFYHPFGLLPTEDQIPLSHYWARKRLNGETDAPFDYSCFREPAMMDALKAPRTLDGERVTYYAWHFDAQLVADYLCRFATENLGVRHVRDAMERVELDDRGFITALHTKEGKRLEGDLFIDCSGFRGLLINQAMGEPFLDMSDHLLCDSAIATSLPYDDEAEGVEPYTSAIAMSSGWTWRIPLLRRFGTGYVYSSRFISQDDAIREFCDMWQIDPETTPPNKIRFRVGRNRRSWVKNVVSVGLASCFLEPLESTGIYFAYAAIYQLVKNFPDLRFDPALSDNFNRQIQSFFDDTRDFIQAHFYFSPRTDTPFWAANKELHLSESIQEKVAMYKAGLPVNAPITDESGYYGNLDAEFANFWTNGSYYCIFTGMGLLPDNPLPALAHKPDAVKNADLLFEEVQRRQDELVATLPSTREYLSMLHAKRP

SEQ ID NO: 88961 - protein, 506 aa, Porphyrobacter sp.
  REGION 1..506: note = tr|A0A1D7NPD7|A0A1D7NPD7_9SPHN Tryptophan halogenase; OS = Porphyrobacter sp. LM 6 OX=1896196 GN=BG023_112708 PE=4; SV = 1
MSDAPAPLKSIVIVGGGSAGWMTAAALAEAVGPDCAITLIESEAIGTVGVGEATIPPIRHFNQRLGIDEATFVRETQGSFKLGIQFVDWGKRGHSYFHPFGQYGAEFDTVPFYHHWMRESLAGRIDGPIDDFSMCWAMAKAGKFAHPSPDRRMIQSTFDYAYHFDAGLYAAFLRRFSEARGVTRIEGRVVDVALRGEDGFIESVTLDNGTRIAGEFFIDCSGFRGLLIEEALHAGYDNWQHWLPCDRAVAVPCERGEFTPYTRSTAREAGWQWRIPLQHRTGNGYVHCSQFISEDEAAEVLLANLDGKALADPRPLRFVTGKRKRFWEKNCVAIGLSAGFMEPLESTSLHLIQYGILRLIALLPDSTISPLLSNEYNAQTAREYELIRDFLILHYKASERDDSELWRYCAAMPIPDSLQYKIDHFRSHGMLVADGQELFANPSWIAVYLGQGIVPDRAPALATMRSQVPVAERMGQIARAMDEAVAAMPSHGEFIARHCAAPPLAA

SEQ ID NO: 88962 - protein, 501 aa, unidentified
  source 1..501: note = Alteromonas lipolytica
  REGION 1..501: note = tr|A0A1E8FDI6|A0A1E8FDI6_9ALTE Tryptophan halogenase; OS = Alteromonas lipolytica OX=1856405 GN=BFC17_20720 PE=4; SV = 1
MNSNPSQSIQKIVIVGGGSAGWMTAASLSNVLKGKCDITLIESDEIGIVGVGEATIPPIRVFNQTLGISEAEFLQRTNGTFKLGIEFVNWGSNGSRYFHPFGTYGRQFDTVSMHHYWLSAHQQGQAKPLDEYAMAWHLARKGKFIHPSGDPKNVLSTFEYAYHFDAGLYVKFLRDYAEQRGVKRIEGKISHASKNKDTGFISSVSLENGQVIDGEFFIDCSGFRGLLIEQALHTGYETWSEWLPCDRAWAVPTASNADPIPYTRSTAHTAGWQWRIPLQNRVGNGHVFSSAFISEEHARQQLLDNLDSDTLAEPRLIKFVTGRRKRFWNKNVVAIGLASGFIEPLESTSIHLIQAGIAKLLALFPDKSFNQRSIDEYNRIAIAEVERIRDFIILHYKLMERRDTEMWRYCADMDVPDELAEKIAHFREFGRITKGEMDLFGNTSWLAVHIGQGNTPQRTDPLVHYSDADYTGWLNKLNQVMTQYAQQAPGHMAYINNMTKS

SEQ ID NO: 88963 - protein, 523 aa, Actinoplanes italicus
  REGION 1..523: note = tr|A0A2T0JLZ3|A0A2T0JLZ3_9ACTN Tryptophan halogenase; OS = Actinoplanes italicus OX=113567 GN=CLV67_13912 PE=4 SV=1
MVKNVVIVGGGTAGWMSATYLRAAFGDRVGITLVESARIPTIGVGEATFSTIRHFFGYLGLAESEWMPECNATYKLAIRFENWRRPGHHFYHPFERLQRANGFSLADWWLQIGGARRLDEECFITTALCEAQRSPRHLDGTLYGIGAGGGDLGAGTDPGRSTLTEQDTQFPYAYHFDAAMLARYLTRIGVEQGVRHVTDDVVGVGRDDRGWITHVTTREHGEVAGDLFIDCSGFRALLINKTLGEEFDSFADVLPNDRAVALRVPSDIDTVGIRPYTTATAMDAGWIWRIPLYGRDGLGYVYAGEYCSEEEAERTLRDFVGPAAAGLAANHVRIRVGRNRRSWVANCVAIGLSSGFVEPLESTGIFFIQNGIEQLVKHFPRYGPADRNDGDDGLRAAYNGQVGRCMDGVREFLTLHYRGASRADTPYWKAAKERGDAELAERMRVWAEMLPGEENIWPHYHGFEPYSWIAMLIGLGRVQPPPRPALALLDATEAGQKFAALQTQAKRLVGELPGHREYLARLH

SEQ ID NO: 88964 - protein, 144 aa, unidentified
  source 1..144: note = Burkholderiales bacterium
  REGION 1..144: note = tr|A0A257GXX5|A0A257GXX5_9BURK Tryptophan halogenase (Fragment) OS=Burkholderiales bacterium PBB4 OX=2015566; GN = CFE44_23980 PE=4 SV=1
MDHALLKTIVIVGGGTSGWMTAAALCKVLQGKYKIVLVESEDIGTVGVGEATIPMIRRFNQVLEIDENEFMRETQGTFKLGIEFVNWGQLGDRYMHGFGVFGQDLWTVGFDQYWQRMYQQGKALDLEAYSINRMAALANKFMPA

SEQ ID NO: 88965 - protein, 202 aa, unidentified
  source 1..202: note = Burkholderiales bacterium
  REGION 1..202: note = tr|A0A257H894|A0A257H894_9BURK Tryptophan halogenase (Fragment) OS=Burkholderiales bacterium PBB4 OX=2015566; GN = CFE44_00145 PE=4 SV=1
MGADNTPVRRVVIAGGGTAGWMTAALISKTLGKSLQITLVESDEIGTVGVGEATIPALLAFHALLEINEQEFMAATQATFKLGISVENWRNVKEDYIHSFGMTGTDHWTAGFQHFWHKGRERNLAGDYGDYCLELKAAQQSRFAHLPRNGLNYAYHLDATLYAKYLRRFSENFGVQRREGKIVAVNPAARNGHIQSLALASG

SEQ ID NO: 88966 - protein, 521 aa, Xanthomonas citri
  REGION 1..521: note = tr|A0A2K2R2D7|A0A2K2R2D7_XANCI Tryptophan 7-halogenase OS=Xanthomonas citri OX=346; GN = xavtCFBP7764_17385 PE=4 SV=1
MPDTTPSDPQQRPVRRVVIAGGGTAGWMAAAALSKLLGRHLQITLVESDEIGTVGVGEATIPSLVTFHRLLEIDEAAFMAATQATIKLGIAFEHWRDVDQHYIHSFGHAGTDHWSAGFQHFWLKGRQRGVARDFGDYCLELRAAQEGRFAHLPNGGMNYAYHLDAGLYARFLRRFSEGFGVSRVEGRIGQVETDAQSGFLTALTLQDGTRLEGDLFLDCTGFAGLLIGKTLGVGSDDWSRWLFADSALAVQTESVGPPVTYTRSRADQAGWMWRIPLQHRVGNGIVYSSRYMDQDGARAVLERNLTGRALTEPRPLRFTPNQRHRVWEKNCVALGLASGFLEPLESTNIHLIQRGIIRLLQTFPQVINAVDIAEYNRQAAQEITHIRDFVILHYHATDRRDTPFWRDCAAMDIPDSLRHRVELFRQSGRVFHQANELFAENSWVQVMLGQGVVPQQHHPVADLMGDAELSRFLETIRTRVEAALVRLPAHADFLQRYCPAPPLPEAAARVPAPPVMATPAG

SEQ ID NO: 88967 - protein, 246 aa, Pelomonas sp.
  REGION 1..246: note = tr|A0A2R7SNZ6|A0A2R7SNZ6_9BURK Tryptophan halogenase (Fragment) OS=Pelomonas sp. HMWF004 OX=2056841; GN = DBR42_14680 PE=4 SV=1
MNTAPTFRRVVIAGGGTAGWMMAALMSKLLGKQLDITLVESEEIGTVGVGEATIPALHTFHNLLGIEEPAFMAATNATFKLGINFEGWHDIGKDYFHSFGTTGTDHWSAGFQHFWLKGRATGIAKAYTDYNPETVAAFANRFAHLPRNGLNYAYHLDASRYAQYLRTMSEAHGVRRVEGKIATVLQEGPGEGRDRDITALQMQDGSRIGGDLFIDCTGFRSLLLGETLGVGYEDWSHWLPCDRAVA

SEQ ID NO: 88968 - protein, 521 aa, Xanthomonas pisi
  REGION 1..521: note = tr|A0A2S7CUK0|A0A2S7CUK0_9XANT Tryptophan 7-halogenase OS=Xanthomonas pisi OX=56457; GN = XpiCFBP4643_20820 PE=4 SV=1
MSHAAPLPPQQRPVRRVVIAGGGTAGWMAAAALSKLLGRQLQITLVESDEIGTVGVGEATIPSLVTFHRLLEIDEATFMAATQATFKLGIGFEHWRDVDRHYIHSFGHTGTDHWSAGFHHFWLKGRQRGVACDFGDYCLELRAAQEGRFAHLPNGGMNYAYHLDAGLYARFLRRFSEGFGVKRLEGRIGQVQTDPDSGYLTALTLQDGTNVEGDLFIDCTGFAGLLIGKTLGVGSEDWSRWLFADSALAVQTESVGPPVTYTRARADQSGWMWRIPLQHRVGNGIVYSSRYTDQDSARAVLERNLQGRALTEPRALRFTPNQRHRVWEKNCVALGLASGFLEPIESTNIHLIQRGIVRLLQTFPQVINAADIAEYNRQAADEIAHIRDFVILHYHATDRRDTPFWRDCAAMEIPDSLRHRMELFRQSGRVFHQGNELFAENSWVQVMLGQGITPQQHHPVADLMGDAELSHFLQGIRQRVDATVATLPPHADFLRRHCPAPPLPDPAPHMRSDAALAAPAG

SEQ ID NO: 88969 - protein, 521 aa, Xanthomonas vasicola; identical to SEQ ID NO: 86430
  REGION 1..521: note = tr|A0A5K1N125|A0A5K1N125_XANVA Tryptophan halogenase; OS = Xanthomonas vasicola pv. vasculorum NCPPB 206; OX = 1094181 GN=KWI_0108195 PE=4 SV=1

SEQ ID NO: 88970 - protein, 532 aa, unidentified
  source 1..532: note = Parvularculaceae bacterium
  REGION 1..532: note = tr|A0A520R6N6|A0A520R6N6_9PROT Tryptophan 7-halogenase OS=Parvularculaceae bacterium OX=2510335; GN = EVA70_07070 PE=4 SV=1
MREETDILIVGGGTAGWLTAAYLAQTLASNKKGGVRVTLIESSDIGIIGVGEGTIPTIRATMNTIGVDEAVFMREAHASFKQGIKFVNWTHAPEDNPTDWYYHSFSQPRIMENGQSLTPYWLMGLSGGAHFSDAVCLQDRLCEGFRAPKTLQHGPYLGPLSYAYHFDAGRLATLLKNLGVERGVKHLIGNVEEVVLDESGAIERIKTKEHGDLRANLYVDSTGFSGLLIEKALGEKFHSLNNQLFVDSAVAIQVPYEDPNAPMNVATVSTAHEAGWTWDIPLADRRGVGYVYSSKYTDDDRAEQVIRNYIGPAARDLSARKLKLRVGTRKRNWVKNCVAVGLSAGFLEPLESTGIMMSEVAAHLISLLYPRNGDMEAAAKHFNRSMSERFHAVTDFIKLHYCLTKRTDNPFWIDNTHPDTIPDSLKQRLELWRQRPPDVFDFPSLHECFEAFNYEYVLYGMEFKTDLSGLDSIYPHKEMAQREFARVAAAAKQALNRLPDHRKMLQDVYQKGLVPTRNAATAERQISALRGS

SEQ ID NO: 88971 - protein, 390 aa, Myxococcus xanthus
  REGION 1..390: note = tr|Q1DDL6|Q1DDL6_MYXXD Tryptophan halogenase; OS = Myxococcus xanthus (strain DK 1622) OX=246197; GN = MXAN_0996 PE=4 SV=1
MSEASYDVAIIGGGPAGAAMAVALRDLAPFLSVVMLERTDYDTHRPGETLSPDLRIPLSRLGVWSSFLRDGHLASRGTSSCWSRAEPRIQDTQMSPWGSAWHLDRARFDERLSLEAARQGVRVLRLTTLLDVESIAKEGYRLHLSQRKTGALTLRARFVVDATGWKATFAMTQGARRRIRDRCFTVHGAFQLRPGESFPTDALVESCPEGWWHSARLPSDCVAVTLVGDGDSLHGLRWATPEPWAALLEQAPVTQARLAACDFAGEPLVAAPVLVGELDQMHGERWLAVGDAACTHDPLSAQGIFSALDSALLAAEALEQYLRGEEDALCAYEQTLHLRFNEHLHRRSRTYLEEQRWPDAPFWKNRHTAFPALTPAAGQRSAPAPTGLAP

SEQ ID NO: 88972 - protein, 533 aa, Streptomyces sp.
  REGION 1..533: note = tr|D9UK02|D9UK02_STRS3 Tryptophan 6-halogenase; OS = Streptomyces sp. (strain SPB78) OX=591157 GN=SSLG_01635; PE = 4 SV=1
MPETDNRIRKVVILGGGTAGWMTASYLGKALQGTVDIQVLEAPAIPRIGVGEATVPNLHRVLFDYLGIPEEEWMRECNASFKMAVKFVNWRTPGRGEPDSRTRPDGKPDHFYHPFGILPDHDNTPLSHYWFKNKYEGVTDKAFDYSCFREPPVMDAKKSPKWMNGESSTRYAWHFDAALVADFLRRFATDKQGVEHIQDEMVRAEQDERGYVTALHTKSGRVLDADLFVDCSGFRGLLINKALGEPFIDMSDHLMCDRAVATAVPHDDDANGIEPYTSAIAMSSGWAWKIPMLGRFGSGYVYSSRFTTQEEATREFCELWNLDPETTKFNHVRFHVGRNRRAWVNNVVSIGLASCFLEPLESTGIYFITAAIHQLAKHFPDRTFPQALVDSFNEEIEVMFDDTRDFIQAHFYYAPRDDSEFWRAQKTLKLPENIQRKIAAYKAGLPINSPITDESTYYGNFEAEFRNFWTNGSYYCVFAGLGLEPDAPLPALAHKPESVAGAQPLFTKVAQEQRHLLDTLPSAHDYLRRLHAK

SEQ ID NO: 88973 - protein, 531 aa, Xanthomonas vasicola
  REGION 1..531: note = tr|A0A5K1N5L9|A0A5K1N5L9_XANVA Tryptophan halogenase; OS = Xanthomonas vasicola pv. vasculorum NCPPB 206; OX = 1094181 GN=KWI_0100365 PE=4 SV=1
MWSFERGQLAPFVCPSAVFAQECIDMIPAPLRNIVVVGGGTAGWMAAAAFARVLGPTFNVQLIESEQLGTVGVGEATVPHIKAFNNLLGIDEAEFVRQTQGSFKLGIEFVDWQRRGSAYMHGFGTQIGHPLGLLPFHQYWIKQHARGKAQPLGAYTLNTVAAARGKFMTSAGDVPANSPLANIAYAYHFDATQYAHFLRRYSEQRGVTRIEGLVEQVQLHPESGHVQSLQLASGQTVHGDLFIDCSGFRGLLIEEALHTGYHDFTHWLPCDRAFAVACEKVGPPTPYTRSTARAAGWQWRIPLQHRTGNGYVYCSAHISDDEAAATLLANLDGKPLADPRPLRFTTGRRKQFWNRNVVALGLASGFLEPLESTSIHLIQSGISKLLELFPREGISPVLVQRYNDRSAFEFDRIRDFLLLHYHATERDDSAFWRHCRSMPITPELQTTLDLFRDSGRFYRNAEEMFAEISWVQVMVGQGILPQGYHPLVDQVPDRDAEGFLASVAQTIAHCVDVMPTHQQFIERYCKAAVPA

SEQ ID NO: 88974 - protein, 486 aa, Sphingomonas sp.
  REGION 1..486: note = tr|A0A0Q4QKW7|A0A0Q4QKW7_9SPHN Tryptophan halogenase; OS = Sphingomonas sp. Leaf67 OX=1736230 GN=ASE90_02525 PE=4; SV = 1
MTAAALANRLQGLGVRVQLIESDEIGTVGVGEATLPHIRAFNTTLGIAEADLMRATEATYKLGIEFCDWGRIGDRYIHPFGNYGPTDDSIPFYHQWLRLRELGDATRLDEYSFPVIAAEHNRFRHPGSDVRQVESSFGYAYQFDASLYARFLRRYAETRGVERIEGKVVDVALHGESGHVRNVTLADGRVLEADLFVDCSGFRGLLIEGALQSGYDDWSNWLPCNRAVAVPTDSCSPLGPYTRATARTAGWQWRIPLQHRVGNGHVYCSSFISEDDAQDQLIANLDAPMQAEPRRLRFTTGRRRDFWKRNVVAIGLASGFLEPLESTSIHLIQDGITELLALFPTRRFDAGDIAEYNRRMALHFERVRDFLLLHYVATEREDSEMWRHFRALTLPDSLQAKIDAWLTRGYVVPYQFGLFLPPSWVAVMLGQRLMPKGYDPRVLAQGDATIAARAAALRRAVAQAVQATPDHADYIRRSPAAAGLAA

SEQ ID NO: 88975 - protein, 514 aa, Variovorax sp.
  REGION 1..514: note = tr|A0A430H7K8|A0A430H7K8_9BURK Tryptophan 7-halogenase OS=Variovorax sp. 679 OX=2496119; GN = EJO71_10495 PE=4 SV=1
MLNLRNLSRAVVVGGGAAGWFAALTLRRMFAPHVEVRVIESPADGATDTVGADEGGLLNLVEALRGNGIRLDEFVRETGATLNLGISYEGWRTGAEDDCYYHLFGRPGLQEIDWTERGFHPLLSGMVHEGIELHRYIPGFASIASNASQQQTKAMLQLGESSGLSTSFHFDTHKLAEYLCRVAVSRGVVHQQARVEELVCDAGGMACAVKLEGVEEALELELLIDASGLARLGIGNKLGVRWHSFSEYLLPDRAVPFHMPNPQPNPSLVTRAIAMPAGWMWQIPLAERVGAGYVFSSAHTDETKVIDEIRCRIGPGIEPMRALKFESGHFAQAWVGNIMAVGLASGFVEPLEATSIGQLLEQLRNFERIVTACDGVVPGHLIDGFNEANARCWAGIRDFLRMHYDCPRRDTDFWRDAAGLPLPPSYAELRECFQQRTPRLIDVQNYVAHGWRGIFHPVNWLFVAAPLGVVSREAAATELASLPVASRKRVAVYIHRMRELGAAGNFSCKEEPSR

SEQ ID NO: 88976 - protein, 521 aa, Xanthomonas citri; identical to SEQ ID NO: 86377
  REGION 1..521: note = tr|A0A2D2SI69|A0A2D2SI69_XANCI Tryptophan halogenase; OS = Xanthomonas citri pv. phaseoli var. fuscans OX=473423; GN = XcfCFBP6989P_20080 PE=4 SV=1

SEQ ID NO: 88977 - protein, 491 aa, Sphingomonas sp.
  REGION 1..491: note = tr|A0A0Q4Q5B9|A0A0Q4Q5B9_9SPHN Tryptophan halogenase; OS = Sphingomonas sp. Leaf67 OX=1736230 GN=ASE90_02265 PE=4; SV = 1
MTRMRIVIAGGGTAGWLAAALLTRQLSSLVEVTLVESEAIGTVGVGEATIPTIRSFHALLGLDEAEFMGATGASFKLGIAFENWARAGDCYIHSFGEVGRSTWMGDFQHFWLEARAQGAAGPIGAYCLEHEAAEAGRFATGPDAPLNYAYHFDAGRYAAYLRTRSEAQGLTRVEGKIARVERAGESGDIAALVLADGRRVAGDLFLDCTGFHALLIEQTLGVGFEDWGHWLPTDRALAVQTVATGPAPPYTRAIAHDAGWRWQIPLQHRVGNGLVYSSRHLSDDAARDRLLASVEGQTLIEPRLIRFRTGRRLTTWERNCVAISLSSGFVEPLESTSIHMVMIALTRLVQLLPFGHPGEAARARFNEQSRREIEAVRDFVLLHYHLNQRPEPFWRERREIAPPDTLAERIALFAQGAHAYQSADDLFRVGSWLQVMLGQRLEPAAHHPLAKMMPPGQLAAVLRDLNDGIAARVAALPTHQQFLDLYCRSGA

SEQ ID NO: 88978 - protein, 538 aa, Burkholderia cenocepacia
  REGION 1..538: note = tr|A0A071M663|A0A071M663_9BURK Tryptophan halogenase; OS = Burkholderia cenocepacia OX=95486 GN=DT99_30260 PE=4; SV = 1
MSNPIRNIVIVGGGTAGWMSASYLVRALQQQANITLVESAAIPRIGVGEATIPSLQKVFFDFLGIPEREWMPQVNGAFKSAIRFVNWRKSPDRAPGDHFYHLFGNVPNCDGVPLTHYWLRKREQGFQQPMAYACYPQTEALDAKLAPCLADGTRQMSHAWHFDAHLVADFLKRWAVERGVKRVVDEVEQVHLDDRGYISSLSTKEGRTLEADLFIDCSGMRGLLINQALKEPFIDMSDYLLCDSAVASAVPADDARVGIEPYTSAIAMNSGWTWKIPMLGRFGSGYVFSSKFTSRDQATADFLDLWGLSDEQPLNQIKFRVGRNRRAWVNNCVSIGLSSCFLEPLESTGIYFIYAALYQLVKHFPDTSFDPRLTDAFNAEIVYMFDDCRDFVQAHYFTTSRDDTPFWRANRHDLRLSDAIQEKVERYKAGLPLTTASFDDSTYYDTFDYEFKNFWLNGNYYCIFAGLGLLPDRSLPLLRHRPESIDKAEAMFARIRREAEHLRKSLPTNHDYLRSLREGHAGLSRSQPGPTLAAPEIL

SEQ ID NO: 88979 - protein, 281 aa, Pelomonas sp.
  REGION 1..281: note = tr|A0A2R7RXY6|A0A2R7RXY6_9BURK Tryptophan halogenase (Fragment) OS=Pelomonas sp. HMWF004 OX=2056841; GN = DBR42_28245 PE=4 SV=1
GETLGVGYEDWSHWLPCDRAVAVQTASVREPWPYTRSIAHPFGWQWRIPLQHRVGNGLVYSSKELSDADAPEMLKRNVEGELMTAPRLIRFTPGQRDKTWHRNCVAVGLASGFVEPLESTSIHLIQRAAIRLMQLFPAGGVQQADVDEFNLQSKRELEHIRDFIVLHYHVTQRRDSALWNHVRTMDVPASLRHRIELFGETARVFRTSDELFAENSWVQVMMGQGLTPQRYHPVADLMGPDELSRFLGDIHLKVSRTVAGLPQHKAYVEQLCAPYRSEAVR

SEQ ID NO: 88980 - protein, 409 aa, Corallococcus coralloides
  REGION 1..409: note = tr|H8MI74|H8MI74_CORCM Tryptophan halogenase; OS = Corallococcus coralloides (strain ATCC 25202 / DSM 2259 / NBRC 100086 / M2) OX=1144275 GN=cmdE PE=4 SV=1
MKTESADILIIGAGPAGSVAAGLLRKQGRDVLVLEREQFPRFSIGESLLPQSMEYIQEAGFLQDVVEAGFQFKNGAAFERAGRYTDFDFRDKFSPGWGTTYQVQRARFDQILAQAAEKKGATVRFRHEVLSVDFTSGQPVVTARSPEGETYQVKARFLLDASGFGRVLPRLLNLETPSNFPVRGAIFTHVVDNIPLGTFDRNKIRVTTHPEHVHVWYWTIPFSDGRCSLGVVAKKEFLDQFTGTDTERLQAIVKEAPSLQNLLKDAVWDTPARKLTGYAANVKSLWGPGFALLGNAGEFLDPVFSSGVTIAFKSASLASACIAREFAGEKVDWEKDYAKPLKAGVDTFRTFVESWYEGGFQKVIFHPNPSDDVRRMISAILAGYAWDKNNPYVADSKRRLTVLEGLCAA

SEQ ID NO: 88981 - protein, 507 aa, Brevundimonas sp.
  REGION 1..507: note = tr|A0A0Q7DYM5|A0A0Q7DYM5_9CAUL Tryptophan halogenase; OS = Brevundimonas sp. Root1279 OX=1736443 GN=ASC65_09155; PE = 4 SV=1
MDQGQARRIRSVVIVGGGTAGWMTAAALVQHFRGAPVSITVVESSEIGTIGVGEATIPTIRRFYAQLGLRDAEVMQATQATCKLGIRFQGWSGAGPDFIHPFGLFGQDLKGVGFHHYWLKQRAASDPGPMGDYSLGASLAAAGKFTLPSPNPPSSLSVFDWALHFDAALFAQYLRRYAEAGGCQRIDARIGSGALRPEDGFVRALVLDDGREVEGDLFVDCSGFRGLLIGEALGVPYEDWGRWLRCDAAWAVQSENASSANPDPFTRVTARTAGWQWGIPLQHRAGNGVVFSSAHTSDEDALAELSANLMGRPLMEPRRIGFRPGRRARAWEKNCVAIGLSAGFLEPLESTSIALIENGIERLKSLFPDRDFAGPVLDEFNDQSAREMERVRDFIVLHYKLNRRDEPFWRDCREGEIPETLERKLALWKARGQFVRYRWEMFHPASWLAIYAGFDVFPGDYDPAVDALDPAYLERSLKEMRENLSRLVAETPDHARFLAALDPARAA

SEQ ID NO: 88982 - protein, 457 aa, Pelomonas sp.
  REGION 1..457: note = tr|A0A2R7SLA0|A0A2R7SLA0_9BURK Tryptophan halogenase (Fragment) OS=Pelomonas sp. HMWF004 OX=2056841; GN = DBR42_15415 PE=4 SV=1
MRDVVVLGGGSAGWLVAGLLAAEHGELRITLIESSDVPTIGVGEGTWPSMRDTLRRIGLDEAEFIRRCQVSFKQGSRFDGWVRGAAGSEGDRYYHPFMLPVGYGDVDLVQAWLATQAERPFADVVSPSVQVCDAGCAPKQVQTPGFAAVANYAYHFDAGLFAQMLREHAVSRLGVRHLVDHVDAVLTAEDGDITALQTREHGLLPGQLFIDCSGLTARLIGQHFGVGLKSERDVLFNDAALPVQVPHARPDAPLATCTIATAWAKGWIWDIGLPSRRGVGCVYSRAHASEDEAQAALQAYLDATGAPHERPAPRSIRYDPGYRERFWVRNCVAIGLSSGFIEPLEASALAMVELSAQRLCEELPMTRATMEAVARRFNDDFSYRWARVIDFLKLHYALSQRDDSTYWRAHRDPATWPARLRELLPMWRLRAPARHDFGRNDEVFPSASYQYVLYGMG

SEQ ID NO: 88983 - protein, 511 aa, unidentified
  source 1..511: note = Salinimonas sediminis
  REGION 1..511: note = tr|A0A346NRG0|A0A346NRG0_9ALTE Tryptophan 7-halogenase OS=Salinimonas sediminis OX=2303538; GN = D0Y50_18235 PE=4 SV=1
MQQTNTPLHSVVIMGGGAAGWLTAGIMAAASTARRPLHITVVESPDVGILGVGEGTWPTMRDTLRKMGIDEATLLRECDASFKQGTCFRQWYNGQSDDVYFHPFDLPAGMFETDILGWWANGQQHVPYAQLFSATPQLCKANKAPKQAQTPPYAAVANYGYHLDANKFAALLKRHCMHHLGVKHVELHVSKVEADDHGYLTALGDGQVQVTGDFFVDCSGFAASLIGQHFGVKLQDQSAILHNNSALAVQATYRQDTPPIACTTHSTAHPNGWIWDIALPHRKGVGCVYSSAFCDEDYARKTLLDYLNRDTAIEPVSEHQVRKLSFTPGYRETPWVKNCVAIGAAAGFLEPLEASALVMTELAANHVAAQLPYTREHCAPAARQFNTAMQNKWSRIIDFLKLHYVLSTRDDSLYWRSMKNPSGASVQLNDWLAMWHHRSPNIHDFQFQDELFPLASYLYILSGMGYAPVGASPHQIGTKAEQFVRQNYQRSRQLLAALPDNRILIEQIRQG

SEQ ID NO: 88984 - protein, 538 aa, Burkholderia cenocepacia
  REGION 1..538: note = tr|A0A3Q9FB44|A0A3Q9FB44_9BURK Tryptophan 7-halogenase OS=Burkholderia cenocepacia OX=95486; GN = D5R55_19525 PE=4 SV=1
MSNPIKNIVIVGGGTAGWMSASYLVRALQQHANITLVESAAIPRIGVGEATIPSLQKVFFDFLGIPEREWMPQVNGAFKSAIRFVNWRKSPDGSRGDHFYHLFGNVPNCDGVPLTHYWLRKREQGFQQPMAYACYPQTEALDAKLAPCLPDGTRQMSHAWHFDAHLVADFLKRWATERGVKRVVDEVERVHLNDRGYISSLSTKEGRTLEADLFIDCSGMRGLLINQALKEPFIDMSDYLLCDSAVASAVPADDARDGIEPYTSAIAMNSGWTWKIPMLGRFGSGYVFSSKFTSRDQATADFLDLWGLSDKQPLNQIKFRVGRNQRAWVNNCVAIGLSSCFLEPLESTGIYFIYAALYQLVKHFPDMSFDPRLSDAFNAEIVYMFDDCRDFVQAHYFTTSRDDTPFWRANRHDLRLSDAIREKVERYKAGLPLTTTSFDDSTYYDTFDYEFKNFWLNGNYYCIFAGLGLLPDRSLPLLRHRPESIDKAEAMFARIRREAERLRATLPTNHDYLRSLRDGEAGLSRSQPGPTLATPEIL

SEQ ID NO: 88985 - protein, 527 aa, unidentified
  source 1..527: note = Cellvibrionaceae bacterium
  REGION 1..527: note = tr|A0A545SLW0|A0A545SLW0_9GAMM Tryptophan 7-halogenase OS=Cellvibrionaceae bacterium R142 OX=2591008; GN = FKG94_27845 PE=4 SV=1
MDNQVKTVVIVGGGTAGWLTAGVIAAEYGGEPDGIAVTLIESPQVATVGVGEGTWPTMRDTLRRIGASELDFIRQCDASFKQGSKFIRWTTGQDSDSYYHPFSMPNGFLELNRVYFWQSLQAEQKFADAMCAQPQVCEHGLAPKQLSTPEFAAVLNYGYHLDAGKFGEFLKRHCIDRLGVRHVLDHVTGVNSSDNGDIASLSTAQSGQLSGDLFVDCSGSAALLLGNHFQVPFVSKQGVLFNDCALAAQVPYGDPDAPVASTTHSTAQRAGWIWDIGLQSRRGVGHVYASAYTSDEQAEQDLRAYLEPSLGAAGADSVAVRKIHFNPGYRAEFWHKNCVAIGMAAGFIEPLEASALALVELAAAMIRDDFPANRALMDITAKRFNARFRYRADRVINFLKLHYVLSQRRDGAYWKDNIDMSTVPDSLQELLSLWRYQVPSRLDFIQAEEVFPAASYQYILYGMGFNSHLRQLHRYTEEQPHALRVMRANAISVQKYLHALPSNRALLQHICGDVQAQSASGLQARRS

SEQ ID NO: 88986 - protein, 514 aa, Brevundimonas sp.
  REGION 1..514: note = tr|A0A0Q7DYM7|A0A0Q7DYM7_9CAUL Tryptophan halogenase; OS = Brevundimonas sp. Root1279 OX=1736443 GN=ASC65_09150; PE = 4 SV=1
MDQPRRPLKKICVVGGGTAGWIAAALMAEHFKGRLCEIELVESDDIGTIGVGESTVPPFLQLLARLGVDEPEFIRETQASFKLGIEFSDWKQKGERYFHPFGAIGAQVDVSDFYQVWLKAHLNGYPRPLQDFAPANVMAQADRFMLPFKAPRTPLAGASYALHVDAKRVARFLRTYAEARGVKRTEGIVEDVATRPDGFVQSLRLKSGQVVEADFFIDCSGFRALLIGKALQVAYTDWSHWLLCDRAIAVQTENVSPPHPYTQAHAEDFGWRWQIPLQHRTGNGYVFSSAHLSDDEATAVLMSKVEGRPVVKPMAVPFKTGVRDRIWSKNVLSLGLASGFIEPLESTAIHLIYRGMDFFFRYLPDLDCAPALADEYNRRMTADYEEIRDFVVLHYCLTQRDDTAFWRACRDMVPPESLQAKIDLFRANGSLAEGLDALFRNASWQSVMDGMGVVPRTWHPLVERIPFEGVPAELDKAADLVRRAAEDQPMLQAFLDAHCAAPPVELPIAELAAV

SEQ ID NO: 88987 - protein, 538 aa, Burkholderia cenocepacia; identical to SEQ ID NO: 85167
  REGION 1..538: note = tr|A0A3N9EJW0|A0A3N9EJW0_9BURK Tryptophan 7-halogenase OS=Burkholderia cenocepacia OX=95486; GN = DF042_31855 PE=4 SV=1

SEQ ID NO: 88988 - protein, 503 aa, Paucibacter toxinivorans
  REGION 1..503: note = tr|A0A4R6QIQ3|A0A4R6QIQ3_9BURK Tryptophan halogenase; OS = Paucibacter toxinivorans OX=270368 GN=DES47_106113 PE=4; SV = 1
MSPKPLRNIVIVGGGTAGWMTAAAFSKALGQAYSIRLIESDEIGIIGVGEASIPNLTEFNRALGIDEDEFLRATRGSFKMGIEFVNWGALGDRYTHGFGKVGQMADTVPFHHFWLRMAQQGKAGPLGDYSINTVAPRQARFMRARADMAGSPLGEIAHAYHFDAGLYAKFLRGYAEQRGVRRLEGKVQQVLQGAEDGFIEAVVMESGERVEGDFFIDCSGMRALLIEQTLKAGYEDWTHWLPCDRAIAVPCESVSPLLPLTRSTAHAAGWQWRIPLQHRIGNGHVYSSAFMDKDEAEAILMNKLDGKALAPPRHLSFRTGRARTFWDRNCVAVGLSSGFLEPLESTSIHLIHMAVARILSFFPHAGFDAADIAEYNALTRLEFERVRDFLILHYKLTTRDDSAFWNHCRTMAIPETLQRKIDLFASNGRIYRYDDELFAETSWLQVMIGQRLMPRGHHPFADLLPEAEVQAYVRNVEQVVAKCVGVMPTHAEFIAKHCAADLG

SEQ ID NO: 88989 - protein, 488 aa, unidentified
  source 1..488: note = Alphaproteobacteria bacterium
  REGION 1..488: note = tr|A0A1Q7WLW6|A0A1Q7WLW6_9PROT Tryptophan halogenase; OS = Alphaproteobacteria bacterium 13_1_20CM_3_64_12; OX = 1803502 GN=AUG47_08455 PE=4 SV=1
MAAAAIAKVMGPRLTITLVESDEIGIIGVGEATIPSIALYNDLLRIDENDFLRQTQGTFKLGIEFVNWYEPGHRYMHAFGGIGKDLAYIPFHHYWLQEVLQGRGESLWHYSLNWMAAHQDRFARLERIADTPLPGVIYAFHFDASLYAAYLRRLALQMGVRRVEGMIAEVLQNPASGDVSALRLKDGRQISGELFIDCTGFRALLIERTLNVGYDDWTRWLPVDRALAIPTERVGPLTPYTRSTALEAGWQWRIPLQHRTGNGHVYSSAFVDDARAAELLMANLDSRPLADPRPIRFVTGRRRQLWSHNVVCLGLASGFLEPLESTAIHLIQANIQRLILLFPHHGDCDHRRAQFNQAAAAEYEYVRDFIILHYYLNNRVGERFWDACRQMSVPDSLTHKIELFRETGGIFPTMYDLFHLTSWLQVMWGQGVRPRGAHPFVQTVAPHDRVEYLKNIRDLIAQAASELPRHDEFIARHCRAPAPAAAVT

SEQ ID NO: 88990 - protein, 521 aa, Xanthomonas perforans
  REGION 1..521: note = tr|A0A0G8VQF9|A0A0G8VQF9_9XANT Tryptophan halogenase; OS = Xanthomonas perforans OX=442694 GN=BJD13_18805 PE=4 SV=1
MPDTTPSDPQQRPVRRVVIAGGGTAGWMAAAALSKLLGRHLQITLVESDEIGTVGVGEATIPSLVTFHRLLEIDEAAFMAATQATIKLGIAFEHWRDVDQHYIHSFGHAGTDHWSAGFQHFWLKGCQRGVARDFGDYCLELRAAQEGRFAHLPNGGMNYAYHLDAGLYARFLRRFSEGFGVTRIEGRIGQVETDAQSGFLTALTLQDGTRVEGDLFLDCTGFAGLLIGKTLGVGSDDWSRWLFADSALAVQTESVGPPVTYTRSRADQAGWMWRIPLQHRVGNGLVYSSRYMDQDGARAVLERNLTGRALTEPRPLRFTPNQRHRVWEKNCVALGLASGFLEPLESTNIHLIQRGIIRLLQTFPQIINAADIAEYNRQAAQEITHIRDFVILHYHATDRRDTPFWRDCAAMDIPDSLRHRVELFRQSGRVFHQANELFAENSWVQVMLGQGVVPQQHHPVADLMGDAELGRFLETIRARVEAALVRLPAHADFLQRYCPAPPLPEPAARVPAPPVMATPAG

SEQ ID NO: 88991 - protein, 528 aa, unidentified
  source 1..528: note = Pseudoxanthomonas wuyuanensis
  REGION 1..528: note = tr|A0A286DC70|A0A286DC70_9GAMM Tryptophan halogenase; OS = Pseudoxanthomonas wuyuanensis OX=1073196; GN = SAMN06296416_10943 PE=4 SV=1
MSEKRIRKVVIAGGGTAGWVAACALTHQFRDLLDITLVESEQIGTVGVGESTIPTIRTFHRLLQIDEREFLSSVAGSFKLAISFENWKHPGDHYFHPFGTTGMNTWSCDFHQFWLESLRRGGKSELGDYCLETVAARAKRFALFDQAGASAQQWSMRWVQSPTSLERADVSYAYHFDAALYAAFLRRKCEGRGLTRVEGKIREVRQDPESGYIQALVLEDGQVVEGDLFIDCTGFRGLLIEQTLKTGYEDWNNWLPCNRAVAMQIESVEPPVPYTRAIAHEAGWRWHIALQHRVGCGWVFSSAHMSDDEAAAKLKAANDNAPMVREPWLVSFRTGRRLKAWNKNVVSLGLASSFIEPLESTSIHLTLSAVTRLVQMFPFAGIDDSIVDRYNDVSRDELEHVRDFIILHYHLNQRDEPLWRDCREMKLPDALAQRIAVFRDTAYAWQGEDELFRLDSWTHVMLGQGVVPREHHPLTRGLGDTDMARLFQGIRAPINRMVEAMPSHGEFLKHYCPADPAVWNLRRSMPVG

SEQ ID NO: 88992 - protein, 498 aa, unidentified
  source 1..498: note = Cellvibrionaceae bacterium
  REGION 1..498: note = tr|A0A545SQU9|A0A545SQU9_9GAMM Tryptophan 7-halogenase OS=Cellvibrionaceae bacterium R142 OX=2591008; GN = FKG94_25800 PE=4 SV=1
MHPKQRIVILGGGTAGWMAANLMATKWAHLDFDITLIEAPDIGIIGVGEGSTPPLKGFMDTIGAQESEWMADCNATYKVGISFKNWSTKPGFSRYFHPFLAQPDEFTAPAFFHNSFLRRKGIDLEGHPDHFFLASHLAEHKLAPVVPEHFPFEINYGYHFDSALLGKFLGRKAATKGVKYRQAKVVDVALDEQGNIAGLHTEQGETIRADLYVDCTGFRAQLIQQALKVPFRSYAENLFNDAAVVLQTEQRPEIACQTVSTALKYGWAWAIPLTSRIGNGYVYSSSFCDADHAETELRAHLGLLEADVQARHLKMKVGRVEQHWAKNCLAVGLSQGFVEPLEATALDMVQETVARFIEAFEKGGFTDTHRDDYNRRISSRFEAVRDYIVCHYRVNSRTDTDYWLENARNEKVSASLRSILHAWVSGQNITDELQRQKLDIYFPNVSWNCLLAGYGIYPTQAQLKPGNALANKYKTADIHEFIRRCALNFKPHREQLSA

SEQ ID NO: 88993 - protein, 509 aa, Brevundimonas sp.
  REGION 1..509: note = tr|A0A0Q7DZA5|A0A0Q7DZA5_9CAUL Tryptophan halogenase; OS = Brevundimonas sp. Root1279 OX=1736443 GN=ASC65_15710; PE = 4 SV=1
MTRPLQVVIVGGGTAGWMTASGLVGSLTQQQVQVRLVESDEIGIVGVGEATLPQMREFNDLIGIVESDMMRKTNATFKLGIEFRDWGFKGSNYVHPFGAHGHPMGGVAFHHQWTRARLNGQAEDIGDYSFAIVASRRNRFDFPADDKSAINSTFDYAYHFDAGLYARYLRGWAEARGLVRTEGKVVDVTLDPHSGDVASVTLESGEVIAGDLFIDCSGFRGLIIGQALNGPFEEWGKWLPCDRALAVPTERSADFTPYTRSTALEAGWQWRIPLQHRTGNGYVYSSAFISDDEAHARLMGNLDGKPLAEPRPIKFKSGRRTASWTKNCIAVGLASGFLEPLESTSIYLTQVAVTTLLKLLPRGNVDPALAAEFNRRIDNEYDRVRDFLILHYQVNARQDGDLWRQCREMEIPDSLREKMALFEHRGHIAQYKDGLFSPPSWLSVFVGQGMSPRGYHPMTDRMPLDQAAAEMADIRRRISDRVDAMPAHDVFVADYCGGEAPQRAAGAGA

SEQ ID NO: 88994 - protein, 444 aa, Variovorax paradoxus
  REGION 1..444: note = tr|T1XF39|T1XF39_VARPD Tryptophan halogenase domain-containing protein OS=Variovorax paradoxus B4; OX = 1246301 GN=VAPA_1c40960 PE=4 SV=1
MTPGPFTSTEPDVVVIGGGPAGSTVAALLADKGHDVVLFEKAHHPRFHIGESLLPMNMPLFDRLGVRTEVEAIGIAKHGAEFVSPWHDHTSHFFFGEAMDKSFPYAVHVRRSEFDELLFRHAARRGARTFEGQRVMGVDMDAGKGADNRALVKIKAEDGTETSWRPRFVIDASGRDTVLSNQFDAKQRNRKHASAALFGHFENAERRPGRYEGNISLFWFDHGWFWYIPLKDGTVSVGAVASPAYFKRRKGTLEEFLMETIALAPKLAARLKNATLMEGATTTGNYAYDSKFCRGDRFMMVGDAYAFVDPMFSSGVYLAMNSAFESAAAADFWLKGEMKEAEKAFRRFDKVMKHGPRMFSWFIYRITSPAIRRLFMNPRNIWRMQEALLSILAGDLFRNTPIGPRFWGFKVTYYASCIGILPQAIKTWAWRRRNLKESLETAKS

SEQ ID NO: 88995 - protein, 479 aa, Sphingomonas sp.
  REGION 1..479: note = tr|A0A0Q4PHF3|A0A0Q4PHF3_9SPHN Tryptophan halogenase; OS = Sphingomonas sp. Leaf67 OX=1736230 GN=ASE90_14360 PE=4; SV = 1
MSAAALSRALGTRCAITLVESDDIGTVGVGEATIPPIKLFNDTLGIDEAEFLRETKGSFKLGIEFVDWARHGHRYFHPFGTFGKPFDLVAVHQHWLAARAAGSPAPLDDLSMAWGVAKHGRFARPMGDPRSVASTFDYAYHFDAGLYAAFLRRYAEARGVVRVEGKVADAALDGQTGHVASVTLHDGRTLAADLFVDCSGFRGLLIEGALATGYDDWTHWLPCDRAVAVPCATGGDGLTPYTRSTARAAGWQWRIPLQHRTGNGYVYCSRHLSDDEAAATLMANLDGPALADPRFLRFTTGRRRRFWNRNVVAIGLASGFMEPLESTSIHLIQTGIAKLLAYFPTRDFDPLPIDEYNRVAGTEYERIRDFLILHYKLTTRDDAPLWRDCAGMDVPDTVALKIAHFRHGGRLVARDMDLFGPPSWLAVHIGQLNNPVSLDPLLDPTNSASFVDRLSAAIDAMAKSMPTHAAFLQQIGATR

SEQ ID NO: 88996 - protein, 562 aa, Maritimibacter sp.
  REGION 1..562: note = tr|A0A2D9YTB0|A0A2D9YTB0_9RHOB Tryptophan halogenase; OS = Maritimibacter sp. OX=2003363 GN=CMH12_18660 PE=4 SV=1
MAKPIREITIVGGGTAGWMAAMLLQTGLQQGRKLKITLIESPDIATVGVGEATVPNMPRTLHQCGISERDFFRTCNASFKLGVDFTDWNRDRAGKPISYINPFARPPALGHQELGVYYSDLGAGPLDFVQTYTPTVDFIRACRAPRMSGAGEFDQKLKIGYAYHLDAGKFAGLMQKTCTEAGVRHLRDNVQDVELDDQGYVAALQLERSGRHPVELVIDCTGFRGLIINKALNEPFVSYSRYLANDRAMAVQIPHRDKQKLEPVTRSTALGAGWSWRVPLYNRIGTGYVFSSAHRTDDEARDEFLAHLGPDAKDAEPRVIPMRIGRNRRAWVKNCVALGLAGGFIEPLESTAIHMIDMSVRWLTTYFPDSDFAPPLRDHFNRLTDRMYDEVRDFIVLHYALGNRTDSQYWIDARETLEVPDRLAELLETWRYALPGPLDLPKAVLFDHSTYQAVLLGKRVYETGYGRGKLARGTRLDAAQWKSYLGQMRAQVKQKVEVACDHRSYLAEMRGEIRPGAAARQPAMGGFAMPQATVPLPGTPLSHLPKAPPAPDTLDDESASLL

SEQ ID NO: 88997 - protein, 504 aa, Sphingomonas sp.
  REGION 1..504: note = tr|A0A0Q4Q4B5|A0A0Q4Q4B5_9SPHN Tryptophan halogenase; OS = Sphingomonas sp. Leaf67 OX=1736230 GN=ASE90_10550 PE=4; SV = 1
MPKPATVSTTDALVRQVVIVGGGTAGWMAAAALSRALGPVGRHITLIESDAIGTVGVGEATIPPIRAFNAMLDIAEDRFLRETMGSYKLGIEFVDWGRIGQRYFHPFGAAGQDFHGVPFHQLWLRHRARGGDTGLTDYSMCTVTAREGRFGIPPAGDRTPLAHIAHAYHFDATLYAALLRRVAEEQGVVRHEGRVVQVDRDGGTGDVTAVRLDDGRTIAGDLFVDCSGFAGLLIEGTLATGYHDWRHWLPMDRALAMPTTRLDPLPPYTRATAHAAGWQWRIPLQHRTGNGHVYSSGFTTAEDAERLLRDHAPGEPCGDVRSLSFTTGMRRKAWSHNVVALGLAAGFVEPLESTSIHLIQHGIQRLIALFPGAAVHPAERDAYNADMARAFEAVRDFVVLHYKATTRNDSDFWRTMRAMTVPDSLSHRIELWRAQGRLIPQAGDIFAVPSWAAVLTGQELWPAAYEPGVDRLSADSVEAALRDMHAAYRRAARSLPMHAAALPR

SEQ ID NO: 88998 - protein, 506 aa, unidentified
  source 1..506: note = Cellvibrionaceae bacterium
  REGION 1..506: note = tr|A0A545SLV4|A0A545SLV4_9GAMM Tryptophan 7-halogenase OS=Cellvibrionaceae bacterium R142 OX=2591008; GN = FKG94_27825 PE=4 SV=1
MRDGPIKKVVIAGGGTAGWMTAAAMAKLMGKNLDITLVESDAIATIGVGEATIPTLVFFNRLLDIKEPEFLAATQGTYKLGIQFENWRDIGEDYMHAFGTTGKDCWACGFQHFWMKGRELGVSSGFGDYCLERRAAESLKFGHLPSNGLNYAFHIDASLYAGFLRKFSEKYGAKRLEGKIDKVVTDTETGFIESLTLTSGEVVEGDFFIDCTGMRALLIEQALHAGFESWSHWLPCDSAIAVQTNTVREPVPYTRSIARESGWQWRIPLQHRVGNGLVYCSRYLDDASARAMLLENVEGETLTEPLSIKFHAGRRRKQWFKNCLAVGLSSGFLEPLESTSIHLIQQNIVRFLRMFPAAGISQAEVDEFNRQADFDIERIRDFIILHYKVTDRADSAFWRHCRAMEIPETLKNKVDIFEKTGHVYREGNELFVDSWQQVMLGQGLEPQRYHPLVDTMTERELVDFLQHIKSNVDRTVAGLPEHNSYLASYIKPASQSVGAKTEVPSY

SEQ ID NO: 88999 - protein, 604 aa, Myxococcus xanthus
  REGION 1..604: note = tr|Q1DCT1|Q1DCT1_MYXXD Tryptophan halogenase; OS = Myxococcus xanthus (strain DK 1622) OX=246197; GN = MXAN_1285 PE=4 SV=1
MFPVRPLQSNGCVRCMELLMSGAWEGKLYDVIVMGGGPAGATLAARLRKDPGLSVAIFESERFPREHIGESFVPSAVSSLQESGALGRVLSSDCWIKKGGGYYSWDAVRPWSTFFEHKAYERDGYRRWAFHANRAELDDILLRHAEENGAEVFEGTPVKQVYRRDGFTEVDLGEKGSARCKVFVNASGRYSVTSLGGPREFLSSYRNIAIWSYIRKGKPAQSLPGDWNIFRESGVSPIGSFAFEDGWFWYIPIPLEVDGRREVVHSLGLVTDPRGLKSKRDYMSPSVFMETARKVPFLCDLVADAELIYDEFRTTANYSRISHQMCSWENREIRVGDAAFFVDPLFSTGVHFALHHTAAAAVLVRAAFDEAMPEQHREDLWHDYDQMLRKQAQVFSLAIDQWYNEISLAHPGSVYWRERSERATFEVRNATFHYLVNGSLDEDLLHVISQGNDAVEALSETGAWRTSFAQLQRLRPADDALVQLMPNVKFRQSVTLEHPIADSAEDKLDARPQAFDHGPYWESPERHAHEVAPRFGRPSPCLRFYFEDGDHQDTVRILWNRPNSALLERLSQPHAYGPLLAGCSLSERGLLDQLLLKGMMRVIP

SEQ ID NO: 89000 - protein, 501 aa, Sphingomonas sp.
  REGION 1..501: note = tr|A0A0Q4PYF6|A0A0Q4PYF6_9SPHN Tryptophan halogenase; OS = Sphingomonas sp. Leaf67 OX=1736230 GN=ASE90_14300 PE=4; SV = 1
MEAGDRIRRIVILGGGTAGWMTAAALSRSFGSAVDVTLLESEAIGTVGVGEATIPTIHWFNELIGIDEPEFLRATKATFKLGIEFVDWTAPGHRYFHPFGQFGAALPGVAFHHRWLKAQADGMDVPLPALSLAAQLARQGRFAKPVGDARSILSTLGYAYHFDAGLYATYLRRLSEAAGVRRIEGKLQKVDRDGKTGFVTALTTERGERIDGDLFIDCSGFRALLIGDAMGEPFEDWSHWLPCDRAVAVPCTRLPATTPYTRSTARAAGWQWRIPLQHRTGNGYVFASRYVSEDEATATLMGNLDGEALAEPRLLRFTAGTRRRPWRDNVVAIGLSSGFLEPLESTSIHLIQSGITKLLTLFPDRNCDPALADRFNDVFARDMDGIKDFLILHYHATSGHSEPLWQHCRTMELPGTLVAREAQYRRSGRLILDGDELFRDASWLAVLNGQGIVAEGYNPLADAIDADGNRAQVRQIADVIARAAPSLPFHDVALAQAMGAT

SEQ ID NO: 89001 - protein, 506 aa, Brevundimonas sp.
  REGION 1..506: note = tr|A0A0Q7EDE5|A0A0Q7EDE5_9CAUL Tryptophan halogenase; OS = Brevundimonas sp. Root1279 OX=1736443 GN=ASC65_12575; PE = 4 SV=1
MTDNRLKRIVIVGGGTAGWMAAAVISKSLRPGYCAIELVESPEIGTVGVGEATIPPIQALNRQLGIDEDEFVRRTQATFKLGIQFQNWGSLGNEYVHPFSTYGADLEGLHFHHHWLRAKANGIEAGSLDDYSLVIQAMKAGKFARPSQDPRNVLSRMAHAFHFDASLYGAFLRDMAMGRGVRRHERKIVGVNLNSETGFVESLSLDNGETLAGDLFIDCSGFRGLLIEGALQTGYEDWSHWLPVDRAQAVPCEAVGAPTLYTKSTAHDAGWQWRIQLQHRTGNGHVYCSSFTTDEAARDTLMANLDGKPLAEPRMLRFLTGRRKKAWNKNVVCLGLASGFIEPLESTSIHLVQTGVTTLMSFFPDLRFDQTDIDKYNAIIQEEYEHARDFVILHYHATQRDDSEFWNHVRTMSIPDSLKTRVDLFRSRARVWGKQEDLFAFTSWVAVMLGQGIMPSGYDPMADQKPLAELATKLEGMRGVIQRGVASMPTHQQFIDRHCRAYDDAA

SEQ ID NO: 89002 - protein, 505 aa, Xanthomonas vasicola; identical to SEQ ID NO: 86395
  REGION 1..505: note = tr|A0A5K1MVD3|A0A5K1MVD3_XANVA Tryptophan halogenase; OS = Xanthomonas vasicola pv. vasculorum NCPPB 206; OX = 1094181 GN=KWI_0120080 PE=4 SV=1

SEQ ID NO: 89003 - protein, 538 aa, Burkholderia cenocepacia
  REGION 1..538: note = tr|A0A109EGE9|A0A109EGE9_9BURK Tryptophan halogenase; OS = Burkholderia cenocepacia OX=95486 GN=AS149_29825 PE=4; SV = 1
MSNPIKNIVIVGGGTAGWMSASYLVRALQHHANITLVESAAIPRIGVGEATIPSLQKVFFDFLGIPEREWMPQVNGAFKSAIRFVNWRKSPDGSRGDHFYHLFGNVPNCDGVPLTHYWLRKREHGFQQPMEYACYPQTDALDAKLAPCLADGTRQMSHAWHFDAHLVADFLKRWATERGVKRVVDEVEQVHLNDRGYIASLSTKEGRTLEADLFIDCSGMRGLLINQALKEPFIDMSDHLLCDSAVASAVPADDARDGIEPYTSAIAMNSGWTWKIPMLGRFGSGYVFSSKFTSRDQATADFLDLWGLSDKQPLNQIKFRVGRNRRAWVNNCVAIGLSSCFLEPLESTGIYFIYAALYQLVKHFPDTSFDPRLADAFNAEIVYMFDDCRDFVQAHYFTTSRDDTAFWRANRHDLRLSDAIKEKVERYKAGLPLTTTSFDDSTYYDTFDYEFKNFWLNGNYYCIFAGLGLLPDQSLPLLRHRPESIDKAEAMFARIRREAERLRATLPTNYDYLRSLRAGDAGLSRSQPGPTLATPEIL

SEQ ID NO: 89004 - protein, 500 aa, unidentified
  source 1..500: note = Planctomycetes bacterium
  REGION 1..500: note = tr|A0A5C5XD42|A0A5C5XD42_9BACT Tryptophan halogenase; OS = Planctomycetes bacterium Pan54 OX=2527969; GN = Pan54_12530 PE=4 SV=1
MTDNLSVDVAVIGAGFGGSLTALLLNRIGLRVVLLESGSHPRFAIGESSTPIADLILGDLAQRYDLPSLLPLSHYGTWKQTYPELNCGLKRGFSYFKHRPEQPFHSLPDHSNELLVAASRDDEHSDTHWMRSDVDTFLVNQVKAAGIPYFDQMKLTHQQHWPTWQLRATSETASLAIRAEFLIDATGEAAFLPRALDLSSCLHQLRTSSRSLFAHFTDVTPWQDILTSQQSDTNIHPFCCDAAALHHVLEEGWMWQLRFDNGVTSVGITLDADRHPLNSVISADKEWEAILNRYPSLSRQFASAQIVAPERGLTRTGRLQRQWSQIVGDNWALLPHTAGFIDPFFSAGIAHTLCGVENLVHLLENYWGRESFSTELRVYEMMIKSEFELIDKLVQGSYLSLRNFDLFVPFTMLYFAAATTYEHRRLITGYSPGRAFLCADDGEYRRIVCQIRHNLEIALRQTDLQTTHRFFDDVAQAIAPYNIAGLCDLNVSNMYRYTAV

SEQ ID NO: 89005 - protein, 538 aa, Burkholderia cenocepacia
  REGION 1..538: note = tr|A0A3N9GUD6|A0A3N9GUD6_9BURK Tryptophan 7-halogenase OS=Burkholderia cenocepacia OX=95486; GN = DF039_31150 PE=4 SV=1
MTHPIKNIVIVGGGTAGWMSASYLVRALQHHANITLVESAAIPRIGVGEATIPSLQKVFFDFLGIPEREWMPQVNGAFKSAIRFVNWRKSPDGSRGDHFYHLFGNVPNCDGVPLTHYWLRKREQGFQQPMEYACYPQTEALDAKLAPCLADGTRQMSHAWHFDAHLVADFLKRWATERGVKRVVDEVEQVHLNDRGYIASLSTKEGRTLEADLFIDCSGMRGLLINQALKEPFIDMSDYLLCDSAVASAVPADDARDGIEPYTSAIAMNSGWTWKIPMLGRFGSGYVFSSKFTSRDQATADFLDLWGLSDKQPLNQIKFRVGRNRRAWVNNCVAIGLSSCFLEPLESTGIYFIYAALYQLVKHFPDTSFDPRLADAFNAEIVYMFDDCRDFVQAHYFTTSRDDTAFWRANRHDLRLSDAIKEKVERYKAGLPLTTTSFDDSTYYDTFDYEFKNFWLNGNYYCIFAGLGLLPDQSLPLLRHRPESIDKADAMFARIRREAERLRATLPTNYDYLRSLRAGDAGLSRSQPGPTLATPEIL

SEQ ID NO: 89006 - protein, 530 aa, Saccharothrix espanaensis
  REGION 1..530: note = tr|K0K1W3|K0K1W3_SACES Tryptophan halogenase; OS = Saccharothrix espanaensis (strain ATCC 51144 / DSM 44229 / JCM 9112 / NBRC 15066 / NRRL 15764) OX=1179773; GN = prnA PE= 4 SV=1
MEDRRIKKVVVLGGGTAGWMAAAYLGKALGPGVNITVLEAPAIPKIGVGEATVPNLHKTFFDFLGIAEEDWMRECNASFKMGIKFTNWRTPGRGEATARPHGDSVDHYYHLFGLLPNHENQPLSHYWTHKKLSGQTDEPFDYACYREPPIMDQKLSPRFLDGTKWTNYAWHFDANLVADFLRRFATTKQGAVHIEDKMTEAVIDQRGHVSALRTEQGRTIDGDLFIDCSGFRGLLINQAMKEPFLDMSDHLLNDSAVATQIPHDDDAEGVEPYTGSIAMSSGWSWKIPMLGRFGTGYVFSSRFQTRDDATLEFCNMWGVDPETQPLNHIKFRVGRNRRTWVKNVVSIGLASCFLEPLESTGIYFVYAALYQLAKHFPDKNFDSILQDRFNAEIETMFDDSRDFVQGHFSFAPRNDTAFWQACKELKLADDFQEKVRMYKAGLAVNMPITDESTYYSSFDAEFRNFWNNSNYYCIFAGLDYLPDHTLPALAARPDVLDSADAVFAEIKQKQKELMATLPTTHEYLKQLHGK

SEQ ID NO: 89007 - protein, 506 aa, Xanthomonas citri
  REGION 1..506: note = tr|A0A2K2QZY8|A0A2K2QZY8_XANCI Tryptophan 7-halogenase OS=Xanthomonas citri OX=346; GN = xavtCFBP7764_21260 PE=4 SV=1
MIPAPLRNIVIVGGGTAGWMAAAAFARVLGPTFKVQLIESEQLGTVGVGEATVPHIKAFNNLLGIDEAEFVRQTQGSFKLGIEFVDWQRPGSTYMHGFGTQIGHPLGLLPFHQYWIKQHARGKAQPLGAYTLNTVAAARGKFMTSAGDVPANSPLANIAYAYHFDATQYAHFLRRYSQQRGVTRIEGLVEQVQLHPESGHVQSLQLASGQVVHGDLFIDCSGFGGLLIEQALHTGYHDFTHWLPCDRALAVPCEKVGPPAPYTRSTARAAGWQWRIPLQHRTGNGYVYCSAHISDDEAAATLLANLDGKPLADPRPLRFTTGRRKQCWNRNVVALGLASGFLEPLESTSIHLIQSGISKLLELFPREGISPVLVQRYNDRLAFEFDRIRDFLLLHYHATERDDSAFWRHCRHMPITPELQATLDLFRDSGRFYRNAEEMFAEISWVQVLVGQGILPQGYHPLVDQVPDRDAEGFLASVAQTISHCVDVMPSHQQFIDRYCKAATLP

SEQ ID NO: 89008 - protein, 520 aa, Saccharothrix espanaensis
  REGION 1..520: note = tr|K0JZZ6|K0JZZ6_SACES Tryptophan halogenase; OS = Saccharothrix espanaensis (strain ATCC 51144 / DSM 44229 / JCM 9112 / NBRC 15066 / NRRL 15764) OX=1179773; GN = BN6_3586 0 PE=4 SV=1
MNTRNPQNVVVVGGGTAGWMTASYLKAAFGDRISVTLVESGRIGTIGVGEATFSDIRHFFQFLDLKEEDWMPACNATYKLAVRFEDWREPGHHFYHPFEQMRSVGGFPLTDWWLQNGLTDRFDKDCFVIASLCDAGRSPRHLDGRLFEQDYVEGGEEPVGLTMSEHQGKTQFPYAYHFEAALLAKYLTKYSVDRGVRHIVDEVQDVRLDERGWIDHVVTKEHGELHGDLFVDCTGFRGLLINKALGVPFQSYQDTLPNDSAVALQVPLDMQARGLRPCTTATAQEAGWIWTIPLFGRIGTGYVYAKDYCSPEEAERTLREFVGPGAEDVEANHIRMRIGRSRESWANNCVAIGLSSGFVEPLESTGIFFIHHAIEQLVKFFPAADWHPKLRDMYNSAIANVMDGVREFLVLHYIGAKRDDTQYWKDTKTRAIPDGLAERLERWKVQLPDSENIFPYYHGLPPYSYMCILLGGGAIPLRPSPSLALSDDTAARKEFAAIRDKARHLVERLPAQYEYHARLH

SEQ ID NO: 89009 - protein, 538 aa, Burkholderia cenocepacia
  REGION 1..538: note = tr|A0A3N9FA75|A0A3N9FA75_9BURK Tryptophan 7-halogenase OS=Burkholderia cenocepacia OX=95486; GN = DF047_24675 PE=4 SV=1
MTHPIKHIVIVGGGTAGWMSASYLVRALQQQANITLVESAAIPRIGVGEATIPSLQKVFFDFLGIPEREWMPQVNGAFKSAIRFVNWRKSADRPHGDHFYHLFGNVPNCDGVPLTHYWLRKREQGFQQPMEYACYPQTEALDGKLAPCSLDGTRQMAHAWHFDAHLVADFLKRWATERGVKRVVDEVEQVRLNDRGHISSLSTKEGRTLEADLFIDCSGMRGLLINQALKEPFIDMSDYLLCDSAVASAVPTDDAREGIEPYTSAIAMNSGWTWKIPMLGRFGSGYVFSSKFTSRDQATADFLDLWGLSDKQPLNQIKFRVGRNRRAWVNNCVSIGLSSCFLEPLESTGIYFIYAALYQLVKHFPDTAFDPRLADAFNAEIVYMFDDCRDFVQAHYFTTSRDDTPFWRANRHDLRLSDAIKEKVERYKAGLPLTTTSFDDSTYYETFDYEFRNFWLNGNYYCIFAGLGLLPDRSLPLLRHRPESIDKAEAMFARIRREAERLRSSLPTNHDYLRSLRERDAGRSRSQSGPTLATSETV

SEQ ID NO: 89010 - protein, 505 aa, Xanthomonas perforans
  REGION 1..505: note = tr|A0A0G8ZSJ0|A0A0G8ZSJ0_9XANT Tryptophan halogenase; OS = Xanthomonas perforans OX=442694 GN=BJD13_01635 PE=4 SV=1
MTQAQIRKVVIAGGGTAGWIAACALSHQFRNLLDITLVESEQIGTVGVGESTVPPIRTFHRFLQIDEQEFLRAVAGTFKLSISFEHWRRQGERYIHPFGITGQSTLVCAFHHLWLESQRRGMPGSFGDYCLETVASRVDRFALHGEPAVNYAYHLDAALYAKFLRARSEGCGVKRVEGRIQQVTVQPHSGDVASLVLEDGHVIEGDLFIDCSGFRGLLIEQTLHTGYEDWSHWLPCDRAVAVQTEALGPPVPYTRAIAHEAGWRWHIPLQHRVGNGLVFSSKHLSDDEAHAKLLRDVAAPAVKEPWMVPFRTGRRLKAWNKNVVSLGLASGFIEPLESTSIHLTISAVVRLLALFPADGIAPSQVQLFNDVSRAEMEHVRDFVTLHYHATQRDEPLWQQCRQMELPESLALRLRAWRERAHAWQGADELFRVDSWTHVLMGQGIAPEQHHPLTRAFSDHDLRRLLDGIAQPIQHAVQQMPSQQDFIERYCKAGEQVWGMRSPVPA

SEQ ID NO: 89011 - protein, 518 aa, unidentified
  source 1..518: note = Cellvibrionaceae bacterium
  REGION 1..518: note = tr|A0A545TP22|A0A545TP22_9GAMM Tryptophan 7-halogenase OS=Cellvibrionaceae bacterium R142 OX=2591008; GN = FKG94_12970 PE=4 SV=1
MDSRDAIKHIIIVGGGAAGWLSACHLAKRLHADRSGAVKVTLVESSEIPTIGVGEGTVPAIRQSLRSLGISESEFVRECDATFKQSIKFVNWLRPEAEGGDCYHHVFDYPNITDIDLTPYWLLGAAEQTSYVDAVSVQGRICDRGLAPKNITQAEYEGITNYAYHLDAAKFSRFLTRHATERLGVRHVLASVQDVELNDSGEISAIVTDSAGTLSADFFVDCTGFASLLLGRKMAVGFTDKSDVLFVDHAVAMQVPYAAADTPIPSHTIATAQEAGWIWDIGLSARRGTGYVYSTRYTDHERAERVLRAYIGSAADKLDSRRIPMRVGYREKFWHKNCVAIGLSQGFVEPLEATGLLVYDATARMLAEQFPACKAAMPEIARRFNRHVQYGWDRVIDFIKLHYYLSKRDDSDFWRDNRRPDSAPASLLDNLALWRYQPPSDYDFPSRLDIFNLSNYLYVLYGMEFFTDMETLAHRFPETARARQAFAYTERVFQQVAGGLPGHRELIERVRQFGFQKV

SEQ ID NO: 89012 - protein, 506 aa, Xanthomonas pisi
  REGION 1..506: note = tr|A0A2S7D043|A0A2S7D043_9XANT Tryptophan 7-halogenase OS=Xanthomonas pisi OX=56457; GN = XpiCFBP4643_16390 PE=4 SV=1
MIPAPLRNIVIVGGGTAGWMAAAAFARVLGPTFNVQLIESEQLGTVGVGEATVPHIKAFNNLLGIDEAEFVRQTQGSFKLGIEFVDWQRPGTAYLHGFGTQIGHPLGLLPFHQYWIKQHARGKAQPLGAYTLNTVAAVRGKFMTSAGDVPANSPLANIAYAYHFDATQYARFLRTYAEQRGVTRIEGLVEQVQLHADSGHVQSLQLASGQVVSGDLFIDCSGFRGLLIEEALHTGYNDFTHWLPCDRALAVPSENVGPPTPYTRSTARAAGWQWRIPLQHRTGNGYVYSSAHISDDEAAATLLANLEGKPLADPRPLRFTTGRRKQFWNRNVVALGLASGFLEPLESTSIHLIQAGISRLLELFPREGISPVLVQRYNNRLAFEFDRIRDFLVLHYHATERDDSAFWRHCRTMPITPELQTTLDLFRDSGRFYRNAEEMFAEISWVQVMVGQGILPRGYHPLVDQVPDHDAERFLASVAQTIGHCVDVMPTHQQFIDRYCKAAAPR

SEQ ID NO: 89013 - protein, 506 aa, Xanthomonas citri; identical to SEQ ID NO: 86421
  REGION 1..506: note = tr|A0A2R2WQJ7|A0A2R2WQJ7_XANCI Tryptophan halogenase; OS = Xanthomonas citri pv. aurantifolii OX=76802; GN = TP45_21155 PE=4 SV=1

SEQ ID NO: 89014 - protein, 538 aa, Sphingomonas sp.
  REGION 1..538: note = tr|A0A430DHB5|A0A430DHB5_9SPHN Tryptophan 7-halogenase OS=Sphingomonas sp. ABOLG OX=1985880; GN = CA236_17830 PE=4 SV=1
MDGRLLWVKRRVGAPTEVSVGVERQVANIVIVGGGTAGWLAAATIAACADPTAQPPVQVTLIESPDVPTIGVGEGTWPTIRRTLARIGISEAEFLLACDASFKQGSRFDGWRTRAPDDSYLHPFSAPVEADPRALVAAWQAGEEEGFAAAVTPQARACALDLAPRQRAMPDYAGALNYAYHLDAVKLAALIRRHATQRLGVRHVRDHVLSVDRRHDGDIAAVRCRDHGAMEGDLFIDCTGHAALLIGGAFGVPFIDRGHELFNDRALAVQVPVGAGSAIASTTNATAHEAGWIWDIGLPTRRGVGCVYSSAHLTDDAAEGILHAYLARTAPAADLDALAPRTLTFRSGHRTRFWERNCLAIGLSSGFLEPLEASAIVTIELALDALVANFPATRASMDAHADRFNALFRYRWDRIVDFLKLHYVLSDRDQPYWRDNRDRASIPPSLSGLLAIWREQPPSGHDLGMVDEVFPAASYQYVLYGMGMAPPPPGPMRIEGVPAASAALRQAAQRARALAASLPTNRAYLDALRADRQNEIIA

SEQ ID NO: 89015 - protein, 526 aa, unidentified
  source 1..526: note = Rhodanobacter glycinis
  REGION 1..526: note = tr|A0A5B9E0F5|A0A5B9E0F5_9GAMM Tryptophan 7-halogenase OS=Rhodanobacter glycinis OX=582702; GN = CS053_15710 PE=4 SV=1
MARLQKILVVGGGTAGWLTACYLAKSLNSVAPGSIKVELVESPRIGLLGVGEATFPSIRGTLSAIGLDERRFLAGSTGTFKQGIRYRHWVRPQGAPGASDFFHPFSMPSQRTGGPELLPYWLLGAAPAGVPFADAVSMQKRLVDGNRAPKRAKDADFHGPMNYAYHFDAARVAEVLAEHGQTELGVVRHLATVERAELDEQGAIARIVTREAGELSADLYVDCTGLRGYLIDGAMKSPFRSRRDVLFVDRAVAMQVPYPQPDSPIPCYTMATAQEAGWIWDIGLQQRRGCGYVYSSQHSDATRAEAVFRQYLGAAAEGVTAQHIRFETGYRPEHWRKNCVAVGLAGGFVEPLESTGIALVELGAYLLTHLLPGDVDDMERTARHYNEMVVARYDRIIDFIKMHYCLSQRRDTAFWLDNANPDSIPDTLKDRLALWKHRPPHRLDFVGDLEMFLVSSWQYVLYGMEFKTDLEPMRSVYTRVDDARREFAMIQQMAGHALGDLPGHRELVEQMVREYRQRNEVAEAVA

SEQ ID NO: 89016 - protein, 500 aa, unidentified
  source 1..500: note = Pseudoalteromonas porphyrae
  REGION 1..500: note = tr|A0A0N1EMU7|A0A0N1EMU7_9GAMM Tryptophan halogenase; OS = Pseudoalteromonas porphyrae OX=187330 GN=ADS77_04560; PE = 4 SV=1
MHNIKQVVIAGGGSAGWMTAAALSKLLGEHVNITLVESAQIGTVSVGEATIPQIRQFNQLIGIDENEFLSATSGTFKLGIEFIDWGQIGQQYMHPFGPYGVNLNGIAFHHYWLKSVKNTNPAPILDYCLEGHAAKLNRFDRIVGQTTKGHSTLNYAFHFDAVKYAEFLSTLAIKQGVKHIQGTISQVTIEPSNGHIKDLILDDGQVISGELFIDCTGFKGRLINQALHVGFESWQHWLPCDSAIAIASESLPELKPYTQATAHKAGWQWQIPLQHRVGNGRVFASGFTSAEQQIAQLAAQLPSKAVTEPRQLNWQNGRRLKAWQKNCVAIGLSAGFLEPLESTGLQFIQSAILRLISLFPSCAMAKVDADTYNRYTEQEITAVRDFIICHYKVTKRSDSEFWRYCQHMDVPNTVSERLALFAQNGRLFRENNELFNELSWFSVLHGQGIEPQGYHPLVNSLSDAACEQYMQQIKTMIGQTARSLPMHSEYVARHCRYSKS

SEQ ID NO: 89017 - protein, 515 aa, Sphingosinicella sp.
  REGION 1..515: note = tr|A0A2P7QSC9|A0A2P7QSC9_9SPHN Tryptophan halogenase; OS = Sphingosinicella sp. GL-C-18 OX=2116704 GN=C7I55_11390; PE = 4 SV=1
MTREVIVVGGGTAGWIAAAYLAKRLNAGSPGGINLTVIESPDIPVIGVGEGSFPSLRKTLNVIGVDEADLVREANATFKQGIRFSNWRAPDPSGSQHRYFHPFQVSDDHDGLDLLPYWLMGVAGDAPWAAVNTVQQAAADACLAPKLPAHPPFAGPLTYAYHFDAVLLGRLLRKRAVALGARHIADTVTRVELAEDGSIAALHCRDTGRVRADLYIDCTGFRAQLIGDALGIPFHSRRNELFVDRAVALQVPHAEPDGPIASQTFATAQDAGWIWDIGLHERRGAGYVYSSSHIDDETALRALRDYVGPAADALEPRILQFEAGYRQVQWHKNCVAIGLSSGFIEPLEATGIGFAEIAALMVVNLFPWAGDYEVSARQFNAIMVKRYDHVLDFIKLHYCLSDRTDSTFWIENRDPASWSPALRERLENWRHRAPDFMDVDLNHDIFLAANWQYVLYGMGFETDLSAQAGAFRFYDDARRTFADIRSQQANALQRLPSHRTLVQQVARPGFHFPVR

SEQ ID NO: 89018 - protein, 496 aa, unidentified
  source 1..496: note = Sphingomonas panacis
  REGION 1..496: note = tr|A0A1B3ZAS7|A0A1B3ZAS7_9SPHN Tryptophan halogenase; OS = Sphingomonas panacis OX=1560345 GN=AWL63_11695 PE=4 SV=1
MNPAQTIRRVVIAGGGTAGWVAAAALSKHLGALLDIILVESDEIGTVGVGEATIPTIRTFHRFLEIDEREFMRATQATFKLGIAFENWARRGDRYVHSFGRVGQSIWMGDFQHMWLRGREAGVADDLGAYCLELAAAEAGKFATSDTAKINYAYHFDASLYAGFLRRFSEAKGVTRIEGRIGGVRQNAETGDIEALDLADGRVIEGDLFVDCTGFRGLLIEQTLKAGYEDWSHWLPTNRALAVQTKAVAPPLPYTRAIAHEAGWQWQIPLQHRVGNGLVYCSDFLSDDAARAKLLAQIDGEPITEPRLIRYVTGRRKRVWDRNCVALGLASGFVEPLESTSIHLIMIGVTRLIQAFPFGGVTPSLVKHYNDLAETELERVRDFIILHYHLTERRDDPFWERCRTMPIPDTLAQRIALFHEAALTPQTADDLFQADSWLQVMLGQRLEPTGYHRMGHMLSVEHLRRAFADVRDGIAGAVARMPTHQAFLEHYCGAGA

SEQ ID NO: 89019 - protein, 505 aa, Sphingosinicella sp.
  REGION 1..505: note = tr|A0A2P7QGH1|A0A2P7QGH1_9SPHN Tryptophan halogenase; OS = Sphingosinicella sp. GL-C-18 OX=2116704 GN=C7I55_23670; PE = 4 SV=1
MSNRAQNEGDGPDGPIRSIVIVGGGTAGWMSAAFLANKLRHLPITITVVDSAQIGTIGVGEATVPAIRDFLSAVALGEMDVLRETEGTVKLGIRFADWAEVGHDFFHPFGLYGVPARGVAFHHYWLKLRAAGDALPLADYCLCTQLAEQGLFLSPPDRPTSDLGIFNFALHFDASRFAAMLRRLSLANKVRHIDGLIERVEQHPERGDVTAVVLAGGARVEGDLWIDCSGFRGLLIAGAQDVPFVDWRHWLPCDRAVAIGCAEAQPHKPVTTATAREAGWQWHIPLRHRIGNGYVYSSDHLGDDDAEAALRDRLEGSPVTEANRLRFTAGHRAETWRRNVVAIGLSGGFLEPLESTSITLIQSGLERLVQLFPERGCDPRLAATYNRQSTLEFERIRDFLLLHYVGNRRYGEPFWDRMRALDLPESLQAKLDAWRAQGAFVRYEWETFQDPSWLSLYAGFGDLPGRYNLLADQFSTEELRDTFARMRQAIAGTVKLGVPHRSIVD

SEQ ID NO: 89020 - protein, 526 aa, unidentified
  source 1..526: note = Rhodanobacter glycinis
  REGION 1..526: note = tr|A0A1I3ZPU5|A0A1I3ZPU5_9GAMM Tryptophan halogenase; OS = Rhodanobacter glycinis OX=582702 GN=SAMN05192579_10336; PE = 4 SV=1
MARLQKILVVGGGTAGWLTACYLAKSLNSVAPGSIKVELVESPRIGLLGVGEATFPSIRGTLSAIGLDERRFLAGSTGTFKQGIRYRHWVRPQGAPGASDFFHPFSMPSQRTGGPELLPYWLLGAAPAGVPFADAVSMQKRLVDGNRAPKRAKDADFHGPMNYAYHFDAARVAEVLAEHGQTELGVVRHLATVERAELDAQGAIARIVTREAGELSADLYVDCTGLRGYLIDGAMKSPFRSRRDVLFVDRAVAMQVPYPQPDSPIPCYTMATAQEAGWIWDIGLQQRRGCGYVYSSQHSDATRAEAVFRQYLGAAAEGVTAQHIRFETGYRPEHWRKNCVAVGLAGGFVEPLESTGIALVELGAYLLTHLLPGDVDDMERTARHYNEMVVARYDRIIDFIKMHYCLSQRRDTAFWLDNANPDSIPDTLKDRLALWKHRPPHRLDFVGDLEMFLVSSWQYVLYGMEFKTDLEPMRSVYTRVDDARREFAMIQQMAGHALGDLPGHRELVEQMVREYRQRNEVAEAVA

SEQ ID NO: 89021 - protein, 485 aa, Pseudoalteromonas ruthenica
  REGION 1..485: note = tr|A0A0F4Q127|A0A0F4Q127_9GAMM Tryptophan halogenase; OS = Pseudoalteromonas ruthenica OX=151081 GN=TW72_05985; PE = 4 SV=1
MNNINTITIVGGGTAGWMCAAYLSKHHRDKTVRVIESAHIGRIGVGEGSTPHLQQFMADLGVTESSWMRACDATYKAGIRFSHWNGDDSEYFHPFFSELDEKTAEVFFVNANARRRGAAVPVHPDGYFLAAQLAAQNRAPKALSALARPLHYGYHFDAQKLADWLRAYACARGVEHISGTVSQVQGRQRIEHVTLADGRTLQGDFYIDASGFQSLLVEKTLQEPFIRFNDELLNDRAVAFATEALPNPPVYTHAQAMPSGWRWHIPLQSRCGNGYVYSSQYLSAEQAELQLRQALGEYHSSAKHLHMRVGMMRRALVSNVMAVGLAQSFIEPLEATALMVTGHSITLLSQFIEGQVSAQQLNDELHTLVLGVKDYILGHYATSRRIDTPYWLASAGIAAQSPRIAPLLQRWRSGGDIDQWLHQHRHQQAYNRASWYCLLAGMDYRDTHLIQPFECAPAHIDSAAKAYVKTLCETHFGVHEQVLRL

SEQ ID NO: 89022 - protein, 533 aa, Streptomyces sp.
  REGION 1..533: note = tr|A0A559U7C8|A0A559U7C8_9ACTN Tryptophan halogenase; OS = Streptomyces sp. BK340 OX=2572903 GN=FB157_12468 PE=4; SV = 1
MTDTDSRIRKVVILGGGTAGWMTAAYLGKALQGTVDIQVLEAPAIPRIGVGEATVPNLHRVLFDYLGIPEEEWMRECNASFKMAVRFVNWRTPGRGEPGARTLDDGRPDHFYHPFGILPDHDNTPLSHYWFKNRHEGRTDEPFDYSCFREPPVMDANLSPKWLDGTPSTRYAWHFDAALVADFLRRFATDKQGVEHVQDEMVRVEQDQRGYVTALHCKSGRVLDADLFVDCSGFRGLLINKALGEPFLDMSDHLMCDSAVATAVPHDDEANGVEPYTSAIAMSSGWAWKIPMLGRFGSGYVYSSKFTSQDEATREFCEMWNLDPAETKFNHVRFRVGRNRRAWVNNVVSIGLASCFLEPLESTGIYFITAAIYQLAKHFPDRTFNPALVDSFNNEIEVMFDDTRDFIQAHFYYAPRNDSPFWRAQKELTLPENIQKKIEAYKAGLPINSPIADESTYYGNFEAEFRNFWTNGSYYCIFAGLGLEPDTPLPALAHKPESVAGAEPLFEQVRQQQEHLLQTLPSTYDYLRQLHGK

SEQ ID NO: 89023 - protein, 511 aa, unidentified
  source 1..511: note = Pseudoalteromonas porphyrae
  REGION 1..511: note = tr|A0A0N1MU88|A0A0N1MU88_9GAMM Tryptophan halogenase; OS = Pseudoalteromonas porphyrae OX=187330 GN=ADS77_09930; PE = 4 SV=1
MDIKKVAIIGGGTAGWLAANHLGKALCNKDDISITLIESPDVPPIGVGEGTVPDIKKTLLSFGISETDFIRECDATFKQSIKFVNWMDKKEHGENNFFHHLFDVPLRNEANLLTSHWLSEKKDVCCYAEMLSSQHKICEEGLAPKSITTPEYQGDLAYAYHLNAAKFAKLLASNAKSKYFVKHLLANITGVNLSEDGSIFSLTTDSQGELEFDFYIDCSGFDSILINKALKVPFKDVSKTLLVNRALVVQVPTAADAEIPPYTVATAHQAGWIWDIALSSRRGVGLVYSSSHMSDEEAEEKLDNYLGESKQNLTYRTIPMKIGYREKFWHKNCVALGLAQGFLEPLEATSILLTDFSAEILAQRFPSSTAQLAQLEKRFNHSMVYAWDRVVDFIKLHYCISDRTDSEFWVDNKKSATIPMSLQEKLALWESYIPISDDFFSHFEVFFLENFLFVLYGMGFKTKLKNDRLPVCKTSLAMINQRKEITNHLQKMLPRHRDLLDKIKQFGLQSL

SEQ ID NO: 89024 - protein, 505 aa, unidentified
  source 1..505: note = Rhodanobacter glycinis
  REGION 1..505: note = tr|A0A5B9DUJ7|A0A5B9DUJ7_9GAMM Tryptophan 7-halogenase OS=Rhodanobacter glycinis OX=582702; GN = CS053_01015 PE=4 SV=1
MSDDPHDSRIRHVVIVGGGTAGWMTAALLAKALGRRVQIRLIESEQIGIVGVGEATIPQIRHINAFLGIDEDDMLRATHGTFKLGVQLNNFGRLGDSYLHAFSDIGLPLGLIGFHHYWLRKRVSDPANDLWSYSLNTQTANEHRFGRMDKVGSSPLGGIKYAYHFDAGLYGQYLRQRCDPQVVQRIEGKVVDVQLREGDCFIESVRLESGERIAGDLFIDCSGFRGLLIEGALHTGYESWQHWLPCDRAMAVASARTEPLWPYTRATARTAGWQWRVPLQHRTGNGLVYASQHLSDDEASAMLLANLDGEALGAPRPLRFTTGMRRKAWQRNCVALGLAAGFMEPLESTSIHLIQSGISRLLAMFPDRHCDPVLVDEYNRQTRFEYESIRDFLILHYKATERDDTPFWRQCAHMDIPPTLARKIELFRCHGQIFREHEELFTEVAWLQAMIGQHIEPQAYHPLADALDETRLDAFLGDIRTLVGRAAGSLPDHARFVADHCLTRT

SEQ ID NO: 89025 - protein, 500 aa, Sphingosinicella sp.
  REGION 1..500: note = tr|A0A2P7QMA3|A0A2P7QMA3_9SPHN Tryptophan halogenase; OS = Sphingosinicella sp. GL-C-18 OX=2116704 GN=C7I55_17510; PE = 4 SV=1
MDECALKRILIVGGGSAGWMTAALFAHLFQGVYEIRLIESEEIGTVGVGEATIPAIKKYNELLDLDEREFVRQTKGTFKLGIQFNDWLRPGSRYIHGFGVIGQDLGWLRCHQYWLKARAMGKASDFAAYSINTAAALHNRFIPAQAKMKDSPLGHIAHAYHFDAGLYARFLRDRAEREGVIRTEGKVVDVSLRSEDGFIEAVTLASGERIEADLFIDCSGFRGLLIEQALETGYEDWTHWLPCDRAIAVPCSRSDDFTPYTRATARAAGWQWRIPLQHRTGNGHVFASRYMDEAEAERILLANLDGEPLAEPNRLRFVTGKRRKTWNRNCVALGLAAGFMEPLESTSLYLIQSAAIRLARLFPDRSFDPENIAEFNRQTDFEYERTRDFIILHYKATERDDTSFWRHVRDMEVPETLRRKIHLFAANGRIFREDEELFSEESWIQVLIGQGVIPRRHDPLVDLRSDAELLKFLGDIETVIAKCVDVMPSHAEFVEKFVAS

SEQ ID NO: 89026 - protein, 503 aa, Idiomarina sediminum
  REGION 1..503: note = tr|A0A432ZBZ8|A0A432ZBZ8_9GAMM Tryptophan 7-halogenase OS=Idiomarina sediminum OX=431675; GN = CWI80_06005 PE=4 SV=1
MSEPYRIVILGGGSAGWMTAAALSKVLDPTRYHITLVESQAIGTVSVGEATIPGIREFNQLLGIDEDEFLRETQGSFKLGIAFENWHQQGDVYMHPFGPYGFAIHGVPFHHYFLRHERESAPEQRVPLHALNLEWTAALAGKFTRPIADKRSPLGHIKYAYHFDATAYARYLKGYATTRGVVAIDDRMLSAKQRYAKGPIDALVLEKHGEVTGDFFIDCSGFKALLIGEAMGVGYHDWRKWMPCDSAVALPGQHDASTIVPYTRSIAHHEGWRWRIPLQHRTGEGWVYSSRFTDSDKAEREFRAVLGNEVDTANHLRWINGRRDQAWQHNCCAIGLAAGFIEPLESTGLQLTQSGIIRLISLLPGQGDMSQRAQAYNRYSAEEITSIRDFVLCHYKLTERDDSAFWRYCRDMDIPDSLQQRLDLYRENGGIFRNSNNELFNEISWFSMFHGQKFTPQQEHPLAAQLPAEQLNQHILNLQRIFQQAVAPLPTHAGFIQQHCKAP

SEQ ID NO: 89027 - protein, 515 aa, unidentified
  source 1..515: note = Niveispirillum lacus
  REGION 1..515: note = tr|A0A255YZA6|A0A255YZA6_9PROT Tryptophan halogenase; OS = Niveispirillum lacus OX=1981099 GN=CHU95_11045 PE=4 SV=1
MDKPVKTVVIAGGGSAGWITAGRIAARNAQGPDAVRVILIESSAIGTIGVGEGTWPTMRNTLRKIGIKETDFIRHCDAAFKQGAKFVRWTDGTDADGYYHPLNPPQAATHINLSGHWQRRSRTGGPDFATAVDFQASLCEAGLAPKSITSPEYAGIANYAYHLDAGKFADLLRDHAVGRLGVIHMVDDITQVHQDEDGDITGLTLRAAGLVQGDFFIDCTGFASLLLGRTYGVGFKDCTDILFCDRALALQVPYERDDAPVATHTISTAQDAGWIWDIGLPTRRGVGHVYSSRHTTDDQAEAALRRYAGPMASGLTARMIKIRAGHRETFWTHNCVAVGLSAGFLEPLEASALMLIETAVDFIADRLPANRSVMDVLSRQFNRAFLHHWERIIEFLKLHYILTKRTDTAFWRDNCDPASIPEGLRERLELWRHHPPGPGDFPHQPEVFSWPSYQYILHGMGFETAYDGLPPLAAEAAGAQRAFAMAERAREQALRDLPRHRQLLDAIREHGLQAV

SEQ ID NO: 89028 - protein, 507 aa, unidentified
  source 1..507: note = Rhodanobacter glycinis
  REGION 1..507: note = tr|A0A5B9DXH7|A0A5B9DXH7_9GAMM Tryptophan 7-halogenase OS=Rhodanobacter glycinis OX=582702; GN = CS053_01640 PE=4 SV=1
MNDQIRTVLIVGGGTAGWMAAAALSKVLGGDCTIRLVESEEIGTVGVGEATVPHLSRFNHFLGIDEAEFVRHVQGTFKLGIQFNDWGRPGDSYIHGFGSIGHDTAMQPFHQLWLRAHKLGLAGDIGDYSLNTLAAPRGRFMASPKDAPPASPLADIAYAYHFDAGRYARHLRGYAESRGVRRTEGKIAQVALCPDDGFVDAVQLESGERIEAELFIDCSGFRGLLIEQALHTGYEEWTQWLPCDRALAVACEKVGPPTPYTRCTARDAGWQWRIPLQHRTGNGYVYSSQHIGDDEAAASLLANLDGRALGDPRPLRFVTGRRKQAWNRNVVSLGLASGFMEPLESTSIYMIQSGIMRLLSLMPRRDFSSVLRDRYNAQVAVESERIRDFLILHYKATQRDGSAFWRHCRDMPIPAALQDTIDLFRDTGSFFREGFEEMFGLVSWVQVMIGQGILPERCHPLAERMPEQDLAAFMAGVRQVVEACAEAMPMHQAFIDKVCPAPVPEAA

SEQ ID NO: 89029 - protein, 511 aa, Sphingosinicella sp.
  REGION 1..511: note = tr|A0A2P7QFW1|A0A2P7QFW1_9SPHN Tryptophan halogenase; OS = Sphingosinicella sp. GL-C-18 OX=2116704 GN=C7I55_24550; PE = 4 SV=1
MSDTGRPNTPLRDIVIVGGGTAGWMTAALLSKLFTRGYHIRLIESDEIGTIGVGEATIPAIRTYLQLAGIDTVEMIKATQATFKLGIEFVDWRDLGTSYIHGFGKIGQDMLWLHPHQLWLKMAARGQVKHFDHYALNCLAARKNRYCPPDPRQPGSPLADLDYAFHFDASLFAAFLRRQSEARGVERIEGRILSAKQRSEDGFVDHVVLADGRAVVGDLFIDCSGIRGLLIGDVLGVGYEDWNHWLPCDRALAVPCESAAVLTPYTRSTARSNGWQWRIPLQHRIGNGRVYSSHHGSDEEAAESLLANLDGRPIGDPRPVRFRPGMRHRSWDKNVVAIGLSGGFLEPLESTSIHLIQTAILRLIALFPGRAFNPADIAEYNRQTAFEYRDVRDFIIAHYKVTDREDTSFWAYVKHMDIPDSLAERLDLFRASARFFLHGKAELFREESWVQVLIGQGLPMHYDPMVDMIPEAQVTGYLRDIEEVIADVAERMPLHSDFIARQCRAPAANLS

SEQ ID NO: 89030 - protein, 481 aa, Sphingomonas sp.
  REGION 1..481: note = tr|A0A430DHK6|A0A430DHK6_9SPHN Tryptophan 7-halogenase OS=Sphingomonas sp. ABOLG OX=1985880; GN = CA236_17845 PE=4 SV=1
MAAAAIARTMGRAAQVTLVESEAIGTIGVGESTIPPIVGFNRLLGINEAEFMAATNATFKLGIVFDGWRNGTDRYVHAFGLTGKDHWAAGFQHFWLAGRAKGHQAPFGDYSVELQAALAGKFAHLPDDRLNYAYQLDSGLYAKFLRGMAERDGAVRIEGKIATVQLDGDSGDIAALVLEDGTAIAGDLFLDCTGFRALLIEGALHAGFDDWTHWLPCDSAIAVQTASVGPAVPYTRAMAHDAGWQWRIPLQHRVGNGIVWCSRYLSREDALERLLGNVEGEVLTQPNHLRFTTGVRRRQWHRNCVAVGLSGGFMEPLESTSIHLIQRAVLRLIRMMPAAGPISPRDIAEFNDQQHADMVQVRDFLILHYKATDRRDSAFWRQCAAMPIPDSLEQKIELFRDTARVFRRNEELFAEHSWLQVLLGQGIEPHAWHPITDKLTDEELARLLQTLRAQVTRTVNGLPAHADYVARYCAGARQTAA

SEQ ID NO: 89031 - protein, 505 aa, unidentified; identical to SEQ ID NO: 85550
  source 1..505: note = Nitrospirillum amazonense
  REGION 1..505: note = tr|G1Y070|G1Y070_9PROT Tryptophan halogenase; OS = Nitrospirillum amazonense Y2 OX=1003237 GN=AZA_18337; PE = 4 SV=1

SEQ ID NO: 89032 - protein, 512 aa, Sphingomonas sp.
  REGION 1..512: note = tr|M4SKF6|M4SKF6_9SPHN Tryptophan halogenase; OS = Sphingomonas sp. MM-1 OX=745310 GN=G432_16620 PE=4 SV=1
MAKRIIIVGGGTAGWLTAAYLIRSLGRSGWSITLVESPDIGIIGVGEGTFPTIRETLSAIGVDEREFLREADGSFKQGVRFSGWTGGPTPGNDTDDYFHPFNLPYGGDEGLLPYWIKAAGEARRPSYADAVTVQGHVIRAGCAPKRASDPGFDGPMNYAYHFDAARFADYLRKVATANGVERIEATINEVRQAEDGRIAAVVPGDGREAIEGDFFIDCSGFRALLIGKALGSPFRHVGDVLFNDRALAMQVPHGDADTPIRPYTLATAHEAGWTWDIGLGARRGIGYVYSSRHSDDEAAERVLRAYVGKAADGLSPRQLRFESGYRSVQWIGNCAAVGLSAGFFEPLESTGIMLIEVAARMISDFLGSPAIDEAAMAAAARQYNRLMLARFDAIVEFLKLHYCISGRRDTAYWRDNSDAASIPEGLRDKLAQWRHRPPSRFDFVVDHETFLPASWQFILYGMGFRTDPAAVSSSHRDDEQAGAAFVRVFQAARQAVAELPPHRALLEQLRAA

SEQ ID NO: 89033 - protein, 525 aa, Sphingosinicella sp.
  REGION 1..525: note = tr|A0A2P7QSY9|A0A2P7QSY9_9SPHN Tryptophan halogenase; OS = Sphingosinicella sp. GL-C-18 OX=2116704 GN=C7I55_11780; PE = 4 SV=1
MPPPREAAVTRVVVVGGGTAGWLAACLIAARTERAPAGPLHVTLIESPDVPTIGVGEGTWPTMRRTLQRIGISEAEFLLFCDAAFKQGSRFDGWVSGEADDQYFHPFTPPVEADPDAVVQAWQASDARSFAETVSPQARACGLNLAPRQRTMADFAGALNYAYHLDAGKLVDLLRRHATQRLGVRHVRDHVVSVEAAASGDIAGVGTRSTGTVEGDLFLDCSGHSALLLGEHYGVPFVDRRDVLFNDRALAVQVPVAPESPIASQTCATAHSAGWIWDIGLPTRRGIGCVYASAHASDDTAAAALEAYLRKTAPSIPVDPGAFRRLTFRSGHRQRFWERNCLAVGLSAGFLEPLEASAIVLIELSLDALLDNFPVTRGIMDIHARRFNALFLYRWDRIVEFLKLHYVLSRRSEPYWRAHRDPASIPARLSELLQIWRHQAPSRADLPMADEIFPAASYQYVLYGMGFPAPAQAPVQADAASTVEPLLRQAEQRGRALAASLPTNRSYLDALRAQATSSPPLVTTC

SEQ ID NO: 89034 - protein, 510 aa, unidentified; identical to SEQ ID NO: 85490
  source 1..510: note = Nitrospirillum amazonense
  REGION 1..510: note = tr|G1XVY3|G1XVY3_9PROT Tryptophan halogenase superfamily OS=Nitrospirillum amazonense Y2 OX=1003237; GN = AZA_06819 PE=4 SV=1

SEQ ID NO: 89035 - protein, 500 aa, Sphingosinicella sp.
  REGION 1..500: note = tr|A0A2P7QKJ0|A0A2P7QKJ0_9SPHN Tryptophan halogenase; OS = Sphingosinicella sp. GL-C-18 OX=2116704 GN=C7I55_18715; PE = 4 SV=1
MPVRVVVVGGGTAGWMTAAALAKLLPHRCTVHLVESETIGIVGVGEATLPHIRAFNERLGISEAEFMSSTRATFKLGIEFKNWGAIGDSYIHPFGTFGDGQSEIGFHHYWTRLRLAGRPVGSLDEYSMGVMAGRLNRFQLPEKDHESIASTFGYAYQFDATLFAPFLRRLAESMGARRTEGRVVGVDRNGESGDIESITMESGEVIEGDLFVDCSGFISLLLGKALGEPFRDWSRWLPADSAVAMPCRTETSLTPYTSAIAMPSGWRWRIPLQHRTGNGYVYSSAFTSDEAARDALVDAVEGEPIADPRVLRFVAGRRERSWAHNCVAVGLASGFLEPLESTSIYLIQQAITYLVELFPEKRISPVDRDEFNRLIDLEYDRIRDFLILHYHATTRSDTPFWDYVRTMDLPSTLSEKIDLFRRRGRIVKYREGVFLEASWVAVYIGQNIFPEGHDARAGVLPIGEVADRAEALRSRIRAAAEAMPDHAAYIRSYCAMAEAA

SEQ ID NO: 89036 - protein, 526 aa, Nostoc sp.
  REGION 1..526: note = tr|A0A235J5P1|A0A235J5P1_9NOSO Tryptophan halogenase; OS = Nostoc sp. 'Peltigera membranacea cyanobiont' 232; OX = 2014531 GN=CDG79_05705 PE=4 SV=1
MSQDVQNVVIVGGGSAGWMTAAYLSKALDKNIQITLVESSNITKVGVGEATFSTIKVFFDFLGLQEDEWMPKCNATYKMAIKFVNWNAKGDHFYHPFQRYEVIDGFDLSEWWLKMKKDREAFDYACFLTPWLCDNQSSPRYLDGKVFDDKVQNEFSQGHIVKKSILDNLKIQYPYAYHFDANLLARFMKDYAMERGVKQIVDDVVDTKLTEDGSIGSLTTKEHGILSGDLFIDCTGFRGLLINKVLDEPFISYSESLLCDRAIAMQIPTDLKKDGINPYTTATALSSGWVWNIPLYGRNGTGYVYASAFISAEEAEQEFRQHLGSAADNCQASHIKMRIGRNRNSWVKNCVAIGLSSGFVEPLESTGIFFIQHGIEELVSHFPSKSFNEELIHSYNKVIADCIDGVREFLTLHYYASDRTDTEFWKATKTNIKVPEELGEKLKLWKNRLPSNKSINPKYHGFESYSYSVMLLGLNYMPESSLPILEHIKNHNAQAAFLEIKERANYLSSTLPSQYEYLTHVIKSQE

SEQ ID NO: 89037 - protein, 412 aa, Thalassospira xiamenensis
  REGION 1..412: note = tr|A0A0B4XXH5|A0A0B4XXH5_9PROT Tryptophan halogenase; OS = Thalassospira xiamenensis M-5 = DSM 17429 OX=1123366; GN = TH3_13960 PE=4 SV=1
MRPDCDIAIIGAGPAGSVIAKFLHDAGMAVTVLEAETFPRFVIGESLLPNCMNVLERAGLLDAVTDAGFQFKNGAVFECGPQYMSIDFRQNFEPSACWGTTFQVKRARFDQILAAETARAGVDIRFGHRVTSAQLADGDCRLGFTDENGNPGELRAGFVVDASGYGRVLPRMLGLARPGKSIERRALFTHMRDHITDPGYDREKILITMHPTRHEIWYWLIPFSDGTSSVGAIYPDNDPAFVGMSDQEIFNQLINDTRLGSLLAKAEPIRDLNSIAGYSAQSENLFGDGYVLLGNSAGFLDPVFSSGVTIALHSAELAAKALIARHNRKSVDWNLDFADPLSKGVDTFRAYVDAWYDGRLQTIIFNQPDDDSQLKRMVVSILAGYAWNMENPLVAKTERYLEMLHDLCAPSS

SEQ ID NO: 89038 - protein, 500 aa, Sphingosinicella sp.
  REGION 1..500: note = tr|A0A2P7QSW1|A0A2P7QSW1_9SPHN Tryptophan halogenase; OS = Sphingosinicella sp. GL-C-18 OX=2116704 GN=C7I55_11765; PE = 4 SV=1
MPEDRRLRRIVVAGGGTAGWMAAAAIARTMGRAVDLTLVESDAIGTIGVGESTIPPLVNFNRLLGINEAEFMRATQATFKLGIAFDGWKEPGHSYFHSFGMTGKDHWSAGFQHFWLHGREKGYDDPYDAYCLELKAALEGKFAHLPDEAMNYAYQLDSTLYAKFLRAMAEGDGATRIEGKIARVELDGESGNVAALQLDSGLRIEGDLFLDCTGFRALLIEEALHAGHDDWTHYLPCDSAIAIQTESVGPAVPYTRAMAHDSGWQWRIPLQHRTGNGIVYCSRYLDKDAALTRLLGNIEGQTLTQPNFLRFGAGARRKQWHRNVVAIGLSGGFMEPLESTSIHLIQRAVLRFIRMMPLHEISARDIAEFNDQQHADMLQIRDFLILHYKATERRDSAFWRFCGTMEIPDTLAQKIELFRETGRVFRKNEELFAENSWVQVMMGQGIMPRAYHPIAEKLRDDELARLLTMLRETVTKTVAGLPQHSAYVEHYCGAVRAAAA

SEQ ID NO: 89039 - protein, 528 aa, Nostoc sp.
  REGION 1..528: note = tr|A0A235J873|A0A235J873_9NOSO Uncharacterized protein OS=Nostoc sp. 'Peltigera membranacea cyanobiont' 232 OX=2014531 GN=CDG79_03810 PE=4 SV=1
MIPKFHEACILEYRTILIDSFIHVEKTIHNVVVLGGGGGSAGFLSALALKVKMPWLNVVVVHSTNIPVIGVGEATTAWIPWFLHKYLELNREQFYEETQPIWKLGIKFIWGDSTQSHFNYPFVTHLADKLSVLSKSTAYYCLDSTTESSIYSLLMEQNKSPCFQRENGDFVVDERFGYHIENTSFVAYLERRAAELDIKIIDKAVVNIEVAENGYVRQLKFTDETTLAGDLFVDCSGFRSTLLGETLQEPFCSFSSSLFCDSAVTGRWMRDDAIQPFTTAQTMQSGWCWQIDLQDKVNRGYVYSSGFISDDDALQEMKCQNPLMGDEHNLIRFKSGRHQRFWVKNVVAVGNASGFVEPLESTGLHMIGETIKCVCDVLIDSDQQPSPGLINLANLANRAIAQKWDDIRDFLSIHFKFNRRVESKFWRHCWHKTDIGDAETVVDFFQNNGPSPIGQILLRKNSVFGYNGYLNLLMGQQVPTKYQSDNDTLDLDNWRQVKNHFIKNCANALPIQEAIQVVKERKCQWLTS

SEQ ID NO: 89040 - protein, 550 aa, unidentified; identical to SEQ ID NO: 84920
  source 1..550: note = Nitrospirillum amazonense
  REGION 1..550: note = tr|G1Y3K8|G1Y3K8_9PROT Tryptophan halogenase; OS = Nitrospirillum amazonense Y2 OX=1003237 GN=AZA_20160; PE = 4 SV=1

SEQ ID NO: 89041 - protein, 500 aa, unidentified
  source 1..500: note = Alteromonas lipolytica
  REGION 1..500: note = tr|A0A1E8FJN4|A0A1E8FJN4_9ALTE Tryptophan halogenase; OS = Alteromonas lipolytica OX=1856405 GN=BFC17_11140 PE=4; SV = 1
MAQNKTRVVVAGGGTAGWLTAFSLVTRLGNVLDITLVESDQIGTVGVGEATIPTMCNFHRLMGIDEREFMAATNATFKLGIQFNNWANQGDSYIHSFGEIGQRSWMAEFHEFWMEAVANGQQDSLDEYCLELKAARQNKFATKVGNKALNFAYHLDATAYAGYLRAKSEAAGVKRCEGKIKTVDIDPQSGNLTGLGLDSDLYIKGDVFIDCTGFRGLLISEHLDVGYEDWSHWLAADRAIAVQTASVEPAKPYTIATAHKAGWQWRIPLQSRVGNGIVYSSQFLSDEEALATLKSNLQGEILTEPRYLKFKTGRRQKAWHKNCIAIGLASGFLEPLESTSIHLVTTALIRLMKLFPFTAEHELLAEQYNRETQKELETIRDFIVLHYHLTQRDDSDFWNHYRTMEIPEPLAHRMAIFAQNGYVWPDDVSLFRVDSWVQVMMGQGLRPAQHHGASRMLPTANLQQQLAAFKQSINSVLNQLPSHSEFIAQYCPANEQVKQG

SEQ ID NO: 89042 - protein, 497 aa, Pseudoalteromonas ruthenica
  REGION 1..497: note = tr|A0A0F4PX84|A0A0F4PX84_9GAMM Tryptophan halogenase; OS = Pseudoalteromonas ruthenica OX=151081 GN=TW72_08465; PE = 4 SV=1
MANINRVVILGGGTAGWLSAALLAKMLGKQLSITLVESTDIGTVGVGEATIPPIVAFNNALGIDEKTLIQRTGATIKLGIQFENWGRQGDSYMHAFGHLGKALPFCDFHHLFHHAKEQGLGHSLWDYSLNFQAAKAGHFAPLRHLPNTQLAGTEHAYHFDASLYAQLLRERAEHFGVQRIDAKVDKVEQSDNGDVQALVLQSGERVEGDLFIDCSGQRGLLIAQTLGVGFEDWSHWLPCDRAIAVQSHHGDDKDPLPYTRSIAHDSGWQWQIPLQHRVGNGLVYCSRYLDDDQAKAQLLANLPGEALHEPRVIPFRTGARRQQWHKNVVAIGLSSGFLEPLESTSIHLIQTAVIRLLKHFPHQGIAPASVRAFNRLFSTEMAQIRDFIILHYALNQRQDSRFWRYCADMELPPSLSERIAQFQQSGQVHRYQDELFAEVAWQQVLIGQNCWPQQHHPLAEQLSNEQLDELLQSLRTLINQAVQNMPSHQQFIQRNLS

SEQ ID NO: 89043 - protein, 417 aa, Capnocytophaga ochracea
  REGION 1..417: note = tr|C7M500|C7M500_CAPOD Tryptophan halogenase; OS = Capnocytophaga ochracea (strain ATCC 27872 / DSM 7271 / JCM 12966 / NCTC 12371 / VPI 2845) OX=521097 GN=Coch_0135; PE = 4 SV=1
MKKEVTDVLVIGAGPSGCVSAAYLHNNGVKVRVVEKTKFPRLVVGESLIPRVMDHFEEAGFMPALEAQKYEVKWGARFIRGEQVCQFDFGKKYGKGWDWTWQVPRADFDNVLAQEVIRKGVNLTFETEVTDVQFFPDHQVTTVKDANGEVSEITSKFVIDASGYGRVLPRLLDLNSPSKLDDHSSIFTHIKEGKVRPAGEEGTLISFDVLEREVWLWVIPFSNGNTSVGIVGPTHYINALSASGDTEEALRKAIKRSDFYRPRFEHSDFLFKPNKIQSYSCSVKKLFGEGFVLTGNSTEFLDPVFSSGVAFATESGMLAAKLVKRELAGEKVDWQKEYAEYMQRGIEVFTSYVREWYTGNLQTLFFHQPGNEEVKKKICSVLAGYVWDTTNPFVTKHKHIIENMAYAIDNGLGMKEA

SEQ ID NO: 89044 - protein, 521 aa, Xanthomonas citri
  REGION 1..521: note = tr|A0A1D9EE00|A0A1D9EE00_XANCG Tryptophan 7-halogenase OS=Xanthomonas citri pv. glycines str. 8ra; OX = 1401257 GN=BHE84_03510 PE=4 SV=1
MPDTTPSDPQQRPVRRVVIAGGGTAGWMAAAALSKLLGRHLQITLVESDEIGTVGVGEATIPSLVTFHRLLEIDEAAFMAATQATIKLGIAFEHWRDVDQHYIHSFGHAGTDHWSAGFQHFWLKGRQRGVARDFGDYCLELRAAQEGRFAHLPNGGMNYAYHLDAGLYARFLRRFSEGFGVSRVEGRIGQVETDAQSGFLAALTLQDGTRLEGDLFLDCTGFAGLLIGKTLGVGSDDWSRWLFADSALAVQTESVGPPVTYTRSRADQAGWMWRIPLQHRVGNGIVYSSRYMDQDGARAVLERNLTGRALTEPRPLRFTPNQRHRVWEKNCVALGLASGFLEPLESTNIHLIQRGIIRLLQTFPQVINAVDIAEYNRQAAQEITHIRDFVILHYHATDRRDTPFWRDCAAIDIPDSLRHRVELFRQSGRVFHQANELFAENSWVQVMLGQGVVPQQHHPVADLMGDAELSRFLETIRTRVEAALVRLPAHADFLQRYCPAPPLPEAAARVPAPPVMATPAG

SEQ ID NO: 89045 - protein, 500 aa, Sphingomonas sp.
  REGION 1..500: note = tr|M4S6T0|M4S6T0_9SPHN Tryptophan halogenase; OS = Sphingomonas sp. MM-1 OX=745310 GN=G432_14595 PE=4 SV=1
MSAHPIETVVIVGSDTTLWLAAAVLRNALRPAGLAVEAVELPATLRPADVHATLPPLEALHAQLRIDEKALLRSTGGAFSLGQNFTDTSGAAPAFLHAYGSCGAPIEDREFFAYWLKARRHGLAVPLDDFSLTASAARHGRLMIPDDETDRYGRADYGYHLPALAYARSLKMLAIRDGVRAHETSALGIALDPDRGTIKAVELEGGRRIEGQLFIDATADARLIGRALGVRVESWRDHFPVDRVLAATGPRFASIPIYAEVRASEGGWTALHPTQAATHVVHAYASASASDEEAAVAAARAAGMPIADIAIRSPEPGRRESAWAGNCVAIGAAACTFDPVHGVDLHAAQLGLVHLLSFFPAGTGHAAERAEYNRIMRSSLCRLRDFQSAHYALNRYGDAPFWTTAREAALPAELAQDIATFRARGLVAPREDESFSPDSWRALFVGHGIVPESYIPAVDTVAADMVKEHFRRMLGFVRDQVMRQPTHDQYLDGIGGASRG

SEQ ID NO: 89046 - protein, 510 aa, Sphingomonas sp.
  REGION 1..510: note = tr|M4S802|M4S802_9SPHN Tryptophan halogenase; OS = Sphingomonas sp. MM-1 OX=745310 GN=G432_14600 PE=4 SV=1
MRIVIVGGGSAGWMCAAGLARLLPATDYDITLIESDEIGTVGVGEATLPHIKTFNDMLGIDEAEFLRETQGTFKLGIEFVGWDRPGDRYIHPFGAFGEPWAGVDFQHHWVRAAQAGFDPGPIQDYSFAVAAARADAFEFPDGDRNSIRSTYAYAYHFDVGLYAAFLRRWATARGVRRIDGQVIDVGHNAISGHVETLRLKSGATLAGDIFVDCSGFRSLLLGGVMGVAWQDWSEWLPCDRALAVPCRRTTALTPYTRATAQRAGWTWRIPLQHRVGNGYVFSSRYCDEDQARETLLAAIEGEPLAEPRLLRFAAGRRALAWERNCIGIGLASGFLEPLESTSIFLIQAAVIDLASLMPTPGFGNRMDPRLIAEFNRLFEIQYDRVRDFLVLHYAANRREGEPLWDHVRAMRLPDSLTHKIELFEASAAAPDYAYGLFSRDSWLSVLFGQGLRPRAYNRLADHLPLEELERRMRDLRSRIAANAGLMTAQEDFIAGYCPASPPAPPMESAA

SEQ ID NO: 89047 - protein, 518 aa, unidentified
  source 1..518: note = Pseudoalteromonas porphyrae
  REGION 1..518: note = tr|A0A0N1EIG1|A0A0N1EIG1_9GAMM Tryptophan halogenase; OS = Pseudoalteromonas porphyrae OX=187330 GN=ADS77_14940; PE = 4 SV=1
MKVEQIKQVIIVGGGTAGWLTANHLAKTLNCTNPLSVQITLIESKNIPTIGVGEGTVPVMCQTLAHFGISETDFIRQCDATFKHSIKFIDWLDNPTDNKKENYFHHLFNYPNIEELDLTPYWLLNKNNTSYANSVSTQGYMCDQGLGPKNMTHREFEGMASYAYHLDAAKFSALLTDNAVNKLGVKHILTDVLDAKLNVAGDIESLQTKCAGTVSGDIFIDCTGFAAKLLGDKLKVPFIDQSHILFADTALAIQVPYQNPDDPINPYTNATAKEAGWIWDIGLSSRRGIGHVYSSNHTSDDQAEQTLRDYIGPQADDLTARKIAMQVGYRKTPWKNNCIAIGLSQGFVEPLEATGLLVFDITARMLAQNFPATRKAIPAISERFNDNITGLWQKVIDFIKLHYCISRRDDSQFWLDNRASSSISDSLQSNLALWRDTVPNKYNFTSALEGFNLENYLYVLYGMEFPTNLQPIATRFEAHQQAAFTMEQIAQAANYCQQQLIPHRELIEKIKRYGLTKI

SEQ ID NO: 89048 - protein, 500 aa, Sphingosinicella sp.
  REGION 1..500: note = tr|A0A2P7QGP1|A0A2P7QGP1_9SPHN Tryptophan halogenase; OS = Sphingosinicella sp. GL-C-18 OX=2116704 GN=C7I55_23225; PE = 4 SV=1
MAAAALSKVLEHTNVDIALVESPDIGTIGVGEATIPPIIEMNRLLGLEENAFVRATRATFKLGIAFENWGAIGERYMHPFGRYGGDIGTLDFHHYWRRLRAIDPQAAGDIADYSLPIAAAGNNKFQRPDPSPRNVLSNIAYAFHFDAGLYAGLLRREAEARGVRRHERRIDDVRLREDGHVAALLLHGGGALKADFFIDCSGFRGLLIEGALKTGYEDWSHWLPCDRAMAVASQRAGPLPPYTRSTARSAGWQWRIPLQHRTGNGYVYHSGSISDDEAAATLLANLDGAPLGDPKPLRFTTGVRRKFWNRNVLALGLAAGFMEPLESTSIHLVQAGLSKLFNLFPDRSFAQADIDLYNRTFREDWERIRDFLILHYHATRRDDSPLWDHVRTMAVPDALQEKIALFESRGRIFRMSDELFAESSWLAVLEGQGVRARSHDPLAEAMPEDVLRTKLARLRAVIARGADAMPMHSRFIADHCAHDGPVPAAASGPIVSTRVR

SEQ ID NO: 89049 - protein, 499 aa, unidentified
  source 1..499: note = Pseudoalteromonas porphyrae
  REGION 1..499: note = tr|A0A0N1EEP5|A0A0N1EEP5_9GAMM Tryptophan halogenase; OS = Pseudoalteromonas porphyrae OX=187330 GN=ADS77_20165; PE = 4 SV=1
MQQQKIKQVIIAGGGSAGWITASLLNKVLGKVIEITLIESDQIGTVGVGEASIPPIQHLNGALGIRESEFIKATQATIKLGIEFENWREQNHKYMHAFGDIGKDFPFCEFYNFWLKAKQQGNATDFWDFSLNYQAAKQHKFTHLQHIPNTQLTGLNYAYHFDATLYGEFLKELAISRGVKRIEGKIAHVKQCTESGFVTALELSSGQIINGDLFIDCTGLSALLIEKTLNTGFEDWSHWLPCDSAIAVQTKSTADPVPYTRSIARDAGWQWQIPLQHRVGNGLVYSSRHLTDEQAKQQLLDNIAGEPITEPRVIRFKTGRRRKQWHKNVVAIGLSSGFLEPLESTSIHLIQTAVIRLIKLFAHNNIEQSLVDTFNQQSQTEIERIRDFIILHYKLTDRTDSAFWRQCKQMSIPKSLQTKIDLFKDTGKIIRQDDELFAEVAWQQVMIGQGLKAQDYNPLADALNDEQLAELFTNLKTLISTTVKQLPTHNEFLARIKSN

SEQ ID NO: 89050 - protein, 554 aa, unidentified
  source 1..554: note = Nitrospirillum amazonense
  REGION 1..554: note = tr|G1Y0E6|G1Y0E6_9PROT Tryptophan halogenase; OS = Nitrospirillum amazonense Y2 OX=1003237 GN=AZA_24523; PE = 4 SV=1
MEAPTDGARAKGAPVKNVLIVGGGTAGWLAAAYLARTLSIGQPGGARITLVESADIGILGVGEGTFPNIQRTLRRIGIDESVFMRESEATFKQGIRFDHWQHAPGPSATGAGQRDHYFHPFQSAIGPQDLDLIPYWLLGAAGDGVPLDTALTMQKRVADAALAPKRSGDADYAAPLNYAYHFDAVKFARLLRVVATDLGVRHVIDTVDAVPLDETGAVAGVVTRENGTLTADLYIDCTGFRAQLIGQALKSPYQSCRKWLFCDRAVALQVPYDQPDAPIPSYTISTAHEAGWTWDIGLETRRGIGHVYSSDHTDDARAEQVLRDYIGPAAADKTARTFRFEAGYRPEPWVRNCVAIGLSSGFFEPLESTGIVLIEVASVLLTSLFPWAGDMATAARQFNRIMRQRYERALDFLKLHYCLTRRTDTAFWRDNADAATVPDTLHDLLDRWRHRPPEGLDFDLNLDTFSEASWQFVLYGMGYRTDLSAQAGAFRHMDEARQQFAAIRAGTEQALAALPRHRDLITQIYRHGLRPRTPLAGAPSGRATLSSGMAGLSR

SEQ ID NO: 89051 - protein, 499 aa, Caulobacter sp.
  REGION 1..499: note = tr|A0A2G5QSG9|A0A2G5QSG9_9CAUL Tryptophan halogenase; OS = Caulobacter sp. FWC2 OX=69664 GN=CSW62_18665 PE=4 SV=1
MTQQMIRKVVIAGGGTAGWMAAAALARQLGPLLDITLVESEDIGTVGVGESTIPTARTFNALLGIDEAEFMRATQATFKLGISFENWGEIGDRYIHSFGQVGKSTWMGGFHHFWMQAREQGFGGDLGDYCLELKAAEQNRFYTGDESPLNYAYHLDAGLYGRFLRGMAEADGVRRVEGKIASVRQHAESGFVEALVMEGGEVVEGDLFIDCTGFRGLLIEQTLKAGFEDWDHWLPTNSALAVQTRSTEPAVPYTRAIAHEAGWRWKIPLQHRVGNGLVYCSDFMSDDEARAKLMGEIEGETLIEPRLIRYRTGRRRKTWDKNVVALGLASGFVEPLESTSIHLIMIGVTRLMQLFPFAGISQAAVDRYNRQADDELEKIRDFIILHYKATERTDSPFWDRVRAMDIPDSLAQRIELFRQSAQVYQAPGELFQVDSWLQVLLGQRIQPQAHHHMGRLMPPQQLKSALEDLKRNIDGMVARLPQHQAFLDHYCAPPVSKSA

SEQ ID NO: 89052 - protein, 534 aa, unidentified
  source 1..534: note = Rhodobacteraceae bacterium
  REGION 1..534: note = tr|A0A2E0BJ21|A0A2E0BJ21_9RHOB Tryptophan halogenase; OS = Rhodobacteraceae bacterium OX=1904441 GN=CML44_03370; PE = 4 SV=1
MMRSVVIVGGGSAGWMTAAYLNGALNNQGQDSNVKITLIESPDIPRISVGEATIPSIKHLLAVVGVDELEFMRATEATFKQSIKYVNWVNNDNTFYHHPFSRHKVTPIDHSARKWLESDRSIPFMETVSAQPLVCEMGRSPRLIGNGSSEVNLNYAFHMNAQKFADYLRDFSTQRGVKHILENLQAVELKENGNIASVKTDNDRTFEGDLFVDCTGFKAKLISEVMKVDVEDCSQWLLCDGAVTMHVPYEDYYPGMVRPYTTATALSNGWIWDIPMQSRRSIGYVHSSAFISSDAAEQEMRAYQGVNTTDLDSRHIKFSVHRRLKTWEKNCVAIGLSGGFIEPLESTGLYLSDLGAVALAEHFPWTDSHMEAMAFRYNRILSNRFYEILDFINMHYCLTKRTDTAFWREVQKPEHINDRLKAKLEYWKMKLPSALDFEDQCFDGGFVTGQNHPAVDTAALWNHDSYLCILLGMDYFQSEDQQMGKELPSSSLYKKVYERVQWAHKHLPLHSDWLQSTVGMRSFSASSKPKGWVT

SEQ ID NO: 89053 - protein, 513 aa, Sphingosinicella sp.
  REGION 1..513: note = tr|A0A2P7QKI1|A0A2P7QKI1_9SPHN Tryptophan halogenase; OS = Sphingosinicella sp. GL-C-18 OX=2116704 GN=C7I55_18705; PE = 4 SV=1
MNEHDIRDVVVVGGGTAGWMAAAAFSRFLHNGHTRITLIESEEIGTIGVGEATIPPLITFNRMLGINENDFVRATKATFKLGIEFVNWGGIGERYFHPFGYHGHELEGVHFHQLYLRERKRRAIQDISAWSMSGVAAAMGRFGRPGRGARPPLSHLLYAFHFDAGLYARFLRDYAERGGVQRVEGKVVDVSLRGEDGHVSSLTLSDGRTVAGDLFVDCSGFRGLLIEQALKTGYEDWTHWLPCDRAIAVPSSYTGPPDPFTRATAHPLGWQWRIPLQHRMGNGYVYSSAFSSDDEAEAKLLASLEGEPLAEPRRLSFTTGRRKQAWNRNVVSMGLSSGFVEPLESTSIHLVQSGIAKLVALFPDLRFNPVERDEYNRQMQEVFEDVRDFIILHYNATRRDDSAFWNRCRTMDIPDSLARKVALWRAKGRLFREGLELFATPSWVAVMLGQGIVPEDYEPAVDALDEDRVATALEEMRLGYLELAQKLPRHEEFIAQACRPPMAPTEDLPEFVL

SEQ ID NO: 89054 - protein, 494 aa, unidentified
  source 1..494: note = Unknown
  REGION 1..494: note = tr|A0Z0U8|A0Z0U8_9GAMM Tryptophan halogenase; OS = marine gamma proteobacterium HTCC2080 OX=247639; GN = MGP2080_05997 PE=4 SV=1
MEHQKIKHVVIAGGGTAGWMAAAAVAKLLGKTVKVSLVESEEIGTVGVGEATIPTLLTLHELLKIKEQDFISAVGGTFKLGISFENWHDVGKDYIHSFGYTGKDCWAAGFQHFWLKGKELGISKDFGEYCNEWAAAKQNRFAVLPNQNLNYAYHFDSSRYATFLRKIAEEHGAVRIEGKIEAVQQHEQTGFITGLRLESGQQVDGDFFVDCTGFRGLLIEQTLHAGYDDWQHWLPCDSALAVQTENVQPPIPYTRSIAHEAGWQWRIPLQHRTGNGLVYCSKFWSRDEAEAKLRGNLEGELVTDPRPIKFQTGTRRRHWVKNCVAVGLSSGFMEPLESTSIHLIQRSIVRFMQMFPSDGVRQPDIEEFNNQMKFEIENIRDFIILHYHVTNRTDTPFWRHCRTMEIPESLQHRIDLFKETGRVFKVPTELFGENSWTQVMLGQGLSPEQYHPIVNMMDEQELRDFLGGIHGSVERLVSQLPEHQRFIDHYCREA

SEQ ID NO: 89055 - protein, 498 aa, unidentified
  source 1..498: note = Pseudoalteromonas profundi
  REGION 1..498: note = tr|A0A3A3ERT1|A0A3A3ERT1_9GAMM Tryptophan 7-halogenase OS=Pseudoalteromonas profundi OX=1774956; GN = D4741_02760 PE=4 SV=1
MESKKITKVVIAGGGTAGWITAALLNKVLGKVIEITLVESAEIGTVGVGEASIPPILHLNGALGISEKEFIKATGATIKLGIEFENWRSQGHRYMHAFGEIGKDFPFCEFYHFWLKAHQANNAPDFWDFSLNYQAAKAHKFAHLKHIPNTQLAGLHYAYHFDATRYGEFLKGLAQSRGVKRIEGKIESVNQCHQSGNIRSLLLTNGEQIDGDLFIDCTGLRALLIEQTLNTGFEDWSHWLPCDSAIAVQSESAADAIPYTRSIARDSGWQWQIPLQHRVGNGIVYSSRFLSDEAAKQQLLDNLPAKPLTEPRVIKFKTGRRLKQWHKNVVSVGLSSGFLEPLESTSIHLIQSAAIRLIKFFPHQGIKQCLMDEFNQQSKTEFERIRDFIILHYKLTEREDSAFWRFCKGMDIPSSLKKKIELFKTSGKIVREDDELFAEVAWQQVMIGQGLIAEDHHPLTDALSDEQLNELFSNLKTLINSTVEQLPSHSQFLEKIQN

SEQ ID NO: 89056 - protein, 517 aa, Sphingosinicella sp.
  REGION 1..517: note = tr|A0A2P7QLB0|A0A2P7QLB0_9SPHN Tryptophan halogenase; OS = Sphingosinicella sp. GL-C-18 OX=2116704 GN=C7I55_15610; PE = 4 SV=1
MDSKRRILIVGGGTAGWLAAAYLARSLGLPDNKHVEITLLESAEIGIIGVGEGTFPTIRNTLKFLGIEEARFIRETSATFKQGIRFTDWARTPDGDDHHHFFHPFEAPFYAEGAELVPYWLLQDELTRPPFAEAMTIQNRVAEAKRAPKRPDESDFSGPLNYAYHFDAASLARVLAGRAAELGVRHIEDLLEGVETDGERGIARVLTREHGPLEADLYVDCTGFRAELIGRALGEPLKSIRSILFTNRALTCKIPYASTATPLESYTIATAHEAGWTWDIGLRGARGIGCVYSSDHLSDDRAAEILRAYVGAAADDLPFRRIAFDPGYRERQWVGNCVAVGLAGGFLEPLESTGVVLIEAAITMIAELFPHSGPIDAPARRFNQLIAARYDNIINFLKLHYCLSQRDEPFWRDNRDEASIPERLRELLEQWRYRPPGRFDFILDLESFAFFNYQYILYGMGFRTDLSPGRGDFPNVRAADRIFARIRSFGERATQDLPSHRALIDQINEEPERAFAL

SEQ ID NO: 89057 - protein, 523 aa, unidentified
  source 1..523: note = Unknown
  REGION 1..523: note = tr|A0Z0U5|A0Z0U5_9GAMM Putative tryptophan halogenase OS=marine gamma proteobacterium HTCC2080; OX = 247639 GN=MGP2080_05982 PE=4 SV=1
MGTTEHVVIVGGGTAGWLTAARLGAMANRQFDITLVESPSVPTVGVGEGTWPSMKATLQAIGLSERVLISECDASLKQGTLFHGWRTGAADDSYLHPFSLPPEYASKNIAEYWRRDGLRYPFHEVVTPQALIATTHKAPKTADTPDYAFALNYGYHVDAVKFAALLRQHSVSRFGVRHIEGHVAGVSSDSAGFLTSLELEGGDRLSGDFFVDCSGQKALLIGDHFKVPFESARHVLPNNRAVVAQVPYNEPNDEIHSCTQSSAQDCGWIWDIGLQSRRGVGYVHNADFISEAEATQTLRNYAEQSVGAKVAQDLACRTLNFEPGYRGTPWTHNCVAVGLSAGFIEPLEASALAMIEQAASFLVESFPVNRDLMGPASRAFNRKMESNWASIQEFLKLHYVLSDRDDTPYWQQACDETSISEGLSDKLALWQIRAPWHPDTPRIDELFPAASYQYVWLGMNGHLNGVIGSAGQGGKDHASSSADLDPILFKVRERALQLSRAMPGNRQLLNALRMNNPSATVTA

SEQ ID NO: 89058 - protein, 513 aa, Shewanella baltica
  REGION 1..513: note = tr|A3D1I8|A3D1I8_SHEB5 Tryptophan halogenase; OS = Shewanella baltica (strain OS155 / ATCC BAA-1091); OX = 325240 GN=Sbal_1078 PE=4 SV=1
MTSRKDIKSVVIVGGGTAGWISACHLAKKLNARTPQIQVMLVESPNIPTIGVGEGTVPMLRETLKYFGIREDDFIHRCDVTFKQSVKFIDWNEPNSGEYYHHLFDYPYFKDFTSTWLNKSLSDRGRYADLVSVQGHLIDAGFGPKAMTQPQYRGAMHYAYHLDAAKFTKLLTEFGVEQLGVKHLLAEVIDTKIDAQGNILELYTDNAGVLTADLYVDCTGFSAQLIGSACNVPFVDKSDILFVDSALVVQLPYEDKYTPIPCFTKSTAQEAGWIWDIGLSERRGVGYVYSSQYSSIEQAESVLREYLGKAAEEISFRHIPMKVGYREKSWQGNCVAIGLSSGFVEPLEATGLLMFDATARMLAECFPANTDVMPLVANRYNQRVSNAWNRVIDFIKLHYVTAKRMDTPFWVDNKNEISIPDSLKEHLELWRYHIPTAYDFTSTLEFFNLENYLYVLYGSDFESKLKMTLNDEEERLFSEMTDKLDKQVTLLKSQLLPHRELIERIKLYGIQLN

SEQ ID NO: 89059 - protein, 511 aa, unidentified; identical to SEQ ID NO: 84822
  source 1..511: note = Nitrospirillum amazonense
  REGION 1..511: note = tr|G1Y0A7|G1Y0A7_9PROT Tryptophan halogenase; OS = Nitrospirillum amazonense Y2 OX=1003237 GN=AZA_61030; PE = 4 SV=1

SEQ ID NO: 89060 - protein, 515 aa, Pseudoalteromonas ruthenica
  REGION 1..515: note = tr|A0A0F4PIA9|A0A0F4PIA9_9GAMM Uncharacterized protein OS=Pseudoalteromonas ruthenica OX=151081; GN = TW72_17670 PE=4 SV=1
MKDLSRVIVVGGGTSGWLSAAYLASSFKRTGRDIKVSIIESDTIPTIGVGEGTFPTIVNTLYEIGLSEKEFIAECDASFKQGALFKNWLYNPSDKPHAYYHPFDPPAKPKGLDLSAYWVSRKHQGTMQQDFAHATSVQSFLCDENLAPKTPETGEYAWLAKYAYHLDAAKLGQLLKKHAMNKLQVEHIVADIEQVELDEQGFIAHLVDKQQRQHDADFFVDCTGFSSLLLAKALKVPFVDKSHYLTVDTAVVLPVEYADAETPITTHTVSTAQDAGWIWDIALQNRRGTGYVYNSHYCSKEQAEKTLCDYHGIAHDSEKRYRHISFKTGYREKSWAKNCCAIGFSSGFVEPLEATAIAMVEAGVRSLAARFPATREAMLEREKQYNRIFTSRWDNIIDFIKLHYCLTKRDDTPFWREQKNPETIPASLQEKLKAWQHYGITDGDLPYKYDLFTLASWQYILYGLEFLPDYVEKAPINEEIIDKAFASIAAQKRSAASKLLSNRALLEAFGASCKS

SEQ ID NO: 89061 - protein, 501 aa, unidentified
  source 1..501: note = Sphingomonas endophytica
  REGION 1..501: note = tr|A0A147I457|A0A147I457_9SPHN Tryptophan halogenase; OS = Sphingomonas endophytica OX=869719 GN=NS334_07785 PE=4; SV = 1
MTAAPIEHVVIIGGGTAGWMMAAAAGRYLDDGRRRITLVESEAIGTVGVGEATIPSIRNFNALIGVDEAEFLRATRGSFKLGIEFVDWERRGTRYVHPFGHYGRDIQGLNFHQLWLKLRGRDGIGAIGDYSPATVAMANGAFGWPQPDPRSPLSGLAYAYHFDAGSYAAFLRERAEADGVARVEGRIVAVERAEDGDVAAVRLEDGRRVAGDLFIDCSGFRSMLLGETLGGAFEDWSHWLPCDRAIAVPTGRTEPLLPYTRATAHAAGWQWRIPLQHRTGNGMVYASRFMDDDAAERLLLSSLDAAPTAAPRRLSFTAGFRPRPWERNVVALGLAGGFLEPLESTSIHLIQQGISKLFALFPDTALSAVERDEYNRQMGDNYRSIRDFIILHYHATTRDDSPFWDHVRTMAVPDTLQRKIALFRQKGRFFRYDDELFATPSWVAVMLGQGIVPEGYDPIVDALDEERTAAALRQMRQATAAAVAGLSPHHAVLERLVGDHG

SEQ ID NO: 89062 - protein, 532 aa, Streptomyces sp.
  REGION 1..532: note = tr|D9W1W2|D9W1W2_9ACTN Tryptophan 6-halogenase; OS = Streptomyces sp. C OX=253839 GN=SSNG_05407 PE=4 SV=1
MTGTDSRIQKVVILGGGTAGWMTAAYLGKALQGTVDITVLEAPAIPRIGVGEATVPNLHKVLFDYLGIAEEEWMRECNASFKMAVRFVNWRTGGQGQPDARELENGGPDHFYHPFGILPDSDNVPMSHYWAKRKLEGRTEEPFDYACFREPPVMDAKKSPKWLDGTPSTRYAWHFDAALVADFLRRFATEKQGVNHVQDEMTHAEKDERGFIKALHTKAGRVLDADLFVDCSGFRGLLINQALEEPFIDMSDHLLCDSAVATAVPHDDEANGIEPYTSAIAMSSGWTWKIPMLGRFGSGYVYSSKFTTKEEATREFSALWGLDPETTKFNHVKFRVGRNRRAWVNNVVSIGLSSAFLEPLESTGIYFITAAIYQLAKHFPDRTFNPELANSFNHEIEVMFDDTRDFIQAHFYYAPRNDTPFWRANKELTLPKNIQEKISAYKAGLAINSPIADESTYYGNFEAEFRNFWTNGSYYCVFAGLGLEPDAPLPILAHKPESVAGAEALFGKVKQEQNHLLDTLPSTYDYLRKLHG

SEQ ID NO: 89063 - protein, 497 aa, unidentified
  source 1..497: note = Alteromonas lipolytica
  REGION 1..497: note = tr|A0A1E8FDP0|A0A1E8FDP0_9ALTE Tryptophan halogenase; OS = Alteromonas lipolytica OX=1856405 GN=BFC17_20980 PE=4; SV = 1
MTSAPLRIVIAGGGTAGWMTANLLAKQGLNRPLQITLVESPDIGIIGVGEGSTPTLKRFFAEMDIAEEDWMPACNATYKVSIRFDGWSPAAQVNSYAHPFISQLDTFSERFFYVNCFHRRMGHAVNTTPGDFLFNAWLAKHNLSPKTPPNFPFRIEYGYHFDSGLVGEYVKRHAATLGVVHKALNITGVDCHPNGDIAGLKTAEGDVIEGDFFIDCTGFKSLLLQQTLKVPFHSFKSNLFNDSAVVCPTPALTELPVETRSTALSAGWAWQIPLTNRTGNGYVYSSDFISDDQAASELCHHLGLNENEADLRKLTMQVGQVAEHWAKNCLAVGLSQGFIEPLEATALHLVQTGVEIFIDHIRAGGFTETQRTAYNRIISERFERVRDYIVAHYRLNTRSDSEYWLANQHNEQLSDALFHLLNVWYRRGDLGQEIARQQLDSHFGNTSWHCLLAGYGAFPPLEQSSNVTEDLYQQNKLDAFFRGCLLNFSPPAPVIAK

SEQ ID NO: 89064 - protein, 517 aa, unidentified
  source 1..517: note = Sphingomonas bacterium
  REGION 1..517: note = tr|A0A3D0WAC8|A0A3D0WAC8_9SPHN Tryptophan halogenase; OS = Sphingomonas bacterium OX=1895847 GN=DEP91_02015 PE=4; SV = 1
MSGGEGAIRDVVIVGGGTAGWMIAAAAARYLDDGQRRITLIESDAIGTVGVGEATIPPILNFNALLGIDERDFVKATQASFKLGIEFVGWGRSGDRYIHPFGTYGRDIHGVAFHQLWRKFAGRPGVGPIDDYAMSIAAARAGRFAHPTADPRDPRSQLAYAYHFDAGLYAAFLRDYAEREGVSRVEGRIADVERDAASGDVRAVQLDDGRRIEGELWIDCSGFRSLLLGETMGVPFVDWSHWLPCDRAWAVPCARVDPLLPYTRSTARPAGWQWRIPLQHRTGNGHVFSSGFMTEETALDLLLANLDDAPAGDPRMLRFTAGRRAEPWRGNVVALGLAAGFLEPLESTSIHLVQHGIQLLFALFPDRRFTAVERAEYNRLMTAQFDAIRDFIILHYHATERRGEPFWDHVRTMPIPDTLAAKIALFREKGRVFRYDDELFAVPNWTAVMLGQGIVPRTHDPIADSLDDDRVLAMMVAHRRNCNAAAAVMPTHAAFIENLLHEGPVVRALGPHRNNDR

SEQ ID NO: 89065 - protein, 502 aa, unidentified
  source 1..502: note = Niveispirillum lacus
  REGION 1..502: note = tr|A0A255Z5M1|A0A255Z5M1_9PROT Tryptophan halogenase; OS = Niveispirillum lacus OX=1981099 GN=CHU95_05180 PE=4 SV=1
MSSDRRIRRITIVGGGTAGWMSAATFARLLGPDYAEITLVESDEIGIVGVGEATIPQMATFNRMLGIDEDEFLRETKGSFKLGIQFVDWGRKGHTYFHPFGHIGLHMEGVSFHAFWLRLKQAGLVDRIEDWSLQATAGARGKFMRAINAGRSPLSEIAYAFHFDAGLYARYLRRYAEARGVVRREGKITTVHQHPETGFVQSVELADGTKVEGDLFIDCSGFRGLLIEGTLKAGYVDWSHHLPCNRAVAVPCEGTEAMTPYTRSTARAAGWQWRIPLQHRIGNGHVFCSNYMSDDEAVSVLLANLDGKPLADPRFVPFQTGHRRKMWDKNVVAIGLSSGFLEPLESTSIWLIQSGLSRLMAMFPDLDFDAATRDRYNRILTTEYAEIRDFLILHYKATDRDDSPFWDYCRTMPVPDRLQEKMDVFMAHGRCFRENEELFNDTSWFAVMLGQLMMPRSYDPVANVLSLEETKARLAHIKDAISNSAEYMPRHRDFINEHCRAG

SEQ ID NO: 89066 - protein, 506 aa, Pseudoalteromonas ruthenica
  REGION 1..506: note = tr|A0A0F4PJ77|A0A0F4PJ77_9GAMM Tryptophan halogenase; OS = Pseudoalteromonas ruthenica OX=151081 GN=TW72_17675; PE = 4 SV=1
MKKLRKVVIVGGGTSGWLAANHIGKRLLGSDIEVCLIESPTIPTIGVGEGTVPMMVSTLQSFGISEQTFITQCDATFKQSIKFINWLDKHHHGEHNYYHHLFEYPFPNNQDVTQTWLSDTTAASFAETVSFQHMLCEHGVGPKAITQAQYTGHASYAYHLNALKFAQLLKDNAISRFNVKLLKTNVTAVKCNDEGYISELQTDDSGQVSGDFFVDCSGFSSILHRQALGVKSVDVSDQLPIDKAITAQVPISADDALPPYTLATAHQAGWIWDIALTTRRGTGFVYASDYLTKEQAYTKFERYLGQPLSGLKVREIDMKAGFAERAWHKNCVALGLAQGFVEPLEATSILLTDFSAKLLAENLPVQHHALALAAKKYNEIVDYAWRRVVDFIQLHYYLSDRQDSAFWQAMKSTDSMSVVLKERLALWQYQVPKKSDFNSKYEVFELENYLYILYGMHFKPCAHLVAKPEHKELIAMLTSYGEQLLKQLPKHRALLNNIAQHGLQKI

SEQ ID NO: 89067 - protein, 515 aa, unidentified
  source 1..515: note = Sphingomonas endophytica
  REGION 1..515: note = tr|A0A147HWB6|A0A147HWB6_9SPHN Tryptophan halogenase; OS = Sphingomonas endophytica OX=869719 GN=NS334_15240 PE=4; SV = 1
MTGGEGSLGEAKTQMRDPIRSIVIVGGGTAGWMAATFLARRLAHLRLSITVVESSAIGTIGVGEATVPAIRDFFAAIDLGEADVLRETEATIKYGIRFADWKARGHDFFHPFGLYGVGAHGVAFHHYWLKLRAAGDTTPLGTYCLATQLAERGLFLPPVDRPANDLGVFNFAVHFDASKFAALLKRLALANKVAHIDARITDVARHGEDGRVTAVTLDSGARVEGDLWIDCSGFRSLLLGDALDVPFVDWRHWLPCDRAVAIPCTAAQVHRPFTTATATEAGWRWHIPLRHRVGNGHVYCSDFIDDADAEDGLLAALEGEALAEPNRIRFTAGHRARFWERNVIGLGLSSGFLEPLESTSITLIQSGLERLIPLFPDRACDPRLAATYNNQSVLEFERIRDFLMLHYSGNQRIGEPFWDHVRAIPPTDGLRAKLDAWRAAGEFVRREWDTFQDASWLSMYAGFDDLPARYSPLADHVADADLRDSLTRMRAAIDGTLAHAEPHAAFLARVHAGVA

SEQ ID NO: 89068 - protein, 508 aa, Pseudoalteromonas carrageenovora
  REGION 1..508: note = tr|A0A2K4XD73|A0A2K4XD73_PSEVC Flavin-dependent tryptophan halogenase OS=Pseudoalteromonas carrageenovora IAM 12662 OX=1314868 GN=rebH PE=4 SV=1
MNKAIKTVAVIGGGTAGWLSAAIIASYHQGKNGDGLKVMLVESSDIPTIGVGEGTWPTMKNTLQQIGLREVDVFKACNATFKQGGKFVNWTHGNNDFYYHPFTVPLGYGRIDLAPYLDNVEDYAQQTNFQHDICEASLAPRGIAQGEYQGNCNYAYHLDAGAFAELLKQHCKSKLGIEHVIGTVEQVKLDDNGAIDTLTLKEQTRTINADLYIDCTGFSSLLLGQALNVPFKKMDHVLFNDSALAMQVPYDENDNSLASHTIATAQYAGWIWDIGLTHRRGVGHVYSSKFLSDEEAEQNLRNYLGDAANGLTARKISFESGYREKFWHKNCVAVGMSAGFVEPLEATAIMLVEISSRFVAEHMPADTQVMPIVAKRFNEQMDYRWQRIIDFLKLHYMLTKRPEPYWQAHVQPETIPQSLQEDLLLWGTRGPLIQDFHGALELFPAASYQYVLYGMGFKPDFTKQAYLYSQDAQAKQIIERNSQLTQQMLQTLPPHRAYIEQWLAANPV

SEQ ID NO: 89069 - protein, 516 aa, unidentified
  source 1..516: note = Alteromonas lipolytica
  REGION 1..516: note = tr|A0A1E8FIR7|A0A1E8FIR7_9ALTE Tryptophan halogenase; OS = Alteromonas lipolytica OX=1856405 GN=BFC17_11145 PE=4; SV = 1
MQDKITRVVIVGGGTAGWLTAGIIAAKNPLKGEHSRTEIVLVESPEVKNLGVGEGTWPTMRDTLRLLGIAEKQFLTCCDASFKQASKFVGWQQGGSDYYYHPFTAPAGYGAVSLADAWHEQGCPGDFESWVCAQGSACERDLAPKMPQLPEYAYNFNYGYHLSADKFVALLHSHCTEQLGVIYKSAHVAGVSSHPNGDIAAIELTEGESLSGDLFIDCSGFSARLIGQHYQVPFVSKRHVLFNDTAVAAQVSHVDEQTPIASCTVATAKPHGWIWDIALQPRRGIGHVFASELTTETQAADALLAYISADKSLNQGGHTPRTIRFDPGHRQSFWINNCVAVGVSAGFVEPLEATALVLIEKSAEWIAEQLPRTPAAMQVLAKRYNTMTCERWTEIIDFIKLHYVLSSRRDTPYWQAHADPSTWPETLKDALLLWQSQPPGLLETNLRQELFSSASKQYVLYGMGFRSASWQGGGVTSLRQPIIERIRREFIHNGDKLLSQLPTNRHYLSRLTAASA

SEQ ID NO: 89070 - protein, 264 aa, unidentified
  source 1..264: note = Sphingomonas endophytica
  REGION 1..264: note = tr|A0A147I471|A0A147I471_9SPHN Tryptophan halogenase (Fragment) OS=Sphingomonas endophytica OX=869719; GN = NS334_07775 PE=4 SV=1
LPCDRAVAVPSASPDAPTEPFTRATAMPAGWRWRIPLRHRVGNGYVHASAFCDEAAATDALLAGLDGTALAEPRVLRFRAGRRRRSFVGNVVAIGLASGFLEPLESTSIYLVQAAITALVEHFPDARVADADRDGFNAAIDAEYDRIRDFLILHYHATTRDDSPFWDHVRTMTVPDSLAEKMALWRASAQVAHYRHGLFLEPSWIAVYLGQGIVPGGWDPRADLPDGAGLDRALSGLSRAIAERVARMPHHDAALAAIAATARA

SEQ ID NO: 89071 - protein, 506 aa, Xanthomonas citri; identical to SEQ ID NO: 89007
  REGION 1..506: note = tr|A0A1D9EDJ1|A0A1D9EDJ1_XANCG Tryptophan 7-halogenase OS=Xanthomonas citri pv. glycines str. 8ra; OX = 1401257 GN=BHE84_02350 PE=4 SV=1

SEQ ID NO: 89072 - protein, 517 aa, Massilia albidiflava
  REGION 1..517: note = tr|A0A411X6F0|A0A411X6F0_9BURK Tryptophan 7-halogenase OS=Massilia albidiflava OX=321983; GN = EYF70_29085 PE=4 SV=1
MSQPPVSSLVNHVVIVGGGSAGWLTAGVIAADHPALTVTLVESPDVAPIGVGEGTWPSMRDTLHRLGVSESAFFRECDAAFKQGSRFNGWRSGGGAEDYYFHPFVLPQGFGEADLVESWQRDVPGVPFADLVSFQPHLCVHGRAPKQPATPEFAAVANYGYHLDAGKFGVFLRKHCLEKLGVRYVPDHVTAVNSHDNGDIASLQTREHGALAGDLFIDCTGMQSLLLGRHYGVPLLHRKDILFNDSALAVQVPYERDDSPIASQTTSTAQRAGWIWDIGLPTRRGIGHVYSSAHTSDEQAEADLRAYIGKDDIPAPRKLTFQPGYREQFWHRNVVAIGLSAGFIEPLEASALALVEMSAAMVSDDLPATREAMDIVARRFNDAFTYRWERVIEFLKLHYVLSGRTDPRSTSDYWHDNRRAETIPARLQELLALWRHRPPSRLDFNRIEEVFPSASWQYVLYGMGFQPDRERITRRGSTGSAGGYFREAAELTRKMLRALPSNRELIDHIRLHGLQKI

SEQ ID NO: 89073 - protein, 501 aa, unidentified
  source 1..501: note = Niveispirillum lacus
  REGION 1..501: note = tr|A0A255YSX7|A0A255YSX7_9PROT Tryptophan halogenase; OS = Niveispirillum lacus OX=1981099 GN=CHU95_21680 PE=4 SV=1
MHKPIRSIVIVGGGTAGWMSAAALARVAGKTHRLHLVESEEIGTVGVGEATIPPIATFNRVLGIDEDEFLRATNGTIKLGIEFKDWYRQGHRYMHAFGALGRPLGMTQFHHVWRRANALGLDGDWEQYVYNTVAARALRYARPGPQRRSPLEPLTHAFHFDAGLYAAFLRRFATERGVVRREGKIRRTILNAFNGHVEAVELEDGSKIEGDLFIDCSGFRGLLIEQALGTGFEDWSHWLPCDRAWAVPCANGGEFTPYTRSTAHPAGWQWRIPLQHRIGNGHVFASRYMGEEQARDILMANLDGEPQAEPRLLRFTAGRRKKMWNRNVVAVGLSSGFLEPLESTSIHLVQSAITRILMALPNDGIDAVEVDDFNAKAQAEYERIRDFIILHYKATERDDSPFWRDCRAMDIPEELERRMRVFASHGRVSRVFDELFLDVSWIQVFLGQGIIPRSWHPLADQLSEAELKEFLAEIKAMIAHEMAVLPTHADFIARHAAARLS

SEQ ID NO: 89074 - protein, 502 aa, Henriciella sp.
  REGION 1..502: note = tr|A0A399RRX0|A0A399RRX0_9RHOB Tryptophan 7-halogenase OS=Henriciella sp. JN25 OX=2305466; GN = D1223_04325 PE=4 SV=1
MTSVQIETVVIVGGGTAGWITAAAMAKLLPSSITITLIESEAIGTVGVGEATIPQIRRLNGMLGLDEDEFVRETRASFKLGIEFSDWGRIGERYIHTFGDPGINLASLHFHHYWLRARAEGSASSLWDFSLHHRAAYANKFGRMERVGNTSMTGLAYAFHFDAGLYAAYLRRFAEAAGVNRVEGRISASHLNSETGFIESVQLANGEQVAGDLFIDCSGFRGLLIDGALGIDYIDWSKWLPCNRALAVPSQKTEPLLPYTKAMAREAGWQWRIPLQHRTGNGHVFCDSFIDEARAAEILVSNLDGAPLSDPKPLRFTTGRREQFWAKNCVSIGLSSGFLEPLESTSIHLIQSNVSRLIELFPTRRFEPANIAEYNRRVGHEYELVRDFLILHYHRTDRDDTEFWRYCANMDVPDSLKAKMDLFAGGGLLHTEPEDLFRESSWAQVMIGQGLMPEAYHAMANRLSSEQLSRFLSDTGSIVERATAQLPEHADFLRSHCKADLQ

SEQ ID NO: 89075 - protein, 167 aa, unidentified
  source 1..167: note = Sphingomonas bacterium
  REGION 1..167: note = tr|A0A3D0WDG0|A0A3D0WDG0_9SPHN Tryptophan halogenase (Fragment) OS=Sphingomonas bacterium OX=1895847; GN = DEP91_07760 PE=4 SV=1
LEPLESTGIVLIEAAAAMIAEFLPFGGAVSASAARFNALMGARYGSITNFLKLHYCLSRRPEPFWRDNADPASIPDTLGAMLAEWRHRPPSRFDFLVGTESFAPFNYQYVLYGMGFETDLGSDAGGSADAAHAERLFERIRSFGRQAVAELPEHRALIRQIGEGIAA

SEQ ID NO: 89076 - protein, 510 aa, unidentified
  source 1..510: note = Niveispirillum lacus
  REGION 1..510: note = tr|A0A255Z418|A0A255Z418_9PROT Tryptophan halogenase; OS = Niveispirillum lacus OX=1981099 GN=CHU95_05165 PE=4 SV=1
MKNHHIKKQSNVRVLILGGGTAGWMAAAALSAKLAGTGVSIRLVESAEIGTVGVGEATVPHIRHFNASLGFDEADFMSRTEATFKLGIEFRDWGRKGDAYIHPFAAFGREIGGVPFHHHWTRARRAGRVPADGLDAVSLPIQAARMGRFGHPSPDPSSFFSTFSYAYQFDAGLYAGYLRAYAEARGVVRTEGKVQDVSLRADGHVEAVTLESGERLVADLFVDCSGFRGLLIEGALKTGYEDWTRYLPCDRAVAVPCANDGPPAPYTRATARDAGWMWRIPLQHRAGNGHVYCSGFMDDDAAEQALLAQLDHPPQAAPRRLRFTTGKRRRQWVGNVVAIGLSAGFLEPLESTSIHLIQLGIGRLLDLFPTSADMDPLDAAEFNRLMDLEYERVRDFIILHYVATQRDDTPFWNHCRTMAIPDSLATKMELFKQRGIVTLYRDGMFLEPSWIAVYLGQNILPTHVDPRAALVSDAEIDRLIAMEAEHCRRAASSMPAHGEILSRYKVQVTA

SEQ ID NO: 89077 - protein, 497 aa, unidentified
  source 1..497: note = Nitrospirillum amazonense
  REGION 1..497: note = tr|G1Y0A9|G1Y0A9_9PROT Tryptophan halogenase; OS = Nitrospirillum amazonense Y2 OX=1003237 GN=AZA_89019; PE = 4 SV=1
MRRIVIVGGGTAGWMAAASLAKFLRNLKCDIVLVESEQIGTVGVGEATIPPIMNFIRVLGIDEDDLIRQTNATFKLGIRFQDWTRLGHSYFHPFGHTGFEMEGIGFPAYWMRQRLAGAAAPLEEYSLQAQAAAHNRFMRPVKAPGSPLEGITYALHFDAALFARYLRTYSEARGVTRVEGKVVKVDLRPEDGFIDALRLEDGRRVEGDFFIDCSGFRGLLIEEALQAGYENWQSYLPCDSAVAVPSERAGAPPSYTLATARDAGWQWRIPLQHREGNGVVYARDFLGDDAARETLLANLAGKPLADPRILRFVTGRRRETWKRNCLSLGLASGFLEPLESTSIHMVHRGLALFIQMLPDRRCEPADIARYNRMVAFEYERIRDFLVLHYATNERRDTDFWRHCAGIDWPDSLKAKIELFQSHGRIQREDTELFPEQSWLYVFTGQGLTPRRYDPLTDLLDPEKMRGALANIHDVIGRVVQTMPHHQAFIDRYCAAQS

SEQ ID NO: 89078 - protein, 505 aa, unidentified
  source 1..505: note = Rhodanobacter glycinis
  REGION 1..505: note = tr|A0A1I4FMC4|A0A1I4FMC4_9GAMM Tryptophan halogenase; OS = Rhodanobacter glycinis OX=582702 GN=SAMN05192579_11839; PE = 4 SV=1
MSDDPHDSRIRHVVIVGGGTAGWMTAALLAKALGRRVQIRLIESEQIGIVGVGEATIPQIRHINAFLGIDEDDMLRATHGTFKLGVQLNNFGRLGDSYLHAFSDIGLPLGLIGFHHYWLRKRASDPANDLWSYSLNTQTANEHRFGRMDKVGSSPLGGIKYAYHFDAGLYGQYLRQRCDPQVVQRIEGKVVDVQLREVDGFIESVRLESGERIAGDLFIDCSGFRGLLIEGALHTGYESWQHWLPCDRAMAVASARTEPLWPYTRATARSVGWQWRVPLQHRTGNGLVYASQHLSDDEASAMLLANLDGEALGTPRPLRFTTGMRRKAWQRNCVALGLAAGFMEPLESTSIHLIQSGISRLLAMFPDRHCDPVLVDEYNRQTRFEYESIRDFLILHYKATERDDTPFWRQCAHMDIPPTLARKIELFRSHGQIFREHEELFTEVAWLQAMIGQHIEPQAYHPLADALDETRLDAFLGDIRTLVGRAAGSLPDHARFVADHCLTRT

SEQ ID NO: 89079 - protein, 418 aa, Advenella sp.
  REGION 1..418: note = tr|A0A2M9U5J4|A0A2M9U5J4_9BURK Tryptophan halogenase; OS = Advenella sp. S44 OX=1982755 GN=CAP48_01300 PE=4 SV=1
MESHHLPATTDIAIIGAGPSGSVAAALLRQQGWQVCVLERQHFPRFSIGESLLPYCMEILKEAGLLQVVNEAGFQIKNGAAFTWGERQAVIDFRDKFTAGPGTTFQVERAKFDQILIQEAANKGAQVYFGHTVTQMTSTQEHATLSVSTDQGQSYTLQARFVLDASGYGRVLPRLLNLEQPSPFPMREAWFTHIQDNISDPDFDREKIVIATHPHDRAIWMWLIPFSHGRCSIGVVGEPDRLAMNGREPLPFLQDMVNEIPRLRHLLADAKWDTPVNPLRGYSANVTTLYGQRFALLGNAAEFLDPVFSSGVTIAMHSAKLATTLVDKTLRGQAADWQRDFSDALRVGIDTFRTYVAGWYDCRFQDVIYSTQINQDIRRMIAAILAGYAWDTSNPYVEKSERRLRALAEICGEAQLDT

SEQ ID NO: 89080 - protein, 547 aa, Henriciella sp.
  REGION 1..547: note = tr|A0A399RMR6|A0A399RMR6_9RHOB Tryptophan 7-halogenase OS=Henriciella sp. JN25 OX=2305466; GN = D1223_04250 PE=4 SV=1
MRRVLIVGGGSAGWMTAAYLNGALNDRGNAPTVKISLIESPDIPRISVGEATVPSIQHVLSVAGLDETEFMKAADATFKQSIRYQNWLHNDQSFYHHPFSRYRIQPIDRTGRAWLNSDRSVPFMETVSAQPVICDMARAPKMLGRWDMGAPLAYAYHMNAQKFADYLRDFSTARGVSHYLENVTDVEMRENGLIKSVRTDRGNVHEADIFVDCTGFRARLIGETLGVGYEDYSRWLMCDQAVVGRIPYDQFYPGLIRPYTTATALSSGWAWDIPMQDQRSVGYVHSSHFISAEEAEREWRAYEGPHAKDIETRLIKFHVGQRQKAWQGNCLAIGLAGGFIEPLESTGLYLSDLGAVMLAEHFPYTDDMLEAMAFRVNRVISNRYFEILDFINMHYCLSRRTDTAFWQEVQKPERITDRLKAKFEYWKLKPPSASDFQDQSFPGGAGQIDRVVPGCDPRSPVDTAGLWNHESYEAIMYGMHFCGEPLAPPSTDAPKTRVMPAIIERLRAAQVKLPPHDMWLQRALGAPSFTSAGYEPPGWASGRARPY

SEQ ID NO: 89081 - protein, 511 aa, Sphingosinicella sp.
  REGION 1..511: note = tr|A0A2P7QKH6|A0A2P7QKH6_9SPHN Tryptophan halogenase; OS = Sphingosinicella sp. GL-C-18 OX=2116704 GN=C7I55_18700; PE = 4 SV=1
MREDRIKKVVVVGGGTAGWMAAAALAKTMGAMPDFSIEVIESDEIGTVGVGEATIPQILLFNEMLGLDEDDFVRATNATYKLGIEFVDWTRLGHRYVHPFGIYGLDMMGVEFHHHWLKGRALGDETPLDDYSLAVVAGLKGRFMRPRPDQPKSPVSKIAYAFQFDAGLYAQYLRRFSEARRVVRTEGRIVDVALNGETGFVDSVVLQSGARIGGDLFIDCSGFRGLLIEQALGAGFEDWSTWLPCDRAFAVPCETGADQQPLTRSTARGAGWQWRIPLQHRTGNGYVYSSAHISDDEAAATLLANLDGAPLADPKPLCFTAGHRKKAWVKNVVALGLAGGFLEPLESTSIHLVQSGIARLMSLFPTRRFDPLEIERFNARTEREYVDIRDFLILHYKATERNDTPFWDYCRTLPPPDGLAYKMEMFRRNGRVFREHEELFTETSWLSVMVGQGIEANGYHPTADLLPDDETLRRLAHVRRVVQQTADMMPTQFDFLEQQGSATHLSLRRAS

SEQ ID NO: 89082 - protein, 535 aa, Thalassospira sp.
  REGION 1..535: note = tr|A0A0D8CHV3|A0A0D8CHV3_9PROT Uncharacterized protein OS=Thalassospira sp. HJ OX=1616823 GN=UF64_06930; PE = 4 SV=1
MRESAEYICRHQNNNDGPEGREILDIGVLGGGTSGLLTALALKKRRPYLNVSIIQSKKIPIIGVGESTVPMVVSFLHNYIGLGVGDLLKNVRPTIKQGVRYDWGKPGDYYFNAPFDWDVNDIGLIGSMRLTGSPNGATSQAILMEHHKLPLWLGPNGKVASQMDRYRFAYHLDNALLVTYLEQEALTAGIEMVDAVIVSADKHPQRDEIVALQTDDGRKLSYDLFVDCSGFRSTLLNKELEVPFIGFEKSLFSNRAIAFQRDHGGDIKPYTSAITMDAGWSWMVPTRHNDHCGYVHSSDFISVEEAKDEVVERFGEVEFLNTVSFRNGRHERCYVGNVIAIGNSYGFSEPLEASALLQIARQVILLVDELPRTKHDRSTEQLMNGQAADDWDKLKWFIAAHYQINNKKQTPFWDVMRSEADISGIKPLMDLFREGAPLSMRSPWALEAIRKVGIPYYGLAGFDTIMMGCAAPHRLLATGESDEIWRQRYRMASTFMMSALSHDEALAVFDEDPDLLMVAGDFNASENHRFTTLGQ

SEQ ID NO: 89083 - protein, 505 aa, Xanthomonas citri
  REGION 1..505: note = tr|A0A1D9EGM7|A0A1D9EGM7_XANCG Tryptophan 7-halogenase OS=Xanthomonas citri pv. glycines str. 8ra; OX = 1401257 GN=BHE84_08800 PE=4 SV=1
MTQAQIRKVVIAGGGTAGWIAACALSHQFRNLLDITLIESEQIGTVGVGESTVPPIRTFHRFLQIDEQEFLRAVAGTFKLSISFEHWRRHGERYIHPFGITGQSTLVCAFHHLWLESQRRGMPGSFGDYCLETVASRVDRFALHGEPAVNYAYHLDAALYAKFLRARSEACGVKRVEGRIQQVTVQPHSGDVASLVLEDGQTIEGDLFIDCSGFRGLLIEQTLHTGYEDWSHWLPCDRAVAMQTEALGPPVPYTRAIAHEAGWRWHIPLQHRVGNGLVFSSKHLSDDQAHAKLLRDVAAPAVREPWMVPFRTGRRLKAWNKNVVSLGLASGFIEPLESTSIHLTISAVVRLLALFPAEGIAPSQVQLFNDVSRAEMEHVRDFVTLHYHATQRDEPLWQQCRQMELPESLALRLRAWRERAHAWQGADELFRVDSWTHVLMGQGIAPEQHHPLTRAFSDHDLRRLLDGIAQPIQHAVQQMPSQQDFIERYCKAGEQVWGMRNPVPA

SEQ ID NO: 89084 - protein, 461 aa, unidentified
  source 1..461: note = Sphingomonas bacterium
  REGION 1..461: note = tr|A0A3D0W8A9|A0A3D0W8A9_9SPHN Tryptophan halogenase (Fragment) OS=Sphingomonas bacterium OX=1895847; GN = DEP91_02195 PE=4 SV=1
EGTWPTMRRTLSRIGISEAEFLTACDASFKQGSRFIGWRDGTDAYHHPFTPPVEGSAAALMAGWGGESAFADAVCAQPSVAERALAPRQPAMPDYAGALNYAYHLDAGKFAALLRAHATERLGVVHIADHVEHVVPGEDGTIAAVATRAHGEVAGDLFIDCTGHAALLIGGHFGVPFVDRLGVLFNDRALAVQVPVAPGSAITAVTDATAHEAGWIWDIGLPTRRGVGCVYASAHMSDDRAAGVLTDYLCRTAPDCDPAALSFRQLQFRSGHRERFWVGNCLAIGLSAGFLEPLEASAIVLIELSLDALVEDFPAHRTAMAGAAARFNARFRQRWDRIVAFLKLHYVLSGRQEPYWQAHRDPASIPPDLAAMLDRWRHRAPMPSDFDAVDELFPAASHQYVLYGMGAPAPAPPAMRVEDEAAVIDRMAKLRQRVRTLTASLPTNRTYLDNLAARPLLREAR

SEQ ID NO: 89085 - protein, 495 aa, unidentified
  source 1..495: note = Sphingomonas bacterium
  REGION 1..495: note = tr|A0A3D0W8G7|A0A3D0W8G7_9SPHN Tryptophan halogenase; OS = Sphingomonas bacterium OX=1895847 GN=DEP91_02005 PE=4; SV = 1
MRTIILGGGTAGWMTAAALARLLRTITHVTLIESAEIGIVGVGEATLPHIRAFNQRLGIDEESFMAATLGTFKLGIDFRDFGAVGESYIHPFGSFGAPIGDVGFHHYWLSAGAPPPLERFSLPCRMARAARFAHPDPREEADHAGYGYAYQFDATRFAPYLRARAEAGSVTRIEGRVVGVDRNGQTGDVTALILSDGRRIEGDLFVDCSGFAARLIEGAMAAPWEDWSRWLPCDRAVALPCAAPAGPIEPYTRATAMAAGWRWRIPLQHRVGNGYVYSSAHLGDDAAADAIAGALDGTPLAEPRLLRFRAGRRRESWVGNVVSVGLASGFLEPLESTSLYLAQMAITELVELFPDGASDPRDRAEFNARVDSEYDRIRDFLILHYTATRRTDSDFWGDMRALAVPDTLAERIELWQETGRVAQYSRGLFLEPSWVAVLVGQGILPRGIDPRAAAAEPDRLRRAMAALDADLTARVAAMPDHGATLGLGVCAADAA

SEQ ID NO: 89086 - protein, 494 aa, unidentified
  source 1..494: note = Sphingomonas endophytica
  REGION 1..494: note = tr|A0A147I6V5|A0A147I6V5_9SPHN Tryptophan halogenase; OS = Sphingomonas endophytica OX=869719 GN=NS334_04490 PE=4; SV = 1
MPAAIERVVIVGGGTAGWMAAALIARVLGDQVRTTLVESEEIGIIGVGEATIPPIQHVNATLGIDEAEFLRETRATIKLAIRFENWGAIGDSYYHTFGAAGRNIAFCPFHHFWHRAQDRDYWDYDLNALCARDGKFAKLRSDDPTFALPYAYHFDSSLYGRFLRRYSEARGVTRVEGMVSAVERHSERGDITALVLRDGRRVAGDLFIDCSGARGLLIQQQLNVGFEDWGHWLPCDRAMAVPSERFAQTAPYTRSIAHGAGWQWRIPLQHRNGNGLVYSSRHLSDEAAATLLLGNLDGRALDEPRIIPFRTGRARRQWDRNVVAVGLSSGFLEPLESTSIYLIQSAIVRLLHLFPQGGIAPALVREYNRQSQLEYETVRDFIILHYHATRRDDSAFWRDLRAMPVPDRLAAKLELFRASGVLNQDPLDIFMEPSWVQVLLGQGVVPAAHHPLADGVGADELAAQLRDLAAAKRAPVEQMPLHDDFLRACGGMAA

SEQ ID NO: 89087 - protein, 488 aa, Streptomyces sp.
  REGION 1..488: note = tr|A0A1Q4VSH1|A0A1Q4VSH1_9ACTN Tryptophan halogenase; OS = Streptomyces sp. CB02923 OX=1718985 GN=A6A06_17620 PE=4; SV = 1
MVVVGGGPAGSTLATLVAKQGHRVLVLEKEFFPRYQIGESLLPSTVHGVCRLTGVADELAAAGFTRKRGGTFRWGATPEPWTFSFSVSERMAGPTSYAYQVERSRFDEILLRYAGRSGAVVREGCAVADVIADTERVRGVRYTDADGVEREAYGTFVVDASGNRSRLFQRVGGERKYSEFFRSLALFGYFEGGKRLPEPNSGNILSVAFDSGWFWYIPLSPTLTSVGAVVRREMADKIQGDREKALTALIAECPLISEYLSGATRVTDGQYGELRVRKDYSYHQTTFARPGMLLVGDAACFVDPVFSSGVHLATYSGLLAARSINSTLAGLVEETVAVREFEARYRREYSVFYEFLLSFYEMHRSEQSYFWQAKKVTHHDRSEMEAFVDLVGGVSSGETALSDAESVVERLRADSAEFAGAVDQLAHSEDGSMLPLFKSAVVSQVTREGSQVQMRALLGADAEPETPLVPGGLVSSPDGMFWLAAGSG

SEQ ID NO: 89088 - protein, 496 aa, unidentified
  source 1..496: note = Alteromonas lipolytica
  REGION 1..496: note = tr|A0A1E8FDM8|A0A1E8FDM8_9ALTE Tryptophan halogenase; OS = Alteromonas lipolytica OX=1856405 GN=BFC17_20985 PE=4; SV = 1
MPTPIKKVVIAGGGTAGWMTAALLKKVLGSSVSIELVESEQIGIVGVGEATIPPIQTFNRFLGIDEKAFLRETHGTIKLAIKFENWRIPGESYFHTFGAPGTTMGFCSFHHYWLKARAAGLAQSFWDFDLNYLACEQGRFNKINTQNPLYDMPYAYHFDSALYGQFLRRFAEQLGVTRTEGMIEHVQQDNQSGFITGLQFTDGRQINGDLFIDCTGLRGLLIRQALGVDYEDWSHWLPADSAQAVPSERFEQTLPYTRSIAHDCGWQWRIPLTHRNGNGIVYSSRFTADEHATQTLMGNLDSKALDTPRTIRFNTGRTEQQWCKNVVAIGLSSGFLEPLESTSIHLIQSGIIRLMKMFPNHGISPTMVDMYNAESKDEFETIRDFIILHYRVNERDDSDFWRAMREMAIPDRLAQKIEAFKETAAIFNEQNDIFRDASWVQVMMGQGLFPADHHAAVNAMDTSTLLSAMQQIHQAKQQPLSSLLDHDEFIQRYTSA

SEQ ID NO: 89089 - protein, 487 aa, unidentified
  source 1..487: note = Sphingomonas endophytica
  REGION 1..487: note = tr|A0A147I8F8|A0A147I8F8_9SPHN Tryptophan halogenase; OS = Sphingomonas endophytica OX=869719 GN=NS334_02440 PE=4; SV = 1
MTGVRRVVIAGGGTAGWLAAAILTKQIGAMVEVTLVESEEIGTVGVGESTIPTVRAFHALIGIDEREFVRATGASFKLGISFEGWTRPEERYIHSFGTLGNSTWMADFHHFWLEARAQGLPHGIGSYCVEHEAAREGRFAGRPQADLNHAYHFDAARYARYLRERCEADGLTRVEGRIARVERDAESGDIAALVMEDGARIAGDLFLDCTGFRALLIGEALGVGYEDWRDWLPTDRAIAVQTAATGPAVPYTRAIAHEAGWQWRIPLQHRVGNGIVYASDYLSDDAARARLLDSVTGETLIEPRVIRFRTGRREKAWERNCVALSLASGFVEPLESTSIHLIMIALTRLLQLFPFDGVSAAAAARFNDMARREIEGVRDFIILHYTLNQRDEPFWRRMRDMPLPDSLATRIALFRESAQAFQASDELFTVTSWVQVMLGQGITPVAHNRLARMMPPGRLEQTLAQLAGNVAGAVRGLPMHQAYLDRV

SEQ ID NO: 89090 - protein, 499 aa, unidentified
  source 1..499: note = Niveispirillum lacus
  REGION 1..499: note = tr|A0A255YTA6|A0A255YTA6_9PROT Tryptophan halogenase; OS = Niveispirillum lacus OX=1981099 GN=CHU95_16795 PE=4 SV=1
MAGNLPGSILIVGGGTAGWMAAAALARAVGRHTRIQLVESSAIGTVGVGEATIPAIRGFNHMLGLDEADFLRFTQGTYKLGIEFRDWTRLNHSYFHPFGVHGASLDANYTHQYWLRLNAMGEGGRLEDYSLCTIMAEQGRYMAPVTDPRNIMSVVGSAYHFDASLYADYLRRYAERLGVVRLDRKVVDVALRGEDGFVEAVICEGGERLAADFFIDCTGFTGLLIEKALKAGYEDWTHWLPCDRAWAVPSSGDGRITPFTRSTAREAGWQWRIPLRHRVGNGHVFSSAHVSEERAREVLLANLDGQPLADPKLLRFVTGRRKQAWVKNCLSLGLASGFLEPLESTSIHLIQTGITKLLDFFPGRQIDGAEVREYNALAQGEFEAVRDFLILHYHVTERSDSSFWNHCRTMDIPDSLKSRIELFRRRGRVSTRARALFTDTSWIAVMIGQGIMPETYDPLVDLHPVAAVRERMGTMRARIRQAADAMPTHEAFLGKQAAA

SEQ ID NO: 89091 - protein, 512 aa, unidentified
  source 1..512: note = [Mycobacterium] stephanolepidis
  REGION 1..512: note = tr|A0A1Z4F0Q1|A0A1Z4F0Q1_9MYCO Tryptophan halogenase; OS = [Mycobacterium] stephanolepidis OX=1520670; GN = MSTE_03466 PE=4 SV=1
MLEEVVIVGGGTAGWMTASYLKVAFGDRITVTVVESERIGAIGVGEATFSTIRHFFEYLGLEEHEWMPSCCATYKLGIRFQDWRKPGHHFYHPFERQRVVDGFGLTDWWLDNPRSASFDRDCFLIGTLCDNDKSPRRLDGSLFTGTGGENPAYRTTLTEQETQFPYAYHFDASLLADFLRDFAVRRGARHVVDDVVDVLQDERGWISQVRTRTHGSIGGDLFIDCTGFSGLLLGRAMKEPFESYQGSLLNDRAVALRVPTDQDHGHLPPYTTATAQDAGWIWSIPLFERTGTGYVYAADYCSPEDAERTLRDFVGPAAEGLEANHIRMRIGRSRRSWVGNCVAIGLASGFVEPLESTGIFFIQHGIEQLVKHFPDESWEESLRDSYNRVVNRCMDGVREFLVLHYYLAARVDTRYWRDTKAIELPATLAERIEHWRSKLPDAGSVYPHYHGFEPYSYVCMFVGLGGIPARASTVVRYLDATRAQREFDLLAQQASRLRHSLPTHREYLAQMY

SEQ ID NO: 89092 - protein, 499 aa, Henriciella sp.
  REGION 1..499: note = tr|A0A399R712|A0A399R712_9RHOB Tryptophan 7-halogenase OS=Henriciella sp. JN25 OX=2305466; GN = D1223_15070 PE=4 SV=1
MKDGQAKQKVIIAGGGTAGWMTAAALGKVLEKVCDVTLVESDAIGTVGVGEATIPTLVTYNRLIGLDEAKWMSAVKGTFKLGIAFENWTDLNHRYIHSFGITGKDHWTAGFQHFWHRGRELGVAKEFGDYCLELIAAEKDRFAHLPDLGLNYAYHIDATAYAGFLREIAERHGVKRREGRIAEVRRAANGDIASLVLDDGAELDGDLFVDCTGFRALLIEGALGVGYDDWTHWLPCDRAIAVQTESVRAPRPYTRSIAHEAGWRWQIPLQHRTGNGTVYCSKYMSDDEAQAKLLNDIEGRPLTEPRVLRFRTGMRRQHWHRNCIAIGLSSGFIEPLESTSIHLIQRSVMRLMRMFPQHGVHQPDVDEFNAQTAYETDHIRDFIILHYHLTNRTDTPFWRHVRSMEIPESLAHRMRLFRETGRVFRANDELFAENSWTQVMLGQGLMPETHHPVADVMSEAEITKFLDYIIENVNRTANGLPAHEDYLKSYCPAAIAEPA

SEQ ID NO: 89093 - protein, 498 aa, unidentified
  source 1..498: note = Sphingomonas bacterium
  REGION 1..498: note = tr|A0A3D0WAF3|A0A3D0WAF3_9SPHN Tryptophan halogenase; OS = Sphingomonas bacterium OX=1895847 GN=DEP91_02180 PE=4; SV = 1
MTPKRIVVAGGGTAGWMAAAAIARTMGGAATVTLVESEAIGTVGVGESTIPPLVTYNRLLGIDEAAFMRATNATFKLGILFDGWRDGSDRYFHSFGVTGKDHWAAGFQHYWLSGLERGQDAAYDDYCLELVAALQGRFAHLPDNALNYAYQLDSNAYARFLRGMAEGDGTVRIDGRIGEVELDGETGDIAALVLDGGRRVEGDLFLDCTGFRALLIEKALHAGYDDWSHWLPCDSAIAVQTENVGPPVPYTRAMAHDAGWQWRIPLQHRTGNGIVWCSRYLTREAALERLLGNVEGRVLTEPNHLSFQTGARRRQWHRNCIAIGLSGGFMEPLESTSIHLIQRAILRLVRMLPLGPVNPSDVAEFNDQQLTDMVQIRDFLILHYKATDRRDSPFWRQAAAMDVPETLAQKIALFRETGRVFRRNEELFAENSWVQVMLGQGIVPQSWHPIAAKLSDDELARFLGSIREQVARTVATLPSHAAYVSRYCGATAPAEKAA

SEQ ID NO: 89094 - protein, 516 aa, Streptomyces sp.
  REGION 1..516: note = tr|A0A1Q4WDD5|A0A1Q4WDD5_9ACTN Tryptophan halogenase; OS = Streptomyces sp. CB02923 OX=1718985 GN=A6A06_35040 PE=4; SV = 1
MIKSVVIVGGGTAGWMSASYLKAAFGDRLDVTLVESDRVATIGVGEATFSTVRHFFDYLGLDESEWLPECSGSYKLGIRFENWREPGHHFYHPFERLRTADGFPLADWWLREGDRSEPFDRSCFITPALCEAERSPRMLDGSLFAGDLDGSLGRSTLEEQRDQFPYAYHFDAALLAKFLTKFGTDRGVRHVVDDVLDVARDQRGWISHVTTREHGDLSGDLFIDCTGFRGLLINQTLEEPFESFEDVLPNNRAVALRVPQPNQAETGMRPYTTATAMDAGWIWTIPLFGRIGTGYVYSDAHCTPEEAERTLRAFAAPGQDDLEANHIRMRIGRNRRSWVNNCVAIGLSSAFVEPLESTGIFFIQHGIEQLVKNFPDAHWDQALIDDYNNRVANVLDGVKEFLALHYRAAQRDDTPYWKEAKVRALPDGLAERLALSSSHLLDEHTIYPAYHGFEQYSWITMLLGLGHEPARPRPALAHIDPAGARAEFAALKASTQRLVENLPSCYEYVASLNARR

SEQ ID NO: 89095 - protein, 533 aa, unidentified
  source 1..533: note = Gemmatirosa kalamazoonesis
  REGION 1..533: note = tr|W0RM71|W0RM71_9BACT Tryptophan halogenase; OS = Gemmatirosa kalamazoonesis OX=861299 GN=J421_4025 PE=4; SV = 1
MTRREIAVVGSGFAGSLAARVLAVLGHDVVLLERGTHPRFAIGESTTPLANLSLERLARRYGLADCWHLATHGRWLAHHAGVRRGLKRGFTFYRHHPGRPFENAGLDSERLLVAASPSDDIADTHWLRADVDHHFVREAVAAGVDYRDRVELTGAERAPGGWRLTGTRGGEPLGLRAEFVVDASGPGGFLARQLAIPSALDRVETQSALVYSHFDGVRTMPDVVPGLPDGPYPDDRAAVHHVIDEGWMYALRFDDDVTSAGFLLTPRGLASLGADAPDPAALWRAVVERYPTIGAAYDDATPRTPIGFVPRVQHRLARAAGDGWLLLPHAYAFVDPLFSTGIAWGLRAVERLALAFEHGVPNAAWLARYDAALAAEATQIDRLVAGAYEAMAHFELLAAHAMLYFATVSFAEVGQRLAPEDDATWSGFLGVGDAVTEPLPGEALRRLRTLSPADADARRAFAAWVADAIHPRNVAGLADPSRHNLYPVDLDTLIDRHALLGMTRAAVLAALPALRGMGPEPDLSQIAGIGSRR

SEQ ID NO: 89096 - protein, 516 aa, Pseudoalteromonas carrageenovora
  REGION 1..516: note = tr|A0A2K4X8F8|A0A2K4X8F8_PSEVC Tryptophan halogenase; OS = Pseudoalteromonas carrageenovora IAM 12662 OX=1314868; GN = PCAR9_A21060 PE=4 SV=1
MTKPIKKIVILGGGTAGWLSAGLLAAEHPHLSVTLIESANVPILGVGEGTWPSMRNTLQRIGIKEIDFITQCDTSFKQGSKFINWRNLNEGENYYHPFMNPQGYEHTNLHASWQRIAPTQKFADVVNMQSFVCQAALAPKQLQTPEYAAVTNYGYHLDAGKFAEFLKNHSVKNLNVTHITDDVTEVINDEKDYIASLKTNNNGNITGDLFLDCSGSRARLIGEHFKSEFIAQDHILFNNSAVAAQIPNSHPTQNITSATLSTAQGNGWIWDIALPTRRGTGYVFSSKYQSDESATDTLKSYIAKSTSEQQAEQLNYRVLKFSPGYRQKFWIKNCVAVGMSAGFLEPLEASALAMVELSISMLSEQLPQNRTHMSQLEARFNDRFSTRWQRVVEFLKLHYVLSERDDTPYWQNIRDLTTAPERLKNLLKLWQFQPPSRFDFIENEEVFSSSSYQYVLYGMGFNTQTVSAQNAFNDPRAGDYYYQQNREKIAQYLKGLPSNRELLNYLLSNNRQPHND

SEQ ID NO: 89097 - protein, 481 aa, unidentified
  source 1..481: note = Sphingomonas bacterium
  REGION 1..481: note = tr|A0A3D0WBJ5|A0A3D0WBJ5_9SPHN Tryptophan halogenase (Fragment) OS=Sphingomonas bacterium OX=1895847; GN = DEP91_08025 PE=4 SV=1
MTAAALAQALQRGTTITLVESDEIGTVGVGEATIPPIRIFNDTLGIDERQFVAEAQGTFKLGIEFVDWARVGHRYFHPFGAHGRNFDIVPLHQHWLRAREEGEGALLDEHSMAWHLARAGRFAPPSPDQRSVLSTYDYAFHFDAGLYARFLRRYAEGKGVVRVEGKVGDVSLNGETGHVERVTLEDGRAIDADLFVDCSGFRGLLIEGALATGYEEWTHWLPCDRAVAVPSARAEPPIPYTRSTAREAGWQWRIPLQHRTGNGYVYCSAHLDDDAAAAALLDRLDAPALADPRHLRFVTGRRRLAWKRNVVAIGLSSGFLEPLESTSIHLIQAGISKLLALFPDRGFDPATIDEFNRVTSIETERIRDFLILHYKLTERTDAELWRYCAAMDVPDTLKLKLEHFRRHGRLVAREMDLFAPPSWLAVHIGQLNFPEGLDPLLDHRSVDARGWLAKLRAAMAAEAARVPTHAEFIERNCRAAA

SEQ ID NO: 89098 - protein, 495 aa, Pseudoalteromonas carrageenovora
  REGION 1..495: note = tr|A0A2K4X8J3|A0A2K4X8J3_PSEVC Tryptophan halogenase; OS = Pseudoalteromonas carrageenovora IAM 12662 OX=1314868; GN = PCAR9_A21059 PE=4 SV=1
MTKTNAIKNVVIAGGGTAGWMAAAALAKLIGKNIHVTLVESDDIGTVGVGEATIPPIRTFHKLLGINEQAFMKATQASFKLGISFENWGDENTRYIHSFGVTGKECWAGEFHHFWLQGKTLGINNPFGDYCYELQAAKAGKFAFNQQNPINYAYHMDATRYAQFLREFSEPLGVKRVEGKIQKVVKNAKTGHIESLLLNSGEQINGDFFIDCTGFRGLLIEQALHTGYEDWSHLLPCNSAIAVQTKSTSDTVLPLTRSIAHKSGWQWRIPLQNRVGNGLVYCSQYMDDEQAKALLLNNIEGEALTEPRVIKFKTGRRLKGWNKNCLALGLASGFVEPLESTSIHLIMSGIIRFMRLFPFNGITNHAIDEYNKQLKSEIENIRDFIVLHYKVTNRDDSEFWLHCSAMEVPKTLKHEIDLFKQTGRVFLDDGDIFRVDSWVQVMLGQGIGPEQHHLIASMMNNEELTRFLHGIKQQIEQRVSQLPPHHEFLKQYCPA

SEQ ID NO: 89099 - protein, 503 aa, unidentified
  source 1..503: note = Sphingomonas endophytica
  REGION 1..503: note = tr|A0A147I4W4|A0A147I4W4_9SPHN Tryptophan halogenase; OS = Sphingomonas endophytica OX=869719 GN=NS334_07405 PE=4; SV = 1
MEQQRDDGPMRRIVIVGGGTAGWMAAAALSRVLGPAGPAITLIESEEIGTVGVGEATIPPLQAFNTLLGIDEDAFVRATNGTFKLGIEFVDWGRIGQRYFHPFGVYGIDNGAVPFEALWRRMRQAGGAGPLADYSICAAAAANGRFLRPQPGNTPLAQIGYAFHFDAALYAAFLRRHAEAAGVVRHEGRVVDVTRRAGDGFIASVTLVDGTRVEGDFFIDCSGFRSLLLGDTLGTGFVDWSHWLPNDRAVAVPSAMVGAPTPYTRSTAHGAGWQWRIPLQHRTGNGHVYASAHLSEDEATATLLAGLDAPALADPRVLRFRAGRRAAFWVGNCVALGLASGFLEPLESTSIHLVQAGVARLLEMLPTRACAPADTARYNRLMIAEVDSIRDFIILHFHASARDDTAYWRDLAAMPIPDTLAERIAIYRRTGRVYREGDELFTRTSWLAVMEGQGLTAEGYDPVAAGMPEAEARARLARIAAVTAEAARRMPAHADFIARHCAA

SEQ ID NO: 89100 - protein, 500 aa, Massilia albidiflava
  REGION 1..500: note = tr|A0A411X5X4|A0A411X5X4_9BURK Tryptophan 7-halogenase OS=Massilia albidiflava OX=321983; GN = EYF70_29100 PE=4 SV=1
MEQQRQKKPVRRVVIAGGGTAGWMVAAGLSKSLGKLLDIKLIESEEIGTVGVGEATIPTLLNFHHLMEINEQEFMAETMATFKLGISFENWRNVNEDYIHSFGTTGTDHWTAGFQHFWHKGRERGIAGDYGDYCLELKAGLKNRFAHLPNNGMNYAYHMDAGRYAKFLRRFSERYGVQRVEGKIVEVRKNLLSGDITALRLDSGAELEGDLFIDCTGFRGLLIGQTMGVEYEDWSHWLFNDSAVALQTKSVRDAVPYTRSIARDAGWQWQIPLQHRVGNGLVYSTRYTDDETALRTLQAAVDGEPLMTPRVIRFTPGQRKQTWKGNCIAIGLASGFLEPIESTSIHLIQRGIIRLMQMFPQDGISQADIDEFNQQADYEIQHIRDFIILHYNVTNRRDTPYWRDAATMKLPPSLQHRIDLFRDTGRVFRVPNELFAENSWIQVMLGQGILPASHHQTADLMGDEELARFLGNISGTIDRTVAQLPSHQKYVEQYCSGTGW

SEQ ID NO: 89101 - protein, 533 aa, Kribbella antibiotica
  REGION 1..533: note = tr|A0A4V2YPS0|A0A4V2YPS0_9ACTN Tryptophan 7-halogenase OS=Kribbella antibiotica OX=190195; GN = E1263_15910 PE=4 SV=1
METTDNRIKNVVILGGGTAGWMTAAYLGKALQGTTTITVLEAPAVPRIGVGEATIPNLQSAFFDFLGIPEEEWMRECNASFKESIKFVNWSTPGAGESTPRLRADGKPDYFYHAFGQLPNHDGIPLSHYWYNDHVNGRTDRDFAFACYPVTPAMDAHKSPRRLDGTRVASYAWHFDANLVAAFLCKFAVEKQGVVHISDQMTEAVQDERGFVTALKTKDGRTVEGDLFVDCSGFRGLLINKAMAEPFIDMSDHLLNDSAVATQIPHDDAANGVEPFTSAIAMSAGWTWKIPMLGRFGTGYVYSSKFASEDDATAEFSKMWGLDPKNTDFNKIRFRVGRNERAWVKNVVSVGLASCFVEPLESTGIYFITGALFQLAKNFPNLDFDPVLIKQFNAEIETMFDDTRDFIQAHFYYSPRTDTPFWQANKELYLAEGFQEKVAMYKSGMVVNMPIMEEGGYYKNFEAEFRNFWTNNNYYCVLAGLGVLPDRPMPALAYRPESVAGAEPLFAELRRKQEALVESLPSTYEYLTHFHGK

SEQ ID NO: 89102 - protein, 512 aa, Lysobacter gummosus
  REGION 1..512: note = tr|A0A0S2G9V9|A0A0S2G9V9_9GAMM Tryptophan halogenase family protein OS=Lysobacter gummosus OX=262324; GN = LG3211_3661 PE=4 SV=1
MHNDADTHAAAVRPVKRVVIAGGGTAGWMAAAAVSKILGGTLEISLIESEEIGTVGVGEATIPTLSTFHRLLDIDEREFMAATRGTIKLGISFENWRTQQHRYIHSFGTTGRDHWSAGFQHFWRRGRELGLAGGYDDYCVELQAALQGKFAHLKNYRMNYAYHLDASLYAKYLRAMSERNGCRRIEGKIVEVLTDADSGYITALRLERGEVIEGDLFIDCTGFRALLIDKTMGVGFEDWSHWLLNDSAIAVQTTSVCDPVPYTRAIAEPWGWQWRIALQHRVGNGIVYSSRHVGDEEARQRLMETVDGEVLKNPWPVRFRPGRRLQCWNRNCVALGLAGSFIEPLESTTIHLIQRGITHLMRSFPQVIGQAGIDEYNTQMADELQHVRDFVVLHYYATERRDTPYWEYLANMELPQTLRRRIELFRETGTVFHVPGELFAENSWIQVMMGQGITPKAHHPTADTMSETDLRRFLDDIRTHVETTVRMLPSHQAYLDQYCPSGPRAAVSTSVA

SEQ ID NO: 89103 - protein, 504 aa, Duganella sp.
  REGION 1..504: note = tr|A0A0Q4NNL6|A0A0Q4NNL6_9BURK Tryptophan halogenase; OS = Duganella sp. Leaf61 OX=1736227 GN=ASF04_18695 PE=4 SV=1
MPQQNQQPQPSRPVRRVIVAGGGTAGWMAAAALSRTLGKVLDIKLVESDDIGTVGVGEATIPSLAQFHRLIDIDEREFMAATQATFKLGISFENWRARGENYIHAFGSTGIDHWTAGFHHFWQKGRERGIAADYGDYCLEHKAARALRFGHLPDDGLVYAYHLDASRYARYLRRYAEHFGIERIEGKIADVQRDPVDGNVAALVLDSGRRLEGDLFIDCTGFRSLLLGQTMGVEYEDWSQWLFNDSAIAVQTESVGPAVPLTRAIAHDWGWQWRIPLQHRTGNGIVFSSRFVDDDTARAALLANIEGKLLTEPRVIRFTPGQRRQVWAGNVVGLGLATGFLEPIESTSIHLIQRSIVRLLQLFPTEGIEPTDVAEFNTQSADDIRTIRDFIILHYKVTERDDSPYWRAARDMTVPPSLQHRLDLFGGSGRVFRSQNELFSENSWVQVMLGQGLNPRTQHHTADVMPERELAAFLDGIRTGIDRTVAQMPAHQAYVERYCPAEQP

SEQ ID NO: 89104 - protein, 502 aa, unidentified
  source 1..502: note = Niveispirillum lacus
  REGION 1..502: note = tr|A0A255Z165|A0A255Z165_9PROT Tryptophan halogenase; OS = Niveispirillum lacus OX=1981099 GN=CHU95_11180 PE=4 SV=1
MSESRIRELVIVGGGTAGWMTAASLANHFQGSGLKITLIESSAIGAVGVGEATIPTIRRFYQSLGLRDLDVLRATHGTVKLGIRFDGWLNKDSSFIHPFGVYGQDLRDIPFHQYWLRLRAAGEKVDLGDYSLAVALARGGRFTTPSPNPPSTLSVFDWALHFDAGLFAQLMRQTAEKLGVQRIDAKIEKVELNPQNGHIAGVLLDSGSTVTGDLFIDCSGFQGLLIEGAMSAGYEDWGQWLLCDRALAAQGHAITPPPPFTRVTAHKAGWRWTIPLQHRTGHGYVYSSRHISDSDAEAELLAAVGGDLKMAPRRISFTPGRRKQAWKGNCVAIGLSSGFLEPLESTSIALIETGIDKLKQLFPQRDIDPVLVEEYNDWSQREMERVRDFIILHYWLNRRQDTAFWRDCRAIDLPDTLIRKVEMWKRRGHMVRYRWEMFQPASWLAIYAGFDFLPEGYDPALDGFDVPSLSRGLAGMRKAIADTVADCPTHQEFIDRYAKVVV

SEQ ID NO: 89105 - protein, 538 aa, Burkholderia pseudomallei; identical to SEQ ID NO: 84273
  REGION 1..538: note = tr|Q3JJI0|Q3JJI0_BURP1 Tryptophan halogenase; OS = Burkholderia pseudomallei (strain 1710b) OX=320372; GN = prnA PE=4 SV=1

SEQ ID NO: 89106 - protein, 497 aa, Pseudoalteromonas carrageenovora
  REGION 1..497: note = tr|A0A2K4X8S4|A0A2K4X8S4_PSEVC Flavin-dependent tryptophan halogenase OS=Pseudoalteromonas carrageenovora IAM 12662 OX=1314868 GN=prnA PE=4 SV=1
MKPIKHVVIAGGGTAGWIAAALLNKVLGKVIDITLIESSTIGTIGVGEATIPPIIQLNNALGINEQDFINATNASIKLGIEFENWKTPSHSYMHAFGSFGKDFPFCDFYNFWVKGKITGSEDSLWDFSLNYQAAQQLKFAPLNTIPNTQLPGLSYAYHFNATRYAEYLKTLATSRGVKHIDAKIEQVNQCPHSGNITSLTLDNDTEINGDLFIDCTGQRALLIEQTLNTGFVDWSHYLPCDSAVAVQSQGTDSLKPYTRSIAHSAGWQWQIPLQNRVGNGLVYCSRYLSDESATQLLLNNLPAEPITEPRVIKFKTGRCLKQWHKNVVSVGLASGFLEPLESTSIHLIQSAVTRLIKLFPNNGISDALVAEFNKQSVTEIEHIRDFIILHYKLTEREDSAFWRQCKQMEIPDSLAHKLNLFKHTGKVVRENDELFAEVAWQQVFIGQGLIPDDYNSIVDSLSSEQLNDLFSTLKTLITSTVEQLPTHKDFLAKIKKA

SEQ ID NO: 89107 - protein, 501 aa, unidentified
  source 1..501: note = Dokdonella immobilis
  REGION 1..501: note = tr|A0A1I4WA99|A0A1I4WA99_9GAMM Tryptophan halogenase; OS = Dokdonella immobilis OX=578942 GN=SAMN05216289_104103; PE = 4 SV=1
MHDSRIRKIVIVGGGTAGWMTAATLAKLIGRSVAIRLVESDEIGIVGVGEATIPQIRLFNATLGIDEDEFVRETRGTFKLGIEFVDWTRPGSRYMHAFGVVGGRDLGLVQFYQYWLKLHQLGKVAELGSYTFNQVAARLGRFMRGTGQPNSPLTNVYHAFHFDAGLYARFLRGYAEKLGVVRTEGKIVDTILRGEDGFIEAVVLDSGERIEGELFIDCSGFRGLLIEQALHTGHEDWSHWLPCNRAMAVPCASVPDPTPYTRATARPAGWQWRIPLQHRTGNGHVYCSDFMGDDEAAAILLANLDGEALADPRPLRFTTGMRKRFWNRNCVAIGLSSGFMEPLESTSIHFIQSSIAKLVALFPDRGFAEQTIDEYNRQTRFEFERSRDFLILHYLANARDEPFWQRCREMAIPDTLRHKIDLFRSSARLFREHEELFTEVGWLQVMVGQGIVPERYHPMVDMLGEAEIVQMVEGTRAVLERAAAAMPSHAEFISRHCRASA

SEQ ID NO: 89108 - protein, 506 aa, unidentified
  source 1..506: note = Burkholderiales bacterium
  REGION 1..506: note = tr|A0A257H1I3|A0A257H1I3_9BURK Tryptophan halogenase; OS = Burkholderiales bacterium PBB4 OX=2015566; GN = CFE44_14735 PE=4 SV=1
MQQENKFDIVIVGGGTSGWMTAAALSKVLKGQYNIKLVESDEISTIGVGEATIPMINLFNRLLDLDEDQFIRETQASFKLGIEFVNWGRLGDRYIHGFGVIGQDNWTCDFHQYWLKQYLAGKAKDLDHYSINTAACHDNKFLRAQTDMPNSPLSQIAHAYHFDAGLYAKFLRKFSEARGVTRIEGKINDVIVRDGDGHIESVVLENGERIHGKLFIDCSGFRALLIEGALKTGFEDWSHWLPCDRAIAVPCASAKVLTPYTRSTARSAGWQWRIPLQHRIGNGHVFSSKFISEDEATAVLMSNLDGAPLADPRTVKFVTGKRKKAWNKNCVAIGLASGFVEPLESTSIHLVQMGIAHLLTFFPTAGFEASDTQAYNRIMNLEYDWVRDFIILHYKATERNDSPFWNYCREMEIPESLAERMDLYKSNGRVYREGNELFTKVSWVQVMHGQRLRPTSHHPLTDLISEEEIQNYLNEVEGVIKACVNVMPDHAEFIAKHCAATTPTMA

SEQ ID NO: 89109 - protein, 478 aa, Streptomyces rapamycinicus
  REGION 1..478: note = tr|A0A3L8RAP8|A0A3L8RAP8_STRRN Tryptophan halogenase; OS = Streptomyces rapamycinicus (strain ATCC 29253 / DSM 41530 / NRRL 5491 / AYB-994) OX=1343740 GN=D3C57_143340 P; E = 4 SV=1
MNSALQSDYDVVVVGGGPGGSTLSTLVALQGYRVLLLEKEEFPRHQIGESLLPSTVHGICRLLGVTDELANSGFIKKRGGTFRWGLNAEPWTFDFSVSDKFSGPTSYAYQVERMKFDKILLDNARSKGVDVRERSEVVGVLEEEGRICGVQYDDAEGVRRDVRASFVADASGNKSRIHKRIGGARKYSDVFQNIALFGYFTGGKRMPAPVAGNITCASFDLGWFWYIPLSDELTSVGAVLRREALERLQDGPRDKVLGGLIDECPLIADYLSEAERVTEGPYGQVRVRKDYSYIQEKFWRPGMVLVGDAACFIDPLFSSGVHLSTYSALLAARSINTTLRGTIDEADCFREYEARYRREYDVFHDFLVAFYDLQKDEHAYFHEAKSVIGSSASAAESFAELVGGGASEEEVLIGTAPSFSQERRADLLERSRKIHWQGSRVQVQAHFGESVGDDPLYEGGLVESPDGMHWARPEQPAS

SEQ ID NO: 89110 - protein, 536 aa, Sphingomonas paucimobilis; identical to SEQ ID NO: 85805
  REGION 1..536: note = tr|A0A411LED2|A0A411LED2_SPHPI Tryptophan 7-halogenase OS=Sphingomonas paucimobilis OX=13689; GN = DRN02_000480 PE=4 SV=1

SEQ ID NO: 89111 - protein, 504 aa, Maricaulis sp.
  REGION 1..504: note = tr|A0A1Q8FWC5|A0A1Q8FWC5_9RHOB Tryptophan halogenase; OS = Maricaulis sp. W15 OX=1772333 GN=AWH62_15910 PE=4 SV=1
MTPNRIKSVLIVGGGTAGWMAAAALSRFLGETIKIQLVESEQIGTVGVGEATIPQIKHLNSVLCIDEREFVARTNGSFKLGIEFINWRRQGEAYLHNFGSIGLNLQQVPFHHYWLRARAGGASESLWDYCLNTAAARQMRFAPLEKVGNSPLSGIAYAYHFDASLYGKFLRDYAEQRDVIRVEGLIDDTIMDPESGHVTAVRLRDGRTLEADLFIDCSGFRGLLIEQALKTGYDDWTHWLPCDRAIPVPSSNAQAPIRPYTQAIAHKAGWQWRIPLQHRTGNGHVFSSAHMSEAAATETLLANLEGEALAEPRVIRFVTGRRKQFWNRNVVALGLASGFLEPLESTSIHLVQSGISRLIALFPDGDLAAADRDEYNRQMALEYERVRDFIILHYHLNERTDSDFWQDCAAMSVPDTLSAKLDLFRANGRLYHREEDLFTDSSWLQVMLGQGVNPKGYHPMADALAAGQLSDFLGNIQKIVGQAAATLPTHSDFLAKHCPAAMDR

SEQ ID NO: 89112 - protein, 505 aa, Litorimonas taeanensis
  REGION 1..505: note = tr|A0A420WJG8|A0A420WJG8_9RHOB Tryptophan halogenase; OS = Litorimonas taeanensis OX=568099 GN=DES40_0474 PE=4 SV=1
MKAPSSALNHIIIAGGGTAGWMTAAALSRLIENKQTRITLIESDAIGTVGVGEATIPPIVGFNQLLGIPEEDFIKFTNATFKLGIEFKNWYNGKDSYIHPFGSYGQDIEAIKFYQIWLKLNALGKVPNIDEFCLSAVAAYSGKFAPPSPNPNSVMSSLAYAYHFDATQYALLLRSLAESRGVKRVEGKIVDTALNSENGHITSLKLQSGDTIEGDFYIDCTGFKSLLINGALGIEFEDWSHWLPCDRAVTIAGARDSAPAPYTRATALTAGWQWRIPLQHRTGNGHVYSSQYITDDDAEKALIENLEGNPIGSARKIHFRTGRRKKFFHKNCVAIGLSAGFMEPLESTSIHLIQAGISKLIALLPDPSFNTAEAETYNNLTHMQFEQTRDFLILHYKATQRTDSDFWTYVKNMDIPDSLQMKLELFKSKGRIFRFQDELFGEDNWAAVLLGQKVMPRSWDPLVDTLDTQQLSNHLAGMHQLIRRTAEQMPDHQSYIDQLVRKTTR

SEQ ID NO: 89113 - protein, 503 aa, unidentified
  source 1..503: note = Hyphomonadaceae bacterium
  REGION 1..503: note = tr|A0A3D3Z464|A0A3D3Z464_9RHOB Tryptophan halogenase; OS = Hyphomonadaceae bacterium OX=2026748 GN=DIU09_06110; PE = 4 SV=1
METNGLLPKSIVIVGGGTAGWMTAAALARFVGHKVKITLIESSDIGTVGVGEATIPPIRNFNAILGLDEAEFVRETKGTYKLGIEFCDWVKPGHRYFHPFGVYGPSLNQPNFFHQWLRARAGGQLPELSEFSLCSLAARAGRFAPQGRDPASIQATLTSAFHFDAGLYAAYLRKFAEARNVRRLDQKVQSVRQSPETGNVEAVLLESGEAIEGDFFVDCTGFRGLLIEQTLKTGYEDWRAYLPADRALAVPTAKVGPAVPFTRSTARSAGWQWRIPLQHRTGNGYVYSSQFVSDEAAHETLMGNLDAPASADAKPLRFVTGRRKKLWNKNVVAIGLASGFLEPLESTSIHLIQTGITKLLDFFPSRQNHAADAATYNRLGQEEYESIRDFLVLHYMANQRVGEPLWDYCRQMALPDSLQERLALFQHGGRVPPRAFDLFTETSWVAVFMGQGIEPQGYNPLVEVHEGAAGRQFLADAHRALAELSRQLPAHEDFLRQAGMMPS

SEQ ID NO: 89114 - protein, 386 aa, Acidovorax avenae
  REGION 1..386: note = tr|F0Q0Q3|F0Q0Q3_ACIAP Tryptophan halogenase; OS = Acidovorax avenae (strain ATCC 19860 / DSM 7227 / JCM 20985 / NCPPB 1011) OX=643561 GN=Acav_2542 PE=4 SV=1
MNAAGTVFDAAIAGAGPAGAACAAVLARAGWRVLLADAGGERDARIGENLPPAVCHLLAELGLREAVRADGHRPCLGSWSSWGDASGRASDTLRQLQGDGVQLDRARFDERLRAAALLDGVRFWPSTHLQIDRPAEDGLPHAVRARATSGGDTVQVGARWFIDATGRAAAPACRLGARRERHDALLAFHLRLESSGRNDRDGRTWIEAVEDGWWYSVLLPGGERVVSFLGDADLVDRRTLLSGDGLWSQLQSTEHLRALCAAHGYRPCAAVQGADACSSELDQPAGHRWLAVGDAAQAFDPLSSKGIGNALHTGLCAARAMLAAEGGDAGATGRYAAHLRDIHRVYRAQLAAVYAQERRWAGQPFWARRHARAVTAAHPPVAATLA

SEQ ID NO: 89115 - protein, 495 aa, Pseudoalteromonas elyakovii
  REGION 1..495: note = tr|A0A558HVI5|A0A558HVI5_9GAMM Tryptophan 7-halogenase OS=Pseudoalteromonas elyakovii OX=81037; GN = FQP81_14090 PE=4 SV=1
MTKTNAVKNVVIAGGGTAGWMAAAALAKLVGNNINITLVESDDIGTVGVGEATIPPIRTFHKLLGINEQAFMKATQASFKLGISFENWGDENTHYIHSFGATGKECWAGEFHHFWLQGKALGINNPFGDYCYELQAAKAGKFAFNQQNPINYAYHMDATRYAQFLREFSEPLGVKRIEGKIQKVVKNPKTGHIESLILNNGEHINGDFFIDCTGFRGLLIEQALHTGYEDWSHLLPCNSAIAVQTKSTSETVLPLTRSIAHKSGWQWRIPLQNRVGNGLVYCSQYMDDEQAKALLLSNIEGEALTEPRIIKFKTGRRLKGWNKNCLALGLASGFVEPLESTSIHLIMSGIIRFMRLFPFNGITNHAIDEYNKQLKSEIENIRDFIVLHYKVTNRDDSEFWQHCNAMEVPKTLQHKIDLFKQTGRVFLDDGDIFRVDSWVQVMLGQGIEPNQHHLIASMMSDEELTRFLHGIKQQIEQRVSQLPSHHEFLKQYCPA

SEQ ID NO: 89116 - protein, 499 aa, unidentified
  source 1..499: note = Hyphomonadaceae bacterium
  REGION 1..499: note = tr|A0A2E3ARS9|A0A2E3ARS9_9RHOB Tryptophan halogenase; OS = Hyphomonadaceae bacterium OX=2026748 GN=CME95_03880; PE = 4 SV=1
  VARIANT 196: note = Xaa can be any naturally occurring amino acid
  VARIANT 203..204: note = Xaa can be any naturally occurring amino acid
  VARIANT 214: note = Xaa can be any naturally occurring amino acid
  VARIANT 253: note = Xaa can be any naturally occurring amino acid
  VARIANT 264: note = Xaa can be any naturally occurring amino acid
  VARIANT 267: note = Xaa can be any naturally occurring amino acid
  VARIANT 270: note = Xaa can be any naturally occurring amino acid
  VARIANT 290: note = Xaa can be any naturally occurring amino acid
  VARIANT 298: note = Xaa can be any naturally occurring amino acid
  VARIANT 301: note = Xaa can be any naturally occurring amino acid
  VARIANT 330: note = Xaa can be any naturally occurring amino acid
  VARIANT 362: note = Xaa can be any naturally occurring amino acid
  VARIANT 364: note = Xaa can be any naturally occurring amino acid
  VARIANT 370: note = Xaa can be any naturally occurring amino acid
MDTQNIRRVVIAGGGTAGWIAAASLSRLLGPLLDITLVESDTIGTVGVGEATIPTHRTFHHLMGIDERDFMRATKATFKLGIAFENWGGQGDRYIHSFGQVGKSNWMGEFYNIWMYAQERGIGDELDAYCYELQAAEAGRFYTSEKANINYAYHLDASLYAKFLRNFSEAKGVKRIEGLIEEVEQDGESGFITALXLQSGERXXGDLFIDCTGXRGMLIEQTLKTGYEDWTHWLPTDSALAVQTRSVGPALPXTRAIAHHAGWXWRXPLXHRVGNGLVFCSENMQPDEAXDYLLSHVXGEXLTEPRLIRYKTGRRKKMWNKNCVALGLSXGFVEPLESTSIHLIQVGATRLVQQFPFAGISXAXATHYNXQAERELEKIRDFIVLHYKLTERDDSDFWRARRDMEIPDSLAQRIALFRENGLAYQATDDLFRVDSWLQVMMGQRLKPKGYHHMGHLMTDEQLKTALNGLQANISRAVSQMPSHQDFINQYCAAPEAEPV

SEQ ID NO: 89117 - protein, 505 aa, Maricaulis sp.
  REGION 1..505: note = tr|A0A1Q8FWB6|A0A1Q8FWB6_9RHOB Tryptophan halogenase; OS = Maricaulis sp. W15 OX=1772333 GN=AWH62_15905 PE=4 SV=1
MPSQSFEQESGLPRIAIIGGGSAGWMAAAAIIKATKGAASVTLVESEQIGVVGVGEATIPPIKLFNQMLGIDENEFVRETQGSFKLGIEFVDWSRRGQRYFHPFGTHGRDFDSVPLYQYWLRERRRGDETPLDAYSMAWVVARENRFSPPARDPRLVQSTFDYAYHFDTILYGQFLRRYSEARGVDREEGRVVETRLSETGDVAAVVMEDGRAIEADFFIDCTGFFGLLIEQALKTGYEDWTHWLPCDRAMAVPSETAGDFTPYTRSTAREAGWQWRIPLQHRTGNGHVYASQFITDDEASDTLLANLDGKPLADPRPLRFTTGRRRKFWNRNVVALGLSAGFMEPLESTSLHLIQTGINRLLALFPGTGDNRLEAAEFNRLTGEEYERIRDFLILHYHATTRDDAPLWRYTANMDIPDSLAWRMEHFRATGRLVSPGTELFLNPSWMAVYAGQEIEPAGLDPLVVGSQVDGAERLAGLRRVMAEAVAPVPDHRAYIERFCKADA

SEQ ID NO: 89118 - protein, 522 aa, unidentified
  source 1..522: note = Alteromonas mediterranea
  REGION 1..522: note = tr|A0A1J0SVG9|A0A1J0SVG9_9ALTE Tryptophan halogenase; OS = Alteromonas mediterranea OX=314275 GN=BM525_17630 PE=4; SV = 1
MTTATPITHIVVVGGGSAGWLTAGRIAAQHQCATRKDIKVTLVESPNVPIIGVGEGTWPTMRSTLIALGISETTFIKECDATFKQGAKFAKWTTGEKSDFYYHPLMLPQGFSQTNLGPYWQTVAPELNESFSHAVCVQEAICEAGCAPKSIRHAEFAGTANYAYHLDAGKFTAFLTKHCTEKLGVHHVLADVNRVESFDNGDIKALHTEQGVTVEGDLYVDCTGFKSMLLGEHYKVPFIPCDDVLFIDRALAVHVPYDTPQSPIASHTISTAQDAGWIWDIGLQSRRGVGHVYSSRHQNKDDAYARLDTYVRQTSSLNGIDDINVKDITIQSGHRQRFWQNNCVAVGLAAGFLEPLEASALVLVELSASMIAEQLPANRAVMDIVAKRFNDTFSYRWQRIIDFLKLHYMLSKREDSAFWRDNRDSHTIPDSLKELLALWQYHPPSDKDFTSNNEVFPAASYQYVLYGMGFTSDLATHQQWVNADFAKQQLMQNRKARSMAVEKLPKHRELINKIHQFGLQAV

SEQ ID NO: 89119 - protein, 510 aa, unidentified
  source 1..510: note = Alteromonas mediterranea
  REGION 1..510: note = tr|A0A1J0SBM2|A0A1J0SBM2_9ALTE Tryptophan halogenase; OS = Alteromonas mediterranea OX=314275 GN=BM525_01070 PE=4; SV = 1
MNHSSNTSQKQRIVIVGGGTAGWLTAAIVAAKHKVTIGECGLDITLVESSDIPTVGVGEGTWPTMRNTLKDIGLSEKEVFKRCSAAFKQGGKFVNWVKGNGDFYYHPFTVPLGYGRVEMAPYVGDIANFANATNFQQHVCERNMAPRTLSEQEYSSAQSNYAYHLDAGAFADMLRDFSKTQLGIKHIVATVENVAASSNEHIENITLNNGEVLEADLFVDCSGFRSLLLGETLGESVISTDEVLFNNSALALHVPHEEDFEIKPYTQATAQEAGWIWDIGLSSRRGVGHVYSTDFTTDERAEEVLRQYVGDEHGDLKARTIRFNSGYKKRIWKGNCIAVGLSAGFVEPLEATALMLIEISARYIAEQMPLPVTAMPIVSQRFNKQMNYRWQRIIDFLKLHYIFNQRSEPYWVANREAASIPDSLKEDLEIWKYRGPQIADFSAAIELFPAASYQYVLYGMGFSPDFSLQSHFYNERDLADKVMQQNQLITQQKLSSLPNHRDYIEQWLAS

SEQ ID NO: 89120 - protein, 127 aa, Stenotrophomonas sp.
  REGION 1..127: note = tr|A0A3C0GUE9|A0A3C0GUE9_9GAMM Tryptophan halogenase (Fragment) OS=Stenotrophomonas sp. OX=69392 GN=DCM50_13695; PE = 4 SV=1
MNVANTTQGRIRKVVIAGGGTAGWLAGCALAHQFRDQLDITLVESEQIGTVGVGESTVPPIRTFHRFLQIDEQEFLRAVAGTFKLSISFENWRRPGDRFIHPFGTIGQGTWATPFHHFWLDSLRRGM

SEQ ID NO: 89121 - protein, 501 aa, unidentified
  source 1..501: note = Alteromonas mediterranea
  REGION 1..501: note = tr|A0A1J0SKF5|A0A1J0SKF5_9ALTE Tryptophan halogenase; OS = Alteromonas mediterranea OX=314275 GN=BM525_18445 PE=4; SV = 1
MTALGLDSSNNQTPVKNVVIAGGGTAGWMAATALSRLLGKSVSVTLVESKDIGIVGVGEATIPPIRTFHKLLGIDEKAFMRATQATFKLGIEFENWREVNHSYIHSFGITGRECWAGEFHHFWLRAQDYGFGGDFGDYCPELIAAKQNKFATSDAMPLNFAYHFDAVAYGRFLKSLACDAGVTHREGDIEKVTVCPNTGNIQALHLTDGESIGGDFFIDCTGFKGLLIEQALHTGYDDWSHYLFCDRAVAMQTELTSPPVPYTKSVAHKAGWRWQIPLQERMGNGLVYCSRFMSDQEAIDTLKSQVSSTPINEPRVIRFTPGKRRRGWNKNCVALGLSSGFIEPLESTSIHLIMTGLIRLMRLFPFDGVTQSAVDEYNNKFDSEMSAILDFIVMHYKVTQREDSPFWQQCQRMDIPDSLKHKLALFAESGRVFLDDGDIFRVDSWTQVLMGQGMKPQQYHRVVDEMSEQSLKQFMAGLKLQVDNHVAKLPSHNAFLAQYLR

SEQ ID NO: 89122 - protein, 501 aa, unidentified
  source 1..501: note = Oleiagrimonas sp.
  REGION 1..501: note = tr|A0A328T287|A0A328T287_9GAMM Tryptophan halogenase; OS = Oleiagrimonas sp. MCCC 1A03011 OX=1926883; GN = BTJ49_05165 PE=4 SV=1
MNDRRIRRIVIVGGGTAGWMTAAALGQALQGNCRIDLVESDRIGTIGVGEATIPPIKLFNQRLGIDENAFITATQGTFKLGIEFVDWSRKGHRYFHPFGQFGAEFDKVPLHHYWLRERTRGDATPLEDYALAWMAARAGKFMTPSKDPRQVLSTFDYAYQFDAGLYATFLRRYAEQHNVRRTEGRVTCVQLREDGFIDRVTLESGEHLEGDLFIDCSGFRGLLIEGALHAGYEDWRHWLPCDRAVAVQCEHGEAFVPYTRSTAHAAGWQWRIPLQHRVGNGHVYCSHYISDDEATATLMDHLEAPALTEPRLLRFTTGRRRRFWHRNCVAIGLSAGFLEPLESTSIHLIQSAVTRLLALFPDRDFDPYTTAEFNRLTGQEYERVRDFLILHYCATQREEPMWRHVARMDIPQPLAYKLAHFRGHGRLVAENHELFQNPNWLAVLVGQEVWPERYDPLVDLRSEVDAPQILAGLRDVIGQAVDAMPTQREYIDRYCRAQPGK

SEQ ID NO: 89123 - protein, 494 aa, Sphingomonas paucimobilis; identical to SEQ ID NO: 87703
  REGION 1..494: note = tr|A0A411LEJ5|A0A411LEJ5_SPHPI Tryptophan 7-halogenase OS=Sphingomonas paucimobilis OX=13689; GN = DRN02_000915 PE=4 SV=1

SEQ ID NO: 89124 - protein, 504 aa, Caulobacter segnis
  REGION 1..504: note = tr|D5VGS5|D5VGS5_CAUST Tryptophan halogenase; OS = Caulobacter segnis (strain ATCC 21756 / DSM 7131 / JCM 7823 / NBRC 15250 / LMG 17158 / TK0059) OX=509190; GN = Cseg_2051PE=4 SV=1
MTPAPIRKIVVVGGGAAGWMTAAALSAMLEGLDVRITLVESEEIGIVGVGEATVPHIRHYNARLGLDEADFMRKTQATYKLGIEFCDWGRKGEAYIHPFGAYGHAIGGIPFHQHWLRAHQRGEVGSIDAYSLPVMAARADKFAPPSTDPRSLGSTFNYAYQFDAALYARYLRAYAEARGVVRVEGKIAAADQRPEDGFVTSVRLEDGRVIDGELFIDCSGFRGLLIEQTLKAGYDEWTRWLPCDRAAAAPCEAVEPPKPFTRATADQSGWRWRIPLQHRVGNGYVYCSSYIDDDAAARVLLEKLDGKPSQDPRFLRFVTGRRKKQWCKNVVAIGLASGFLEPLESTSIHLIQLAISNLLELFPHQGFDPADADEYNRVMDLEFERIRDFLVLHYHVNQRTDSVFWNDRRNAPVPDSLAEKMALFRERGVVAAYKDGFFKEPSWVAVYLGQNFTPDGYDPLVEAVDPAQSARVMAEIEAAVARTVSAMPSHDSYLRAFADARLPA

SEQ ID NO: 89125 - protein, 516 aa, Caulobacter segnis
  REGION 1..516: note = tr|D5VG50|D5VG50_CAUST Tryptophan halogenase; OS = Caulobacter segnis (strain ATCC 21756 / DSM 7131 / JCM 7823 / NBRC 15250 / LMG 17158 / TK0059) OX=509190; GN = Cseg_1566PE=4 SV=1
MKRGRSILIVGGGTAGWLTAAYLAKALRIGEQAHLSITVLESPEIGAIGVGEATFPTIRNTLQFLGIDEARFIRQTSATFKQGIRFVDWAHAPGEGRRHSFFHPFEAPFSTDGVSLAPYWLLQDEATRAPFAEAVTIQARVADAARAPKRPHESDFAGPLNYAYHFDAAKLAQVLAERAQELGVRHLEGHVGEAVLDETGAIARIVSPEHGELTADLYIDCSGFRAELIGKALNAPFKSARPVLFADRAVACRAPYDRPDAPIQSYTVATAHEAGWLWDIGLSGARGVGCVYSSDHIDDDRAEAILRAYVGGAEVETRRLTFEAGYRQKQWISNCVAVGLSAGFLEPLESTGVVLIEAAVAMIAELFPHTGPVSAPARRFNELMAARYENIIVFLKLHYALSRRPERFWRENTNPATIPERLQELLEQWRHRPPARFDFILDLETFAFFNYQYILYGMGFPTDLADGADEFPDAAGAAKLFAKIRGFADRATQDLPGHRDLIAQINRFGFEERALA

SEQ ID NO: 89126 - protein, 508 aa, Asticcacaulis sp.
  REGION 1..508: note = tr|V4N6D0|V4N6D0_9CAUL Uncharacterized protein; OS = Asticcacaulis sp. AC402 OX=1282361 GN=ABAC402_01255; PE = 4 SV=1
MQSVVKKIVIVGGGTAGWMAAACFVKALDPNFYDITLVESEEIGTVGVGEATIPAIIQYNQFLGIDEYEFVRETNATFKLGIQFADWRKKGQSYFHPFGLFGIEIDGFTFPHYYFRHYLQRGAGEVDIGRYNAETEAALQGRFGRVKPENGKPNINYAFQFDAGLYARYLRRYSEQRGVVRQEGRIVQVNQNPETGYLTSVQMDDGRVIEGDLFVDCSGFRGLLIEETLKTGYTDWSRWLPMNRAAAVPCERVEVLTPYTRATARESGWQWRIPLQHRTGNGYVFCNDFISEDEAAQTLLARLDGKPLADPKILRFVTGRRNKAWNKNVVALGLASGFLEPLESTSIHLVQSGAFKFLALFPRHGFNPHIVDEYNRQVEHDYENIKDFIIAHYKVTERDDTPFWRQVQQMSVPDSLQARLDVFRSTCQTLSREPDLFKEVSWVAVLTGQGLVPQDYHPAADALEDDDLRLHLGRWRTLVTERVKTLPLHEDFINRHCASTSARLVAAG

SEQ ID NO: 89127 - protein, 495 aa, unidentified
  source 1..495: note = Acinetobacter colistiniresistens
  REGION 1..495: note = tr|N9QWR4|N9QWR4_9GAMM Uncharacterized protein; OS = Acinetobacter colistiniresistens OX=280145; GN = F889_01758 PE=4 SV=1
MLNLRGLNRVAVVGGGTAGWFAALQLRQVFGPSVEVMVISAPEIPIVGVGEGGVLNLLTVLRDLDIDLKDFIDKTGSTLKLGFRYERWRTGKEDDYYYHLFPLPTEDFAWNELGFNPYLSGLFNHGIDVSRYMASYQFSEDRKPFQEVLQILLEGKNNFGASLHFDTFRVGQYLKKIALSKGIVHIENKIEDFELDPATGYVSAIQCIDQKISCDFVIDASGFSKLLIGKKYQSYWCSFADILPMNRALPFHLPHKNKIELVTRATAMSSGWVWQIPLQERIGAGYVYHDQFITDQQAQQEVEQWLGHPINPVKPIAFEAGYFQEVWIKNVVGIGLASGFIEPLEATSIGQMLSQLALLISFIRENHGVISQQNIAFYNQQNAQYWQGIRDFIRMHYDTGRSDTPFWQYMLTVPQSESYQELKKCWLHRTPRDIDFVEHSMGGMSMFSAASWFAVGAGVGVIKPEATSAELYALSPEKKQKLAKYLQEIKQQLAL

SEQ ID NO: 89128 - protein, 498 aa, unidentified; identical to SEQ ID NO: 82779
  source 1..498: note = Hyphomonadaceae bacterium
  REGION 1..498: note = tr|A0A2E1LU32|A0A2E1LU32_9RHOB Tryptophan halogenase; OS = Hyphomonadaceae bacterium OX=2026748 GN=CME93_08195; PE = 4 SV=1

SEQ ID NO: 89129 - protein, 501 aa, Maricaulis sp.; identical to SEQ ID NO: 82777
  REGION 1..501: note = tr|A0A1Q8FR40|A0A1Q8FR40_9RHOB Tryptophan halogenase; OS = Maricaulis sp. W15 OX=1772333 GN=AWH62_05435 PE=4 SV=1

SEQ ID NO: 89130 - protein, 509 aa, Stenotrophomonas sp.
  REGION 1..509: note = tr|A0A3D5JVH6|A0A3D5JVH6_9GAMM Tryptophan halogenase; OS = Stenotrophomonas sp. OX=69392 GN=DGV23_09770 PE=4 SV=1
MNVANTTQGRIRKVVIAGGGTAGWLAGCALAHQFRDQLDITLVESEQIGTVGVGESTVPPIRTFHRFLQIDEQEFLRAVAGTFKLSISFENWRRPGDRFIHPFGTIGQGTWATPFHHFWLDSLRRGMPSELGDFCLESVASRSDRFSLETQPQVNYAYHFDAGLYARFLRRKAEAHGLRRVEGKIREVRQHPDDGAVASLVLEDGQVIEGDLFIDCTGFRGLLTEQTLHTGYEDWHEWLPSDRAVAVQTESVAPPVPYTRAIAHEAGWRWHIALQHRVGCGLVFSSRHMSDDEAHAKLLGDVDGPPLRDPWLVPFRSGRRLKAWNKNVVALGLASGFIEPLESTSIHLTISAVVRLIQLFPFDGISPALRTLYNEVSRQEMEHVRDFIILHYHANQRDEPMWKACREMPLPESLAIRLRAWRERAHAWQDPGELFRVDSWTSVMLGQGIQPGPPHPLAAALEDADLKMLLARIRQPVQQAVAAMPSQAAFIERYCRAAQDVWPRARAPA

SEQ ID NO: 89131 - protein, 506 aa, unidentified
  source 1..506: note = Hyphomonadaceae bacterium
  REGION 1..506: note = tr|A0A3D3Z5F0|A0A3D3Z5F0_9RHOB Tryptophan halogenase; OS = Hyphomonadaceae bacterium OX=2026748 GN=DIU09_08350; PE = 4 SV=1
MTPSSDRRIRSIVIVGGGSAGWMTAAALANTLKQDCEIKLVESELIGTVGVGEATIPPIRTFNEMLGIDEREFVAKTKGSFKLGIEFVNWGRQGNRYFHPFGPHGRAFDIVGLHHFWLKAREAGDTTSFDDFSMAWSLAQRGRFTRPSPDPRQVMSTFDYAYHFDAGLYARLLRDYAEARGVKRHEGKVVSVRQHGETGFVEGVTLESGLELTGDLFIDCSGFRGLLIGEALKVGYQDWTHWLPCDRAVAMPCAKVGDMLPYTRSTACEAGWQWRIPLQHRTGNGYVYCSKFISDEDAEASLRANLDGEALAGPNKLRFTTGRRDKFWDKNVVAIGLSSGFLEPLESTSIHLIQAGISKLLALFPQRDFDPLIVDEYNHIASTEFERIRDFLVLHYKLTTRDDSPLWRYCASMDIPDTLKLKIDHFRRYGRHIARDMDLFGQPSWLAVHIGQGNIPQDVDPVFDFRGIDGRDYLGKLKTAMVASAEQVSSHQAFVNTHCAAEGAIA

SEQ ID NO: 89132 - protein, 516 aa, Caulobacter segnis
  REGION 1..516: note = tr|D5VNT0|D5VNT0_CAUST Tryptophan halogenase; OS = Caulobacter segnis (strain ATCC 21756 / DSM 7131 / JCM 7823 / NBRC 15250 / LMG 17158 / TK0059) OX=509190; GN = Cseg_3732PE=4 SV=1
MSHTHPNAIRKIVIVGGGSAGWITAAMLSHYFQAGGCRIELVESEEIGTIGVGESTIPPFLRLLASLGIDEREFIQATQASFKLGIRFEDWRRVGDRYMHPFGVIGGPFGPHEFYQCWLRAKAAGHPSGLHDFAPGAVMAEQGKFMLPFKAERTLIGGANYALHVDARLVARFLRDYAEARGVKRTEGIVSDVITHADGSVAKVRMKDGREIEGDFFIDCTGFRGLLIGKTLETPFDDWSDMLLCDRAVVVQTENVGAPHPYTLSKAEAGGWRWRIPLQHRAGNGYVFCSRFVSDDEARATLLGQLEGRALMEPMFIPFKTGVRQRLWEKNVVAVGLSGGFIEPLESTALHLIYRGVDFLLRFFPDRDFDPALREEYNRRMVADYEEIRDFIVLHYCKTQRDDTPFWRAVRAAPIPESLKERMALFEASGVLREGVDDMFRNPSWQSVMEGMGVRPQRYQPLVDTIPYDVISQTLDQSAPMLAAQVAGLPSHGEFLAKHCPAPPPAAPVAPFKTVA

SEQ ID NO: 89133 - protein, 498 aa, Sphingomonas paucimobilis; identical to SEQ ID NO: 87065
  REGION 1..498: note = tr|A0A411LED8|A0A411LED8_SPHPI Tryptophan 7-halogenase OS=Sphingomonas paucimobilis OX=13689; GN = DRN02_000485 PE=4 SV=1

SEQ ID NO: 89134 - protein, 521 aa, Caulobacter segnis
  REGION 1..521: note = tr|D5VGS7|D5VGS7_CAUST Tryptophan halogenase; OS = Caulobacter segnis (strain ATCC 21756 / DSM 7131 / JCM 7823 / NBRC 15250 / LMG 17158 / TK0059) OX=509190; GN = Cseg_2054PE=4 SV=1
MTTDQRLRRIVIVGGGTAGWMTAAAMGRFLKDGYTRVTLVESEAIGTVGVGESTIPQINIFNRMLGLDENDFVRKTKATFKLGIDFVDWKHVGHSYHHPFGPYGVDMEGVSFHAYWLKLHALGLEDDLGAYSLQTVGARQGKFMRPNGQANSPLGQIAYAFQFDAGLYAKFLRAYSEARGVARQEGKIASVQQDGERGHVTSVTLESGEVIEGDLFIDCSGFRGLLIEQTLKTGYEDWSQWLLNDRAVAMPCALGGSMAPVTRATARPHGWQWRIPLQHRLGNGYAYCSQFVSDEEALADLLKNLDGAPLADPNLIRFTAGRRKKSWNGNVVAIGLSAGFMEPLESQSIHLIQVGISRLLAHFPDRHFRQADIDRYNRTMTFEYEKIRDFLILHFKATARNDTPYWDYLREMPIPDYLADKIELFKGSGRVFRENEELFNDTSWFAVMIGQGILPESYDPMVDCMDEGLFRARMAEIKAVIARSAEVMPDHFAFIRENCDAMAADVSLGSGAGTTHPESVT

SEQ ID NO: 89135 - protein, 551 aa, unidentified
  source 1..551: note = Boseongicola sp.
  REGION 1..551: note = tr|A0A4P7JCN3|A0A4P7JCN3_9RHOB Tryptophan 7-halogenase OS=Boseongicola sp. CCM32 OX=2552942; GN = E2K80_10285 PE=4 SV=1
MGEPITEITIVGGGTAGWLTASLLQSILTRPGRADKDVRITLVESPNVPTVGVGEATVPGMPRTLKNIGIPEAEFFKTCNTSFKLGVLFRNWNVDNDGAPVDYVNPFNPVPRVEGIDAGYFMLRHGAGALDFVQTYSAAVDLARAHKGPRVLGAKENDPRVGFAYHLDAGKFAHMLRDTCIARGVTHILEDVVDVEQDDRGYIAALNLKESGRHPVQLVIDCTGFRGVIINQILKEPFVSYSRYLANDRALAVQIPHREPSKLPSVTQSTALGAGWVWRVPLFHRIGTGYVFSSAHRTDEQAMDEFMAHLGEEAEGAEPRVIPMRVGRTERAWVKNCIAVGLSGGFIEPLESTAIHMIDTAVRWLTTYFPDQDFADPLRDRYNKLSAALYDEVRDFICLHYALGNRSDDPYWIDARNLEVPDSLAENLELWKHTLPGPYDLEFASLFSPGVYQTVLLGKRVYETGYGSAEVTRNLPLRQEVWGRHLQAARTAIRKSVSEMADHRTLLTQLRGEDRAAPVFPMAQPTVAMPGAAPLKAPQIAPLEKEDASLL

SEQ ID NO: 89136 - protein, 504 aa, Sphingomonas paucimobilis; identical to SEQ ID NO: 87075
  REGION 1..504: note = tr|A0A411LH02|A0A411LH02_SPHPI Tryptophan 7-halogenase OS=Sphingomonas paucimobilis OX=13689; GN = DRN02_006165 PE=4 SV=1

SEQ ID NO: 89137 - protein, 491 aa, unidentified
  source 1..491: note = Streptomyces sviceus
  REGION 1..491: note = tr|B5I9C5|B5I9C5_9ACTN Tryptophan halogenase; OS = Streptomyces sviceus ATCC 29083 OX=463191 GN=SSEG_08260; PE = 4 SV=1
MNPEYDLIVVGGGPAGSTAAAAVALRGHRVLLLERETFPRYQIGESLLPATVHGLCGILGVADEVAAAGFTLKRGGTLRWGRDPKPWQFSFAMTPRLPEPTATAFQVERSRFDEILLRNAARVGAEVREGSPVRRIVADDERVRGVEYTDRDGNSRTAYGRHVIDASGNTSRVHSGVGGARVYSDFFRNLAVFGYFAGGRRLPEPNRGNIFCAAFDAGWLWYIPLRDDLTSVGAVISPEHHPAVQRDPRAAWQDMVRACPEVAELVDGVPAATEPPYDRVRVRKDWSYWKTSFWTPGMALVGDAACFVDPVLSSGVHLATYGALLAARAVNSALDGSVPEGRGFAEFETRYRHEYRVFYDFLIAFYDMERNDESYFWSAKKVTNVDSTEVAAFAELAGGLVSGDTAVLGPERFGDRWSAAAAELDGAVGRLATSDDRTNPLLSTRVVGETFRTGNDLQEQALYGGPLDETAPAAPGHLVASADGLGWERQR

SEQ ID NO: 89138 - protein, 498 aa, Glaciecola nitratireducens
  REGION 1..498: note = tr|G4QE43|G4QE43_GLANF Tryptophan halogenase; OS = Glaciecola nitratireducens (strain JCM 12485 / KCTC 12276 / FR1064) OX=1085623 GN=GNIT_3223 PE=4 SV=1
MTQNKLINRVVIAGGGTAGWMAAATIAATIGKRLNITLVESDDIPTVGVGEATVPSLLTIHQLLKIREADFLKAVNGTYKLGIMFENWKRLDHKYFHSFGKSGTSCWAAGFHHFWLRAKEQKMAKSFSEYSLETLAAEKGRFAHTKNQSLNYAYHLDSAKYGQFLRGIAEKHSVTRIEGKIDKVDIDKQSGHIKSILLESGQIVEGDLFIDCTGFRSLLLGQALGVGYNDWSDTLPANAAYAVQTKSHRPAVPYTRSIALDAGWRWQIPLQHRVGNGVVFSTNFKSEESALDDLLRGIDGEPITDPRLIRFTTGQRKEFWHKNCVSIGLSSGFLEPLESTSIHLIQQAIVWLISLFPNEGIDQNLVNRFNQQMAVETETIRDFIVLHYHLQERDDHEFWRYLREIKVSDRLQQILDLFKNNGTIIEEQDDLFAENSWVQVMLGQGLTPKQYHPIVDMMSDRDLNMFMRQQEFNIQKQLTSLPPHTQFIQHFMSHAASK

SEQ ID NO: 89139 - protein, 510 aa, Brevundimonas sp.
  REGION 1..510: note = tr|A0A326L0T1|A0A326L0T1_9CAUL Tryptophan halogenase; OS = Brevundimonas sp. OX=1871086 GN=DI552_01410 PE=4 SV=1
MDQSRRPLKKICIIGGGSAGWIAAALMSEHFKGKLAEIELVESDDIGIVGVGESTIPPFLQMLTRLGINEQDFLKEVQGSFKLGILFKDWKLKGDDYIHPFGRFGVPVEMDDLYQVWLRARAQGYDGPLQAFAAASVMIEQDRFTLPFKAPRTPVASAAYAVHIDARRMARYLRRFSEARGVTRTEGIVDQVVTRPDGFVEGVVLKDGRRIDADFFIDCTGFRALLIGKTMGVGYHDWSSWLPCNRAVALQVTNPTPPGPYTLAHAQDHGWCWRIPLQQRSGVGYVFCDRHVSDDEALANLLAQAEGEPIVDPWIIPFKTGMRERLWEKNVLSLGLAGGFIEPLESTALHLIYRGMDFFLRFLPDADCDPALIAEYNRRMTQDYEEIRDFVIMHYATTQRDDNDFWRQCRTMEMPESLKSKIELFQVNGTVREGVDLMFRSVSWQSVLEGMGVHPRAYHPLIDRIPFEGMPAYLDQAATAIRRAVEGLPRHADFLKDHCTAPSPDWAAPV

SEQ ID NO: 89140 - protein, 508 aa, Brevundimonas sp.
  REGION 1..508: note = tr|A0A354EPX7|A0A354EPX7_9CAUL Tryptophan halogenase; OS = Brevundimonas sp. OX=1871086 GN=DDY79_04420 PE=4 SV=1
MDTIKDQGSIKRVVILGGGTAGWMTAAALSHRLAGRGVEIELIESDAIGIVGVGEATLPHIRAFNTAMGINEQTLIERTQATFKLGIQFVDWGRPGEAYIHPFGAYGEPIEGIDFHQVWAARRAGGDPTPLDDYSYPVRAAEACRFQRPTSDAGSPLSTFSYAFQFDASLYAAFLREVSCGRGVVRTEGKVVQHHLDAETGHVTALTLEGGRRIAGDLFVDCSGFRGRLIAEALNAGFEDWSHWLPCDSAFAVPCQTAAPVGPYTRATARHAGWQWRIPLQHRTGNGLVFSSAHLSDEVAQQTLMSNLEGPALAEPRRLSFRTGRRSRLWDRNVVAIGLSGGFLEPLESTSIYLIQLGVTTLLDLFPDQAGMADDAREYNAIMALEFDRIRDFLVLHYVANQRDEPFWRAMREMAWPDSLSAKVEAFVSRGLLPDYDVGVFHPPSWLAVLIGQNIVPQGWDPRVDRLDAARLSAKLTGMRDAVRSAVDRTPDHMGFIQAMGQPRRGAV

SEQ ID NO: 89141 - protein, 518 aa, Brevundimonas sp.
  REGION 1..518: note = tr|A0A521MF11|A0A521MF11_9CAUL Tryptophan 7-halogenase OS=Brevundimonas sp. OX=1871086; GN = EPO54_09810 PE=4 SV=1
MRPDMDQPRRPLKKICIVGGGTAGWVAAALMAEHFKGRMAEIELVESDDIGTIGVGESTVPPFLEMLKRLGIDERDFIQKTQASFKLGIQFEDWTQKGESYFHPFGAVGVPVDISDFYPVWLKARMNGYDRPLMDFAAAARMASQGRFMLPFKAQRTPIGGASYAVHVDAKRVARYLRDFAEARGVKRTEGIVEDVMTRPDGFVSGLKLKSGQTVEADFFIDCTGFRALLIGKTLGVGYTDWSEWLMCDRAIAVQTENVGPPTPYTLAQAQDCGWRWRIPLQHRTGNGHVFCSRYMSDDEATARLLAQVEGRPVVNPMVVPFKTGVREKIWDKNVLSLGLASGFIEPLESTAIHLIYRGMDFLFRLMPDLDCDPNLAAEYNRRMTVDYEEIRDFIILHYALTRRDDTAFWRQCRDMVLPEGLQHKLEVFRANGSLVEALDPLFRNVSWYAVMDGMGVRPRSYPPLVDRIDSTGLTDEMDRAANILNAFVADLPTHQAFIDTHCPAPSVDLPAPLAVPA

SEQ ID NO: 89142 - protein, 499 aa, Cellvibrio japonicus
  REGION 1..499: note = tr|B3PB98|B3PB98_CELJU Tryptophan halogenase; OS = Cellvibrio japonicus (strain Ueda107) OX=498211; GN = CJA_1070 PE=4 SV=1
MKKILILGGGTSGWMAAACFAKVLRPLGIDVVLVESTEIGTVGVGEATIPSILSFIQLLGIDEREFIQATQASFKLGIHFVDWRNLGEAYWHQFGTVGANIDGVEFYQHWLKSQRRGNAAAFTDYAPAVVMAQKNKFSRVGDDPRHTLHGAKYALHFDATLVAAYLRRYAEERGVVRIDAKVESVILRDGGNVKSIILNDGCEIDADFFIDCSGFKGVIIEKALQTGYEDWSAYLPCDSAVVAQTTNVGAPAPYTQSTALTSGWQWRIPLQHRTGNGYVFCSKYSDRDTAKELFCRNLQGSLITEPRFLSFITGKRKKLWNKNCVAVGLASGFLEPLESTSIHLAMKAVLKFIEMLPAGNSTQATQDEYNRVMDAEYLSIRDFIILHYCTTQRRDTDFWKYCAAMAIPDTLQNKLELFRAQGRLYRDEFDLFTRNSWYAVLEGMGVRPEAHDPLVDLSHVDEVANMMNRALRLMEQAADGLPDHQQFMMENCRAPDPSN

SEQ ID NO: 89143 - protein, 510 aa, Brevundimonas intermedia
  REGION 1..510: note = tr|A0A4Y9S5G4|A0A4Y9S5G4_9CAUL Tryptophan 7-halogenase OS=Brevundimonas intermedia OX=74315; GN = EGY25_01455 PE=4 SV=1
MRQDQKIGRIVIVGGGTAGWMAAAVISKNLAPDYAQIDLIESAEIGTVGVGEATIPPILTLNRLLGIDENEFVRRTQATYKLGIQFRNWGLLGHEYVHPFGTYGADLEGLPFHQHWLRLRDQAGVGLIDAYSLPIMAMKAGRFVRTAEDPRHVHSRMAYAYHFDASLYGGFLRELATARGVNRIEAKIVDVALNAETGFVEAVVLDDGRRVKGDLFIDCSGFRGLLIEQALKTGYEDWSHWLPMDRALAVPCEAVGAPTLFTRSTAHDAGWQWRIQLQHRTGNGHVYASAFTTEEAARDTLLANLDGKPLGDPRPLRFVTGRRKKAWNKNVVSLGLASGFLEPLESTSIHLVQSGVTTLMSLFPDKRFDQADIDKYNALMREEYEHARDFIILHYHAGERDDSEFWRHVRATDIPDSLKERIDLFRSRGRVMGRNEDLFAHTSWVAVMLGQGIMPQGHDPMADQTPAPQMTARLAQIRNVIQSGVAAMPTHQQFIDKHCRADSLAAKEPA

SEQ ID NO: 89144 - protein, 492 aa, Cellvibrio japonicus
  REGION 1..492: note = tr|B3PGG3|B3PGG3_CELJU Tryptophan halogenase; OS = Cellvibrio japonicus (strain Ueda107) OX=498211; GN = CJA_0218 PE=4 SV=1
MKNNQHIVIVGGGSAGWMAAAALSNAFGASKKITLIESDAIGTVGVGEATIPAVKSFNKLLGIDEAEFLRATQGTFKLGIQFENWGEQGETYMHPFGLVGKDSWMANFQHFWLKARRMGIAGDYFDYSLNIRAAKSNKFFIDPQSGLDYAYHFDAGLYAALLRQYSEARGVVRREGLIDSVHTNDMGFIASLRLASGEMISGDLFIDCSGFRALLIEQTLHTGFEDWSHWLPCDRAVAVQTESVGEPIPYTRSIAHSVGWQWRIPLQHRVGNGLVYCSRYISDEAAKALLLENLAGDVRTEPRLIKFRTGRAIQQWHKNCVAIGLSSGFLEPLESTSLHLIQTGIVRLIRLFPGDDGINQAQIDEYNRQSRYEYERIRDFIILHYHVTRRSDSDFWNYCRTMSIPDTLAHKIHLYKNTTSVFREQDELFLEGSWQQVMLGQGLTPGNYHPVVDKMSDDELTRLMTSIEREHNQRLAQFPGHQQFIDHYCKAI

SEQ ID NO: 89145 - protein, 501 aa, unidentified
  source 1..501: note = Sphingomonadales bacterium
  REGION 1..501: note = tr|A0A258Z8M2|A0A258Z8M2_9SPHN Tryptophan halogenase; OS = Sphingomonadales bacterium 24-56-14 OX=1970588; GN = B7Y10_02375 PE=4 SV=1
MAIEHIIIVGGGTAGWMAAAALSRIRAGRPVAITLIESEEIGTVGVGEATIPPFLDFNRLLEIDERDMLSMVQGSFKLGIQFVNWGKIGDSYIHPFGNYGYQVDGISFHHVWHKYQQAGDKRPIQVFNVETMAAHFGRFARTEDYQRDDLPPVNYAYHIDAGRYARYLRNYAETRGVVRREGKISDVTLDNESGFVSSVTMENGDVLKGDLFIDCSGFRGLLIEQALKTGYDDWSNYLPCNRAVALPCLREDGSGPLPYTRATAHSAGWQWQVPLQHRNGNGHVYCNEYMSDDEAHSILVNNIAGKPGAEPNFLRFVTGRRKKFWNKNVVALGLASGFMEPLESTSLHLVNTGINKLIALLSLDGVTQAQEDAFNRLTGKEYARIRDFLILHYNSTTRDDSPFWNYCRNMPVPDSLTEKVELFRQNGQIFREDDELFTETSWAAVMMGQGIKMGGHNAMADAVSEPNTRREIDEMEKSIQFVVQHMPSHGEYLNRYCPAPA

SEQ ID NO: 89146 - protein, 504 aa, Aquabacterium sp.
  REGION 1..504: note = tr|A0A480AXY6|A0A480AXY6_9BURK Tryptophan halogenase; OS = Aquabacterium sp. W35 OX=2315236 GN=AQPW35_53950 PE=4; SV = 1
MDHNNRSLRRIVVVGGGSAGWMAAAALSRAVQRDCAIVLIESDEIGTVGVGEATIPPIQTFNAMLGIDEATFMRRTQGSFKLGIEFVHWGRQGHRYFHPFGPHGHQFDLSPQHQYWLRSRQQPGAAGLDDHSMAWAAASRGRFDKPSRDPRTVQSTFDYAYHFDAGLYARFLRELSESRGVQRLEGKIARVDLRPGDGFVQSVHLEDGRDVAGDLFIDCSGFRGLLIEEALHTGYEDWTHWLPCDRAMAVPCASVPGGLTPYTRSTAQEAGWQWRIPLQHRTGNGYVYCSQFISDDEAAARLLQRLDGPALAQPRPLRFTTGRRKQFWNRNVVALGLASGFMEPLESTSLHLVQSGISRLLALFPDRDFDPLVTAEFNRIAINEFERIRDFIILHYKLTTRDDSPLWRHCAAMSIPDTLQYKIDHFRRHGRLVSEGNDLFGPASWLAVHIGQHNLPQRHDPLIDLRNVDGDAILARMRQAMAQAAEAMPTHEAYIRAHCAATPA

SEQ ID NO: 89147 - protein, 514 aa, Pseudoalteromonas luteoviolacea
  REGION 1..514: note = tr|A0A162BNJ3|A0A162BNJ3_9GAMM Uncharacterized protein OS=Pseudoalteromonas luteoviolacea CPMOR-1; OX = 1365248 GN=N473_13280 PE=4 SV=1
MNGEIKKVVVVGGGTAGWLAACHLAKQLEPLVNQDISVTLVDSPDIPTIGVGEGTVPVMRDTLKYFGISEIEFIKRCDVTFKQSIKFVDWEVPPQKDRSTYYHHLFDFPNIRPFNPTPYWLSNDEINKTHYADLVSVQSHVCELGLAPKLNRDGEFAGLFNYAYHLDAGKFTQMLSEHGTAELGISNIKANVQHIHLNDNGEITHLDTDSAGVISGDIFVDCTGFKAMLIEKSMGAKFIDKSDVLLTDTALAIQVPYRDENTPIPPFTISTAQKNGWIWDIGLTQRKGVGYVFSSNYQSEEQAVDTLANYLGQTAAQIEPRKISMKVGYQKEAWIKNCVAMGLSQGFVEPLEATGLLMFDVTARMFSEALPDFKEDIPLRARRFNEDIRQMWESTSDFIKLHYFLSKRDDSQFWIDNRDPLSISTELAEKLQMWQRKLPSQFDFRHTVDSFRVSNYLYVLYGMNFGTELNGRYTESQNIEEINKLRVEIEKGVKYCKSNLLSHREYLEKVSKLS

SEQ ID NO: 89148 - protein, 513 aa, Devosia chinhatensis
  REGION 1..513: note = tr|A0A0F5FM95|A0A0F5FM95_9RHIZ Uncharacterized protein OS=Devosia chinhatensis OX=429727 GN=VE26_08995; PE = 4 SV=1
MEKPAHFVIVGGGTAGWIAAFILQDEARRRGLNIKLSVVESSRIPTVGVGEATTAAFRVLLKHFGIDEFEFFRKTDASFKLGIRHEDWRRKGYTYYGPIDDPHQVVQAPAGAPSDYLNVYAVAAGRPVQDMHLFQPLLEQKKAPYARKADGSLIPLGPFHHAFHFDQALVGKFFASKSRGVDKVDAQVAGVERDGESGDIAALVIDDNSRLEGDFFIDATGFRKQIIVKALEAPWVSYAHELPVNRALPFWVEVKPGEELANYTRAWAQNAGWMWQIPTRTRYGCGYVYSDEFSTSEQAKAEVERVLGHEIEVRGDIRFQIGRLEKAWIGNCVAVGLSSSFLEPLESTSIHGTIVQMMLFAQRYMDQPARMTQDKRDDYNARVGRQVDDFRTFVNTHYVTERDDTPFWREVRANRIHPETRERLAHWQREMPRHEHFPSYLGGLPHIETQLHYPVLNGLGLLDQTLARQEMERDPKLRRFAQETFEGLVREYRSAARQAMGHAEFLQAVQDMG

SEQ ID NO: 89149 - protein, 505 aa, Brevundimonas sp.
  REGION 1..505: note = tr|A0A326L0N7|A0A326L0N7_9CAUL Tryptophan halogenase; OS = Brevundimonas sp. OX=1871086 GN=DI552_01405 PE=4 SV=1
MQDHRIRSVVIVGGGTAGWMTAAALVQHFRSTPVSITLIESSEIGAVGVGEATIPTIRRFYAQLGMTDDAVMRATQATCKLGIRFLDWSAPGSDFIHPFGHYGQDVRGTGFHHYWLKQRQAGDDTPLAAYSLGAALAAAGKFALPAPNPPTQLSVFDWALHFDAALFAQHMRAYAEAGGCTRIDARIRSVEQRPEDGFIRAVTLDDGREVEGDLFVDCSGFRSLLLGEALGVRFEDWGRWLPCDAAFAVQSRNRPGDAPAPFTRVTARSAGWQWGIPLRHRAGNGLVFSSAHLSDDQVLAELMPHLLGDPLTEPRRIPFRPGRRAQAWSRNCVAIGLSAGFLEPLESTSIALIETGVARLKQLFPDRRFAPAVIDEYNDQSAREMERVRDFIILHYKLNRRTDSAFWRDCREMTVPDTLQRKIDLWTARGEFVRYRWEMFHPASWLAIYDGFGVHPDDYDPAVDAMTPADLERGLRDMRDNIARLVASTPDHAQYLAALDRGQAA

SEQ ID NO: 89150 - protein, 569 aa, unidentified
  source 1..569: note = Alteromonas mediterranea
  REGION 1..569: note = tr|A0A1J0SKJ0|A0A1J0SKJ0_9ALTE Tryptophan halogenase; OS = Alteromonas mediterranea OX=314275 GN=BM525_18450 PE=4; SV = 1
MRDNESHNNINRVVVIGGGTAGWLAAGVLAAKLSAENSVTLIESPAIPTIGVGEGSWPSLKDTLLDIGISELEFLSVCHGSYKQGSSFANWRKGEHKYYHPFTEPAGYREIDIHACWQAIAPTEAYENAFSIQAAMCEAGKAPKQATTPDYAHVLNYGYHFDATALATLLKKHCINKLNVTHVVGHIASVNSHQNGYIKSVVGDNGHVTEGDLFIDCSGSNGLLIDKHFKVPWVSVEHIMLNNRAVALQVPYSDNDSAIESTTLATAHPCGWTWDIALQHRRGVGLVYSSQLASDEQAYKTLINYVSRRYPKALAEALTPRTLAFEPGHREHFWVKNCLSLGMSSGFVEPLEASAIAMVELGLRMLCEGFPQTQEHMTIVSKRYNQRFRYRWRRVIDFLKLHYVLSDRDEPYWRAQRDMATVPESLRELLTLWKYQSPSRLDLIENEEIFPSASYQYVLYGMGYRTLPNSLRLSEEDRQKASNIREKLQKTKPSYFQALPSNNALLKSLAERYATSDLVNSQCPSGQTDKASSANNASKDNGNINNNVESYRDGTPNKKDTQYDRIGFR

SEQ ID NO: 89151 - protein, 513 aa, Sphingomonas paucimobilis; identical to SEQ ID NO: 85813
  REGION 1..513: note = tr|A0A411LH37|A0A411LH37_SPHPI Tryptophan 7-halogenase OS=Sphingomonas paucimobilis OX=13689; GN = DRN02_005970 PE=4 SV=1

SEQ ID NO: 89152 - protein, 502 aa, Aquabacterium sp.
  REGION 1..502: note = tr|A0A480AVL4|A0A480AVL4_9BURK Tryptophan halogenase; OS = Aquabacterium sp. W35 OX=2315236 GN=prnA PE=4 SV=1
MQDGRAVREVVIVGGGSAGWMVAAALAQVLEGRVRIQLVESDEIGTVGVGEATIPQMRLFNSALGIDEHDFVRATQGTYKLGIEFVDWGQRGERYLHSFGGVGQDLGLVPFHHYWLKMLRQGRAQPLGHYTLNTVAALAGRFAPQAQAPGLPTVGTAYAYHFDAGLYARYLRRYSEAKGVVRTEGRIADVQLRPGDGHVQAVVLADGRRVEGELFIDCSGFTGLLIERALHTGYEDWSHWLPCDRAVAVPCERTGPPEPYTRATARGAGWQWRIPLQHRIGNGHVFCSRHISEDEATAQLMAHLDGRPLAEPRPLRFVTGKRRKLWHRNVVAVGLASGFLEPLESTSLYLVQSSISRLLQFFPTLDFDPLNTAEHNRQADSEFERVRDFIILHYHLTRRDDTPFWTRVRTMELPATLTEKLQLFRATGRLFRAPSDIFSEVSWLQVLVGQGLVPQAHQPLADVLSDDEAAFFLANIERGVAQHAGAMPRHADYLAAHCAAGG

SEQ ID NO: 89153 - protein, 507 aa, Maricaulis sp.
  REGION 1..507: note = tr|A0A1Q8G0D9|A0A1Q8G0D9_9RHOB Tryptophan halogenase; OS = Maricaulis sp. W15 OX=1772333 GN=AWH62_00010 PE=4 SV=1
MTDQRIRKIVIVGGGTAGWMTAAALAKVLGPDYADITLVESDAIGIVGVGEATIPQIKIFNAMLGLDEDRFMRDTKGSFKLGIQFRDWGRKGDSYFHPFGPFGVDMEGVSFHAFWLRMNQLGEPYPITDYSVQSVAGENGKFMRPIANAGTSPLGQIAYAFHFDAHLYAKFLRGFAEERGVKRVEGKIDQVHQRGEDGFIEAVELENGTRIEGELFIDCSGFRGLLIEQTLKAGYEDWTNWLPCDRALAVPCEGSEEITPYTRATAREAGWQWRIPLQHRVGNGYVYSSNHISDDEAAATLLANLDGKPLAEPRLLRFVTGRRKQAWVKNCVALGLSSGFLEPLESTSIHLIQSGIAKLLQMFPRTSFEQADIDRFNARTKEEFERVRDFIILHYNATTRDDTPFWDHCRTMQIPPGLAEKYRIFESYGRVFRENDELFNDTSWFAVMIGQGLKPRSFDPVAECLSEDETRRRLAQIRQAMQTSSDHMPAHADFIAKTCAAEMEPMT

SEQ ID NO: 89154 - protein, 280 aa, Rubellimicrobium thermophilum
  REGION 1..280: note = tr|S9SAH9|S9SAH9_9RHOB Tryptophan halogenase; OS = Rubellimicrobium thermophilum DSM 16684 OX=1123069; GN = ruthe_02889 PE=4 SV=1
MPFWVDLKEGEEIAPCTLAWAQGSGWLWWIPTQGRYGAGYVYSDAHISPEAAKAEIEAALGYPIEPRNDIRIDAGRLREAWIGNCVALGLSSSFLEPLEATSIHGTIVQIMMLAEWLGLPDGRARYNAAVARQVDDFRDFIRLHYVSERRDTPFWRDVAESHPSIVKDRLALWQTKVPGPEDFDPFPPGLERLGLAHVQEQLYLPVLDGLGLLNREAARAEMAKDPRARARAREIHAGLVAEYRRAAAQALPHRAWLRSLAGRHADPSRPPVPTVMQEPS

SEQ ID NO: 89155 - protein, 499 aa, Brevundimonas sp.; identical to SEQ ID NO: 85169
  REGION 1..499: note = tr|A0A521MWD5|A0A521MWD5_9CAUL Tryptophan 7-halogenase OS=Brevundimonas sp. OX=1871086; GN = EPO54_04450 PE=4 SV=1

SEQ ID NO: 89156 - protein, 500 aa, unidentified
  source 1..500: note = Acinetobacter colistiniresistens
  REGION 1..500: note = tr|A0A558F4C4|A0A558F4C4_9GAMM Tryptophan 7-halogenase OS=Acinetobacter colistiniresistens OX=280145; GN = FPV60_12480 PE=4 SV=1
MLNLRGMERICIIGGGTAGWFSALHLREIFSPSVEIILISSPEIPIVGVGEGGILNLMETLHKLKIPFAEFMQETDAIHKLGFVYEGWRDNKSNLTDCFYHMFPMQNEELLWKDSGYYPILSMMLNHNLPISYITESINLSEKNISQEYLTKLLLEKTKKNFASSFHFDTYKVGQYLKRIALQRGVKYKEGLFNDVIRDSQTGLITDLYIDNQVLPVNFVIDASGFSRQIMGKVLKSPWTSFEKYLPANTAIPFHLKHLKKNPDLVTRSTAMDAGWVWQIPLKDRVGAGYVFDRNFISPDEAVKEVEQWLGHEIDPIRTITFEAGCYEKIWIGNVLSVGLASGFVEPLEATSIGQMLYQLSLFAELVIESHGVVSKQIIDIFNEQNLQGWHGIRDFIRMHYDTPRKDTNFWRNMPNVPISNEYNELKHVWQHRTPREIDFINYEMGGKQQFGVYSWLAIGQALSIIKPEASAAELFYLSVENKHRLAKYFFDIKNKIKVN

SEQ ID NO: 89157 - protein, 116 aa, Brevundimonas sp.
  REGION 1..116: note = tr|A0A3B9RJW2|A0A3B9RJW2_9CAUL Tryptophan halogenase (Fragment) OS=Brevundimonas sp. OX=1871086 GN=DCG66_10340; PE = 4 SV=1
DDTPFWRECRDMVLPEGLQHKLDVFRANGSLVEALDPLFRNVSWYAVMDGMGVTPRSYPPLVDRIDFAGLTAEMDRAADILNAFVKDLPSHQQFLQDNCPAPPVDLAPVAPAAVPA

SEQ ID NO: 89158 - protein, 515 aa, Litorimonas taeanensis
  REGION 1..515: note = tr|A0A420WLK8|A0A420WLK8_9RHOB Tryptophan halogenase; OS = Litorimonas taeanensis OX=568099 GN=DES40_1266 PE=4 SV=1
MTDKPFKIIIVGGGTAGWLSAAFLSQQLPLSSGRDIQISLVEASDIPTVGVGEATVPSLRETLAACGISEIDFLTSCGATFKHGIKFVNWRQPPKENSGESYFHPFGAPLKVGAVDPLRAWSKLPQDKRGNIADIFSVQSEMAEMGRAPKHLKDRPYDGALSYAYHLDAGKFAEYLKQRFRAQGVKHIIGKVAEVDYNPSTEIISALTLDDGTKLTADFYIDCTGFAARLINSDKQNPFIDKTDVLFVDKAVTTRLPTKGTASINGFTTCTAQSAGWIWDIVLQNRRGIGHVYSSKYISDAQAKTELASYIGQSEDALETRTLNMRIGYQQHQWRGNCVAIGLASGFLEPLESTGIYLTEMANWALADMLPRYMSGHNPQAQYTDAMVHHYENIVDFLKLHYAISERRDTPFWRDNANPDTWPETLKANLKAWENDVPSVYDFGRSIQCFSATNYQFVLYGMGWRGHEEPNVLTGQTKNLLEQLAIRRARLKEFVLRDTLPNSEIFTAITPSNIE

SEQ ID NO: 89159 - protein, 509 aa, Stenotrophomonas sp.
  REGION 1..509: note = tr|A0A349Y5M2|A0A349Y5M2_9GAMM Tryptophan halogenase; OS = Stenotrophomonas sp. OX=69392 GN=DCW96_07985 PE=4 SV=1
MNVANTTQGRIRKVVIAGGGTAGWLAGCALAHQFRDQLDITLVESEQIGTVGVGESTVPPIRTFHRFLQIDEQEFLQAVAGTFKLSISFENWRRPGERFIHPFGTIGQGTWATPFHHFWLDSLRRGMPSDLGDFCLESAASWHDRFTLETQPQVNYAYHFDAGLYAKFLRRKAEGHGLRRVEGKIREVRQDAHDGSIACLVLEDGQVIEGDLFIDCTGFRGLLTEQTLHTGYEDWHEWLPSDRAVAVQTASVAPPVPYTRAIAHEAGWRWHIALQHRVGCGLVFSSRHMSDDEAHAKLLRDVDGPPLRDPWLVPFRSGRRLKAWNKNVVALGLASGFIEPLESTSIHLTISAVVRLIQLFPSDGISPALVDLYNEVSRQEMEHVRDFIILHYHANQRDEPMWKACRDMDLPESLAVRLRAWRERAHAWQDPGELFRVDSWTSVLMGQGIQPGPPHPLAAAISDADLRTLLMRIRQPVEQAVATMPSQAAFIERYCRAARDVWPRVSALA

SEQ ID NO: 89160 - protein, 506 aa, Caulobacter segnis
  REGION 1..506: note = tr|D5VGS6|D5VGS6_CAUST Tryptophan halogenase; OS = Caulobacter segnis (strain ATCC 21756 / DSM 7131 / JCM 7823 / NBRC 15250 / LMG 17158 / TK0059) OX=509190; GN = Cseg_2053PE=4 SV=1
MTAIRKVLIVGGGTAGWMTAAALAKALPREVAITLIESEQIGTVGVGEATIPPINTFNQMLGLDEAAFMRATQASFKLAIEFVDWMGPDHRYLHPFGGFGLDIEALKFHQIWLRALHEGWAPPIDAFNLSAQASHLGRFSLPSRDPGQVMSSLKYAFHFDAGLYAKHLRAYAEQRGVARFEGKVAGVAQHGETGFVESVTLEDGRTLEADLFVDCSGFRGLLIEQTLKAGYDDWSHWLPNDRAVAMPCETGGDGLTPYTRATADAAGWRWRIALQHRTGNGYVYSSADISDDEALARLRATLDGPALAEPNFLRFQAGRRRQAWIKNVVAIGLSSGFLEPLESTSIHLIQAGITKLLALFPDKGFYPVEIAEYNRLTAQQVELIRDFIILHFKANARTEPYWVRAREMAIPETLQRKIDLFAASGRLFQSDYDLFAEPSWVAVLLGQGVVPRRHDPLVDALDDEVVRGQLSRLSALIRRTAESLPTHDAFIARYCAASPTPARIPA

SEQ ID NO: 89161 - protein, 522 aa, Sphingomonas paucimobilis; identical to SEQ ID NO: 87071
  REGION 1..522: note = tr|A0A411LG07|A0A411LG07_SPHPI Tryptophan 7-halogenase OS=Sphingomonas paucimobilis OX=13689; GN = DRN02_003950 PE=4 SV=1

SEQ ID NO: 89162 - protein, 425 aa, unidentified
  source 1..425: note = Streptomyces roseochromogenus
  REGION 1..425: note = tr|V6KLD0|V6KLD0_STRRC Tryptophan halogenase; OS = Streptomyces roseochromogenus subsp. oscitans DS 12.976; OX = 1352936 GN=M878_13815 PE=4 SV=1
MPSTLTGIPTEFDVIVIGGGPAGATTAGLLAKRGHKVLILDRERFPRYHVGESLIPVVMAPMEEMGLTERLEQRGFERKYGGTFVWGSEQAAWDFSFVDGGDYPFAYHTRRADLDSVILDRARELGAFVVEDATVKEPIEEDDRVTGVRFTVRGAKEAYEVKASMVVDASGQARVLTRKYSEIHWHDKLRNVAVWTYFDNCERLPGDQYTNILIEGIENGWFWGIPLDKGTVSVGFVTPSTVAGETDQNLEQLFRDEVEKTTKLKHMLRNARQSAGFRSARDWSYTNQTVYGKGWAAVGDSAAFVDPLISTGVALATTAGSILSRVIDKVLQYPEIEEVALKRYATAYLSFFNEVRSFVERFYDRSLKKEDYHKLAQTIIDPEQKNTPANDFVTLLAGLRGKHLALDITVDDLVPETEPSATAGN

SEQ ID NO: 89163 - protein, 532 aa, Luteibacter rhizovicinus
  REGION 1..532: note = tr|A0A4R3YYP6|A0A4R3YYP6_9GAMM Tryptophan halogenase; OS = Luteibacter rhizovicinus OX=242606 GN=EC912_101763 PE=4; SV = 1
MARLRKVLIVGGGTAGWLAACYLAKAVNAVDPRSVQVHLVESPDIGLLGVGEATFPSIRGTLAAIGLDERRFLVGATATYKQGIHYRHWVRPPGTPGADHFFHPFNAPSQRPGGPELLPYWLLGAAPEGMAFADAVSMQSTLVDHSRAPRRARDADYQGPMNHAFHFDAACFARVLAEHGQQALGVVRHVATVERTELDEHGAIARVVTKEEGELTADLYVDCTGLRSMLIGNVMQSPFRSRADVLFADRAVAMQVPYETPDAPIPSYTISTAQEAGWIWDIGLQKRRGTGYVYSSRHTTDDRAEEVFRRYLGGAGEGLKAMHIKFETGYRPEHWRKNCIAVGLAGGFVEPLESTGIALIELATYLLTHLLPSDTDDMASAARHFNEMIVARYDRIIDFIKMHYCLSQRRDSPFWIDNCDVASIPQTLQEKLAKWKQRPPHRLDFVSDLEMFMTASWQYVLYGMEFRTDLEPMRSAYPHMEAARQEFTMIRQAAARALDDLPNHRALVEQLCREHTQRSRSDAGIAASVLDG

SEQ ID NO: 89164 - protein, 499 aa, Caulobacter segnis
  REGION 1..499: note = tr|D5VMI4|D5VMI4_CAUST Tryptophan halogenase; OS = Caulobacter segnis (strain ATCC 21756 / DSM 7131 / JCM 7823 / NBRC 15250 / LMG 17158 / TK0059) OX=509190; GN = Cseg_3271PE=4 SV=1
MTQQTIRKVVIAGGGTAGWTAAAALARQLGPLLDITLVESEDIGTVGVGESTIPTARTFNALLGIDEAAFMRATQATFKLGISFENWGEIGDRYIHSFGQVGKSTWMGGFHHFWMQAQAQGFGGDLGDYCLELKAAEGDRFFTGENGPLNYAYHLDAGLYGQFLRRMAEADGAKRVEGKIASVRQSAADGAIEALVMESGQAVEGDLFIDCTGFRGLLIEQTLKAGYEDWDHWLPTNSALAVQTRSTEPAKPYTRAIAHHAGWRWKIPLQHRVGNGLVYCNEFMSDDEALALLQSEIEGETLIPPRLIRYRTGRRRKTWDKNVVALGLSSGFVEPLESTSIHLIMVGVTRLMQLFPFGGISQAAVDRYNRLADDELEKIRDFIILHYKATERTDSPFWDRVREMQIPDSLAQRIELFRESAQVYQAPGELFQVDSWLQVLLGQRVQPESFHAMGRLMPPQQLKQALDDLKRNIAATVSRLPQHQAFLDAYCAPPVSKSA

SEQ ID NO: 89165 - protein, 503 aa, unidentified
  source 1..503: note = Hyphomonadaceae bacterium
  REGION 1..503: note = tr|A0A3D3Z2G0|A0A3D3Z2G0_9RHOB Tryptophan halogenase; OS = Hyphomonadaceae bacterium OX=2026748 GN=DIU09_06245; PE = 4 SV=1
MQGQSQKLERLVIVGGGSAGWMAASAIANAAGRGCTITLIESDEIGTVGVGEATIPPIKVFNRSLGLDEKDFVVRTQGTFKLGIEFVNWGRQGHRYFHPFGTYGADFDMVPLHQYYLRARQTGRDPGSLDEFTMAWQVAKRGRFAPPTQDPRLIQSTFDYAYHFDAGLYARFLRSYSEARGVVRMEGKIADVGLDGEDGRITHVTLEDGRKVEGDFFIDCSGFRGLLIEGALKAGYEDWSHWLPCDRAMAVPCEHGGEFTPYTRSTAREAGWQWRIPLQHRIGNGYVYSSGFISDDEVERTLLANIDGKALADPRPLRFTTGKRKKIWHKNCVAIGLAAGFMEPLESTSLHLIQTGITRFLALFPDKTVDPVLETEFNRLSTYEWERIRDFLILHYCATERDDTELWRYCASMSLPDTLTYKIAHFRKYGRMVSDGPELFLNPSWLAVYLGQFVEPTGYDPLVDTRTHVEADRHLASLKTLMAQTAETFPTHRDFINQTCRAG

SEQ ID NO: 89166 - protein, 302 aa, Stenotrophomonas sp.
  REGION 1..302: note = tr|A0A3C0GTP5|A0A3C0GTP5_9GAMM Tryptophan halogenase (Fragment) OS=Stenotrophomonas sp. OX=69392 GN=DCM50_12235; PE = 4 SV=1
IEGDLFIDCTGFRGLLTEQTLHTGYEDWHEWLPSDRAVAVQTESVAPPVPYTRAIAHEAGWRWHIALQHRVGCGLVFSSRHMSDDEAHAKLLGDVDGPPLRDPWLVPFRSGRRLKAWNKNVVALGLASGFIEPLESTSIHLTISAVVRLIQLFPFDGISPALRTLYNEVSRQEMEHVRDFIILHYHANQRDEPMWKACREMPLPESLAIRLRAWRERAHAWQDPGELFRVDSWTSVLLGQGIQPGPPHPLAAALEDADLKMLLARIRQPVQQAVAAMPSQAAFIERYCRAAQDVWPRARAPA

SEQ ID NO: 89167 - protein, 509 aa, Stenotrophomonas sp.
  REGION 1..509: note = tr|A0A357NQE0|A0A357NQE0_9GAMM Tryptophan halogenase; OS = Stenotrophomonas sp. OX=69392 GN=DEB32_14745 PE=4 SV=1
MNVANTPHARVRKVVIAGGGTAGWLAGCALSHQFRDQLDITLVESEQIGTVGVGESTVPPIRAFHRFLQIDEQEFLRAVAGTFKLSISFENWRRPGDRFIHPFGTIGQGMWAAPFHHFWLDSLRRGMPSELGDFCLESVASRGDRFSLDTRPQLNYAYHFDASLYAKFLRRRAEAQGLRRVEGKIRNVQQHADDGSVAALVLEDGQIIEGDLFIDCTGFRGLLTEQTLHTGYEDWHDWLPSDRAVAVQTGSVSPPVPYTRAIAHEAGWRWHIALQHRVGCGLVFSSRHMSDDEAHAKLLRDVEGPPLRDPWLVPFRSGRRLKAWNRNVVALGLASGFIEPLESTSIHLTISAVVRLIQLFPFDGISPALMTLYNDVSRQEMEHVRDFIILHYHANQRDEPMWKACREMPLPESLAIRLRAWRERAHAWQDPGELFRVDSWTSVLMGQGIQPGPPHPLARAIDDADLRTLLARIRQPVQQAVATMPSQAAFIERYCRAGEDVWPRAPALT

SEQ ID NO: 89168 - protein, 502 aa, unidentified
  source 1..502: note = Hyphomonadaceae bacterium
  REGION 1..502: note = tr|A0A3D3Z2B2|A0A3D3Z2B2_9RHOB Tryptophan halogenase; OS = Hyphomonadaceae bacterium OX=2026748 GN=DIU09_06255; PE = 4 SV=1
MEPQAVEKIVIVGGGTAGWMTASALSKVLGPRVNIRLIESEEIGTVGVGEATIPQINIFNSILGIDENDFVAKTNGTFKLGIEFVNWHRQGERYMHAFGGIGRNLGFVPFHQYWMRQNLAGKETSLWDYSAATKAAYANKFDRLERLGASPLPGPTWAFQFDAGLYARYLRGYSEYHGVKRTEGKVHSVELDSLSGFIQSVTLESGEVVSGDLFIDCSGFRGLLIEGALQTGYEDWSNFLPCDRALAVPCESVQPLTPYTRATARHAGWQWRIPLQHRIGNGHVYCSAFTSDEEAERVLMSNLDGKPLADPRPLKFVTGRRKKLWNKNCIAVGLASGFMEPLESTSIHLIQSAVSRLINLFPTKACDTVLSDEYNQQTIEEYALIRDFLILHYHANERTDSPFWLHCQNMAIPDSLSHKIELFRKTGRIERRANDLFAEPSWLQVLIGQGIRPESYHALARDLSDEDLDGFLVNVSTIITKAVEHMPSHEDFIARDCRAPAA

SEQ ID NO: 89169 - protein, 499 aa, Pseudoalteromonas sp.; identical to SEQ ID NO: 87532
  REGION 1..499: note = tr|Z9K0H7|Z9K0H7_9GAMM Tryptophan halogenase; OS = Pseudoalteromonas sp. SCSIO_11900 OX=1461766; GN = BG00_02520 PE=4 SV=1

SEQ ID NO: 89170 - protein, 498 aa, unidentified
  source 1..498: note = Sphingopyxis fribergensis
  REGION 1..498: note = tr|A0A0A7PGD9|A0A0A7PGD9_9SPHN Tryptophan halogenase; OS = Sphingopyxis fribergensis OX=1515612 GN=SKP52_06780; PE = 4 SV=1
MSDKKPVRVVIAGGGTAGWMMASAIARTMGHTVDLTLVESEAIGTIGVGESTIPPLVNFNRILGIPEPDFMRATQATFKLGILFDNWKHDGDSYFHSFGLSGKDHWSAGFQHFWLNARERGLEQPYEDYCLELVAGMQGKFAHLPEDRMNYAYHVDATLYGRYLRKLAEADGCTRVEGKISRVELDGESGDIAALHLDGERRIEGDMFVDCTGFRGLLIDGALHAGFEDWSHWLPNDSAIAVQSKHLGPPMPYTQAIAHDAGWQWRIPLQHRMGAGIVYTSGYLSRDEAYDRLMGSVGEPLIEPFDIKFKGGVRRKQWFRNCVAVGLAGGFVEPLEATTVHLIQRAVLRFIRLMPNGRVSERDAQEFNDQQRTDIEQIRDFVVLHYKATNRRDSPFWRHVAAMPIPDSLQQKIELFRETGRVFRKNEELFAENSWVQVMMGQGIEPQSYHPIAAKLRDDEVERLFQTLRDNIAETVATLPEHHAYVARYCGAEAPKAA

SEQ ID NO: 89171 - protein, 561 aa, unidentified
  source 1..561: note = Ruegeria meonggei
  REGION 1..561: note = tr|A0A1X6YWJ7|A0A1X6YWJ7_9RHOB Flavin-dependent tryptophan halogenase RebH OS=Ruegeria meonggei OX=1446476; GN = rebH PE=4 SV=1
MNNRLRKVTIVGGGTAGWMTALLLDMVLSRTSAPKDRPRICLIESPNIATVGVGEATVPRMPVTLRQAGISEREFFRETNASFKLGVKFCNWNKDAKGNRIDFVNPFAHGQMVEGLEAAEYFLRFGNGDRDFTQSISPHDHLGRLCKGARQLGQPEFEQRFGYAYHLDAVKFAGMLTKVCTNRGVEHIQDEVKAVELDEQGNVSHLMLERAGRHDIEMVVDCTGFRGLIINQALGEPFMDYSDYLPNDRALALQIEHPDPDKIESLTRSTALGAGWTWRVPLFNRVGTGYVFSSAHRTDDQAADEYLEWLGDSGKGATPRVIPMRIGRVRNAWVKNCVAIGLSGGFIEPLESTAIHMVDHAVRWFAEHLPTRDIEPSLRTRYNRQMNKLYDEVLEFICLHYRLGNRTDDQYWIDARTEMKLPDRLAENLELWQHRLPMDHDIEFATLFDHRVYQTVLLGKQAYDTGYGTGIRDRLRPLKKPVWFQGMKRAKADLAQIIKTMPDHKTLLRDIRGELEKPAFGKAAAVKPTVAMPGVTPAPVTIQNMPDFAEIQSGAKDLQLF

SEQ ID NO: 89172 - protein, 441 aa, unidentified
  source 1..441: note = Sphingomonadales bacterium
  REGION 1..441: note = tr|A0A4Q3AGI4|A0A4Q3AGI4_9SPHN Tryptophan 7-halogenase (Fragment) OS=Sphingomonadales bacterium; OX = 1978525 GN=EOP58_11395 PE=4 SV=1
MSSEAPRDDRPRTRVVIVGGGTAGWMAAAALIRRLPHACSVRLIESEDIGIVGVGEATLPHLRAFVSMLGIDEAEFMGVTQATYKLGIEFRDFGRIGDAYLHPFGNFGRPLNGVPFHHYWLRMRAQGRGDSLFDYSLCNQMAAQRRFAPPTSDAASLRSSYGYAYQFDATLFAPYLRDYAVARGVDRTEGRVVDVSLDPLSGDVSALTLASGERVEGDLFVDCSGFRALLIGGAIGSAWEDWSRWLPCDRAVAAPCASPEGPIEPYTRATAMSAGWRWRIPLRHRVGNGYVFSSAHLDEDAASTALVSALENPPLADPRILRFRAGRRARSWDRNVVSVGLASGFLEPLESTSIYLAQGAVEQLIALFPIDGRIADADRDEFNRMVDLEYDRIRDFLILHYHATTRDDSPFWNDMRTMRIPDSLAEKMELFRESGRVAHYT

SEQ ID NO: 89173 - protein, 514 aa, unidentified
  source 1..514: note = Sphingomonadales bacterium
  REGION 1..514: note = tr|A0A4Q5T7K0|A0A4Q5T7K0_9SPHN Tryptophan 7-halogenase OS=Sphingomonadales bacterium OX=1978525; GN = EOP59_07635 PE=4 SV=1
MDGLVSRIVVIGGGTAGWLAASLVAARADPAAAAPISVTLVESPSVPTIGVGEGTWPTMRHTLQRIGIDEAEFLTACDASFKQGSRFIGWASGAAGDTYYHPFSPPVDGDARALIAGWREAAGNQPFAAAVSPQPGVCDLHLAPRQRAMPGYGGALNYAYHLDAAKLAALLARHGVERLGVRHVRGHVTGIDATEAGDIAAVRIRDGAPIAGDLFIDCTGHASMLLGDHFGVPFIDRSDVLFNDRALAVQVPVDPASPIASQTDATAHAAGWIWDIGLPTRRGVGCVYASAFMDDDQAAATLAAYLGRDPAELGARKLSFRSGHRERFWERNCVAVGLSAGFLEPLEASAIVLIELSLNALIDNFPTTRSAMDIHARRFNALFRYRLDRIVEFLKLHYVPSTRTDPYWRAHRDPASIPDRLAELLELWRHQPPSIADFPMVDEIFPAVSYQFVLYGMGFPVPPLAVIASDPDAVTRAIAQAAQRGRTLAASLPTNRAYLDALRAAAPRTALETS

SEQ ID NO: 89174 - protein, 500 aa, unidentified
  source 1..500: note = Sphingomonadales bacterium
  REGION 1..500: note = tr|A0A4V1ZYB8|A0A4V1ZYB8_9SPHN Tryptophan 7-halogenase OS=Sphingomonadales bacterium OX=1978525; GN = EOP62_00810 PE=4 SV=1
MTDRKIRSIVIVGGGTGGWMTAATLSRILTTEYASITLIESDEIGIVGVGEATIPQMATFNRMLGIDEDQFMRETQGSFKLGIQFVNWGKQGHTYYHPFGKIGLDMQGVSFHAFYQRLHQMGEAPSFSDWSLQATASKDNKFMRSIDAGNSPLSEIAYAFHFDAGLYAKFLRRYAEAKGVVRREGKIVDVKLRGEDGFVQSVVMENGDEIEADLYIDCSGFRGLIIEQALKAGFNDWSQYLPCNRAVAVPCESVEELTPYTRSTAHTAGWQWRIPLQHRIGNGHVFSVDYMSEDEATGILLKNLDGKPLADPRIVRFTTGHRKKFWIKNCVSMGLAGGFIEPLESTAIWLIQAGLSRFLTMFPDRDFNQADTDRYNRIMTTDYEEIRDFIILHYHATERDDSPFWNYCRTMEIPERLAEKMRVYRSHGRCFRENEELFNDTSWFAVMHGQLMKANSYDPVADIMSLEETRARLAHIKEAIANSADYMPKHKDFIREHCAA

SEQ ID NO: 89175 - protein, 137 aa, unidentified
  source 1..137: note = Sphingomonadales bacterium
  REGION 1..137: note = tr|A0A4Q5SEJ6|A0A4Q5SEJ6_9SPHN Tryptophan halogenase (Fragment) OS=Sphingomonadales bacterium OX=1978525; GN = EOP59_17350 PE=4 SV=1
MSAAPVRSVAVVGRDAAAWILALGLHRALRSIDVQVSVVELPSALHPGQAYSALPSLANLHLLLGLQEPALFARCGALPAMGQQFMGWSSAHPAFVHGYDETRPAINDVDFVQFWALAQRQGLRVPFEEFSVAAAAA

SEQ ID NO: 89176 - protein, 496 aa, Colwellia sp.
  REGION 1..496: note = tr|A0A2S0V1T9|A0A2S0V1T9_9GAMM Tryptophan halogenase; OS = Colwellia sp. Arc7-D OX=2161872 GN=DBO93_11560 PE=4 SV=1
MTNKINKVVVLGGGTAGWMSASLIKKLMGKSVDVELVESEDIASVGVGEATIPPIRLFNSVLGINEAEFLRETKATIKLGIKFENWKNTEESYFHTFGAAGKSLPFCHFHHYLKRAQDAGLKDNLWDYDLNYLCATQGKFAQIKSKDPIIDIPYAFHFDAGLYAQFLRKFSEKIGVKRTEGMVENVEQCQKTGNVKSLVLKDGEVIKGDLFIDCSGFRGLLIQQTLNTGYEDWGHWLPCDRAVAVPSKRFAETVPYTRSIAHAGGWQWRIPLQHRNGNGLVYSSKHYSDEQAKALLLGNIESEPLAEPRVIKFTTGRRRKQWHKNVIAIGLSSGFLEPLESTSIHLIQSAIVRLIHMFPQKGISTAQVDEYNRQSKIEYEQIRDFIILHYHVNQRDDSQLWRDLREMDIPESLAEKIKLFKETGKIFREQNDLFNEGSWLQVMLGQGIEPEDYHPLANDMPLEQLNSMLAKIKAIKHEPLTKLPSHDEYLTNFCRL

SEQ ID NO: 89177 - protein, 502 aa, Rheinheimera sp.
  REGION 1..502: note = tr|F7NX41|F7NX41_9GAMM Tryptophan halogenase; OS = Rheinheimera sp. A13L OX=506534 GN=Rhein_2359 PE=4 SV=1
MLNTKKVLILGGGTAGWMAANLMIKKWAGQNISVSLLESEEIGIIGVGEGSTPSLKDFFAYVDIPEQEWMPACNATYKNGITFKNWSSKPGFSSYCHPFPSQLDDYTADAFIYNAFVRRKGIDVEAHPDQFLFASHLCQQGLAPQAAFHFPFNVSYGYHFDSVLLGKFLKNKAKERGVTHIEGTVAAVEQHPNGDISRLVTKDGRAIEADLFVDCSGFQAVLIQQCLKEPFISFGNNLFNDSAVVMPTAATAQVNSQTIATALKAGWAWDIPLTNRTGNGYVFSSAFCSNDQAETELRTKLGLLDSAEPVRFLKMKVGRLQQHWAKNCLAVGLSQGFIEPLEATALHLVQETLLAFIEAYSAAGFTDKNRDKFNQIINHRFESVRDYIVCHYKVNSRTDTDYWRANSNNNDISESLRQVLQCWVGGADLRQEIDRQQIGRYFPSISWHCLLAGYGLFPEQSQLKPGNAEALKYNLTSIRDFVERCALNYQPHQNILQKLHQV

SEQ ID NO: 89178 - protein, 384 aa, unidentified
  source 1..384: note = Sphingomonadales bacterium
  REGION 1..384: note = tr|A0A4Q5SYE2|A0A4Q5SYE2_9SPHN Tryptophan 7-halogenase (Fragment) OS=Sphingomonadales bacterium; OX = 1978525 GN=EOP59_11085 PE=4 SV=1
MKKIVVAGGGTAGWMAAAAIARTMGSTASVTLIESEAIGTVGVGESTIPPLVTYNRLLGINEAEFMRATQATFKLGILFDNWKQPGDRYFHSFGYTGKDHWAAGFQHYWLEGRSRGHDQSYDDYCLELVAALQSKFAQLPDNKVNYAYQLDSGLYARFLRQMAEADGVTRIEGKIARVELNGESGDIAALELDGGRRVEGDLFLDCTGFRALLIEGTLHAGYDDWTHWLPCDSAIALQTPNVRPPVPYTRAMAHDAGWQWRIPLQHRTGNGIVYCSRYLDHDAALERLLGNIEGEPLTPPNKIRFQTGARRKQWHRNCIAIGLSGGFMEPLESTSIHLIQRAILRLIRMMPQGEISPRDIAEFNDQQFQDMEQIRDFLILHYKV

SEQ ID NO: 89179 - protein, 514 aa, unidentified
  source 1..514: note = Sphingomonadales bacterium
  REGION 1..514: note = tr|A0A4Q3ALM6|A0A4Q3ALM6_9SPHN Tryptophan 7-halogenase OS=Sphingomonadales bacterium OX=1978525; GN = EOP58_04790 PE=4 SV=1
MLQRCCTAIWGGKSVAERIRSIVIVGGGTAGWMTAAAMARILGPDYATITLVESDAIGTVGVGEATIPQIGTFNRLLGIDENDFVRRTKGSFKLGIEFVDWGGLGRRYFHPFGKYGIDMEGVSFHAYWQRLAQDPQFANVDAFSLMASAGRANRFMPPVDAGNSPLSGIAYAYHFDAGLYALYLRELAEGMGVKRVEGRIVDVERDGESGHIAAVALESGERVSGELFIDCSGFGGLLIGKTLGVPYVDWSAHLPCNRAVAVPCASVPGGLTPFTRSTARSAGWQWRIPLQHRTGNGMVYCSEYISDDEAAATLLGNLDGEALADPRFIRFTTGHRARFWEGNCVSIGLSAGFMEPLESTSIWMIQTGIARLLSNFPDSTFAEAERARYNRLMIEESELIRDFLVLHYCVTDRTDSPFWNHCRTMPIPERLAEKIRVFESSGRCFREHEELFNDTSWFAVMVGQGMRWSRYDPVAELLTLAETRDRLAHIASAVAKSVDYMPDHAEYIRQNCAA

SEQ ID NO: 89180 - protein, 148 aa, unidentified
  source 1..148: note = Sphingomonadales bacterium
  REGION 1..148: note = tr|A0A4Q5SYR0|A0A4Q5SYR0_9SPHN Tryptophan halogenase (Fragment) OS=Sphingomonadales bacterium OX=1978525; GN = EOP59_11160 PE=4 SV=1
MSGAPVHVVVAGEDAALWLAASTLHGALGRSGVTVEVVELPTRLGPADMLVTQPSLEALHDRLGVDEARLLRATRGSFALGQKFVDALGAQPGFFHAHGGYGVAIDGQPFLPVWLKARRHGLPSAFEAFSLSAAAALQGRMLLRDADT

SEQ ID NO: 89181 - protein, 445 aa, Hydrogenophaga intermedia
  REGION 1..445: note = tr|A0A1L1PIX6|A0A1L1PIX6_HYDIT Tryptophan halogenase; OS = Hydrogenophaga intermedia OX=65786 GN=BN948_02331 PE=4; SV = 1
MQEAGITQRDCDVLVIGGGPAGSTVATLLAREGHHVVLLDKDRHPRFHIGESLLPANLPLLDRLGVGDAIRAIGMHKPGAEFVSPQHTHTQVYHFADAWDKSMPAAYQVKRADFDHVLLRNAASQGVDVHEATLAREVRWSADAQRAESVTSTDENGQAIEWHPRFLVDASGRDTFLAGRLKSKEKNPNHNSAAVYAHFRGARRQAGADEGNITIFWFDHGWFWFIPLSDGTTSVGMVTWPYHMKTRGGRDLQDFLLDNIRACPALAERLAEAEPVTAAEATGNYSYRSTLSHGEGFLLLGDAYAFIDPVFSSGVWLAMSSADIGARTVDTCLREPARAARAMRHFDQHMRHGPREFSWFIYRMTNPTMRGFFMDPHNPLRMKEALLSVLAGDLFGRTPIWPSLWAFKSFYFAVNLGNPLRTWRAWRQRRRNIRPTVSANAASNP

SEQ ID NO: 89182 - protein, 114 aa, unidentified
  source 1..114: note = Sphingomonadales bacterium
  REGION 1..114: note = tr|A0A4V1SUR7|A0A4V1SUR7_9SPHN Tryptophan halogenase (Fragment) OS=Sphingomonadales bacterium OX=1978525; GN = EOP61_10495 PE=4 SV=1
ILHYHANRRKDGDLWRRVREMEIPETLRRKLDLFRNRGRFFRYEDELFAESSWIAVMLGQGVYPAGWDPLADAIDPAQIRNTLDRIRTMFAQTASTMPRHEDWLARHAPAGSLA

SEQ ID NO: 89183 - protein, 501 aa, unidentified
  source 1..501: note = Sphingomonadales bacterium
  REGION 1..501: note = tr|A0A5C7JRW4|A0A5C7JRW4_9SPHN Tryptophan 7-halogenase OS=Sphingomonadales bacterium OX=1978525; GN = E6R12_04260 PE=4 SV=1
MQQPRRIVIVGGGTAGWMAAAAFGRFLTPHYEVTLVESDAIGTVGVGEATIPQIQLFNNALGINEPDFIKATAGSFKLGIVFDGWWRPGHRYIHAFGTVGRGQGLIGFHHYWLRYRQNGGAHDFWRYSANAQAAFANRFGLGVPDAGVAIPYAFHFDASLYAAYLRRYAEARGVQRIEGRIDAVSRHGETGDILNLSLEGGRTVAGDLFVDCSGFRSLLLGEALGVGFDDWSNWLPCDRALAVPCASAEPFTPYTKASVRPAGWQWRIPLQHRTGNGYVYCSALVSDDEAAHTLLANLDGAPLAEPRPLRFTAGKRREVWRGNCVALGLAGGFLEPLESTSIHLIQTGIARLLQYLPGAGFGQADIASFNAQTDFEYTAIRDFLILHYAATERDDTEFWRARRAMAIPDSLRARIDLFAADGRFVRNGEELFAEPGWLQVMLGQGILPRGYHPLADSLSLLQLDELMGQAQRQTDAALARFMDHGAFIQRHCAMPNTESAA

SEQ ID NO: 89184 - protein, 475 aa, unidentified
  source 1..475: note = Sphingomonadales bacterium
  REGION 1..475: note = tr|A0A4Q5S4X1|A0A4Q5S4X1_9SPHN Tryptophan 7-halogenase OS=Sphingomonadales bacterium OX=1978525; GN = EOP62_00800 PE=4 SV=1
MAIRRIAILGGGVAGWMSALALGNALDGSGIAIELVETGGPDHSIGPFGPGEATLPAFHAFLGDHGVDEDALLKAARGTFALGAAFSGWAGAQSGWFLPFGEIGAGMGPVAFPPLVARLRAAGHPVRPTDFSLAAVAAAAGRFARPSLDPRSVLASYGYGLHLDKAALAAICRDLTKGVTHHAAPFVRAIRAENGHVTALELEGGEQIAADLFLDCSGPAALLCEGHGFESWSAWLGCDRVIERANSQEGIPPPYTHIGAHAAGWARAVPLIGGPSEAMLFASAHHQDANATAIHQGRRARFWHGNVVAVGAAAALVEPLYGHNLRLVHTAIQRLIALFPNHVEGPEAAEYNRITADEGDRVRDFVIAHYKTNARIGEPFWDAARAMSVPDELQYKLDLYASRGRMPMYDEEVFDRAEWIAALDGQGLHPRRYDALADTIPEAAIIQHVTRLREMIVEAAKAMPTHGATLAEVAA

SEQ ID NO: 89185 - protein, 506 aa, unidentified
  source 1..506: note = Sphingomonadales bacterium
  REGION 1..506: note = tr|A0A4V1SHH9|A0A4V1SHH9_9SPHN Tryptophan 7-halogenase OS=Sphingomonadales bacterium OX=1978525; GN = EOP60_02840 PE=4 SV=1
MTAPQPIRSIVIVGGGTAGWMAAAAFSRLARTGVKISLVESDAIGTVGVGEATIPPIRNFNGLLGIDENEFIAKTQGTLKLGIDFVGWTREGDRYFHPFGEFGFDIEGVKFHQFWRKLYESGQAADIGEYNLCAMAMNLGRYQTPSPDPASILSRMAYAYQFDASLYAAFLRDYAEKKGVVRHEGKVVHVPVRAEDGHIEAVVLEGERRIDGELFIDCTGFHALLIEETLGAGWESWAHWLQCDRAMAVPCESPEGGAITPYTRSTARTAGWQWRIPLQHRMGNGYVYCSNDIADDQVRDDLLASLDGKPLRDPFIIKFEAGRRKKAWHKNCVALGLASGFLEPLESTSIHLIQTGISKLMALLPDTGFSAVERDEYNRLTDLQMEQVRDFIILHYHANERRDGDLWRRVREMEIPETLSRKLDLFRNRGRFFRYEDELFAESSWIAVMLGQGVMPAGWDPLADTIDPAQVRHTLDRVRMLFAKTAQSMPRHEEWLARNAPARRMA

SEQ ID NO: 89186 - protein, 501 aa, unidentified
  source 1..501: note = Sphingomonadales bacterium
  REGION 1..501: note = tr|A0A4Q2ZF90|A0A4Q2ZF90_9SPHN Tryptophan 7-halogenase OS=Sphingomonadales bacterium OX=1978525; GN = EOP60_11565 PE=4 SV=1
MTVPFRIAIIGGGTAGWMCAAACAAKLDLQRYDVRLIESDEIGIVGVGEATLPQMKDFNDYIGVDEAEFMTATQATFKLGIEFVDWGHIGSRYIHPFGSFGRPIGEAEFFHYWLRARQTAGPLFDYCLPIVAAEAGRFDFPAKDPADPKSAFSYAYHLDASLYAKYLRGWSEARGMQRVEGRIIHVTRHPESGDIAHVMLASGEAIAADLFVDCSGFRGLLIEQALETGIEDWSHWLPCDRAMAVPCDKIEGITPFTRSTAREAGWQWRIPLQHRTGNGYVYASEWMSDDEAASLLLARLDGAPQADPRGLRFKACKRNKAWNRNVIAMGLASGFLEPLESTSIYLVQMSIAFLLTLMPDRAEIDPALEREYNRVMDVEYDRIRDFLILHYRATTRDDAEIWRYCRAMQIPESLADRIERFRHRGHIREYRDGLFGPPSWQAVFIGQGIVPEASDAMAELMSEAVLTERMAKLRGLVGNTAAAMPLHAETIARYCPAGGAA

SEQ ID NO: 89187 - protein, 94 aa, Erythrobacter sp.
  REGION 1..94: note = tr|A0A3D4M4Q1|A0A3D4M4Q1_9SPHN Tryptophan halogenase (Fragment) OS=Erythrobacter sp. OX=1042 GN=DIW45_14620; PE = 4 SV=1
TRATARAAGWQWRIPLQHRVGSGLVYCDAFWDDADAAEALMANLEGEPGAEPRQLRFTTGRRSALWRSNCVAIGLAGGFLEPLESTSIDLIQSG

SEQ ID NO: 89188 - protein, 500 aa, unidentified
  source 1..500: note = Sphingomonadales bacterium
  REGION 1..500: note = tr|A0A4Q2ZKL5|A0A4Q2ZKL5_9SPHN Tryptophan 7-halogenase OS=Sphingomonadales bacterium OX=1978525; GN = EOP60_10160 PE=4 SV=1
MTDSRIRSIVIVGGGTAGWMAAATLARILGTDYASITLVESEEIGTIGVGEATIPQMATFNRMLGLDEDQFMRETQGSFKLGIQFVDWARKGHRYYHPFGKYGLDMNGVSFHAFFQRLHQMGEAPDINDFSLQATASRDNRFMRPIDAGKSPLSEIAYAFHFDAGLYARFLRKYAENLGVVRREGKIVDVKLRGEDGFVQSVVLADGSAVEGELFIDCSGFRGLIIEQALKAGYTDWSRYLPCNRAIAVPCESVEEWTPYTRSTAHSAGWQWRIPLQHRIGNGHVFCSDFMGDDEAASILLGNLDGKPLADPRVVPFTTGHRSKLWVKNCVALGLAGGFIEPLESTAIWLVQSGLSRLLTMFPDRNFNQADVDRYNRIMTTEYEELRDFIVLHYNATERDDSPFWDYCRNMEVPERLAEKMRVFRTHGRCFRENEELFNDTSWFAVMHGQLMKPQSYDPVADTMSLDETRSRLAHIRQAIANSADYMPKHRDFIREHCAA

SEQ ID NO: 89189 - protein, 506 aa, Sphingomonas sp.
  REGION 1..506: note = tr|A0A345WST6|A0A345WST6_9SPHN Tryptophan halogenase; OS = Sphingomonas sp. FARSPH OX=2219696 GN=DM480_00205 PE=4; SV = 1
MTADAPLRSIAIVGGGTAGWMAAAALARVLGPDGPAITLVESEEIGTVGVGEATIPPIQAFNALLGIDEDAFVRATGGTFKLGIEFVDWWQRGHRYFHPFGVYGIDSGAVPFEAMWQRLRMTGDALPLDAYSICTAAAAAGRFARPQASNTPLAQIGYAFHFDATLYARFLRQHAEASGVRRIEGRVVDVARRPDDGFIETVALESGVRIAADLFIDCSGFRALLLGEALGVGFQDWGHWLPNDRAVAVPSANAEPPTPFTRSTAQAAGWQWRIPLQHRTGNGYVYASGHISDDAAAATLLAGLDGAPLADPRLLRFRTGRRDVFWARNCVALGLASGFMEPLESTSIHLVQAGIARLLEMLPTRAFEQADIRRYNRLMTAEFESIRDFLILHFHATARDDTAYWRNLAAMRVPDSLAERIAIHRRTGRVYREADELFTRTSWLAVMEGQGLRPEGFDPIALGIPLDTARARLSRIAEVTRAAVGHLPPHADFIARHCAAPQEPVA

SEQ ID NO: 89190 - protein, 521 aa, Sphingomonas sp.
  REGION 1..521: note = tr|A0A369VYP3|A0A369VYP3_9SPHN Tryptophan 7-halogenase OS=Sphingomonas sp. WZY 27 OX=2283317; GN = DVW87_06445 PE=4 SV=1
MEQPVSRIVIVGGGTAGWLAACLLAARGDRTARPPLSVTLIESPDVATVGVGEGTWPTMRRTLERIGLSEADFLRRCEASFKQGSRFDGWRTGAEGEQYFHPFTPPVDGQAADLVAAWADDPLARPFAETVSAQPGICAQDLAPRQRGMPDYAGALNYAYHLDAGKLAALLAEHGTQVLGVRHLRDHVTRVVPGEGGDIAAVELRGAGEIAGDLFLDCTGHAALLIGGHHGVPFVDWSDVLFNDRALAVQVPVAPGSAIASQTNATAHAAGWLWDIGLPTRRGVGCVYASAFLSDAAAEETLAAYLARTAPDVDRSALSFRKLAFRSGHRERFWQGNCLAIGLAAGFLEPLEASAIVLIELSLNALLDGFPRTRGAMERHARRFNDLFRYRWDRIVEFLKLHYVPSVRSEPYWQAHRDPASIPARLQELLALWRDQPPSRADLPMVDEIFPAASYQYVLYGMGWPAPPPSRIAGETQAQVAQQLAAAAQRARVLAASLPTNRAYLDAVRADALPRQMETVR

SEQ ID NO: 89191 - protein, 167 aa, unidentified
  source 1..167: note = Sphingomonadales bacterium
  REGION 1..167: note = tr|A0A4Q2YXI7|A0A4Q2YXI7_9SPHN Tryptophan halogenase (Fragment) OS=Sphingomonadales bacterium OX=1978525; GN = EOP63_09395 PE=4 SV=1
MGDKFELVIVGGGTAGWMCAAACAAKLDPARFRVRLVESEEIGTVGVGEATLPQMKDFNDFLGLDEVEFMKATQASFKLGIEFVNWGREGHRYVHPFGTFGRPIGEADFFSYWIRAHRAGTAAPLSDYCFPIVTALQNRFMLPNGEANDVRNAFSYAYHLDAFLYAR

SEQ ID NO: 89192 - protein, 482 aa, Erythrobacter sp.
  REGION 1..482: note = tr|A0A3D0WJ89|A0A3D0WJ89_9SPHN Tryptophan halogenase; OS = Erythrobacter sp. OX=1042 GN=DEP68_07510 PE=4 SV=1
MAAALLARFLPPDYRVELVESEAIGKVGVGEATIPQIRHFNQALGIDEAEFLRETKGSFKLGIAFDGWRGEGHSYMHAFGPVGQSSGLIAFRHYWLRAKALGHAKDLAHYSPNEMAARNLRMPGPGSADLPYAYHFDASLYAAFLRHYAETRGVVRAEGIIERVERDSETGDIAALVLDGDRRLEADFFIDCTGFRALLIEGAMEAGFDDWSNLLPCDHALAVPCASGGDFTPYTRAMARKAGWQWRIPLQHRIGNGYVFSSQFCSEDEAADTLLANLDGSPDGTPRLLSFTTGKRRRQWIGNCLALGLAAGFMEPLESTSIHLVQSALARFLQLLPAGRSTPSTIDHFNTQADFEWSRVRDFLVLHYWANGREGDPFWDAMRALDLPATLQARIDQWRDTGHIHREHEELFTEVAWFQVFAGQGVSANHYNPLADAMAEQDLRDFLASQERALEQAAAAMPHHADTLGRLMARPAKRNTAA

SEQ ID NO: 89193 - protein, 518 aa, unidentified
  source 1..518: note = Alteromonadaceae bacterium
  REGION 1..518: note = tr|A0A2D9KBZ4|A0A2D9KBZ4_9ALTE Tryptophan halogenase; OS = Alteromonadaceae bacterium OX=1916082 GN=CL582_04580; PE = 4 SV=1
MTSASQPVRKVVIVGGGTAGWLTAGRIAAEHATKAHHPVEVVLVESPNIPTIGVGEGTWPTMRNTLIKLGIRETDFIRECDASFKQGAKFAGWVTGDTDDFYYHPLMLPQGFSQGNLGPYWQQHQDTIEQSFSNAVCFQEALCEHNRAPKSIRHAEFGAVANYAYHLDAGKFTSFLTRHCTEKLNVRHVLADVTGVTAHDNGDIRAIQTQQAGEIGGDLFVDCTGFQSLLLGKHYKVPFVPCDDVLFIDRALAVHVPYDSPDAPVATHTISTAQQAGWIWDIGLQSRRGVGHVYASRYQSEQQALDQLAQYVGPQFNDLSVKQIQIQSGHREHFWHNNCVAVGLSAGFLEPLEASALVLVELSATMLAEQLPVNRATMPIIAKRFNQTFQYRWQRIIDFLKLHYMLTKRTDTAFWRDNCDPATIPDSLQELLDLWRYHPPYDHDFTSNNEVFPAASYQYVMYGMGFESDLSFGQQQVAKAFAQQQLQMNQQARQKVLSALPTHRDLLNKINQYGLQPV

SEQ ID NO: 89194 - protein, 519 aa, unidentified
  source 1..519: note = Alteromonadaceae bacterium
  REGION 1..519: note = tr|A0A2A5HFZ1|A0A2A5HFZ1_9ALTE Tryptophan halogenase; OS = Alteromonadaceae bacterium OX=1916082 GN=COA42_19550; PE = 4 SV=1
MNKATRTVVILGGGSAGWLTAGVIAAEHRTNQADGLRVILVESPDVAPIGVGEGTWPTMRNTLSKIGVRETDLFRECEASFKQGAKFSRWVTGEKNDHYYHPLVIPDGYEETDLASQWLAMQDRAPFADTVCFQGHICEKGLAPKQITTPEYASVANYAYHLNSAKLGEFLKNHCIDKLGVKHVLDHVISVKSAENGDISALATKENGDIEGDLFVDCSGFSSLLLAKHYKIPFVSKKHILFNDTALAVHVPYENEDSPIASHTISTAQSAGWIWDIGLPSRRGVGSVYSSAHQTEEGAGAELRKYIAESVGQKTADSLSFRKIPINPGHREKFWHRNCVAVGMASGFLEPLEASALVLIELAAEMISENMPATRDVMDIVSKRYNKRFLHRWDNIIDFLKLHYILTKRTDSEYWRDNLLDETIPDNLQELLKVWRHHPPTRHDFPYTEEVFPSASWQYVLYGMGFETEPRKTARLASDPKIAQRFFESTRKYTAKCIAGLPNNRELIKKIHAHGLQRI

SEQ ID NO: 89195 - protein, 497 aa, Rheinheimera sp.
  REGION 1..497: note = tr|F7NRC3|F7NRC3_9GAMM Tryptophan halogenase; OS = Rheinheimera sp. A13L OX=506534 GN=Rhein_0179 PE=4 SV=1
MNNEQNRIKKVVIAGGGTAGWMTAAGLTKLLGKNLEVVLVESDDIGTVGVGEATIPTMHIFHRLLNIKESEVMAATNATFKLGIQFENWKTQGENYIHSFGFLGKDCWACGFQHFWVKGKQKGIASEIGDYCVEHLGARQGRFAVTPNQDLNHAYHMDASLYAKFLRRLSEQHGIKRIEGKISEVQQHMDGSISALLLESGELIEGDLFIDCTGFRALLIEQTLNTGFEDWSHWLPCDSAYAVQTKTTQEPVAYTRAIARDAGWQWKIPLQSRVGNGLVFCSKFITEAEAKQTLIDNVEGEMLFEPRLIKFKTGTRRQHWNKNCVAIGLSSGFLEPLESTSIHLIQRSIIRLLQAFPSDGILAAEVAEFNRQTKIEMDNIRDFIILHYKATERTDTKFWRYCKAMDIPETLSHRMELFKQSGKVYKFAQELFGESSWLQVLIGQGLMPQQYHPIVDLMPDSELNDFLMSIKHNVKRTVSQFPTHHEFIQHYCKSSLV

SEQ ID NO: 89196 - protein, 495 aa, unidentified
  source 1..495: note = Sphingomonadales bacterium
  REGION 1..495: note = tr|A0A4Q5RUM9|A0A4Q5RUM9_9SPHN Tryptophan 7-halogenase OS=Sphingomonadales bacterium OX=1978525; GN = EOP62_13585 PE=4 SV=1
MTEHRLRRVVIAGGGTAGWMAAAAIARTLGNAVDLTLVESDAIGTIGVGESTIPPLVSYNRLLGINEADFMRATQATFKLGILFDNWKEPGHRYFHSFGLTGKDHWSAGFQHFWMRARANGVAGSYDDYCLELVAALQSKFAHLPDDRMNYAYQLDSGLYAKFLRKMAEADGARRIEGKIARVELDSESGDIAALALESGQRIEGDLFLDCTGFRAVLIEQAMHAGFDDWTHWLPCDSAIAIQTASVGPAVPYTRAMAHDAGWQWRIPLQHRVGNGIVYCSRYLDHDTALERLLGNIEGETLVQPNKLRFTTGVRRKQWHRNCVAIGLSGGFMEPLESTSIHLIQRAVLRLIRMMPLSEISERDVAEFNDQQFQDMAQIRDFLILHYKATERRDSPFWRQCESMAIPDSLTQKIELFRETGRVFRRNEELFAENSWVQVMMGQGITPRAWHPIAEKLSDEELGKLMTVMGDQVKHTVASLPAHADYVAQYCGAAR

SEQ ID NO: 89197 - protein, 223 aa, unidentified
  source 1..223: note = Sphingomonadales bacterium
  REGION 1..223: note = tr|A0A4Q3AQ58|A0A4Q3AQ58_9SPHN Tryptophan halogenase (Fragment) OS=Sphingomonadales bacterium OX=1978525; GN = EOP58_03755 PE=4 SV=1
MTKRFDLVIVGGGTAGWMCAAACAAKLDPTRYRVRLVESEEIGTVGVGEATLPQMKDFNDYLGLDEVAFMAATQASFKLGIEFVNWGRQGDRYIHPFGTFGRPIGEADFFSYWARANAAGRAAPLPDYCIAIVMAWANRFMLPNGAAGDVRNAYSYAYHLDAFLYARFLRRWAEERGVERVEGRIVTVARDGERGGIASVTLASGAQVTGDLFVDCSGFRSLL

SEQ ID NO: 89198 - protein, 499 aa, unidentified; identical to SEQ ID NO: 86032
  source 1..499: note = Alteromonadaceae bacterium
  REGION 1..499: note = tr|A0A2D5M3Q4|A0A2D5M3Q4_9ALTE Tryptophan halogenase; OS = Alteromonadaceae bacterium OX=1916082 GN=CL579_11900; PE = 4 SV=1

SEQ ID NO: 89199 - protein, 376 aa, Caulobacter sp.
  REGION 1..376: note = tr|A0A259J7G2|A0A259J7G2_9CAUL Tryptophan halogenase (Fragment) OS=Caulobacter sp. 39-67-4 OX=1970332; GN = B7X77_00980 PE=4 SV=1
MTAAALSKVLKGVEITLIESDQIATVGVGEATIPPINTFNQILGIDEADFMRSTKASFKLAIEFVDWTAPGSRYLHPFGGFGLDIEAIKFHQFWLKAQSQGSTQPLDDFNLSATAAKLGKFMLPSKDTGQVLPSLKYAFHFDAVLYAGYLRDYAEKRGVIRREGKVVDVCLRGEDGFIASVTTDGGEVIEADLFIDCSGFRGLLIEQALDTGFEDWGHWLPNDRAVAMPCDTGGDGLTPYTRATADKAGWRWRIPLQHRTGNGYVYSSQHLSDEDAVARLRATLDGPARAEPNFIKFRAGRRKQIWVKNCVAIGLASGFLEPLESTSIHLIQVAITTLLELFPERGCAGADQDEYNRVMDLEFERIRDFLVLHYHN

SEQ ID NO: 89200 - protein, 366 aa, unidentified
  source 1..366: note = Sphingomonadales bacterium
  REGION 1..366: note = tr|A0A4Q3BZ83|A0A4Q3BZ83_9SPHN Tryptophan 7-halogenase (Fragment) OS=Sphingomonadales bacterium; OX = 1978525 GN=EOP61_38880 PE=4 SV=1
MVIVGGGTAGWMAAAALSRLTRTGVRVTLVESDAIATVGVGEATIPPIRNFNGLLGIDENDFLAKTQGTIKLGIDFHGWRNGSDRYVHPFGEFGFDVEGVKFHQLWRKMLASGQASGIEDYNLCAMAMRLGRYQPPSPDPGSVLSRMAYAYQFDASLYAAYLRAYAEKRGVVRVEGKVVDVPLRGEDGHIEAVVLEGDRRIEGELFIDCTGFRALLIEEKLGAGWESWAHWLPCDRAVAVPCDSPDGTITPYTRSTARAAGWQWRIPLQHRIGNGYVYCSGDISDDAARETLMANLDGKPLRDPFMLKFEAGRRKLAWHRNCVALGLSSGFLEPLESTSIHLIQTGEKPASGSSAISLETPVWIRW

SEQ ID NO: 89201 - protein, 525 aa, unidentified
  source 1..525: note = Alteromonadaceae bacterium
  REGION 1..525: note = tr|A0A2E9K329|A0A2E9K329_9ALTE Tryptophan halogenase; OS = Alteromonadaceae bacterium OX=1916082 GN=CL587_04355; PE = 4 SV=1
MKDTQQLTSVVIAGGGTAGWLTACILAAKHRPGNLSITVIESPDIPTLGVGEGTWPTMRGTLQKIGIDEATFLSACHGSFKQGTSFHHWRKPEASPHQYYHPFSLPFNYFDTDCAAWWQRHQPQMDFASVATSQGAICDRNLAPKQAETPPFAGVVNYGYHLDAVKFAGLLKHRATSESGVTHITGHISSVIPSEDGGIRSVVLDKSGRQIEGDIFIDCTGFSARLIGEHCGEPLISCKHILANDSAVAVQCQYAADDTPVTSVTRSVAQSKGWIWDIALPERRGAGYVYSSQHCTAEEAILTLHRYAGSDKSLRDVSFGEFSGKAKYFNFEPGYRRSPWQKNCVAIGTSAGFLEPLEASALVMIELAATLLSEQLPRYTNQIAPVARQFNQQLAGKWSRIVDFLKLHYVLSDRDDSAYWQEMRKLSSCSEQLQDWLSMWSTRSPNASDFNLRDEIFPAASYLYVLYGMGFNTAFLPGSADHDSSEHQHAWHKQQQLTRQHLAGLPANRALLTQLTGARQYQVNK

SEQ ID NO: 89202 - protein, 517 aa, unidentified
  source 1..517: note = Alteromonadaceae bacterium
  REGION 1..517: note = tr|A0A2E7GWI6|A0A2E7GWI6_9ALTE Tryptophan 7-halogenase OS=Alteromonadaceae bacterium OX=1916082; GN = CL578_24485 PE=4 SV=1
MDQAIKSIVIVGGGTAGWITAGTLAAKLQNEHADGFKITLVESPDVKPIGVGEGTWPTMRRTLKAMGIRETDFIRECNVSFKQGAKFAQWVTGAEDDFYYHPLVLPQDFDSTNLARHWMAHPFEQSFSQAVSPQEAVCETGLAPKTIATAEFTSIINYAYHLDAGRFSAFLQRHCIEKLNVHHILDNVSKINAAENGDIASVSTKANGDIAGDLFIDCTGFKSLLLGEHFKVRFKSCKDVLFVDQALAIHVPYDTDDAPIASHTISTGQSAGWVWDIGLQNRRGVGHVYSSAHTTEQRASEELLNYIAQTGGKVNEADIRSIGLNPGHRETFWRQNCVAVGLSAGFLEPLEASSLLLVEISAAMIADQFPATRDAMDIVAKRFNHTFLYRWERIIDFLKLHYMLSKRNDSAFWIDNRDTTTIPQSLQEQLTLWQFQPPWHNDFEHAVEVFPAASYQYVLYGMGFYTKPNELGMSQAYQQKAGALRQKNSQQVQQMLKNLPDNRGLINKIHQFGMQRV

SEQ ID NO: 89203 - protein, 253 aa, unidentified
  source 1..253: note = Sphingomonadales bacterium
  REGION 1..253: note = tr|A0A4Q5SE65|A0A4Q5SE65_9SPHN Tryptophan halogenase (Fragment) OS=Sphingomonadales bacterium OX=1978525; GN = EOP59_17345 PE=4 SV=1
LQSERLDTVPPYTRSTARDCGWQWQIPLQHRTGNGYIYSSAFLDDEAARDALLANLPTSPLIEPRPLRFTAGRRTHCWTRNCIAIGLSSGFLEPLESTSIYLIQIAAMNLVALFPEHADDPVLAAEFNRRMDVEYDRIRDFLILHYHANRRDEPFWRQCRAMAVPDSLAEKIAMFRHRGAVPRYGEGLFSPPSWVSVLFGQGLEPEAVHPLAEALPMPELTRRLAAIRAEVATGVAGMSGHDGFVSDFGEWGI

SEQ ID NO: 89204 - protein, 498 aa, unidentified
  source 1..498: note = Alteromonadaceae bacterium
  REGION 1..498: note = tr|A0A2E6SJH2|A0A2E6SJH2_9ALTE Tryptophan halogenase; OS = Alteromonadaceae bacterium OX=1916082 GN=CL590_00745; PE = 4 SV=1
  VARIANT 45: note = Xaa can be any naturally occurring amino acid
  VARIANT 233: note = Xaa can be any naturally occurring amino acid
  VARIANT 440: note = Xaa can be any naturally occurring amino acid
  VARIANT 442: note = Xaa can be any naturally occurring amino acid
  VARIANT 471: note = Xaa can be any naturally occurring amino acid
  VARIANT 492: note = Xaa can be any naturally occurring amino acid
MNASPLNIVIVGGGTAGWMAANLLAKRWQHKAVSVTLVESPDIGXIGVGEGSTPTLKRFFEDMNIAESDWMAACNATYKVSIQFDGWSPESGVGSYAHPFISQLDTFSERPFYVNCLTRRMGLDVNVTPGDFLFNGWLAKHKRSPQTPANFPFRIEYGYHFDSGLLGAFLQRHAHTLGVTHKSRNIESVQCHPNGDIASLHTREGEIIEGDLFIDCSGFRSLLLQQTLKVPFXSFKDNLFNDAAVVCATDALEDRPVETRSTALSTGWAWQIPLTNRTGNGYVYSSAFISQDDAEKELLTHLGVNDDDAQTRHLTMKVGQVSEHWSRNCLALGLSQGFIEPLEATALHLVQTSVEIFMDHYEKGGFSDQYRAAYNQVIGERFERVRDYIVAHYKLNTRNDSEYWRANRNNDVLSESLLQLLDVWFRRGDLQQEIQRQKLXSXFGATSWHCLLAGYGAFPRLAAQQPNQGDXYKDNNLAQFFSGCLLNFSAQXRDDSHL

SEQ ID NO: 89205 - protein, 506 aa, unidentified
  source 1..506: note = Sphingomonadales bacterium
  REGION 1..506: note = tr|A0A4Q5TGP7|A0A4Q5TGP7_9SPHN Tryptophan 7-halogenase OS=Sphingomonadales bacterium OX=1978525; GN = EOP59_00465 PE=4 SV=1
MRQAQGAPPKTRVVIVGGGTAGWMTAAGLIRRLSHACEVRLIESEDIGIVGVGEATLPHLRAFVRMLGIDEAEFMAVTHATYKLGIQFRDFGRLGHAYLHPFGNFGRPLSGVAFHHYWLRMRAEGGGDSLFEYSVANVMAEECRFQPPSDDPDSLLSTYGYAYQFDATRFAPYLRDYAVARGVERTEGRVVDVALDPLSGDVAALTLASGQRIEGDLFVDCSGFRALLIGAALGSEWEDWSRWLPCDRAVAAPCASPAGVIEPYTRATAMPAGWRWRIPLRHRVGNGYVFSSAHIGEDEAMEALVAALENKPMADPRLLRFRAGRRKRSWDRNVVAIGLASGFLEPLESTSIYLAQGAVEQLIALFPAGGQIADADRDEFNRMVDVEYDRIRDFLILHYHATQRDDSDFWNDMRTMTVPDSLAEKIELFRETGRVARYTQGLFLEPSWIAVYLGQGIVPERWDQRADAAETRLLAPALDRLRAQLADAVRAMPSHDAYLARHGASG

SEQ ID NO: 89206 - protein, 514 aa, unidentified
  source 1..514: note = Sphingomonadales bacterium
  REGION 1..514: note = tr|A0A4Q5T6H9|A0A4Q5T6H9_9SPHN Tryptophan 7-halogenase OS=Sphingomonadales bacterium OX=1978525; GN = EOP59_05870 PE=4 SV=1
MSPAGDQGQRYEIVILGGGTAGWMCAANLARHLNPRDYSVTLVESDEIGTVGVGEATLPHMKAFNDMLGVDEARFMTETRATFKLGIEFCGWDRPGDSYIHPFGAFGEPWGGAEFQHHWLRARQKGRPVQPLEAYSYAVAAARARAFEFPNEDPGSIRSTFSYAYHFDAGLYAEFLRRWATERGVTRIEGEVAYVARDPGTGDIAALVLESGERIAGDFFVDCSGFRSLLLGQTLGVGWQDWSKWLPCDRAWAVPSARAEDFTPFTRATARKAGWQWRIPLQHRTGNGYVFSSGFIGEEQARDDLLSRLDGALVAEPRLLRFQAGRRLEGWRGNCVAIGLASGFLEPLESTSIFLVQTAVHDLVTLIPACGSARAEPRLAAEFNRLFALQYDRVRDFLVLHYAANRRVGEPLWDHVRSMTLPDTLMHKIALFEARGTVPNYQYGLFARDSWLSVLIGQGIEPRAYDRLADALDLDDVEARLDDYASRIALNVGAMSSHDDFVRSYCPADKGAVA

SEQ ID NO: 89207 - protein, 505 aa, unidentified
  source 1..505: note = Sphingomonadales bacterium
  REGION 1..505: note = tr|A0A4Q5S5J4|A0A4Q5S5J4_9SPHN Tryptophan 7-halogenase OS=Sphingomonadales bacterium OX=1978525; GN = EOP62_00805 PE=4 SV=1
MTAPQPIRSIVIVGGGTAGWMAAAAFSRLIRTGVKVTLVESDAIGTVGVGEATIPPIRNFNGLLGIDENDFLAKTQGTIKLGIEFVDWTHEGHRYAHPFGEFGFDIEGVKFHQFWRKLRESDAATGIEDYNLCAMAMRLGRYAPPSPDPGSILSRMAYAYQFDASLYAAYLRDYAEKRGVVRHEGKVIDVPVRGEDGHIEAVVLEGDRRIEGELFIDCTGFRALLIEQTLGAGWESWAHWLQCDRAVAVPCEAPDGSITPYTRSTARTAGWQWRIPLQHRIGNGYVYCSGDISDDDARETLLANIDGKSLRDPIMLKFEAGRRKLAWHKNCVALGLSSGFLEPLESTSIHLIQTGISKLMALLPDAGFSPVERDEYNRLTDVQMEQVRDFIILHYHANERKDGDLWRRVREMEIPETLSRKLDLFRNRGRFFRYDDELFAESSWIAVMLGQGVYPAGWDPLADALDPAQIRHTLDRIKAMFAQTAQSMPRHEEWLARHALARSFA

SEQ ID NO: 89208 - protein, 518 aa, unidentified
  source 1..518: note = Sphingomonadales bacterium
  REGION 1..518: note = tr|A0A4Q3AL13|A0A4Q3AL13_9SPHN Tryptophan 7-halogenase OS=Sphingomonadales bacterium OX=1978525; GN = EOP58_07130 PE=4 SV=1
MAVAVSRIVIVGGGTAGWLAACLIAARADPAASPPLQVTLIESPDIPTIGVGEGTWPTMRHTLERIGLSEADFLLACDASFKQGSRFDGWRTGAPGDFYYHPFTAPADGDARALVAAWQAGGGTFAEAVGAQARIAALDLAPRQRAMPDYAGALNYAYHLDAAKLAGLLSRNAVQRLGVRHIRDHVVAVERADDGDLAAVRTREHGAIAGDLFIDCTGHAALLIGEQLGVPFVDRSDVLFNDSALAVQVPVAPGSPIASQTNATAHAAGWIWDIGLPERRGVGCVYASRFMGDEEAAETLAGYLRATAPDADLAALSFRRLTFRSGHRERFWERNCLAVGLSAGFLEPLEASAIVLAELSLEALLDNFPATRASMDTHARRFNTRFRYRWDRIVEFLKLHYVPSERDQPYWRAHRDPATIPPRLAELLALWRDQPPSPTDLPMADEVFPAASYQYVLYGMGFAPPAPGAIRADGTDSARAQIGQAEQRGRALAASLPSNRAYLDALRAEHSSGKRMAE

SEQ ID NO: 89209 - protein, 478 aa, unidentified
  source 1..478: note = Sphingomonadales bacterium
  REGION 1..478: note = tr|A0A4Q5TD30|A0A4Q5TD30_9SPHN Tryptophan 7-halogenase OS=Sphingomonadales bacterium OX=1978525; GN = EOP59_00460 PE=4 SV=1
MSDGPIRSVCVVGNGIVALSAAAAFARALPGVALHIVETPPDPTALADTPCASLPSIHHFHAAIGLDEAALLGEGAATHLLGTRFAGWSASGSPWIHAFGEHGLNAGEVPFHMLWHRARIAGRAAPFHCHSAAATLAAADKFVHPSADPASPLAGFLYGLRLERVAYGNRLGTLTADIPHRTFLAAERDMRGIAALRLTDGTAITADLYLDCTGPQALLRASLDPEFEPWDAWLPCDHIRFGAGSDAPLSPLDRVEAQPNGWRRTSSRPGHVRTVQAWSSRFADTGQEPAVIAIRPGRRPCPWAGNVLALGDAATALDPLYGAPLHLAQAGILLALELLPGRGNSPIALAEYNRRFAEEALGVRDFLALHYVRSGRSEPFWTEAAGQKLPASLARIVEQFERRGRIPPSEAEGVDRESWIAALIGLGVEPGTVNPLADSVDPDKAAAAIDALAGRIAAIPAGVPPYPEYLARMRAGGR

SEQ ID NO: 89210 - protein, 525 aa, Erythrobacter sp.
  REGION 1..525: note = tr|A0A2D5F217|A0A2D5F217_9SPHN Tryptophan halogenase; OS = Erythrobacter sp. OX=1042 GN=CL948_02990 PE=4 SV=1
  VARIANT 5: note = Xaa can be any naturally occurring amino acid
  VARIANT 7: note = Xaa can be any naturally occurring amino acid
  VARIANT 9: note = Xaa can be any naturally occurring amino acid
  VARIANT 78: note = Xaa can be any naturally occurring amino acid
  VARIANT 96: note = Xaa can be any naturally occurring amino acid
  VARIANT 101: note = Xaa can be any naturally occurring amino acid
  VARIANT 264: note = Xaa can be any naturally occurring amino acid
  VARIANT 290: note = Xaa can be any naturally occurring amino acid
  VARIANT 368: note = Xaa can be any naturally occurring amino acid
  VARIANT 425: note = Xaa can be any naturally occurring amino acid
MTASXRXDXGQAQAIGSICIVGGGTAGWSAAALLSQVLRGSGCRITLVESSAIPTVGVGEATIPPIFDFLRNIGADEXEFIRRCQATFKLGIQFRXWLHHXHAYWHPFGNLGVTINQRPFHHYYCMNRAAGHGETLADLCPSVALAEDGKFAFPSPDGQWPGGAVAYALHFDAGLVAAFLRDHAVAAGVERLDRRIVGATRGEGERIAAVQFDDGESLEADFYIDCSGFRGLLIEETLGAGFEDWKHWLPCDSAVAAPTAAQEXRAPYTVATARSAGWQWRIPLQHRTGXGLVYASDFISDADAQAQLLAGLDGEPQADPRVLRFTAGLRKRAWVGNCLAIGLSAGFLEPLESTSIHLIHTGLNRLLXLFPDRRFDPALIAAYNRDVHREYAHIRDFLLLHYVPNRREGEPFWDHMRGLDLPDTXAEKIELFTRTGRIMSRQRELFSDISWFYVMHGMGLTPAALDPLAEAAPFGEVRKVIDQLRGAMQAFRSAAPTHDAILDRLLDPAETRRPQFGTGGGWTTR

SEQ ID NO: 89211 - protein, 434 aa, Caulobacter sp.
  REGION 1..434: note = tr|A0A259IGQ1|A0A259IGQ1_9CAUL Tryptophan halogenase (Fragment) OS=Caulobacter sp. 39-67-4 OX=1970332; GN = B7X77_08665 PE=4 SV=1
LGIDEATFMRETQSTFKLGISFENWGQIGDRYIHSFGQVGKSTWMGGFHHFWLQARAQGFGGELGDYCFELKAAEADRFFTDENATTNYAYHLDATLYGRFLRKMSEGKGVRRLEGKIARVQQRAEDGFIEALVMESGEIVEGDLFIDCTGFRGLLIEQTLKAGWEDWSHWLPTNSALAVQTTSTEPAVPYTRAIAHKAGWRWKIPLQHRVGNGLVYCSDHMSDDEARALLLREIDGEPLIEPRVIRYGAGRRRKTWSKNCVALGLASGFVEPLESTSIHMIMIGVTRLMQLFPFGGVNDALIERYNRLAEDELEKIRDFIILHYKATERSDSPFWDYCRTMDIPDSLAQRIDLFRENAQVFQAPGELFQVDSWLQVLLGQRVEPRSHHHMGRMMPPDQLRQALDSLKGNIARAVEGMPSHQAFVDRYCAAWST

SEQ ID NO: 89212 - protein, 509 aa, unidentified
  source 1..509: note = Sphingomonadales bacterium
  REGION 1..509: note = tr|A0A4V1SD96|A0A4V1SD96_9SPHN Tryptophan 7-halogenase OS=Sphingomonadales bacterium OX=1978525; GN = EOP63_07460 PE=4 SV=1
MNEAIERVVIVGGGTAGWLAACLLASARRAAKLDVTLIEAPDIPTIGVGEGTWPTMRATLSAIGIGEAEFLAACDGSFKQGSRFDGWVTGAEGDRYLHPFTSPPAAPTAELLAAWQAGAPDLPFAAAMTAQTHVCASDLAPRQRAMPDYQGAANYAYHLDAGKFAALLAGHAVQRLGVRHISDHVVGVARDDDGAIASVATRHNGDIAGDLFIDCTGHAALLIGNHLGVEWIDRSDTLFNDRALAAQVPVAPGSPIASQTVSTAHAAGWIWDIGLPGRRGIGCVYASRFMDDDMAEATLRAYIARVLPDAPDVPARRLTFPTGHRARFWEGNCIAVGLSAGFIEPLEASAIVMIELSLKALIDNFPARRAAMPIHADRFNDLFRYRWDRIVEFLKLHYALSRREEPYWLAQRDPAHLPPRLSEMLQLWRDQPPSAWDFPRVDEIFSAESHQYILYGMGYPVPADLPSSERAAALLAENRQRARALAAALPANRDYLDALAPDPHSAAAR

SEQ ID NO: 89213 - protein, 525 aa, Erythrobacter sp.
  REGION 1..525: note = tr|A0A3D2LLK2|A0A3D2LLK2_9SPHN Tryptophan halogenase; OS = Erythrobacter sp. OX=1042 GN=DHV64_16700 PE=4 SV=1
MTASTRTDHGQAQAIGSICIVGGGTAGWSAAALLSQVLRGSGCRITLVESSAIPTVGVGEATIPPIFDFLRNIGADEIEFIRRCQATFKLGIQFRDWLHHNHAYWHPFGNLGVTINQRPFHHYYCMNRAAGHGETLADLCPSVALAEDGKFAFPSPDGQWPGGAVAYALHFDAGLVAAFLRDHAVAAGVERLDRRIVGATRGEGERIAAVQFDDGESLEADFYIDCSGFRGLLIEETLGAGFEDWKHWLPCDSAVAAPTASQEQRAPYTVATARSAGWQWRIPLQHRTGNGLVYASDFISDADAQAQLLAGLDGEAQADPRVLRFTAGLRKRAWVGNCLAIGLSAGFLEPLESTSIHLIHTGLNRLLDLFPDRRFDPALIAAYNRDVHREYAHIRDFLLLHYVPNRREGEPFWDHMRGLDLPDTLAEKIELFTRTGRIMSRQRELFSDISWFYVMHGMGLTPAALDPLAEAAPFGEVRKVIDQLRGAMQAFRSAAPTHDAILDRLLDPAETRRPQFGTGGGWTTR

SEQ ID NO: 89214 - protein, 499 aa, unidentified
  source 1..499: note = Sphingomonadales bacterium
  REGION 1..499: note = tr|A0A4Q2ZRB7|A0A4Q2ZRB7_9SPHN Tryptophan 7-halogenase OS=Sphingomonadales bacterium OX=1978525; GN = EOP60_09250 PE=4 SV=1
MSENRLRRVVIAGGGTAGWMAAAAIARTMGRAVGLTLVESDAIGTIGVGESTIPPLVNYNRLLGINEADFMRATQATFKLGILFDNWKEPGHRYFHSFGITGKDHWSAGFQHFWLAAREKGLAASYDDYCLELVAALKGKFAHLPDDRMNYAYQLDSGLYAKFLRTMAEGDGAKRVEGKIAQVELDGETGDIAALVLESGERVEGDLFIDCTGFRAVLIEQALHAGFDDWTHWLPCDSAIAIQTASVAPAVPYTRAMAHDAGWQWRIPLQHRVGNGIVYCSRYLDHDTALERLLGNIEGETLVPPNKLRFVTGARRKQWHRNCVAIGLSGGFMEPLESTSIHLIQRAVLRLIRMMPLREISQRDVAEFNDQQFQDMEQIRDFLILHYKATDRRDSPFWRHCESMAIPDTLAQKMELFRETGRVFRRNDELFAENSWVQVMMGQGIEPRAWHPIAEKLRDEELAKLMTTIAENVSRTVDGLPAHADYVAQYCGIARAAAA

SEQ ID NO: 89215 - protein, 501 aa, Erythrobacter sp.
  REGION 1..501: note = tr|A0A2D8MJU0|A0A2D8MJU0_9SPHN Tryptophan halogenase; OS = Erythrobacter sp. OX=1042 GN=CL949_22275 PE=4 SV=1
MRTATTPRRIVIAGGGTSGWMAAAALARTMGDTIELTLVESDAIGTVGVGESTIPPLVKYNQLTGIDEAEFMRETNATFKLGIEFENWKTDGESYFHSFGATGKDHWSAGFQHFWMHGLTQGHEHSYDDYCLELAAAHAGKFAILPDNRINYAYQLDATAYARFLRRKAESFGATRREGKIAAVELDSESGDIAALTLESGERIEGDLFVDCTGFRALLIEGALHVGYDDWSHYLPNDRAIAVQTESVRDPVPFTRAIAHEAGWQWRIPLQHRQGNGIVYCSRYMSDDEAEARLLSTVEGATCSTPNRLRFTTGARRKQWHRNCVAVGLSSGFMEPLESTSIHLIQRAVLRLIRMLPSGERVSQRDIDEFNDQQLTDMDQIRDFLILHYKVTQRRDSPFWRQCAAMEIPDSLTQKIELFRETGRVFRKNEELFAENSWVQVMMGQGLMPETYHPVATKMSSEELDRFLGTLRSNVARTVAGLPEHHAFVKRYCGAKQAEAA

SEQ ID NO: 89216 - protein, 395 aa, unidentified
  source 1..395: note = Sphingomonadales bacterium
  REGION 1..395: note = tr|A0A4Q3DDE4|A0A4Q3DDE4_9SPHN Tryptophan 7-halogenase (Fragment) OS=Sphingomonadales bacterium; OX = 1978525 GN=EOP61_03620 PE=4 SV=1
MTAPQPIRSIVIVGGGTAGWMAAAALSRLVRTGVRVTLVESDAIATVGVGEATIPPIRNFNGLLGIDENEFLRRTQGTIKLGIDFQGWTHEEDRYFHPFGEFGFDIEGVKFHQFWRKLHETGAASGISDYNLCAMAMKLGRYQPPSNDPGSVFSRMAYAYQFDASLYAAFLRDYAEQRGVVRQEGKVVQVPVRGEDGHIEAVMLEGDRRIEGELFIDCTGFRALLIEQTLGAGWESWAHWLQCDRAVAVPCAAPDETITPYTRCTARTAGWQWRIPLQHRIGNGYVYCSGDISDDAARETLLANLDGKPLRDPFMLKFEAGRRKLAWHKNCVALGLSSGFLEPLESTSIHLIQSGVTKLMALLPDAGFSSVERDEYNRLTDIQMAQVRDFIILHY

SEQ ID NO: 89217 - protein, 538 aa, Burkholderia pyrrocinia; identical to SEQ ID NO: 87078
  REGION 1..538: note = tr|A0A318J024|A0A318J024_BURPY Tryptophan halogenase; OS = Burkholderia pyrrocinia OX=60550 GN=NA66_1001515 PE=4; SV = 1

SEQ ID NO: 89218 - protein, 493 aa, unidentified
  source 1..493: note = Sphingomonadales bacterium
  REGION 1..493: note = tr|A0A4Q2ZCQ7|A0A4Q2ZCQ7_9SPHN Tryptophan 7-halogenase OS=Sphingomonadales bacterium OX=1978525; GN = EOP60_14205 PE=4 SV=1
MSAVRRVVIAGGGTAGWVAAAALVKQLGPLLDITLIESDEIGTVGVGESTIPTSRSFHQLLGIDEQIFMRETQSTFKLGIAFENWGKVGDRFIHSFGEIGRKSTWIAPFHNFWMEARKQGFGGSLDDYCFELKAADAERFATGEGATINYAYHLDATLYARFLRKLSEPAGVRRVEGKIATVERDPESGFITALAMESGARVEGDLFLDCTGFRGLLIEETLETGYEDWTHWLKTDSACVVQTESVGPPVPYTRAIAHEAGWRWQIPLQHRVGNGLVFASEHMSADEAKAKLLDGIQGKPLFDPRLIRFRTGRRRKVWNGNCVALGLASGFIEPLESTSIHLVKVAIMRLIQSFPFGGISEAVAERFNENSRQEIENIRDFIILHYHLNQRDEPFWKRCREMDVPESLKQRIAAFRDGAEAYQDGIDLFRVDSWVQVLMGQGLEPRSYHALARMMPAAELRQALAGLKANIEKAVGELPTHQAFLQSYCPAAE

SEQ ID NO: 89219 - protein, 471 aa, Sphingomonas sp.; identical to SEQ ID NO: 82654
  REGION 1..471: note = tr|A0A430E3Z8|A0A430E3Z8_9SPHN Tryptophan halogenase; OS = Sphingomonas sp. ABOLH OX=1985881 GN=CA237_14270 PE=4; SV = 1

SEQ ID NO: 89220 - protein, 518 aa, unidentified
  source 1..518: note = Alteromonadaceae bacterium
  REGION 1..518: note = tr|A0A2E6SM41|A0A2E6SM41_9ALTE Tryptophan halogenase; OS = Alteromonadaceae bacterium OX=1916082 GN=CL590_05390; PE = 4 SV=1
  VARIANT 85: note = Xaa can be any naturally occurring amino acid
  VARIANT 98: note = Xaa can be any naturally occurring amino acid
  VARIANT 145: note = Xaa can be any naturally occurring amino acid
  VARIANT 197: note = Xaa can be any naturally occurring amino acid
  VARIANT 234: note = Xaa can be any naturally occurring amino acid
  VARIANT 242: note = Xaa can be any naturally occurring amino acid
  VARIANT 270: note = Xaa can be any naturally occurring amino acid
  VARIANT 305..306: note = Xaa can be any naturally occurring amino acid
  VARIANT 318: note = Xaa can be any naturally occurring amino acid
  VARIANT 333: note = Xaa can be any naturally occurring amino acid
  VARIANT 338: note = Xaa can be any naturally occurring amino acid
  VARIANT 369: note = Xaa can be any naturally occurring amino acid
  VARIANT 371: note = Xaa can be any naturally occurring amino acid
  VARIANT 457: note = Xaa can be any naturally occurring amino acid
  VARIANT 491: note = Xaa can be any naturally occurring amino acid
  VARIANT 493: note = Xaa can be any naturally occurring amino acid
  VARIANT 505: note = Xaa can be any naturally occurring amino acid
MTSASQPVRKVVIVGGGTAGWLTAGRIVAEHATKAHHPVEVVLVESPNIPTIGVGEGTWPTMRNTLIKLGIRETDFIRECDASFXQGAKFAGWVTGDXDDFYYHPLMLPQGFSQGNLGPYWQQHQDTIEQSFSNAVCFQEALCEXNRAPKSIRHAEFGAVANYAYHLDAGKFTSFLTRHCTEKLNVRHVLADVTGVXAHDNGDIRAIQTQQAGEVDGDLFVDCTGFQSLLLGKXYKVPFVPXDDVLFIDRALAVHVPYDSPDAPVATHTXSTAQQAGWIWDIGLQSRRGVGHVYASRYQSEQQAXXQLAQYVGPQFNXLSVKQIQIQSGHREXFWHNXCVAVGLSAGFLEPLEASALVLVELSATMLAXQXPVNRATMPIIAKRFNQTFQYRWQRIIDFLKLHYMLTKRTDTAFWRDNCDPATIPDSLQELLDLWRYHPPYDHDFTSNNEVFPAASXQYVMYGMGFESDLSFGQQQVAQAFAQQQLQMNQXAXQKVLSALPTHRXLLNKINQYGLQPV

SEQ ID NO: 89221 - protein, 236 aa, Erythrobacter sp.
  REGION 1..236: note = tr|A0A3D4M2B9|A0A3D4M2B9_9SPHN Tryptophan halogenase (Fragment) OS=Erythrobacter sp. OX=1042 GN=DIW45_14625; PE = 4 SV=1
MTERAQAIRNVVIVGGGTAGWMTAAALARLLGGTGLAITLVESAAIGTVGVGEATLPQIRRFNSLLGIDEREMMARTAATIKLGIEFRDWGRVGDSYIHPFGRFGQEIGPASFVEYWARAHARGMVAPIGQYCLPIMAALQGRFEPPDASGSRQPYDYAFQFDAGLYAAWLSELAQSAGVVRREGRIVDVARDSESGAISAVSLEDGAAIRGDLFIDCSGFRALLIGETLETSFED

SEQ ID NO: 89222 - protein, 514 aa, Sphingomonas sp.
  REGION 1..514: note = tr|A0A345WPI2|A0A345WPI2_9SPHN Tryptophan halogenase; OS = Sphingomonas sp. FARSPH OX=2219696 GN=DM480_08710 PE=4; SV = 1
MTHAEAASHPNPPIKTITIVGGGTAGWMTAALLSRLFLGAYTIRLIESEEIGTIGVGEATIPAIRTFNGLAGIDEFDFARATQATFKLGIEFRNWGGIGDSYVHGFGKIGQDLYWLHCHQFWLKARAAGRAKHLDLYALNTLAARMNRFALPDPSNPHSPMADLDYAYHFDASLFARFLRGRAEAAGVTRIEGRIVAANRRGHDGFLDHVVLADGRTVDGDLFVDCSGMRGLLIGDAMGIGYEDWNQWLLCDRALAVPSARGPGPLTPYTRSTAHAAGWQWRIPLQHRTGNGHVYASQFVSDDAAADTLRAHLDTPALGDPRPVRFRPGKRHRAWEKNVVALGLAGGFLEPLESTSIHLIQTGILRLIALFPGRGFNAADIDEYNRQTDFEYRDVRDFIIAHYKVTERDDSEFWRYLKAMDVPDSLTERLDLFRASARFFMHGKAELFREESWVQVLLGQRLEAAYDPMVDMIPAQEANAFLRDVEDVVADVARGLPTHEAFIARHCQAPATAA

SEQ ID NO: 89223 - protein, 374 aa, unidentified
  source 1..374: note = Sphingomonadales bacterium
  REGION 1..374: note = tr|A0A4Q5SN93|A0A4Q5SN93_9SPHN Tryptophan 7-halogenase (Fragment) OS=Sphingomonadales bacterium; OX = 1978525 GN=EOP59_13835 PE=4 SV=1
IQNRVAEQRRAPKRPDEEAFSAPLNYAYHFDAVKLAEVLRERAVELGVTHLRGLLTDTALTADGAIDHIVSREHGRLDADLYVDCSGFRAELIGKALQSPFKSVGDVLFTDRALACRIPYAKRDAPIESFTIATAHRAGWTWDIGLEGGRGIGCVYSSRHMSDDEAAQVLRSYIGHDEFTPRSVPFEPGYRPRQWIKNCVAIGLSGGFVEPLESTGVVLIEAAAGMVAEMFPHNGPVEAPARRFNELIAARYDNIVNFLKLHYCLSRRTEPFWRDNVDPASIPERLHELLEQWRYRPPSRFDFILDLETFAFFNYQYILYGMEFATDPGRLDFPNTAEAAKLFARIRTFSERAAEDLPSHRALIAQINAGVLAS

SEQ ID NO: 89224 - protein, 435 aa, Caulobacter sp.
  REGION 1..435: note = tr|A0A259IVB2|A0A259IVB2_9CAUL Tryptophan halogenase (Fragment) OS=Caulobacter sp. 39-67-4 OX=1970332; GN = B7X77_02955 PE=4 SV=1
RFNDWAWAPRADGQRHRYFHPFEAPFSTDGTSLTPYWLLQDEATRAPFAEAMTIQARVAEAQRAPKRPHEGNFSGPLNYAYHFDAAKLANVLAERARELGVRHLQGLLTGVALDETGAIASVSCQQHGTLEADLYIDCTGFRAELIGQALNSPFKSVRSTLFADRALACKIVQDGPETPIQSFTVATAHQAGWIWDIGLNGARGVGCVYSSDHMADDQAEAALRGYVGDGVEITPRSLAFDAGYRQKPWIKNCVAVGLSAGFLEPLESTGVVLIEAAVAIIAELFPHNGPIAAPARRFNELMTARYDNIITFLKLHYCLSQRTEPFWRDNVDEASIPERLIDLLEQWRYRPPTRYDFTLDLETFAFFNYQYILYGMGFKTDLSPGRAEFPDVAGAEKLFAKIRGFGERATHDLPSHRDLIAQINQFGFDRSLEPA

SEQ ID NO: 89225 - protein, 504 aa, unidentified
  source 1..504: note = Sphingomonadales bacterium
  REGION 1..504: note = tr|A0A5C7JSJ2|A0A5C7JSJ2_9SPHN Tryptophan 7-halogenase OS=Sphingomonadales bacterium OX=1978525; GN = E6R12_04245 PE=4 SV=1
MADNPRLLTRICIAGGGSAGWMTAAALSAALGHRCRIELVESEEIGIVGVGEATIPPIKLFNQQIGVDEAAFLRATHGTIKLAIEFVGWGDTHSRYPHPFGAYGAAFDRAPVFQHWLAAHLAGAPEPLEDYSFAWALARAGRFSPLAEDPRRIQSTHDYAYHFDAMLYGRFLRSVCEPRGVVRTEGRIEVVERNGESGDVTALILADGRRVEADFFVDCTGFRGLLIEEALGTGYEDWRYLLPCDRAVALPTARTEPPSPYTRATAHAAGWQWRIPLQHRTGNGLVYASDHLSDDAAAAALLAAVEGQPLAEPRFLRFTTGRRRQAWNRNVVAIGLAAGFLEPLESTSLHLIQTGVTRLLALLPERGPDPLAQAEYNRITAEEYERIRDFLVLHYHANRRPEPFWQARAQTPPPERLQWKLDHFRQFGRVVSEGPELFANTAWTAVMIGQGVLPQSPEPLVRLRGDEDARRILPSLRRTIADTVAQCPEHLTWLEHIGALSARA

SEQ ID NO: 89226 - protein, 318 aa, unidentified
  source 1..318: note = Alteromonadaceae bacterium
  REGION 1..318: note = tr|A0A2D9KAM9|A0A2D9KAM9_9ALTE Tryptophan halogenase (Fragment) OS=Alteromonadaceae bacterium OX=1916082; GN = CL582_02160 PE=4 SV=1
MNQPDKQHVVIAGGGTAGWMAAAAISRLLHGRVEVTLVESSDIGTVGVGEATIPTLLFFHKLLKIDEQAFMAATNATFKLGINFENWRSLNHAYLHAFGATGKDCWAAGFQHFWRRGLDLGLSEDFGQYCLERVAAEAEKFAHLPGNGLNYAFHIDATRYAGFLRELAGQAGVTRIDATIERVNVREQDGFIESLTLNNGQTLSGDLFIDCTGFRGLLIEKALHTGYEDWSQWLLCDSAVAMQTESVEAPLPYTRCIAREAGWQWRIPLQSRVGNGLVYCSNYLSDERATEILQQNINGNPLNSPRVIKFRPGRRLKQ

SEQ ID NO: 89227 - protein, 482 aa, Erythrobacter sp.
  REGION 1..482: note = tr|A0A3B9ULV6|A0A3B9ULV6_9SPHN Tryptophan halogenase; OS = Erythrobacter sp. OX=1042 GN=DCL34_10305 PE=4 SV=1
MAAALLARFLPPDYRVELVESESIGTVGVGEATIPQIRHFNQALGIDEAEFLRETKGSFKLGIAFDGWRGEGHSYMHAFGPVGQSLGLIAFRHYWLRAKALGHAKDLAHYSPNEIAARNLRMPGPGGADLPYAYHFDASLYAAFLRHYAETRGALRTEGTIERVERDGETGDIAALVLDGDRRLEADFFIDCTGFRALLIEGAMGAGFDDWSNLLPCDRALAVPCASGGDFTPYTRAIARKAGWQWRIPLQHRIGNGYVFSSQFCSEADAADTLLANLDGSPDGDPRLLSFTTGKRRRQWVGNCLGLGLAAGFMEPLESTSIHLVQSALARFLRLLPAGRATPSTIDHFNAQADFEWSRVRDFLVLHYWANGREGEPFWDAMRALGPPATLKCKIDQWRDTGHIHREHEELFTEVAWFQVFAGQGVSANHYNPLADAMAEHDLRDFLASQERQLEQAAAAMPHHADTLGRLMARPAKRNTAA

SEQ ID NO: 89228 - protein, 505 aa, Caulobacter sp.; identical to SEQ ID NO: 84337
  REGION 1..505: note = tr|A0A259IPT1|A0A259IPT1_9CAUL Tryptophan halogenase; OS = Caulobacter sp. 39-67-4 OX=1970332 GN=B7X77_04760 PE=4; SV = 1

SEQ ID NO: 89229 - protein, 514 aa, unidentified
  source 1..514: note = Unknown
  REGION 1..514: note = tr|A0A2D6YMC2|A0A2D6YMC2_9DELT Uncharacterized protein OS=SAR324 cluster bacterium OX=2024889; GN = CMN54_13010 PE=4 SV=1
MNKNSSSSEKKIVVLGGGTAGWLSAFLLQDYCRKQELSVGVTVIESSKIPMIGVGEGTTAIFKTFLDSFGLEEAEFLRETRGTIKYGIRHKDWRKLGHYYDGPIDDPHFLIPPVGEDGFEYLNSYCVAAGHSVSETHLFQILLSKGLAPVKAKKNQLISNHPFLHAYHIDNALVGQYLLKKSKGIRIVDGVVEEAIRDSETGHILSLKMDDGDLIEGDFFIDCSGFRRILIEKTLGNKWVDYSAELPVNRAMPFFLNHDTAKEIPTYTLAWAQKCGWMWQIPTQNRLGCGYVYCDEYCNPEQAQEEIESVLGHSIEPRQDLRFQVGRLKDSWRHNCVAVGLSAGFLEPLEATSIHSTLVQLILFAKEYLSAGLNGDYSGREDFNQRIAHQFDDFRTFLNIHYVSERRDTPFWEFVHQECLGEESIDRLQQWEKSLPKREHFHGFLSGLPHVETQLYFPVLDGLGLLSQVAARQEMSKRNLKRQAQEELKRLHSKYKEMTKGSLGHREYLLMVSA

SEQ ID NO: 89230 - protein, 495 aa, unidentified
  source 1..495: note = Sphingomonadales bacterium
  REGION 1..495: note = tr|A0A5C7JTA2|A0A5C7JTA2_9SPHN Tryptophan 7-halogenase OS=Sphingomonadales bacterium OX=1978525; GN = E6R12_06610 PE=4 SV=1
MAEQRIRRVVIAGGGTAGWLAAAALSRQLGQMLDLTLVESEEIGTVGVGEATIPTIRAFHAILGLDEREFMRETLATFKLGISFENWAREGDRYIHSFGEVGRSTWMGDFQHFWLEARAQGIADPIGDYCLEHAAAEKGCFAIPSEGEISYAFHLDAGRYARYLRRRAEADGLRRVEGRIVDVERDGQTGDIAALRLDNGARVEGDLFLDCTGFRSLLIAQTLGVGYEDWTHWLPADRALAVQTATTAPAPPYTRAIAHDAGWRWRIPLQHRDGNGLVYSSRHLSDDAARERLLAAVEGETLIEPRLIRFQTGRRDRVWERNCIALSFASGFVEPLESTTIHLTMIGLSRLMQVFPFAGIQPSIVQRYNEQARNELERVRDFIVLHYHLNERPDPFWRACRETPPPESLQERIALFREAALAYQAGDDLFRVSSWLQVMLGQRLEPQAYHHMARIMGPERLAQALGNMRRAIADTVETMPAHQDFLNQYVQGAAA

SEQ ID NO: 89231 - protein, 68 aa, Erythrobacter sp.
  REGION 1..68: note = tr|A0A3D2E7K4|A0A3D2E7K4_9SPHN Tryptophan halogenase (Fragment) OS=Erythrobacter sp. OX=1042 GN=DFK13_08250; PE = 4 SV=1
SICIVGGGTAGWSAAALLSQVLRGSGCRITLVESSAIPTVGVGEATIPPIFDFLRNIGADEVEFIRRC

SEQ ID NO: 89232 - protein, 472 aa, unidentified
  source 1..472: note = Sphingomonadales bacterium
  REGION 1..472: note = tr|A0A4Q5T0V9|A0A4Q5T0V9_9SPHN Tryptophan 7-halogenase (Fragment) OS=Sphingomonadales bacterium; OX = 1978525 GN=EOP59_11165 PE=4 SV=1
AITLIESEAVGTVGVGEATLPHIKAFNDALGIDEAAFMTATQATFKLGIEFRGWSAPGDSYIHPFGAFGAPWGGAEFQHHWLRAERHGRAVAPLEAYSYAVAAARARAFEFPNEDPSSIRSTFSYAYHFDAGRYAAFLRDWATERGVTRIEGQVARVERTAEGGNIAALTLQSGVRVAGDLFVDCSGFRALLLGETLGAGWDDWSDWLPCDRAWAVPSERAEDFTPFTRATARAAGWQWRIPLQHRTGNGYVFASRFLDEGQARDDALAGLDGAPLAEPRLLRFQAGRRREAWRGNCVAIGLASGFLEPLESTSIFLIQAAVHDLVTLLPSARGDTVDPRLAAEFNRLFALQYDRVRDFLVLHYAANSRVGEPLWDHLRTIKLPDSLSQKIALFEARGTVPNYQFGLFSRDSWLAVLIGQGVTPRGYDRLADALDLDDLEARLEDHASRIALNVGAMSSHAEFVRSYCAAAA

SEQ ID NO: 89233 - protein, 134 aa, unidentified
  source 1..134: note = Sphingomonadales bacterium
  REGION 1..134: note = tr|A0A4V1SD55|A0A4V1SD55_9SPHN Tryptophan halogenase (Fragment) OS=Sphingomonadales bacterium OX=1978525; GN = EOP63_09175 PE=4 SV=1
PALPAELNRVMDVEYDRIRDFLILHYIANEADAPLWERVRATDLPDTLAGKIERFRHRGHVQAYRDGLFGPPSWQAVFVGQGIEPLAADRLADTLPATTVNERLQNLVATIADAAASVPSHADFIARYCPAPAP

SEQ ID NO: 89234 - protein, 520 aa, Erythrobacter sp.
  REGION 1..520: note = tr|A0A2D8MB89|A0A2D8MB89_9SPHN Tryptophan halogenase; OS = Erythrobacter sp. OX=1042 GN=CL949_06610 PE=4 SV=1
MAVMQTSSPTTNGSAAPLNVAIAGGGTAGWMAAAGLARLTACKVTLVESDAIGTVGVGEATIPQIRLFNRGLGIDEAEFLRETKGTFKLGIEFDGWRKAGTSYMHAFGNVGAGAGLLPFHHLWLRGRELGSAKDFGAYSLNEAAARAGRMQMWPADKAPQPDMPWAYHFDATLYAAFLRRFAETRGVTRIEGRIETVERDGESGDIAALVIDGGRRIEADFYIDCTGFRGLLAGDMPGQGFEDWSHWLPCDRAIAVPCKTGGEFTPYTRAAAHTAGWKWRIPLQHRIGNGLVYCSDYLADDEAEAQLLADLDGEPLGDPRTMRFTTGMRRAPWSGNCLALGLAAGFMEPLESTSIHLIQSGIARFLSMLPRPGMEAAMAAEFNRQSGFEWSAIRDFLILHYAANERSGEPFWDRARAMDLPASLATRIELFRSTGYLSREHDELFTEAGWTQVLLGQGILPRATHPNADALDPAALERLLAGIESDIAETVGTMPGHAQFLRATCMPQTANRPAATKETA

SEQ ID NO: 89235 - protein, 503 aa, unidentified
  source 1..503: note = Sphingomonadales bacterium
  REGION 1..503: note = tr|A0A4Q3A697|A0A4Q3A697_9SPHN Tryptophan 7-halogenase OS=Sphingomonadales bacterium OX=1978525; GN = EOP60_00455 PE=4 SV=1
MAMGVPFRIVIVGGGTAGWMCAAACVARLDPKRYDVRLVESDEIGTVGVGEATLPQMKDFNDLLGVDEAEFMTATQATFKLGIEFVDWGHIGARYVHPFGQFGRPIGEAEFFHYWLRARETAGPLSDYCLAIAVGNANRFDFPAKNPAYAKASFSYAYHLDASLYARYLRKWSEAKGLKRIEGLVESVAQHPESGNVASITLASGDVIEGDLFVDCSGFRGLLIEQTLETGIEDWSHWLPCDRAMAVPCDRVGELVPYTRSTAREAGWQWRIPLQHRTGNGYVYASQFLSDDEAASLLLSRLDGAPQADPRALRFKACKRRKAWNRNVIAMGLASGFLEPLESTSIYLVQMAVAFLLTLMPEQAEIDPSLEREYNRVMDVEYDRIRDFLILHYRATTRDDAEIWRYCRAMAIPDSLSDKIERFRHRGHIREYRDGLFGPPSWQSVFIGQGVIPTGHDAMADLMPEAVLTERMASLRALIGNTAGAMPSHADTVLRHCDAGAAA

SEQ ID NO: 89236 - protein, 507 aa, unidentified
  source 1..507: note = Sphingomonadales bacterium
  REGION 1..507: note = tr|A0A4Q2YYQ8|A0A4Q2YYQ8_9SPHN Tryptophan 7-halogenase OS=Sphingomonadales bacterium OX=1978525; GN = EOP63_07475 PE=4 SV=1
MSDKKPVRVVIAGGGTAGWMMAAAIARTMGKTVDLTLVESEQIGTIGVGESTIPPLVNFNRILGIPEPEFMRATQATFKLGILFDNWKHDGDSYFHSFGLSGKDHWSAGFQHFWLNARERGHEQPYSDYCLELVAAMEGKFAHLPEDRMNYAYHVDATLYGRFLRKLAEADGCKRVEGKIARVELNGENGDIAALHLDGDRRIEGDMFVDCTGFRGLLIDGALHAGFEDWSHWLPNDSAIAVQAKHLGPPQPYTQAIAHDAGWQWRIPLQHRMGAGIVYTSGYLSRDEAYDRLMSSVGEPLIEPFDIKFKGGVRRKQWFRNCVAVGLAGGFVEPLEATTVHLIQRAVLRFIRLMPNGRVSERDAMEFNDQQRLDIEQIRDFVVLHYKATNRRDSPFWRHVANMPIPDSLQQKIELFRETGRVFRKYEELFAENSWVQVMMGQGIEPQSYHPIADKLRDDEVERLFQSIRDNIAQTVATLPEHHAYVARYCGPTAAGGSPGRTSSTAR

SEQ ID NO: 89237 - protein, 505 aa, Roseateles depolymerans
  REGION 1..505: note = tr|A0A2W5DK18|A0A2W5DK18_9BURK Tryptophan halogenase; OS = Roseateles depolymerans OX=76731 GN=DI603_17320 PE=4; SV = 1
MQDTQALVREVVIVGGGTAGWMAAAALSKLLRQQVSITVVESDEIGTVGVGEATIPMIQRFNQVLEIDENEFMRETQATFKLAIEFVNWGRVGDRYMHGFGRIGQPLNTVAFEHYWRKLHMAGRAADLADYSITRAAALKNRFMRPLADAGNSPLGEIAYAFHFDASLYARYLRRYAEARRVTRLEGRIVDASLSGLSGRVESLKLADGRSVPGQLFIDCSGFRGLLIEQVLRTGYEDWSHWLPCDRAWAVPCESVAPLTPYTRSTAHSAGWQWRIPLQHRTGNGHVFSSRFMAEDEAQRVLMSQLDGRPTAEPRLLRFLTGMRRQAWNRNVVSMGLASGFMEPLESTSIHLVQTAIARLIDFFPHTAFDQADIDEYNRLSRFEFERIRDFLILHYHANQRDDSEFWRYCREMPIPDTLAAKLALYQRNGRIVREGAELFAEVGWLQVLHGQNLRARGYHPLADLIAERETEAYLQGVREVIANCVEVMPTHQQFIAQHCAAPRG

SEQ ID NO: 89238 - protein, 496 aa, Rheinheimera sp.
  REGION 1..496: note = tr|F7NSD8|F7NSD8_9GAMM Tryptophan halogenase; OS = Rheinheimera sp. A13L OX=506534 GN=Rhein_0672 PE=4 SV=1
MQTPVKKLVIAGGGTAGWMAAALLKKVFASELDIELVESEDIGIIGVGEATIPPIQIFNQYLGLDEKEFLRETHATIKLAIKFENWRVQGESYYHTFGAPGAPLGVANFQHYWLRAKELGLTESLWDFDLNYLCCEQGKFNKIKTPNPVYDMPYAYHFDSALYGKYLRKLAEQSGVVRTEGLIEHIKQDAETGFVQALQLKNGREVTGDLFIDCTGLRGLLIRKTLGVAYEHWDQYLPANSALAVPTERFAHTLPYTRSIAHSAGWQWRIPLTHRNGNGIVYSSGYLSDDQAYQTLMSNLDSNTLAEPKKISFETGRTTEQWHKNVVAIGLSSGFLEPLESTSIHLIQSGIVRLMKMFPNRGISNAQISAYNAESKDEFETIRDFIILHYHVNERDDSDFWRDMRQMAIPHRLEEKLALFKETGAIFNDANDIFRDASWLQVMLGQGLLPADYHLAARAYPKEVLLQMMQQIRTAKQQPLTKLTSHDEFLALYARP

SEQ ID NO: 89239 - protein, 516 aa, Sphingomonas sp.
  REGION 1..516: note = tr|A0A369VTD0|A0A369VTD0_9SPHN Tryptophan 7-halogenase OS=Sphingomonas sp. WZY 27 OX=2283317; GN = DVW87_10640 PE=4 SV=1
MRQLQRILIAGGGSAGWMAAAMFARLFKGLYEITLVESDEIGTVGVGEATIPAIKKFNELLGLDEDEFVRRTQGSFKLGIQFNDWLRPGHSYVHGFGVIGQDLEWLRCHHYWLKMQAEGRADVFDRYSINTWAALANRFMRPRADMPDSPVGQIAYAYHFDAGLYAALLADYAEAWGVQRREGRIVDIAQDAETGYLRSVTLADGQVLEADLFIDCSGFRGLLIEQTLGAGYEEWSHWLPCDRAIAVPSERSADFTPYTRSTARPAGWQWRIPLQHRTGNGHVYASRYMDEAEAEAILFEHLDAPAAGEPRRLRFVPGKRRAAWVKNCVAIGLAGGFLEPLESTGLHLIQSAILRLVRLMPDAGFDPANIAEFNRQTDFEFERIRDFIILHYKATERGDTPFWRHVRDMEVPETLARKMALFAANGRIFREDDELFAEESWIQVLIGQGVIPRAPDPLVDVTPPAEIERYLANIAGVIEKCVALMPSHEAFVARHCAAPPIADLLASRDARAAVRR

SEQ ID NO: 89240 - protein, 153 aa, Erythrobacter sp.
  REGION 1..153: note = tr|A0A3D4M1E8|A0A3D4M1E8_9SPHN Tryptophan halogenase (Fragment) OS=Erythrobacter sp. OX=1042 GN=DIW45_14615; PE = 4 SV=1
IQSGILNLVELFPHTAIEETDRREYNRLMDLEFERIRDFLVLHYVANQHEEEFWQAMRAMPLPDSLSARIEDFRERAILPDYADGLFQPVSWISVFLGQNVVPRRWDPRADAMNADELGKRLAAIHSKIADDAAAMPLHLDFLERSGARYIDE

SEQ ID NO: 89241 - protein, 549 aa, unidentified
  source 1..549: note = Sphingomonadales bacterium
  REGION 1..549: note = tr|A0A4V1SEH8|A0A4V1SEH8_9SPHN Uncharacterized protein (Fragment) OS=Sphingomonadales bacterium; OX = 1978525 GN=EOP60_15890 PE=4 SV=1
MDDTGNNSVVIVGGGTAGWMAAAALSRYFNDGRRTVTLVESDLIGTIGVGEATIPPIRSFNGMLDIPENEFLRETRGTFKLGIEFVNWGQQGDRYFHPFGGHGQDLHGIAFHQLYLRERARTDTTPEIAAYSMSSVAASARSFGRPGPGAALPLSELGYAFHFDAGLYAAYLRRLAERQGTIRREGRIVRVERDGESGDVAAVILENGSRIEGDLYLDCSGFRGLLIEEAMQAGFEDWSDWLPMDSALAMPTANVGSPDPFTRSTAHGAGWQWRIPLQHRTGNGHVFSSRYMDAAEAERILRDHAEGEVLAEPRLLRFTTGMRREAWVGNVVALGLSSGFIEPLESTAIHLVQNGIQRLFALFPEGRVNPLEREEYNRGMRTLYEDVRDFVILHYKATQRDDTPFWRHVRDMAVPESLARRMELWRLHGRVFRENAELFTLPSWVAVMLGQNIWPERHDPIVDTLDPDKVAGAMAQMREGYRRRGTLAEPGSIPAPGRRVARVRSVGDFRVTGRPIRKIVIVGGGTAGWMAAAALSRIIGAMPGLTITL

SEQ ID NO: 89242 - protein, 517 aa, Erythrobacter sp.
  REGION 1..517: note = tr|A0A3B9ULL9|A0A3B9ULL9_9SPHN Tryptophan halogenase; OS = Erythrobacter sp. OX=1042 GN=DCL34_07615 PE=4 SV=1
MSGEFTNLVIVGGGTAGWLSACILAARRPELAITLIEAPDIPTVGVGEGSWPTLRETLAVIGIDETEFLTECDASFKQGSRFDGWVDGSERDCYYHPFSAPLSGAMPDILTAWKMQNDGQPYAEAVNPQAAICNRDLAPRQRTMPPFAGALNYGYHLDAGKFGALLASHGIKKLGVRHVHGKVTRTERGVDGLFTRLLLDNGSAIEGDFFIDCTGMASKLMGEELGIGWVDRSNVSFNDRALAVQVPVVPDSAIASQTIGTAHRAGWLWDIGLPTRRGVGCVYSSGFLSDDEAQAILMNYIGSRIAGAEQTALTPRGLKFSTGYRDKFWEGNCLAIGLSAGFIEPLEASAIVLIELSLKALADGYPQSRTALPRLADRFNSLFRYRWERIVDFLKLHYVLSTRTEPYWQAQRDPATIPSSLAAHLDLWRDHAPSSGDFPQIDEIFSAASHQYVLYGMRFPQPADISSAPSSEVQRQFAKVAERSRALSAALPSNRAYFDALCSSMDKNSARGVPTRQ

SEQ ID NO: 89243 - protein, 484 aa, unidentified
  source 1..484: note = Sphingomonadales bacterium
  REGION 1..484: note = tr|A0A4Q5SQT2|A0A4Q5SQT2_9SPHN Tryptophan 7-halogenase OS=Sphingomonadales bacterium OX=1978525; GN = EOP59_13075 PE=4 SV=1
MAASALARFLPGVADVRLIESEEIGIVGVGEATLPHLRAFLQRLGIDEAEMMRATNATYKLGIDFRDFGRLGDRYVHPFGAYGVDLAGVGFHHYWLRARDEGSRWSLEDYSLPIVAARANRFALPPADGDFLSTSYGWAYQFDATKLAPMLRGYSEARGVTRTEGRVTGVERDGENGDVTELVLESGERVAGDLFIDCSGFRALLIGGEMDAAWEDWSHWLPCDRAAALPATRVDGPIEPYTRATAMSAGWRWRIPLQHRVGNGYVFSSSFLSEDAACDAILGAVEGTPLADPRILRFRAGRRRESWVGNVVSIGLASGFLEPLESTSIHLAQMAVMRLIELFPERAIDPADRAAFNATVDYEYDRVRDFLILHYHATTRDDSDFWNHVRTMELPDSLAGKLELWREAGRIEQHGEGLFLEPSWVAVYLGQGMIPARHDPRADNPSPAALTRALDDMARTIRERVDAMPDHEAALRAQGAWGAA

SEQ ID NO: 89244 - protein, 521 aa, Erythrobacter sp.
  REGION 1..521: note = tr|A0A356ZSR5|A0A356ZSR5_9SPHN Tryptophan halogenase; OS = Erythrobacter sp. OX=1042 GN=DD795_09040 PE=4 SV=1
MRPDDGQAQAIGSICIVGGGTAGWSAAALLSQVLRGSGCRITLVESSAIPTVGVGEATIPPIFDFLRNIGADEVEFIGRCQVTFKLGIQFRDWLHHGHAYWHPFGNLGVTINQRPFHHYYCMNRAAGHGETLADLCPSVALAEAGKFAFPSPDGQWPGGAVAYALHFDAGLVAAFLRDHAVAAGVERLDRRIVGATRGEGERIAAVQFDDGESLEADFYIDCSGFRGLLIEETLGAGFEDWKHWLPCDSAVAAPTAAQEQRAPYTVATARSAGWQWRIPLQHRTGNGLVYASDFISDADAQAQLLAGLDGEAQADPRVLRFTAGLRKRAWVGNCLAIGLSAGFLEPLESTSIHLIHTGLNRLLDLFPDRRFDPALIAAYNHDVHREYAHIRDFLLLHYVPNRREGEPFWDHMRGLDLPDTLAEKIELFTRTGRIMSRQRELFSDISWFYVMHGMGLTPAALDPLAEAAPFGEVRKVIDQLRGAMQAFRSAAPTHDAILDRLLDPAETRRPQFGTGGGWTTR

SEQ ID NO: 89245 - protein, 525 aa, Erythrobacter sp.
  REGION 1..525: note = tr|A0A2D9U903|A0A2D9U903_9SPHN Tryptophan halogenase; OS = Erythrobacter sp. OX=1042 GN=CL950_05510 PE=4 SV=1
  VARIANT 5: note = Xaa can be any naturally occurring amino acid
  VARIANT 7: note = Xaa can be any naturally occurring amino acid
  VARIANT 9: note = Xaa can be any naturally occurring amino acid
  VARIANT 147: note = Xaa can be any naturally occurring amino acid
  VARIANT 178: note = Xaa can be any naturally occurring amino acid
  VARIANT 236: note = Xaa can be any naturally occurring amino acid
  VARIANT 264: note = Xaa can be any naturally occurring amino acid
  VARIANT 316: note = Xaa can be any naturally occurring amino acid
  VARIANT 319: note = Xaa can be any naturally occurring amino acid
  VARIANT 324: note = Xaa can be any naturally occurring amino acid
  VARIANT 368: note = Xaa can be any naturally occurring amino acid
  VARIANT 385: note = Xaa can be any naturally occurring amino acid
  VARIANT 406: note = Xaa can be any naturally occurring amino acid
  VARIANT 425: note = Xaa can be any naturally occurring amino acid
  VARIANT 473: note = Xaa can be any naturally occurring amino acid
  VARIANT 515: note = Xaa can be any naturally occurring amino acid
MTASXRXDXGQAQAIGSICIVGGGTAGWSAAALLSQVLRGSGCRITLVESSAIPTVGVGEATIPPIFDFLRNIGADEVEFIRRCQATFKLGIQFRDWLHHGHAYWHPFGNLGVTINQRPFHHYYCMNRAAGHGETLADLCPSVALAXDGKFAFPSPDGQWPGGAVAYALHFDAGLVAXFLRDHAVAAGVERLDRRIVGATRGEGERIAAVQFDDGESLEADFYIDCSGFRGLLIEXTLGAGFEDWKHWLPCDSAVAAPTAAQEXRAPYTVATARSAGWQWRIPLQHRTGNGLVYASDFISDADAQAQLLAGLDGEXQAXPRVLXFTAGLRKRAWVGNCLAIGLSAGFLEPLESTSIHLIHTGLNRLLXLFPDRRFDPALIAAYNXDVHREYAHIRDFLLLHYVPNXREGEPFWDHMRGLDLPDTXAEKIELFTRTGRIMSRQRELFSDISWFYVMHGMGLTPAALDPLAEAAXFGEVRKVIDQLRGAMQAFRSAAPTHDAILDRLLDPAETRRPXFGTGGGWTTR

SEQ ID NO: 89246 - protein, 499 aa, Erythrobacter sp.
  REGION 1..499: note = tr|A0A350KR40|A0A350KR40_9SPHN Tryptophan halogenase (Fragment) OS=Erythrobacter sp. OX=1042 GN=DCX71_01480; PE = 4 SV=1
GWSAAALLSQVLRGSGCRITLVESSAIPTVGVGEATIPPIFDFLRNIGADEVEFIRRCRATFKLGIQFRDWLHHGHAYWHPFGNLGVTINQRPFHHYYCMNRAAGHGETLADLCPSVALAEAGKFAFPSPDGQWPGGAVAYALHFDAGLVAAFLRDHAVAAGVERLDRRIVGATRGEGERIAAVQFDDGESLEADFYIDCSGFRGLLIEETLGAGFEDWKHWLPCDSAVAAPTAAQEQRAPYTVATARSAGWQWRIPLQHRTGNGLVYASDFISDADAQAQLLAGLDGEAQADPRVLRFTAGLRKRAWVGNCLAIGLSAGFLEPLESTSIHLIHTGLNRLLDLFPDRRFDPALIAAYNHDVHREYAHIRDFLLLHYVPNRREGEPFWDHMRGLDLPDTLAEKIELFTRTGRIMSRQRELFSDISWFYVMHGMGLTPAALDPLAEAAPFGEVRKVIDQLRGAMQAFRSAAPTHDAILDRLLDPAETRRPQFGTGGGWTTR

SEQ ID NO: 89247 - protein, 536 aa, Mameliella alba
  REGION 1..536: note = tr|A0A0B3RNZ6|A0A0B3RNZ6_9RHOB Putative Tryptophan halogenase OS=Mameliella alba OX=561184 GN=OA50_02429 PE=4; SV = 1
MGDPVTSITIVGGGTAGWLAACFLRTKCAPKIKITLIESPNVPTVGVGEATVPHMPVTLREMGIDDQEFMRRCNASFKMGVMFNDWNVDRKGRFIRYMNPFASPPRIEGVEAGHYFQAYGAGNRDYIRSFSPLMDLFESWKCPFSLNKQGEDPMPRAGYAYHLDAVKFAGLLAERGRDHGIEHILDDVDDVELDERGFVAALILRETGRHPVQLVLDCTGFRGLVIQKALGEPFDSYADYLGNDRAMALQVPHPDPEKIRAATQSTALGAGWSWAVPLFNRIGTGYVFSSAHRTDDEAAEEFLAHLGDMAPPGAEPRVIPMRVGRSRRAWVKNCIALGLSGGFIEPLESTAIHMIDMGLRWLLQYFPSQDYEDATRDAYNRVSDGMFNEVRDFICLHYRLNNRTDDPYWMDSRTQLKISDRLEHLLDLWRHQLPTPLDVPSAHLFTYNVFTAVLLGKQVYDNGYGEGQLNRSFALPEKPWKAFLRQSAARNRAVLDHKADHRRVLLALRGELRAGMRANTRLGEVDESGAAESALF

SEQ ID NO: 89248 - protein, 525 aa, Erythrobacter sp.
  REGION 1..525: note = tr|A0A2D8MDV7|A0A2D8MDV7_9SPHN Tryptophan halogenase; OS = Erythrobacter sp. OX=1042 GN=CL949_11630 PE=4 SV=1
MASRNGIGTGGGGRIKRVVIVGGGTAGWMAAAALSRFFDDGQRSIELVESDAIGTVGVGEATIPPLAKFNAMLGIREDEFLRETRGTYKLGIEFVNWGEIGDSYIHPFGSYGQPFHGIPFHQLFLREKARSGNGGKIGDYSLSTVAALRQRFGRPSPTAKSLVNQIAFAYHFDAGLYAAFLRRFAEDLGVTRTEGRIAHVEQDSEDGNVTAVVLDNGRRIEGELFIDCSGFRGLLIEETLETGYDDWSKWLPMDRALALPSSNGGSPPPFTRSIAHGAGWQWRIPLQHRIGNGHVFSSAYIEEQTALDVLLANLEGEALQDPRKLAFRSGMRRKAWNRNVVSLGLSAGFVEPLESTSIHLIQNGIARLFALFPDNPISPIERDEYNRGMAELYEDIRDFIILHYKATQREDTEFWRYVRHMPIPESLTRKMDLWKLHGRVFRENAELFAADSWIAVMLGQNVWPDTYDPIADTLDAEKIASAMVQMRQAYSETADRLPTHEDFLRQSGGWHHRQDMQIKQPDYQA

SEQ ID NO: 89249 - protein, 510 aa, unidentified
  source 1..510: note = Sphingomonadales bacterium
  REGION 1..510: note = tr|A0A4Q3AR37|A0A4Q3AR37_9SPHN Tryptophan 7-halogenase OS=Sphingomonadales bacterium OX=1978525; GN = EOP58_00855 PE=4 SV=1
MGGQRRILIVGGGTAGWLTAAYLARFLALSGRPGIQISVLESPEIGIIGVGEGTFPTIRATLKFLGIDETQFIRATSATFKQGIRFNDWLHAPEDGKRHHYLHPFEAPFYTEDASLVPYWLLQDKATRPPFAEAVTIQNRVAEQRRAPKRPGEEAFSAPLNYAYHFDAVKLARVLRERAIELGVTHLAGLLTHVELAADGAVDHVISREHGKLDADLYVDCSGFRAELIGKAMGSPFKSVNDVLFTDRALACRIPYARADAPIESFTIAAAHQAGWTWDIGLEGARGIGCVYSSRHMSDDQALQVLRGYIGHNDFTPRSVPFAPGYRPRPWIRNCVAIGLSGGFVEPLESTGVILIEAAAGMVAEMFPHSGPVDAPARRFNELISARYDNIVNFLKLHYCLSRRQEPFWRDNVDPASIPERLRELLEQWRYRPPGRYDFILDLETFAFFNYQYILYGMEFPTDPGRADYPNTAEAAKLFARIRAFSERATEDLPSHRALIQQINAGAAAA

SEQ ID NO: 89250 - protein, 356 aa, unidentified
  source 1..356: note = Sphingomonadales bacterium
  REGION 1..356: note = tr|A0A4V1ZZC8|A0A4V1ZZC8_9SPHN Tryptophan 7-halogenase (Fragment) OS=Sphingomonadales bacterium; OX = 1978525 GN=EOP59_17590 PE=4 SV=1
MTAPPVASIVIIGGGTAGWMTAAAAARFLNDGRRTITLVESDAIGTVGVGEATIPPIREFNHQLGIDERDFVRETGATIKLGIEFVNWGRKGDRYLHPFGDLGHDFQGVAFHQYWLKHRIGSLEDYWMAAQAARRDRFAHPAADPRTPLGGLAYAYHFDAGLYAAFLRRRAEAGGVSRVEGKIASVERDGETGHVAAVVLDDGRRISGDFFIDCSGFRSLLLGDALGVGYRDWSHWLPCDRAMAVPCERADPLTPLTRSTAHDFGWQWRIPLQHRTGNGIVYASAFGSDEAARETLLANLDAPATAEPRALSFTAGVRERQWQGNVVALGLSAGFIEPLESTSIHLIQTGISKLMW

SEQ ID NO: 89251 - protein, 561 aa, unidentified
  source 1..561: note = Defluviimonas denitrificans
  REGION 1..561: note = tr|A0A2S8SCF5|A0A2S8SCF5_9RHOB Tryptophan halogenase; OS = Defluviimonas denitrificans OX=404881 GN=LX70_00307; PE = 4 SV=1
MNNRLRKITIVGGGTAGWMTALILETEFSHTSSPKDRPRICLIESPNIATVGVGEATVPEMPRRLRLAGISERDFFRETNASFKLGVKFCNWNTDAQGNRIDYVNPFAYGQMLEGVDAAEYFLRFGNGDMDFTQSITPHDDLARHCKGARPLGEPEFQQRFGYAYHLDAVKFAGMLAKFCTKRGVEHIRDEVQSVELDEEGNVGHLMLERAGRHDVEMVVDCTGFRGLIINQALGEPFLDYSAYLPNDRAMALQIEHPDPDRIESLTRSTALGAGWTWRVPLYNRVGTGYVYSSAHRTDDQAAAEYLDWLGDSGKGATPRIIPMRIGRMRNGWVKNCVAIGLSGGFIEPLESTAIHMIDYSVRWLAENLPTRAIEPSLRTRYNREMDRLYNEVLDFICLHYRLNNRTDDPYWIDARTEMKIPDRLAENLELWQHRLPVERDIESATLFSHRVYQAVLLGKQVYDTGFGAGIRDRIRPLKKPIWFQFCKNAKADLAQILKAMPDHKTLLRDIRGELDRPAFGMALAAKPTVAMPGAAMAPVVVQNMPNFAEIQSGKKDLQLF

SEQ ID NO: 89252 - protein, 504 aa, unidentified
  source 1..504: note = Sinorhizobium fredii
  REGION 1..504: note = tr|A0A249Q7G9|A0A249Q7G9_RHIFR Tryptophan halogenase; OS = Sinorhizobium fredii CCBAU 83666 OX=1128334; GN = SF83666_a44280 PE=4 SV=1
MLDLTNAKRIGIIGGGIVGWLAAIALRRVFDVDVDVTVIEAPTVFPLGPGEGGSLNLIDTLCRNELDLDVFIGEAGATHKLGVLYENWRGGGIPDRYYRMFGGSGIPEIECRVGGFFPLLSARIAAGENLHTCIPGFELITKKASQVEIDELLATGESGLYPSFHFNHAGFERYLRRVGLARGITSRRAVVHGMRLDDRGHVNAFQLGGEELEVDFAVDASGFARLGLGKVFNTRWCSFANVLPTDRAIIFELEPRASSPVTRATAMKAGWMWEAPLNRSISAGYAFSSRYADAAMAIAEVENHYGFRVEAKHELSLDQGYFSTAWVNNFVALGTASGCVEPLEAALAAYTFEALRNLERILANGSGIVPARAIEGYNSANARCWTGVRDFLRLHYDSKRIDTPFWRDLAAAELPEGYANLRACFQKRTPRFIDIQPYVGSGWQSLFHEIDWISVAVPLGVVPQAAACAELRRLSTESRSEVQAYVDRLKGTIAKISSTRGCMH

SEQ ID NO: 89253 - protein, 460 aa, Erythrobacter sp.
  REGION 1..460: note = tr|A0A3D4LXP4|A0A3D4LXP4_9SPHN Tryptophan halogenase (Fragment) OS=Erythrobacter sp. OX=1042 GN=DIW45_05040; PE = 4 SV=1
MMTQVQGEGSGADPLRSICIVGGGTAGWSAAALLARVLRGSGCRITLVESSAIPTVGVGEATIPPIFDFLRNIGADEVEFIRRCQATFKLGIQFRDWLHRDHAYWHPFGNLGVTINQRPFHHYYCRNLAQGHGESLADLCPSVALAEDGKFAFPSPDGNWPGGAVAYALHFDAGLVAAFLREHAEAAGVERLDRRIVGATRGEGERIAAVQFDDGETLAADFYIDCSGFRGLLVEETLNAGFEDWKRWLPCDSAIAAPTAAQQQRAPYTVATARSAGWQWRIPLQHRTGNGLVYASDFVSDADAHEELLSGLDGEPLADARVLRFTAGLRKRAWVGNCLAIGLSAGFLEPLESTSIHLIHTGLNRLLDLFPDRGFDPALADAYNRDVWREYAHIRDFLLLHYVPNQREGEPFWDHMRGLDLPDTLAEKIELFTRTGRIMSKQRELFSDISWFYVMHGMGL

SEQ ID NO: 89254 - protein, 511 aa, unidentified
  source 1..511: note = Sphingomonadales bacterium
  REGION 1..511: note = tr|A0A4Q3D1T7|A0A4Q3D1T7_9SPHN Tryptophan 7-halogenase OS=Sphingomonadales bacterium OX=1978525; GN = EOP61_14815 PE=4 SV=1
MMGKRSILIVGGGTAGWLAAAYLARALELSDHGRLEITLLESPEIGIIGVGEGTFPTIRETLKFLGIDESRFIRETSATFKQGIRFTDWVRTPENGAHSHFFHPFEPPFYADGANLIPYWLLQDEATRPPFAEAVTIQNRVADARRAPKRSHEGDFDGPLNYAYHFDAASLAHVLAERARELGVRHLQGTVGAVKLDSAGAVAEVVTAEHGALTADLYVDCTGFRAELIGRALQVPFKSVRNHLFANAAVTCKLPYERPDAPLESFTVATAHEAGWTWDIGLAGARGIGCVYSSDHIDADRAEAILRAYVGPRDAEYQTRRIPFEAGYREKQWVKNCVAVGLAGGFLEPLESTGVLLIEAAIGMIAELFPHNGPIDAPARRFNQLIAARYDNIVNFLKLHYCLSQRTEPFWRENADPASIPERLRELLEEWRYRPPSRYDFTLDVESFAFFNYQYILYGMGFRTDLSAGREDFPNVAGAEKLFQRIRNLGERATQDLPAHRALIAQINAGV

SEQ ID NO: 89255 - protein, 100 aa, Caulobacter sp.
  REGION 1..100: note = tr|A0A259IPE9|A0A259IPE9_9CAUL Tryptophan halogenase (Fragment) OS=Caulobacter sp. 39-67-4 OX=1970332; GN = B7X77_04895 PE=4 SV=1
MDQAAQDNRIRSVVIVGGGTAGWMAAASLQRHFQGSPLKITLIESSEIGTIGVGEATIPTIRNFYQNLGLSDLDVMRATGATCKLGIRFNDWLKPGSSFL

SEQ ID NO: 89256 - protein, 518 aa, unidentified
  source 1..518: note = Sphingomonadales bacterium
  REGION 1..518: note = tr|A0A4Q2YZR3|A0A4Q2YZR3_9SPHN Tryptophan 7-halogenase OS=Sphingomonadales bacterium OX=1978525; GN = EOP63_08755 PE=4 SV=1
MAFPVAKRSILIVGGGTAGWLTAAYLARFFDLPRNPRLSITLLASDEIGSIGVGEGAFPTIRNTLQFIGIDESQFVRATSATFKQGIRFDDWVHTPNVGQSSHYLHPFEAPYHGDGCSLVSYWLLQDEKTRRPFAEAMTIQNRVAEAQRAPKRPGEGEFTGPLNYAYHFDAARLAEALSAHACAMGVKHLSGTLTGVGLDPGTGAIDHVVTAEHGTLTADLYIDCSGFRAELIGEALQSPFQNVKHQLFTDRALACKLRYDRPDISLESYTIAAAHEAGWTWDIGLAGARGIGCVYSSDHMSDDRAADILATYTGGRSHDVTVRAIPFTAGYRPASWVKNCVAVGLSGGFLEPLESTGLVMIETAAAMIAEMLPLNGPVGAPARRFNELMAARYDNIINFLKLHYCLSQRKEAFWRDNGDPASIPDRLKGLLEEWRYRPPGRFDFILDLESFAYFNYQYILYGMEYRTDLSPVREEYPDTAEAERIFARIKSFGDRAASELPAHRAMIDQINAGGAYA

SEQ ID NO: 89257 - protein, 494 aa, unidentified
  source 1..494: note = Sphingomonadales bacterium
  REGION 1..494: note = tr|A0A4Q5S887|A0A4Q5S887_9SPHN Tryptophan 7-halogenase OS=Sphingomonadales bacterium OX=1978525; GN = EOP62_00795 PE=4 SV=1
MLVKRVLVVGGGTAGWMTAAALSNKFGNSPLEIRLIESAEIGTVGVGEATVPHIRHYNATLGFDEADFLKRTQGTFKLGIEFVNWGRIGDSYIHPFGVFGQDFGGVPFHQHWLRMRGKPGVAGFEDFSLPIQAARRGRFHHPNEDPSSLLNTFNYAYQFDASLYARFLREYSEARGVVRQEGKVVDVALNGETGFVEAVTLDSGERIEADLFVDCSGFRGLLIEQALKTGYDEWTHWLPCDRAIAMPCPNDGPPAPYTRSTAQSAGWVWKIPLQHRCGNGHVYSSGFISDDAALETLLGAIAAPPLANPNKLRFVTGKRKKQWVGNTVAIGLSSGFLEPLESTSIHLIQLAIGRLLDFFPTGEWDPLDAEEFNRVMVLEYERVRDFLILHYNATQRDDSDFWNYCRTMDLPDSLTYKMELFRERGVVVNYRDGMFLEPSWLAVYLGQNILPGAHDPLSARLSDDDLMSAMAELRTRYSAAAEAMPTHLSALAAA

SEQ ID NO: 89258 - protein, 45 aa, Burkholderia pyrrocinia; identical to SEQ ID NO: 87085
  REGION 1..45: note = tr|A0A318IXC4|A0A318IXC4_BURPY Tryptophan halogenase; OS = Burkholderia pyrrocinia OX=60550 GN=NA66_1001516 PE=4; SV = 1

SEQ ID NO: 89259 - protein, 494 aa, Sphingomonas sp.
  REGION 1..494: note = tr|A0A345WPJ0|A0A345WPJ0_9SPHN Tryptophan 7-halogenase OS=Sphingomonas sp. FARSPH OX=2219696; GN = DM480_08765 PE=4 SV=1
MTPCGPSIAIVGGGTAGWMAACLMAKAWPDAAITLVESPDVGIVGVGEGSTPQMKALFDGLGIAESAWMPTADATYKVGIAFRSWGGAGSSYFHPFAGAVDLHTQPAFHASAHARRTGADVAAHPDRFFLNSRLAAARRAPVAPAHFPFPVGYGYHFDAHKVGEVLRAEALRRGVGHVRAHVTDVPLTETGDIAGLTLADRDPIAAELFVDASGFGGLLVQQALRVPFRPFADNLFNDRAVVMPTPRGPDLDAHTTATALSAGWAWAIPLTTRTGNGYVFSSAHLSPDAAETELRRHLGLIDSDVAARHLTMKVGRVERSWAANCLAIGLAQGFIEPLEATALHIVQATVEGFIQAYDAGGRSPRERDGFNARIARRYEGIRDYIVAHYRLNRRTDTPYWRDAAAVEHLSDDLKAIMTAWFTGRDVAAVIEGRDLRGYYAPMSWEVLLSGYGTFPPADRLRAVSPVADLAGIDALLDGCLLNFPPHAAALKDPA

SEQ ID NO: 89260 - protein, 525 aa, Erythrobacter sp.
  REGION 1..525: note = tr|A0A520VDJ1|A0A520VDJ1_9SPHN Tryptophan 7-halogenase OS=Erythrobacter sp. OX=1042 GN=EVA34_13740; PE = 4 SV=1
MTASIRPDDGQAQAIGSICIVGGGTAGWSAAALLSQVLRGSGCRITLVESSAIPTVGVGEATIPPIFDFLRNIGADEVEFIRRCQATFKLGIQFRDWLHHGHAYWHPFGNLGVTINQRPFHQYYCMNRAAGHGETLADLCPSVALAEDGKFAFPSPDGQWPGGAVAYALHFDAGLVAAFLRDHAVAAGVERLDRRIVGATRGEGERIAAVQFDDGGSLEADFYIDCSGFRGLLIEETLGAGFEDWKHWLPCDSAVAAPTAAQEQRAPYTVATARSAGWQWRIPLQHRTGNGLVYASDFISDADAQAQLLAGLDGEPQADPRVLRFTAGLRKRAWVGNCLAIGLSAGFLEPLESTSIHLIHTGLNRLLDLFPDRRFDPALIAAYNRDVHREYAHIRDFLLLHYVPNRREGEPFWDHMRGLDLPDTLAEKIELFTRTGRIMSRQRELFSDISWFYVMHGMGLTPAALDPLAEAAPFGEVRKVIDQLRGAMQAFRSAAPTHDAILDRLLDPAETRRPQFGTGGGWTTR

SEQ ID NO: 89261 - protein, 478 aa, unidentified
  source 1..478: note = Sphingomonadales bacterium
  REGION 1..478: note = tr|A0A4Q2ZLQ7|A0A4Q2ZLQ7_9SPHN Tryptophan 7-halogenase (Fragment) OS=Sphingomonadales bacterium; OX = 1978525 GN=EOP60_10150 PE=4 SV=1
SRPAGSLPPSGGGVAGWMSALALGKALQGSGVTIDLVETDDPDHSVGPFGSAEAVLPAFHGFLGDHAIDEDALLRAARGTFALGAAFSGWAGQQSAWFLPFGETGAPMGPVAFPPLVARLRSAGHAVRSTDFSLAAVAAAAGRFDRPSDDPRSVQSSYGYGLHLDKGGLAEVCRALATGVKHHQAALRCAIRAENGHVAALELESGAHVAGDLFLDCSGHAALLCEGHGFDSWSAWLACDRVVERNNIQDGVPPPYALGAAHAAGWLRSVPLTGGPGEAMLFASAHHADDAATPFHQGRRTRAWHGNVVAIGAAAATIEPLYGQNLQLVAHALQRLIGLFPNRAEGAEAAEYNRITADEADRVRDFVIAHYKTNARLGEPFWDAARKMPVPDELQYKLDLFASRGRMPMYDEELFSRAEWIAMLDGQGMHPRRYDALAETIPEPAILQHMARLRDLIVDAARTMPNHGAILSRIGGRG

SEQ ID NO: 89262 - protein, 538 aa, Burkholderia pyrrocinia
  REGION 1..538: note = tr|A0A4R4FY90|A0A4R4FY90_BURPY Tryptophan 7-halogenase OS=Burkholderia pyrrocinia OX=60550; GN = EVG18_14040 PE=4 SV=1
MSNPIKNIVIVGGGTAGWMAASYLVRALQQHTNITLIESAAIPRIGVGEATIPSLQKVFFDFLGIPEREWMPQVNGAFKAAIKFVNWRKSPERSRDDHFYHLFGNVPNCDGVPLTHYWLHKREQGFQQPMEYACYPQPGALDGKLAPCLSDGTRQMSHAWHFDAHLVADFLKRWAVERGVKRVVDEVVEVRLNDRGYISSLSTKEGRTLEADLFIDCSGMRGLLINQALKEPFIDMSDYLLCDSAVASAVPNADARVGVEPYTSAIAMNSGWTWKIPMLGRFGSGYVFSSKFTSRDQATADFLNLWGLSDKQPLNQIKFRVGRNGRAWVNNCVAIGLSSCFLEPLESTGIYFIYAALYQLVKHFPDTSFDPRLADAFNAEIVHMFDDCRDFVQAHYFTTSRDDTPFWLANRHDLRLSDAIKEKVQRYKAGLPLTTTSFDDSTYYETFDYEFRNFWLNGNYYCIFAGLGMLPDRSLPLLRHRPESIDKAEAMFARIRREAERLRTSLPTNYDYLRSLRDGDAGLSRSQPGSTLAAPEIL

SEQ ID NO: 89263 - protein, 429 aa, unidentified
  source 1..429: note = Sphingomonadales bacterium
  REGION 1..429: note = tr|A0A4Q3A8M9|A0A4Q3A8M9_9SPHN Tryptophan 7-halogenase (Fragment) OS=Sphingomonadales bacterium; OX = 1978525 GN=EOP58_14960 PE=4 SV=1
IGTIGVGESTIPPIVSYNRLLGINEAEFMAATQATFKLGILFDNWKEPGHRYFHSFGTTGKDHWAAGFQHFWMYARERGLADSYDDYCLELVAAMQSKFAHLPDESMNYAYQLDSGLYAKFLRKMAEGDGTKRIEGKIARVELDGESGDIAALTLESGERIEGDLFLDCTGFRAVLIEQALHAGFDDWTHWLPCDSAIAIQTESVGPAVPYTRAMAHDAGWQWRIPLQHRVGNGIVYCSRYLDKDAALERLLGNIEGKTVVEPNFLRFTSGVRRKQWHRNCVAVGLSGGFMEPLESTSIHLIQRAVLRILRMMPQGKVSARDVAEFNDQQHQDMEQIRDFLILHYKATDRRDSGFWRQCAAMEVPESLTQKIELFRETGRVFRRNEELFAENSWVQVMMGQGIMPQSWHPIAEKLRDDELARLMTTLKD

SEQ ID NO: 89264 - protein, 507 aa, Rheinheimera sp.
  REGION 1..507: note = tr|F7NYZ2|F7NYZ2_9GAMM Tryptophan halogenase; OS = Rheinheimera sp. A13L OX=506534 GN=Rhein_3033 PE=4 SV=1
MINRIIIVGGGTAGWLVANHLGQAMKSRPEMKITLIESPTIPTIGVGEGTVPAIRQSLRKFGISESDFIQRCNVTFKQSIKFVNWLDKNIHGENHYHHLFDVPVPYGIDLAPFWLNQHKQTAFADLVAAQYQVVEAGLAPKAITSPEFGGLTSYAYHLDARKFADFLHEHAVKHFGINHLYGDITDIDRDVDGYITALHSPQLGLQPCDFVIDCSGFNSVLLGEKMQVKFIDRSDHLLTDVALAVQIPTMEHSIVPPYTLATAHQAGWIWDIALTNRRGVGLVYSSSHMDEEQACLKLNRYIGGGLENYPWRKINMRIGRREKFWHKNCVAIGLSQGFVEPLEATSILMTDFSADLLSKRFPENRAALELLEQRFNQRLLHAWEQTFDFIKLHYCISDRSDSSFWLDNRDPATIPDTLLQKIALWRHHPPAREDFFTKFEIFDFENYLYVLYGMKFNTPAPKLAPEYIKMAAAVQERVTLEAEVLKQKLISHRALLEKIHKFGLQRL

SEQ ID NO: 89265 - protein, 513 aa, Roseateles depolymerans
  REGION 1..513: note = tr|A0A2W5D9M8|A0A2W5D9M8_9BURK Tryptophan halogenase; OS = Roseateles depolymerans OX=76731 GN=DI603_18790 PE=4; SV = 1
MTPIRNILIVGGGSAGWLAAAYLARTLGSQSPQGPRITLVEAPGIPTIGVGEGSFPSLRGTLATIGIAEDRFIRDASASFKQGIRFDHWVRPPGQPGADHYFHPFSQPSQRAGGPELLPYWLQGEAGPGMAFAEAATLQKRVADAARAPKRPTDADYTGALNYAYHFDAGRFATLLAEQARSLGVQHIAATVERVEMGDGGLIAAVHTREAGRLQADLFLDCSGFHAALIGAALGSPFRSLASSLFVDRALAIQVPYARADAPIASYTISTAQTAGWIWDIGLRERRGIGHVYASRYLDDEQAEAQLRAYIGPAAEGLPARRLDLRIGYRETQWQGNCVAVGLSSGFIEPLEASGLGLVEAAVYLIAHLFPHGGELEAAARQFNQQMRTRYERIADFVKLHYGLTQRHDSAFWQDNTAPESFSPLLREQLAMWRHRAPHRLDFITDLEMYPPSSWQYVLYGMEYPTQLAPNATAWPRAAEARQEFQTLRQLAPRAIADLPPHRALVEHLCGRC

SEQ ID NO: 89266 - protein, 496 aa, unidentified
  source 1..496: note = Hyphomonas beringensis
  REGION 1..496: note = tr|A0A062UBP1|A0A062UBP1_9RHOB Uncharacterized protein OS=Hyphomonas beringensis OX=1280946 GN=HY29_02905; PE = 4 SV=1
MQKVRKVVIAGGGTAGWITAAALSRMLGPLLDITLVESDDIGTVGVGEATIPTHRTFHHLLGIDEREFMRATKATFKLGIAFENWGGIGDNYIHSFGQVGKPSWMGEFYNIWMAAREKGIGEELDAYCFELQAAKHNKFYTDEKFKINYAYHLDASLYAKFLRTFSEGKGVKRVEGLIGEVEQDGESGFITALKLKSGERIEGDFFVDCTGFRGLLIEQTLKSGFEDWGHWLPTDSALAVQTRSVGPALPYTRSIAHQSGWQWRIPLQHRVGNGLVFCSQYMQPDEAEEVLRGNVEGDLLAEPRLIRYKTGRRQKVWSKNCVALGLSSGFLEPLESTSIHLIQIGASRLVQQFPFSGVSEAIANHYNEQSVRELERIRDFIILHYKVTERDDSAFWRDRRDMDIPDSLAQRLEVFRENGLAYQATDDLFRVDSWLQVMMGQRLKPKGYHHMGHMMTQDQMQRALGGLSTGIANAVAKMPTHQEFIDRYCAIEPEPA

SEQ ID NO: 89267 - protein, 498 aa, Acinetobacter sp.
  REGION 1..498: note = tr|A0A3A8EZD3|A0A3A8EZD3_9GAMM Tryptophan 7-halogenase OS=Acinetobacter sp. WCHAc060115 OX=2419601; GN = D7V20_03385 PE=4 SV=1
MINFNEIKRVCIVGAGTAGWFSALQMRKSLKENVEICVIATPDIPTIGVGEGGVLNFMSSLIRLEIPFLEFMQETGAVHKLGFVYEGWRTGKPDDMYYHMFPYLNKHEKTKGYYPILSVLANHNVPVSNIVDSIKLREENTSQQNITDMFVNMKDHNFLSSFHFDTYKVAQYLKKIALNRNIKYIEGKVDQIFVNAQGGDIEFLEVNNQKIKTDFVIDASGFSRIFISKHFNSEWVSLSDKLVMNTAIPFHLQHSLKNPELVTRSTAMSSGWVWQIPLQERIGAGYVFNDSFISPEKAVDEVERWLGYHIDPIKIIKFEAGYYENIWIKNVLAVGLASGFVEPLEATSIGQMLLQLEVFDQIILNSAGIVSRDLVKFYNQQNQNSWQGIADFIRMHYDTQRADTEFWKSTVNMPMSEKYKELKEIWKYRTPRDYDFIEYQMDLMHHFGTYSWLAIAQALGHIKAEVTVPELMDLTSQQRQKLAKEINDIYQRLGLQPS

SEQ ID NO: 89268 - protein, 506 aa, Sphingomonas sp.
  REGION 1..506: note = tr|A0A345WQ59|A0A345WQ59_9SPHN Tryptophan halogenase; OS = Sphingomonas sp. FARSPH OX=2219696 GN=DM480_10120 PE=4; SV = 1
MKDAERQPGDRVRQVVILGGGTAGWMTAAALARTFGRRIAVTLLESDEIGTVGVGEATIPTIHWFNELVGLDEAAFLRETKATFKLGIEFVDWRGPGHRYFHPFGQYGAPLPGVAFHHRWLKARAEGYDLPLAALSLAGTLAAQNRFAKPAAEARSILSTLGYAFHFDAGLYARHLRGLAEGAGVTRVEGKLATVARDGGTGHVTALVTETGARLAGDLFIDCSGFRALLIEGAMQAGYEDWSHWLPCDRAVAVPCARVGETTPYTRSTAREAGWQWRIPLQHRTGNGYVYASRHLSDDAAAATLLANLDGEALAEPRFLRFLAGRRRRTWIGNVVAIGLSSGFLEPLESTSIHLIQSGIAKLLTLFPDRDMDPALARRYDTLLAADMDNIKDFLILHYHATTRDEPLWRHTRAMEIPDTLAARIDHYRRAGRLMVGSDDLFRDASWLAVLDGQGVTARDYNPVADTIDAATNRAQVEQIAALIARAAPTLPGHDAALAAMLAPGR

SEQ ID NO: 89269 - protein, 477 aa, unidentified
  source 1..477: note = Sphingomonadales bacterium
  REGION 1..477: note = tr|A0A4Q3DDG3|A0A4Q3DDG3_9SPHN Tryptophan 7-halogenase OS=Sphingomonadales bacterium OX=1978525; GN = EOP61_03625 PE=4 SV=1
MAIRRIVILGGGVAGWMSALALGKALAGSAIAIDLVETGGPDHSVGPFGPGEATLPAFHKFLGDHGVDEDALLRAARGTFALGAAFSGWAGRQSAWFLPFGEIGAGMGTVAFPPLVARLRAAGHPVRPTDFSLAAVAAAASRFARPSLDTRSVLSSYGYGLHLDKAGLTGMCRALARGVTRHAAPFARAVRAANGHVAALELADGEEVPGDLFLDCSGPAALLCEDHGFESWSAWLACDRVVERATSQEGIPPPYTHAAAQPAGWLRSVPLAGGPSEAMLFASAHHSDAAAIEIHQGRRTRAWHGNVIAIGAAAALVEPLYGHNLQLAHQAIQRLIALFPNNAEGPEATEYNRITAEEADRVRDFVVAHYKTNARSGEPFWDAARAMPVPDALQYKLDLYASRGRMPMYDEELFDRAEWIAMLDGQGLHPRRYDALADTVPEPAIIQHVTRLRELIVDAAKAMPHHGATLAQIGAGA

SEQ ID NO: 89270 - protein, 280 aa, unidentified
  source 1..280: note = Sphingomonadales bacterium
  REGION 1..280: note = tr|A0A4Q5SJ56|A0A4Q5SJ56_9SPHN Tryptophan 7-halogenase (Fragment) OS=Sphingomonadales bacterium; OX = 1978525 GN=EOP59_14910 PE=4 SV=1
MTDPLRSIVIVGGGTAGWIAAAMLSRFVPHDTRIELVESDAIGIIGVGEATIPQIRLLTAGLGVDENALLDATQGTYKLGIEFVDWLRPGDRYMHAFGQIGRGLGVLPFHQFWLRGQAQGITAPLTAYMPSAAAAYAGWSALPPQVPPTPSYAYHFDASLLAGVLRSIAEPAGVVRTEGRIVGSECGEDGNVAALVLDDGRRVEGDFFLDCSGFRSLLLGDALGIGYEDWSRWLPCDRAMAMQCEQPGAILPFTRATARPVGWQWRIPLRHRIGNGLVYA

SEQ ID NO: 89271 - protein, 514 aa, Erythrobacter sp.
  REGION 1..514: note = tr|A0A2D8MJR1|A0A2D8MJR1_9SPHN Tryptophan halogenase; OS = Erythrobacter sp. OX=1042 GN=CL949_22260 PE=4 SV=1
MAIDFEKVVIVGGGTAGWLSAAYLAARRPELQITLVEAPDIPTIGVGEGSWPTMRETLRIIGIPESEFLFECDASFKQGSRFDGWRTGGAEDSYLHPFTPPTPGDVRPFITAWKQTDGRSFAELASPQAAVCMQNLAPRQRSMPDYAAALNYGYHFDAGKFARLLSRHAVNRLGVTHIRDQVTDILSEGPDRIAAVILRSGGQLSGDFYLDCTGMAAHLIGEHFGTAWIDRSDVLFNDRALAVQVETQPDSPIASQTIGTAHKSGWLWDIALPTRRGIGCIYSSQFTEDAEAERTLKDYVATNLPWQEPEAIVPRKISFRTGHRESFWRGNCVAIGLSAGFIEPLEASAIVLVELSLKALADSFPVTREALPAYSERFNKLFQYRWERVVDFLKLHYVLSQRSEPYWKAHRDPASIPPSLGRQLQLWRDHPPTQWDFPQVDEMFSAASQQYVLYGMGFAEPLSGSSEDLGPVQAQLAAVREKARALTAAMPTNRTYLDALRSTHPANPREGEFA

SEQ ID NO: 89272 - protein, 76 aa, unidentified
  source 1..76: note = Sphingomonadales bacterium
  REGION 1..76: note = tr|A0A4V1SHE6|A0A4V1SHE6_9SPHN Tryptophan halogenase (Fragment) OS=Sphingomonadales bacterium OX=1978525; GN = EOP60_03090 PE=4 SV=1
MGAIQRIVILGGGVAGWMTALGLAHALDASGIAIDLVETGGPDDSIGPFGPGESALPAFHGFLGDHGVDEDMLLRF

SEQ ID NO: 89273 - protein, 147 aa, unidentified
  source 1..147: note = Sphingomonadales bacterium
  REGION 1..147: note = tr|A0A4V1ZZF2|A0A4V1ZZF2_9SPHN Tryptophan halogenase (Fragment) OS=Sphingomonadales bacterium OX=1978525; GN = EOP59_17205 PE=4 SV=1
RMMPQGEISPRDIAEFNDQQFQDMEQIRDFLILHYKVTDRRDSPFWRQCAAMDVPDSLAQKIELFRETARVFRRNEELFAENSWVQVMLGQGIEPQSWHPIAGKLNDDELDRLLGMIRQDVTRTVAGLPDHAAYVARYCGAAEPAAA

SEQ ID NO: 89274 - protein, 405 aa, unidentified
  source 1..405: note = Sphingomonadales bacterium
  REGION 1..405: note = tr|A0A4Q2ZH53|A0A4Q2ZH53_9SPHN Tryptophan 7-halogenase (Fragment) OS=Sphingomonadales bacterium; OX = 1978525 GN=EOP60_12700 PE=4 SV=1
LDLIEFWQYWLRARREGVAEPLADYSFNQQAAKLGRFGRMPRIPNSDLDGISYAFHFDAGLYAKFLRGIAEANGVVRTEGRITGVTRDCESGFVRSVTLESGEEIAGELFLDCSGFIGLLIEQELKTGYEDWTQWLPCDRAIAVPTRNVGAPRPYTQAIAHPAGWQWRIPLQHRSGNGHVFCSEFMSEDEARALLLATIEGEPIAEPRALRFKTGMRKKAWNANVVALGLSSGFLEPLESTSIHLIQNGIAKLISHFPDRRFAQANIDAYNRRTAYDYERIRDFIILHYHANQRPEPFWQHCREMSIPDSLRDKIELFKATGRVFREQEELFVEVGWFQVLTGQNVVPETYHPLADALTREELAQFLQDIRTIVSSNAARLPSHADFIAATCAAPPAAAPAGAPA

SEQ ID NO: 89275 - protein, 502 aa, Erythrobacter sp.
  REGION 1..502: note = tr|A0A349TEF6|A0A349TEF6_9SPHN Tryptophan halogenase; OS = Erythrobacter sp. OX=1042 GN=DCS24_07475 PE=4 SV=1
MTIKNIIIVGGGTAGWMAAAVLSRLKSDRPLNITLIESEAIGTVGVGEATIPPFVEFNQLLEIDERELLSQVQGTFKLGIQFVNWGKQGDSYIHPFGAYGYNMRGISFHHVWHRYHQDGDKRPIQAFNLETMAAHFGRFARTQDFQRDDLPPVNYAYHLDAGRYAQYLRKYAEKRGVVRQEGRIADVALDNESGFVSSVKLEDGREFAGDLFVDCSGFRGLLIEQALKTGYEDWTHWLPCDRAVALPCFREDGSPPPPYTRATAHSAGWQWQVPLQHRNGNGHVYCGNFMDDDEAHDILVNNIAGKPGADPNFLRFVTGRRKKFWNKNVVALGLAAGFMEPLESTSIHLINTGVNKLVALLSLDGVTQAQEDAFNRLTGKEYARIRDFLILHYNATQRDDSEFWNYCRTMDVPETLTEKVELFKQNGQIFREEDELFTESSWTAVMMGQGIQMQGHNAVADTLIGRETRKEVDEMEKSIRFAVQNMPGHGDYLKRYCPAPAI

SEQ ID NO: 89276 - protein, 492 aa, unidentified
  source 1..492: note = Sphingomonadales bacterium
  REGION 1..492: note = tr|A0A4V1ZXN8|A0A4V1ZXN8_9SPHN Tryptophan 7-halogenase OS=Sphingomonadales bacterium OX=1978525; GN = EOP62_08125 PE=4 SV=1
MAEQRIKRVVIAGGGTAGWVVAAALGRHLGPLLDITLVESEEIGTVGVGESTIPTARTFHAFLGIDEREFMRETGSSFKLGISFEDWGQIGDRYIHSFGQIGKGTWMGDFQHFWLRARDQGYGGDLGDYCFELQAALAGKFATGENAQINYAYHLDAGRYSRFLRNFSEKLGVKRVEGRIAQVEQHPESGDIAALVLESGVRIEGELFIDCTGFRGLLIEQALKAGHEDWSHWLPTNSALPLQTAAVGPAVPYTRAMAHSAGWQWRIPLQHRVGNGLVWCSEFMSDDEAHATLHASIEGEVLVEPRPIRFKAGRRRKAWDKNCVAFGLSSGFVEPLESTSIHLFMIGVTRLIQLFPFGGCNDAVTNRYNDLAQSELERIRDFIVLHYKLTERDDSAFWKYCREMAIPDTLAARIELFREDAHAWQASDDLFRIDSWVQVMLGQRLNPRSYHQMGQLLGDKQLREALGDLKGNIARVVAGMPSHQQFIDHYMS

SEQ ID NO: 89277 - protein, 538 aa, Burkholderia pyrrocinia
  REGION 1..538: note = tr|A0A104N2S7|A0A104N2S7_BURPY Tryptophan halogenase; OS = Burkholderia pyrrocinia OX=60550 GN=WJ63_09430 PE=4 SV=1
MSNPIKNIVIVGGGTAGWMAASYLVRALQQQANITLIESAAIPRIGVGEATIPSLQKVFFDFLGIPEREWMPQVNGAFKAAIKFVNWRKSPDRSRDDYFYHLFGSVPNCDGVPLTHYWLRKREQGFRQPMAYACYPQPEALDGKLAPCLPDGTRQMSHAWHFDAHLVADFLKRWAIERGVSRVVDEVVQVHLNDRGYISSLSTKEGRTLEADLFIDCSGMRGLLINQALKEPFIDMSDYLLCDSAVASAVPNDDARVGIEPYTSAIAMNSGWTWKIPMLGRFGSGYVFSSKFTSRDQATADFLNLWGLPDKQPLNQIKFRVGRNGRAWVNNCVAIGLSSCFLEPLESTGIYFIYAALYQLVKHFPDTSFDPRLTDAFNAEIVHMFDDCRDFVQAHYFATSREDTPFWLANRHDLRLSDAIEEKVQRYKAGLPLTTTSFDDSTYYETFDYEFKNFWLNGNYYCIFAGLGMLPDRSLPLLRHRPESIDKAEAMFARIRREAERLRTSLPTNYDYLRSLREGDAGLSRSQPGPMFAAPEIL

SEQ ID NO: 89278 - protein, 511 aa, Erythrobacter sp.
  REGION 1..511: note = tr|A0A2D8MDZ2|A0A2D8MDZ2_9SPHN Tryptophan halogenase; OS = Erythrobacter sp. OX=1042 GN=CL949_11625 PE=4 SV=1
MMPEPISKVVILGGGTAGWMVAAALSKAMGGIPGFSVKLVESEAIGTVGVGEATIPQIVSFNRLLGIDEMEFVRETHATYKLGIEFVDWLREGHSYVHPFGSFGIDMLGIEFRHFWLRGKEQGAAETIDSYSIAAMAAKGGRFDWPRPDMPRSPLSRLAYAFQFDAGRYARFLRKIAEARGVARIEGEVADIRQHPETGFVTGLTLVDGQQIEGDLFIDCSGFRSLLLGQTLEIPFLDWSRWLPCDSAVAVPCKLGGRNEPLTRSTARPAGWQWRIPLQHRIGNGHVFSSGHMERDIATKTLLDNLDGAPLADPIHLSFKAGRRERSWEKNVVALGLAAGFLEPLESTSIHLVQSGIARLMALFPDKDFSALEIARFNAETEKEYRDIRDFLILHYKATERDDSEFWRYCRNLEAPDGLAEKIAMFRSSGRIFREDNELFTEESWMAVMLGQGIEPDRYHPAARLLDGPETLDRLQHIRNAIAGTVAQMPTQDVFLRQRGGAITAGRISPT

SEQ ID NO: 89279 - protein, 482 aa, Erythrobacter sp.
  REGION 1..482: note = tr|A0A3B9AUX4|A0A3B9AUX4_9SPHN Tryptophan halogenase; OS = Erythrobacter sp. OX=1042 GN=DCF81_01175 PE=4 SV=1
MAAALLARFLPPDYRVELVESESIGTVGVGEATIPQIRHFNQALGIDEAEFLRETKGSFKLGIAFDGWRGEGHSYMHAFGPVGQSSGLIAFRHYWLRAKALGHAKDLAHYSPNEIAARNLRMPGPGGADLPYAYHFDASLYAAFLRHYAETRGALRTEGTIERVERDGETGDIAALVLDGDRRLEADFFIDCTGFRALLIEGAMGAGFDDWSNLLPCDRALAVPCASGGDFTPYTRAIARKAGWQWRIPLQHRIGNGYVFSSQFCSEADAADTLLANLDGSPDGDPRLLSFTTGKRRRQWVGNCLGLGLAAGFMEPLESTSIHLVQSALARFLRLLPAGRATPSTIDHFNAQADFEWSRVRDFLVLHYWANGREGEPFWDAMRALGPPATLKCKIDQWRDTGHIHREHEELFTEVAWFQVFAGQGVSANHYNPLADAMAEHDLRDFLASQERQLEQAAAAMPHHADTLGRLMARPAKRNTAA

SEQ ID NO: 89280 - protein, 289 aa, unidentified
  source 1..289: note = Sphingomonadales bacterium
  REGION 1..289: note = tr|A0A4Q5SP04|A0A4Q5SP04_9SPHN Tryptophan 7-halogenase (Fragment) OS=Sphingomonadales bacterium; OX = 1978525 GN=EOP59_14720 PE=4 SV=1
MSARARPVQRIVILGGGSAGWMTAAALGRALGGQRHSITLVESEAIGTVGVGEATVPPIQEFNRYLRIDPAEFLRATSGTIKLGIQFDGWGGADSSYFHPFGYLGVEMGGIHFHHYWLRHLAQGGDPDHAPYNLETLAARAERFAPATRLGPVHHAVHFDAAGYARFLRGHAEASGVVRVEGKVAEVRLDPEDGFIDSLLLDDGRVIDGDLFVDCSGFRGVLIEGALETGYVDWRHWLPCDSAVAMPASRAGDPPPYTRSTAREAGWQWRIPLQHRDGNGYVYSSAHLE

SEQ ID NO: 89281 - protein, 538 aa, Burkholderia pyrrocinia
  REGION 1..538: note = tr|A0A087NKT6|A0A087NKT6_BURPY Tryptophan halogenase; OS = Burkholderia pyrrocinia OX=60550 GN=JM78_31035 PE=4 SV=1
MSNPIKNIVIVGGGTAGWMAASYLVRALQQHTNITLIESAAIPRIGVGEATIPSLQKVFFDFLGIPEREWMPQVNGAFKAAIKFVNWRKSPERSRDDHFYHLFGNVPNCDGVPLTHYWLRKREQGFQQPMEYACYPQPGALDGKLAPCLSDGTRQMSHAWHFDAHLVADFLKRWAVERGVKRVVDEVVEVRLNDRGYISSLSTKEGRTLEADLFIDCSGMRGLLINQALKEPFIDMSDYLLCDSAVASAVPNADARVGVEPYTSAIAMNSGWTWKIPMLGRFGSGYVFSSKFTSRDQATADFLNLWGLSDKQPLNQIKFRVGRNGRAWVNNCVAIGLSSCFLEPLESTGIYFIYAALYQLVKHFPDTSFDPRLADAFNAEIVHMFDDCRDFVQAHYFTTSRDDTPFWLANRHDLRLSDAIKEKVQRYKAGLPLTTTSFDDSTYYETFDYEFKNFWLNGNYYCIFAGLGMLPDRSLPLLRHRPESIDKAEAMFARIRREAERLRTSLPTNYDYLRSLRDGDAGLSRSQPGSTLAAPEIL

SEQ ID NO: 89282 - protein, 500 aa, Sphingomonas sp.
  REGION 1..500: note = tr|A0A369VV04|A0A369VV04_9SPHN Tryptophan 7-halogenase OS=Sphingomonas sp. WZY 27 OX=2283317; GN = DVW87_10785 PE=4 SV=1
MTDMPPALPDIVIAGGGTAGWVAAAAFASQLNGLARIVLVESDEIGTVGVGESTIPTIRTFHNLLGIDERRFMAASQATFKLGISFEGWETPERRYFHAFGSVGRSVFMADFQHFWLEAAGRGFGGEYGDYSLESQAAAQGRFAAGAKSPLSYAYHLDATAYARFLRGLAEAAGVRRVEGRIERVERHDDGDIAALHLASGERVQGDVFVDCTGFRALLIGQTLGSDFVDWSEWLRADSAFAVQSAPSGAPVPYTRAIAHADGWRWRIPLQTRMGNGIVFSSKTLSADEARARLLGALDGEPLFEPRLLRFTSGMRREAWRNNCLALGLAAGFIEPLESTSIHLVMTAVTRFLQAFPFNGAAPAVRDRFNAQARAEWEHVRDFIILHYHLNRRPEAFWRECAAMRVPDTLAQRIAVFRDSAGAWQDQDEIFRTDSWVEVMLGQGEHPRAHHRLPSLLPDDQLRQSLGELSRGIAEQVRGLPSHKDFLDSYCPHQGSAAAA

SEQ ID NO: 89283 - protein, 161 aa, unidentified
  source 1..161: note = Sphingomonadales bacterium
  REGION 1..161: note = tr|A0A4Q5SHB7|A0A4Q5SHB7_9SPHN Tryptophan halogenase (Fragment) OS=Sphingomonadales bacterium OX=1978525; GN = EOP59_16260 PE=4 SV=1
FIEPLESTSIHLIQTGISKLMWLFPDSGMGSAARDEYNRLMHEAYEYVRDFIVLHYKATERRDTALWRHVGEMSVPDSLAAKLELWRERGRIRRYDHDLFGVPSWVAVLIGQGIMPEGHDPLVDSMDDARVTGAMRRIAATYAEVAGKLPGHADQIAAMVR

SEQ ID NO: 89284 - protein, 471 aa, unidentified
  source 1..471: note = Sphingomonadales bacterium
  REGION 1..471: note = tr|A0A4Q5SKR4|A0A4Q5SKR4_9SPHN Tryptophan 7-halogenase (Fragment) OS=Sphingomonadales bacterium; OX = 1978525 GN=EOP59_14690 PE=4 SV=1
MRRVVIAGGGTAGWVATAALVKQLGPLLDITLVESDEIGTVGVGESTIPTSRSFHQLLGLDERIFMRETQATFKLGIAFENWGRIGERYIHSFGEIGRKSTWMAPFHHFWMEARAQGFGGSLGDYCFELKAADADRFATGDGAAINYAYHLDATLYARFLRALAEPAGVRRVEGRIDRVERDPESGFLTALVLQSGARIEGDLFLDCTGFRALLIEQTLESGFEDWTQWLRTDSAFAVQTESVGPPVPYTRAIAHEAGWRWRIPLQHRVGNGLVFASETMSDDEARAKLLAALDGRPLFDPRLIRYRTGRRKQVWNRNCIALGLASGFIEPLESTSIHLVKVAVTRLIESFPFAGVSAAIAERFNDNARQEAEHIRDFIILHYHLNQRDEPFWQRCRTMDIPDSLQQRIAAFRDGAHAYQDGIDLFRVDSWVQVLLGQGLMPQGYHQLARMMPPAELRQALAALTANIDAA

SEQ ID NO: 89285 - protein, 500 aa, Erythrobacter sp.
  REGION 1..500: note = tr|A0A357H967|A0A357H967_9SPHN Tryptophan halogenase; OS = Erythrobacter sp. OX=1042 GN=DD861_08390 PE=4 SV=1
MRSDFKPRRIVVAGGGTAGWMAAAAIAHTMGDAIDLTLVESDAIGTVGVGEATIPPLVLFNRLIGISEADFMRETQATFKLGIEFENWKRDGEKYFHSFGNTGRDHWSAGFQHFWAEGRERGHTVSYDEYCLELVAAYAKKFAHLPENGLNYAYHLNATAYAAYLLRIAEQAGAKRVEGKIGQVDIDGATGNIAAIRLEDGTRLEGDLFVDCTGFRALLIEGALHVGYDDWSHYLPCDSAIAVQTELAGPPVPYTRAIAHDAGWQWRIPLQHRGGNGIVYCSRYLSQDAAHDRLMSTLEGKPISEPRAIPFTTGARRKQWHRNCIAIGLSSGFLEPLESTSIHLIQRAVIRLLRMMPAGDVSERDIAEFNDQQLTDMIQVRDFLILHYKATERRDSPFWRQCATMDIPDSLTQKIELFRETGRVFRKNEELFVENSWIQVMLGQGIMPRAFHPVAKKMTDEELAHFLQTLREKVARTVANLPDHHAYVAQYCGAKTAQAA

SEQ ID NO: 89286 - protein, 538 aa, Burkholderia sp.
  REGION 1..538: note = tr|A0A3N8CC49|A0A3N8CC49_9BURK Tryptophan 7-halogenase OS=Burkholderia sp. Bp9125 OX=2184569; GN = DIE18_08065 PE=4 SV=1
MSNPIKNIVIVGGGTAGWMAASYLVRALQQQANITLVESAAIPRIGVGEATIPSLQKVFFDFLGIPEREWMPQVNGAFKAAIKFVNWRKSPDRSRDDHFYHLFGSVPNCDGVPLTHYWLRKREQGFQQPMAYACYPQPEALDGKLAPCLPDGTRQMSHAWHFDAHLVADFLQRWAIERGVNRVVDEVLEVRLNDRGYISSLSTKEGRTLEADLFIDCSGMRGLLINQALKEPFIDMSDYLLCDSAVASAVPNADARVGIEPYTSAIAMNSGWTWKIPMLGRFGSGYVFSSKFTSRDQATADFLDLWGLPDNQPLNQIKFRVGRNGRAWVNNCVAIGLSSCFLEPLESTGIYFIYAALYQLVKHFPDTSFDPRLTDAFNAEIVHMFDDCRDFVQAHYFASSREDTPFWLANRHDLRLSDAIKEKVQRYKAGLPLTTTSFDDSTYYETFDYEFKNFWLNGNYYCIFAGLGMLPDRSLPLLRHRPESIDKAEAMFARIRREAERLRTSLPTNYDYLRSLRDGDAGRSRSQPGPTLAAPEIL

SEQ ID NO: 89287 - protein, 522 aa, Rheinheimera sp.
  REGION 1..522: note = tr|A0A1B7UGP8|A0A1B7UGP8_9GAMM Tryptophan halogenase; OS = Rheinheimera sp. SA_1 OX=1827365 GN=A5320_16720 PE=4; SV = 1
MTTAVKKLVIVGGGTAGWLSAAIIAAQHRSNTADGLQVVLVESADIPTIGVGEGTWPTMKNTLQQIGLKEADVFAHCHAVFKQGGKFVNWVRSDAQDRSDPSSNTNCNKEFYYHPFTVPMGYGRIDLAPYVDDVSQFAIDSNFQHQICEAGLAPRSLAEGEYQGQCNYAYHLDAGAFADLLKQHCKTKLGVEQRIGTVERCELTADGQIKALHLTDGSMPIEADLFIDCTGFASLLLGKTLGVPFESVDHLLFNDSALAMQVPYDSPDAPIPCHTIATAQNAGWIWDIGLTHRRGVGHVYAAKYLSDDEAEFNLRRYIGKAAEGVAARKISFATGHRTKFWQHNCVAIGMSAGFVEPLEATAIMLVEISARFVADNLPADQATMPLVARRFNQQMLYRWQRILDFLKLHYMLTKRPEPYWQAHLDPATIPQSLLDDLQLWRHRGPQISDFHGALELFPAASYQYVLYGMGFKPDFTAQAYLYQQQAQAQQIIRRNQQLTAQMLQTLPPHRDYINRWLAGSRG

SEQ ID NO: 89288 - protein, 514 aa, Rheinheimera sp.
  REGION 1..514: note = tr|A0A1B7URH1|A0A1B7URH1_9GAMM Uncharacterized protein OS=Rheinheimera sp. SA_1 OX=1827365 GN=A5320_21465; PE = 4 SV=1
MQNFATHHTTPFKLLIVGGGTAGWLTALMLAWHFRQQPWVQIELVEAPDIATIGVGEGSTPALTRLFRQLEIAEADWMPACQATYKNGIQFSHWSTIPGYQHYFHPFPSSEDNAVLPEFFRQVRAAQQAQPSDAHPDSFFLQSQLAKAGKAPFCADHYIQLQYGYHFDAGLLGQCLKKIAIKRGIAYRPFKVTDVQCFSDGAIAQLHTAEGETLTADFYLDCTGFASKLMRQTLGSKFHSYQQMLPNNAAVTIATQAKSQPLSQTTATALRHGWSWQIPLQHRTGNGYVFSQDFISADIAETELRQHLGLSEQQGSSRLLKFESGRLQRHWQHNCVAVGLSQGFIEPLEATALYLVQQTVSHFLLYWQQSQYQCRGELAARSEYNLLINNYFDRIADYIVLHYKTNSRTDSAYWQHNRKLEFISPELRQLLQCWQSGGDLPALLARKRLEKYYHAVSWYCLLAGTGYLPERSQQQCRVEQQQLRLQRWQQLVTLCPDQLEYLHQLAPSDRLVTP

SEQ ID NO: 89289 - protein, 508 aa, Rheinheimera sp.
  REGION 1..508: note = tr|A0A1B7UHT7|A0A1B7UHT7_9GAMM Tryptophan halogenase; OS = Rheinheimera sp. SA_1 OX=1827365 GN=A5320_15565 PE=4; SV = 1
MKIKKIAIVGAGTAGWLAANHLGHELRADPDVQITVIESADVPTIGVGEGTVPYVMKGLERFGISEAELLLQCDTTFKQGIKFVDWLDKKTHGDNHYYHPFDSPYPAGFDISPYWLTQQEKLPFDDIGIQARIAELGLAPKQRSSAEYQGPLAYAYHFNALKFAALLAKNAKQRFRVEHQIATVTGAETDDQGLIRCLTTSAGDKLHFDFYVDCSGFASILIDKTLKVPFISKADELLTDRALVQQIPIADGQPLPPYTTATAHAAGWIWDIPLTSRRGTGFVYSSKHMSDDEARREFASYLGLDPATFAPRQIPMPIGYREQFWLGNCVALGLAQGFVEPLEATSILVTDFAAELLARHFPRHLADVTVCQPYYNQVLRYVWDGVVDFIKLHYFLSDRQDSAFWQDNRDESKLSAQLKNRLAMFKLRPPQQSDFFSRFDLFNEKNFLYVLYGMKFQTQLQPLTPYEIRRSEELLQSNQQLVAGASREFLPHRVWLDALKHAAQQRAG

SEQ ID NO: 89290 - protein, 507 aa, unidentified
  source 1..507: note = Alteromonadaceae bacterium
  REGION 1..507: note = tr|A0A2A5HDT4|A0A2A5HDT4_9ALTE Tryptophan halogenase; OS = Alteromonadaceae bacterium OX=1916082 GN=COA42_21760; PE = 4 SV=1
MSEATPPISRIVIAGGGTAGWMCAAALARVCDKQTTQITLIESENIGSIGVGEATLPVLRDFNRMLGIDEQEFMKATNATFKLGIEFKNWARQGQSYFHPFSGFGLSQNLTPFHLQWLQAHHYTKNAQSKDITLPNFDEFAIVTHAARNNKFAAPGAGNQIDYTYAYHLDATAYAQYLRRYSEALGVVREEGKITHVALDSQCGNITALSLDNGKQVSGDLFIDCSGFRALLIGKVLDTAYIDWRHWLPCDRAVALQTERPPNQPLHSYTTSTAHRAGWQWHIPLQHRTGNGHVYCSKYVSDDEALSVLQSNSGKAINEPKVLHFGAGMRQQCWKRNCISIGLSSGFLEPLESTSIYLIQFGIFKLIELFPRKHNFEIEAKQYNRLMREEYESIRDFLIMHYALNQHKDLPFWADTANMPLPVSLQERLALFKSSGYLPKKRGSFGEASWLAVLYGQHCWPQFKQQGLALLEDDKLLADLQAQHQHMQKSTYTMPAHSSIFPQKPHS

SEQ ID NO: 89291 - protein, 498 aa, Rheinheimera sp.
  REGION 1..498: note = tr|A0A1B7UF71|A0A1B7UF71_9GAMM Tryptophan halogenase; OS = Rheinheimera sp. SA_1 OX=1827365 GN=A5320_19990 PE=4; SV = 1
MQSSANQGIKKVVIAGGGTSGWVAAAALSKRLKGLVEVVLVESEEIGTIGVGESTIPPVQLFHNILGIDEQEFMRATDATFKLGISFENWGQIGDRYIHPFGTTGKGSFLTDFQHYYLHGQMLGVEASFGDYCYELQAAKAHKFGKSANSQISYAYHLDAGRYARFLRTFSESHGCRRIEGKIATVTQHQNGDIKSLLLASGEEVSGDLFIDCTGFRALLIEQTLQTGFVPWDHWLPCNKAVVVQTESAATIPPYTRAIAHDSGWQWKIPLQHRVGNGLVYAGDYLSDELAKQRLLDGLETPALFEPRFLSFQTGRRKKFWSKNCVALGLSSSFIEPLESTSIYLFMNGVVRLLRLFPFDGVRQALADEYNRQSISELEKIRDFIILHYHQTERTDSPFWNYCRTMQIPDSLAQRMELFRESAHAFQSGEEMFRLESWTHVMLGQRLQPKSYHQLVASLPEQELRQHLQNIRDTIGRAVEKLPSHRDFLRQYCPANDQ

SEQ ID NO: 89292 - protein, 498 aa, unidentified
  source 1..498: note = Alteromonadaceae bacterium
  REGION 1..498: note = tr|A0A2E9KC65|A0A2E9KC65_9ALTE Tryptophan halogenase; OS = Alteromonadaceae bacterium OX=1916082 GN=CL587_20610; PE = 4 SV=1
MSENKKTKVVIAGGGTAGWLSAFSLATRLGNLLDITLVESDQIGTVGVGEATIPTMRSFHQLMGINEQEFMSATQATFKLGIQFENWGCKDEKYLHSFGEIGQRAWMAEFHAFWMAAKESGYSAGLDDFCLELKAAREGKFALAAGKKPLNYAFHLDATAYAAWLRKKSEAAGVKRIEGKIAAVDLNSETGNITALKLEKGQVIAGDVFIDCTGFRGLLIGEHLGVEYEDWSHYLAADSAIAVQTESVEPPLPYTRAIAHEAGWQWRIPLQTRTGNGIVYSSRFLSDEEAEKTLLANLDGKPLTQPRKLKFKTGRRVKAWHKNCVAIGLSGGFLEPLESTSIHLVTTALIRLMKLFPFSENFGILAERFNQETAVELETIRDFIILHYHQTTRDDSPFWNHYRTMDVPGSLKHRLSIFRENGYVWPDDVSLFRVDSWVQVMMGQGLMPGSYHQAGKLLPPEGLKQQLTALKNQIDNQLAQLPPHAQFIEKYCPAGKVG

SEQ ID NO: 89293 - protein, 517 aa, Simiduia agarivorans
  REGION 1..517: note = tr|K4KQI7|K4KQI7_SIMAS Tryptophan halogenase; OS = Simiduia agarivorans (strain DSM 21679 / JCM 13881 / BCRC 17597 / SA1) OX=1117647 GN=M5M_17000 PE=4 SV=1
MENKAVRKVVIVGGGTAGWLTAGVLAARLRSQSGHAVSVTLVESPAVKTVGVGEGTWPSMRRTLKAIGVSETELIRRCNATFKQGAKFARWVTGSAQDHYYHPLIQPNGFHDFNLAPYWLKQSEQASFSAAVCPQDALCDAGLAPKKITTPEYAGIANYAYHLDAGAFADFLREHCVTRLDVLHRQAHVSEVRSDDQGDIVGVETNQGLIAGDFFIDCTGSQSLLLGQQLQVPFVCKKHQLFVDQALAVHVPYDSDDAPVASHTVSTAQSAGWIWDIGLQNRRGVGHVYSSAHQSPEMAERELMDYIAASGASVENLSPKHIAIHPGHRAQFWKNNCVAIGMSAGFLEPLEASAILLIEIAAGYIADQFPASRFAMEQLARKYNDTFLYRWERIIEFLKLHYVLSQRSDTAFWRDNRNAQSMPESLQQWLSYWREQSPWHGDFDRAVEVFPAASYQYVLYGMGFETRTDWPPVSEQSLARARTLFQQAQSDTNQLLRGLPDHRTLLNKIKHYGLQAV

SEQ ID NO: 89294 - protein, 538 aa, Pseudomonas sp.
  REGION 1..538: note = tr|A0A0C5ELJ4|A0A0C5ELJ4_9PSED Uncharacterized protein OS=Pseudomonas sp. MRSN12121 OX=1611770; GN = TO66_16635 PE=4 SV=1
MNKPIKNIVIVGGGTAGWMAASYLVRALQQQANITLIESAAIPRIGVGEATIPSLQKVFFDFLGIPEREWMPQVNGAFKAAIKFVNWRKSPHPSRDDHFYHLFGSVPNCDGVPLTHYWLRKREQGFQQSMEYACYPQPGALDGKLAPCLPDGTRQMSHAWHFDAHLVADFLKRWAVERGVNRVVDEVVEVKQNERGYISSLLTKEGRTLEGDLFIDCSGMRGLLINQALKEPFIDMSDYLLCDSAVASAVPNDDAHEGVEPYTSAIAMNSGWTWKIPMLGRFGSGYVFSSKFTSRDQATTDFLNLWGLSDNQPLNQIKFRVGRNKRAWVNNCVSIGLSSCFLEPLESTGIYFIYAALYQLVKHFPDTTFDPRLRDAFNAEIVYMFDDCRDFVQAHYFTTSREDTPFWLANRHELRLSDAIKEKVERYKAGLPLTTTSFDDSTYYETFDYEFKNFWLNGNYYCIFAGLGMLPDRSLPLLQHRPESIEKAEAMFASIRREAERLRTSLPTNYDYLRSLRDGDAGLSRSQRGPKRAAREIL

SEQ ID NO: 89295 - protein, 519 aa, unidentified
  source 1..519: note = Thalassotalea sp.
  REGION 1..519: note = tr|A0A4V5NUQ3|A0A4V5NUQ3_9GAMM Tryptophan 7-halogenase OS=Thalassotalea sp. ZS-4 OX=2572245; GN = E8M12_01345 PE=4 SV=1
MNSDAINSVTIVGGGTAGWLTACYLARQLNQEAADTITITLVESPDVPIIGVGEGTWPTMRTTLQRIGVDESRFIRECDVSFKQASKFVNWHRPAQGNTDNFYYHLFDGPGFSWEFNPVPYWLDGSLGFSSYANAISLQEQVCQHHLAPKMMVTPQYQGVFNYAYHLDAGKFSQLLKTVATTELGVNYISANVTDVHLDNDGSIRSLSTDRTDDLGADLFIDCSGFKSLLLGEALKVPFIDLNDVLFVDRAVTIQAPYKTPECPIASQTISTAQEAGWIWDIGLQSRRGTGYVYSSKYSSAEQAEQLLRDYLNDSEAELEARHLQMRVGHRQTFWEKNCIGIGLSAAFMEPLEASAIFLIEAACFMLAEQFPKNQRGMDYVRNQFNESFAFRWQKTVEFIKMHYVLSERDDSPFWRDNKDPASIPEGLQQRLDYWLENPISKYDFSSQYEPFTKESYEFILYGMRPELRMDSPVTSPAQREKAQQQSQWLQQSWQQAKQQLPTNRELLTRLQENDFQKI

SEQ ID NO: 89296 - protein, 502 aa, Sphingopyxis sp.
  REGION 1..502: note = tr|A0A0Q7YXK0|A0A0Q7YXK0_9SPHN Tryptophan halogenase; OS = Sphingopyxis sp. Root1497 OX=1736474 GN=ASD67_13805; PE = 4 SV=1
MDEGPFNLVIVGGGTAGWMCAAACAAKLDRSRFRVRLIESEEIGTVGVGEATLPQMKDFNDFLGLDEVEFMQATQASFKLGIEFVNWGRQGDRYVHPFGTFGRPIGEADFFSYWVRGRNAGVAAPLSGYCFPIVAALQNRFMLPNGDPNDVRNAFAYAYHLDAFLYARYLRGWAEARGIERVEGRIVDVARDANSGNIAAVALASGTSVAGDMFVDCSGFRSLLLGGTLGVDLDDWSKWLPCDSAAAVPSVRSTDFTPYTRSTRRKAGWQWRIPLQHRTGNGYVYARKDISDDEAAATLLANLDGEALAEPRVLRFKAGKRDQAWAHNVVGMGLAGGFLEPLESTSIYLVQMAIMHMLTLLPSRDGIDPALPAEFNRVMDVEYDRIRDFLILHYIANDADAPLWEQVTTMNVPDTLAGKIDRFRQRAFVQAYRDGLFGPPSWQAVFVGQGIVPHAADRLADTLPDDLLADRLGNLAATIALGAKSAPSHADFVASYCPAPAP

SEQ ID NO: 89297 - protein, 545 aa, unidentified
  source 1..545: note = Dehalococcoidia bacterium
  REGION 1..545: note = tr|A0A3D3WUZ9|A0A3D3WUZ9_9CHLR Tryptophan halogenase; OS = Dehalococcoidia bacterium OX=2026734 GN=DIT90_01535; PE = 4 SV=1
MNVTDLSADVVVIGGGPAGSAAATMLARKGWQVTVLERENFPRDHVGESLLPASIPILEELGALPAVEEAGFLPKPGATMVWGSGSSPWSWYFKETSQRYPHSYQVWRPQFDQILLDNARAAGVTVVEGAHVSEVIFDDGEAVGVEFTNADGVEGEAECRFIVDASGQSTLLARHLEYKQWDPFFQNLAVYAYFTGGDPLPEPDQNNIFIESYQHGWLWSIPLHTGRTSVGAVVDSKIGQEGIQKEGAKAFLESQLSQSTHTKNMLAKAAMDSEPTVLLDWSYTSEKLFGPGFILAGDAACFVDPLFSSGVHLALMSGVLAAAYVTTALNDPSLAEDAGQVYQELYLKEYNQFREMARLFYSSNLSAESYFWEARRITNASHYSPRESFIQAVAGQPPRGYERVVLERGHAPEEFTESIRAVETERRARTEWLAALAGDPQRNQLLNAIPQIAEGVKVEEKPVLAEGEFVRGHVLNTISQPEGTPCSPIVAAVITAVDGQKSVADIVDSLGQHLDQSAHAQLEEAVSRTIEILFVDGAITGLTTE

SEQ ID NO: 89298 - protein, 602 aa, unidentified
  source 1..602: note = Microcystis novacekii
  REGION 1..602: note = tr|A0A552J4C9|A0A552J4C9_9CHRO Tryptophan halogenase; OS = Microcystis novacekii Mn_MB_F_20050700_S1D OX=2486266; GN = EWV54_06580 PE=4 SV=1
MNSTITQSREYDVVIMGAGFAGLCQARHLMLNIPNIRVALIDPRPVERTDKDLKIGESLIEVAALFLCKELGLHDYLIENHTPKSGLNFHWPKDTSKTASLDDYYHVWANRQTPVGSFHLQRAKFEQDLLVMNCQMGADFYEGRVKDVALTSGDELKTVYAKVGEENITLQAKHVIDAAGRNFIIGRKTDNVLSGPENLLGLNNGSAWLRVKNIDRTIFHSGYHPEGASTSHYYATNHYFGQGHWLWMIPIDKHSMELSIGIIHHHEVIPAHSINNLDKFANFLKSNHTILSQLIESGEVVDFHYWPKIAHKSKVLFSPDNWYVIGDAAHIFDAFYSYGTTMIAFEVESVTEIIRAKLAEEAAAEQKRSAYNDFNLAYARTVNCLYRDHAYQLGHASVMSWRIYFEYMWWFGVHVPTYIGKWHLDLNFIPRYVKIANGNVDGIFADLCKEFHQLVEEGANIGLMDAYRADQLWGNYGTLKHFDDFLENTKFEPRRCNVFASMKAVYFYIAIWYALFQWKAFGIAGWLNPKHWYYFGRMLKLSIQATIAEVIYKRKTRGIPDNTQIEKMREEFKNYHYQPQKKSPSVVQNVISERVKIESFPA

SEQ ID NO: 89299 - protein, 498 aa, Pseudoalteromonas luteoviolacea
  REGION 1..498: note = tr|V4H3S7|V4H3S7_9GAMM Tryptophan halogenase; OS = Pseudoalteromonas luteoviolacea 2ta16 OX=1353533; GN = PL2TA16_04963 PE=4 SV=1
MTKRIQNVLIVGGGTAGWLSASLLKRILKDQINITLIESDDIGTVGVGEASIPPMVNFNAALGLDERTFIEQTKATYKLGIEFEGWGYQDSRYMHAFGELGKSFPFCDFFQVWLKAKQQGLTESLAEYSLNTQAAQANRFAHLQQIPNTQLPGLTYAYHFDAGLYAKLLSRHSQNQGVKRVEGKIIEVLTDPKTGYVTEVVMENDERHSADMYLDCSGLKGLLIEQTLNVGFEDWSHWLPCDSAWALPSEQLDGDIKPYTRAIAKEAGWQWQIPLQHRVGNGYVFSSKFISEQDAKESLLQSLPSSALAEPKLIKFKTGMRRKQWQGNVFAVGLASGFLEPLESTSIHLIQTSILRLIRHFPFNEISDNAVSNVNTEFGNEMKQVRDFIILHYKLTERGDTRFWQWCKNMPIPASLQSKIALFNDTGHCTAKTDDLFQNVAWQQVMVGQGLLPKSHHPLAEQFSDEQLTSLLDSLRTLLRSTVAKLPSHQVFIDKMTK

SEQ ID NO: 89300 - protein, 521 aa, Xanthomonas arboricola
  REGION 1..521: note = tr|A0A2S7BDN0|A0A2S7BDN0_9XANT Tryptophan halogenase; OS = Xanthomonas arboricola OX=56448 GN=XarbCFBP7697_20650; PE = 4 SV=1
MTDTAPSEPQQRPVRRVVIAGGGTAGWMAAAALSKVLGRHLQIVLVESDEIGTVGVGEATIPSLVTFHRLLEIDEAAFMAATQATIKLGIGFEHWRDVDRHYIHSFGHTGTDHWSAGFQHFWLKGRQRGLARDFGDYCLELRAAQEGRFAHLPNGGMNYAYHLDAGLYARFLRRFSEGFGVQRIEGRIGNVETHAYSGYLTALTLDNGTRVEGDLFLDCTGFAGLLIGKTLGVGTDDWSQWLFADSALAVQTESVGAPVPYTRSRADQAGWMWRIPLQHRVGNGIVYSSRYMDQDSAAQVLQRNLSGRALTQPRALRFTPNQRHRVWEKNCVALGLASGFLEPLESTNIHLIQRGIIRLMQTFPQVIDNIDIAEYNRQAAAEITHIRDFVILHYHATDRRDTPFWRDCAAMDIPDTLRHRVELFRQSGRVFHQANELFAENSWVQVMLGQGITPKQHHPVADLMGDAELRHFLETIRTRVDAALARLPAHADFLHRYCPAPPLPEPATQLPADAALVTGVR

SEQ ID NO: 89301 - protein, 495 aa, unidentified
  source 1..495: note = Thalassotalea sp.
  REGION 1..495: note = tr|A0A4U1B8H8|A0A4U1B8H8_9GAMM Tryptophan 7-halogenase OS=Thalassotalea sp. ZS-4 OX=2572245; GN = E8M12_04230 PE=4 SV=1
MQQPIKKLVILGGGTSGWISAALTKKLLGNAIDVELVESNEIGTVGVGEATIPPIKLLNDVLGLNEAEFLRETQGTIKLAIKFENWKNENHSYYHTFGAAGKSMAFCHFHHFLKRTGELENDSKLWDYDLNALLAEDGKYAHIRHQDPILEVPYAYHFDAGLYAKYLRKFSEKIGVKRTEGTVARVHQNQQSGFIQTLELKDGTLIDGDLFLDCSGFRGLLIQQTLQTGYEDWSHWLRCDRAVAVASERFDKTLPYTRSIAHKGGWQWRIPLQHRNGNGLVYNSAYYTDDEATDLLLGNLDSKPLTDPKIIKFQTGRRYQQWHKNVIAVGLSSGFLEPLESTSIHLIQSAVVRLVHLFPQHGINQAIVDEYNKQSKLEFEQIRDFIILHYHVNQRTDSLFWQDMRNMAIPDTLAHKIELFKQDGRLFRDQNDLFLESSWLQVMLGQGLVPNSYHPMANAMPEAQVKSMLQKIKAIKHEPLASIPSHDEFLKRYCG

SEQ ID NO: 89302 - protein, 505 aa, Xanthomonas arboricola
  REGION 1..505: note = tr|A0A381LTF7|A0A381LTF7_9XANT Tryptophan 7-halogenase OS=Xanthomonas arboricola OX=56448; GN = CPBF424_32270 PE=4 SV=1
MSQAPIRKVVIAGGGTAGWIAACALSHQFRDLLEITLVESEQIGTVGVGESTVPPIRSFHRFLQIDEQEFLRAVAGTFKLSISFEHWRRQGERYIHPFGITGQSTLVCAFHHLWLESQRRGMPGSFGDYCLETVASRLDRFALLREPAVNYAYHLDAALYARFLRTRSEACGVRRIEGRIQQVTLQPDSGDVASLVLEDGQVLEGDLFIDCSGFRGLLIEQALHTGYEDWSHWLPCDRAVAVQTQALGPPVPYTRAIAHEAGWRWQIPLQHRVGNGLVFSSKHLSDDEAHARLLRDVAAPALKDPWLVPFRTGRRRKAWNRNVVSLGLASGFIEPLESTSIHLTIAAVVRLITLFPADGIAPSQVELFNDISRAEMEHVRDFIILHYHATQRDEPLWRQCRAMELPASLALRLRAWRERAHAWQAADELFRVDSWTHVLMGQGIVPAQHHPLARAISDHDLRRLLDGIAQPIRHAVEQMPSQQAFIDAYCKAGERVWGLRSPVVA

SEQ ID NO: 89303 - protein, 471 aa, Stappia sp.
  REGION 1..471: note = tr|A0A1H2HHG4|A0A1H2HHG4_9RHOB Tryptophan halogenase; OS = Stappia sp. ES.058 OX=1881061 GN=SAMN05428979_2902 PE=4; SV = 1
MSDLRQTDIAVIGGGATGWMAAAYLKRFLPSAGITVMESPTVAPLGVGESLNDISRRFNSALGLDEHDFLRATDGTYKIGIRFENFDRPGGDFYHPFGRPGTHHRARPDAQEAYAATGLCRQNRFDPGQEARGYHVCATRYSAVLRDFARALGVHHIKRHARDVERIGDDVASVEGVSADLFIDCTGFRALLIGEALDTPFEPLSDVLFNDAAVALRVPYDAVSERPFPYTRCTAMDAGWIWRIPLWSRLGAGYCYSSAHISPAQAEADLRAELKLPPGTPDFAGTSDTAWGDHDLKPMHIAFRHGRHARARRGNCVALGGAFGFIEPLESTGLSMTQAAIMALVPGLADLGGWDRLCRDRFDTTVDFIFAHYWLSKRMDTAYWRDLKQCTPSRRLSRVIEAAGRGDYRAIETDPGFFYRPSNWDVVLSGMGAFDDRPRIVATDPEDRHCPDFVSHLATHIHGPTKWSQLQ

SEQ ID NO: 89304 - protein, 507 aa, unidentified
  source 1..507: note = Litorilituus sediminis
  REGION 1..507: note = tr|A0A4P6P7W6|A0A4P6P7W6_9GAMM Tryptophan 7-halogenase OS=Litorilituus sediminis OX=718192; GN = EMK97_07160 PE=4 SV=1
MQIKRIAIVGAGTAGWLAANHLGSELNAEENIEITVIESPDVPTIGVGEGTVPYIMKGLERFGISEAELLVSCDATFKQGIKFVNWLDSEKHGQDNYYYHPFDAPYPQGFNATPYWLAHEQHRPFDDVGIQARVCELGLAPKLKSSGEYQGQLSYAYHFDAAKFAQLLANNAKQRFKVQHQFATVTGAKLCDKGNISHLETKQGELLAYDFYVDCSGFSSILIDKALKVPFISKADELLTDTVLVQQVPISEEEALNPYTTATAHKAGWIWDIPLTTRRGTGFVYSSRHMDEQEAKALYAEYLGIDSKDFNPRKLPMKIGYRETFWQNNCVALGLAQGFLEPLEATSILLSDFSAELLARNFPRELAEIDSTTPYYNEVVSYAWQRTVDFIKLHYCLSDKTDSAFWCENRDPATYSDELIQRLNKFKSKPPQQSDFFSRFDMFDDKNFLYVLYGMKYQTKALAISDAEQQHSKSLLLQNDDLVAKAPEHLMKHKDWLLGLKAAMQAR

SEQ ID NO: 89305 - protein, 535 aa, Verrucosispora sp.
  REGION 1..535: note = tr|A0A2G7D1E5|A0A2G7D1E5_9ACTN Tryptophan halogenase; OS = Verrucosispora sp. CNZ293 OX=2035249 GN=CLT74_1059 PE=4; SV = 1
MTVSGAAAKNTRDPGRTQRVVIVGGGTAGWMTASYLAAAFGKRVDVTVVESATVGTIGVGEATFSDIRHFFEFLRLEESEWMPACNATYKLAVRFENWREPGHHFYHPFEQMASVDGFPLSDWWLRYPTTSRFDKDCFVMASLCDAERSPRYLDGSLVDQGFVEQTHDETSARSTIAEYQGAQIPYAYHFEAHLLAKFLTGYSTQRGVKHVVDNVVDVALDDQGFISHVRTAEHGEIAGDLFVDCTGFRALLLNKALDEPFVSYQDTLPNDSAVALQVPLDMDSKPLRPCTTATAQDAGWIWTIPLISRIGTGYVYASDYATPEEAERVLREFVGPEAADVSANHIRMRIGRSRRSWVKNCVAVGLSSGFVEPLESTGIFFIHHAIEQMVKYFPSGRGDDLLREQYNRSVTHVMDGVREFLCLHYRGAKRVDNQYWKDTKTRVIPDALAERIEIWQHKVPDSESIYPHYHGLPPYSYNCILLGTGGIDVRHSPAVELADERAALAEFERIRLKAEKLVQELPTQNQYFAAMRANA

SEQ ID NO: 89306 - protein, 511 aa, unidentified
  source 1..511: note = Alphaproteobacteria bacterium
  REGION 1..511: note = tr|A0A2N3DIP4|A0A2N3DIP4_9PROT Tryptophan halogenase; OS = Alphaproteobacteria bacterium HGW-Alphaproteobacteria-14 OX=2013660 GN=CVT75_00440 PE=4; SV = 1
MTDGAPASGPTPLKSIVIVGGGSAGWMTAAALADAVGSECAITLIESDAIGTIGVGEATIPPIRNFNRRLGIDEATFVRETQGSFKLGIEFVDWGRQGHSYFHPFGQYGAEFDQVPFYHHWMREYLEGRVAGPIDDFAMCWAMARAGKFTHPSADLRLIQSTFDYAYHFDATRYAAFLRRFAEARGVTRVEGRVVDVGLRGEDGFIDSVTLENGTHIAGEFFIDCSGFRGLLIEDALEAGYDNWQHWLPCDRAVAVACESGDFTPYTRSTAKAAGWQWRIPLQHRTGNGYVHCSEFISEDEASAELVATLDGKPLADPRPLRFIAGRRREFWKRNCVAIGLSAGFMEPLESTSLHLIQYGILRLIALLPDSGMSPLLAREYNAQTTAEYERIRDFLILHYKASERDDSELWRYCAAMPIPDSLQYKIDHFRDYGLLVSDERELFANPSWIAVYLGQGIVPKRAPALAAMRSGVPVAERLAQIRSAMDEAVAAMPSHGEFIARHCAAPLPTA

SEQ ID NO: 89307 - protein, 505 aa, Xanthomonas arboricola
  REGION 1..505: note = tr|A0A2S7BK42|A0A2S7BK42_9XANT Tryptophan halogenase; OS = Xanthomonas arboricola OX=56448 GN=XarbCFBP7697_07330; PE = 4 SV=1
MSQAPIRKVVIAGGGTAGWIAACALSHQFRELLEITLVESEQIGTVGVGESTVPPIRSFHRFLQIDEQEFLRAVAGTFKLSISFEHWRRQGERYIHPFGITGQSTLVCAFHHLWLESQRRGMPGSFGDYCLETVASRVDRFALLREPAVNYAYHLDAALYARFLRTRSEACGVRRIEGRIQQVTLQPDSGDVASLLLEDGQVLEGDLFIDCSGFRGLLIEQALHTGYEDWSHWLPCDRAVAVQTEALGPPVPYTRAIAHEAGWRWHIPLQHRVGNGLVFSSKHLSDDEAHAKLLRDVAAPALKDPWLVPFRTGRRLKAWNKNVVSLGLASGFIEPLESTSIHLTIAAVVRLISLFPADGIAPSQVELFNDISRAEMEHVRDFIILHYHATQRDEPLWRQCRAMELPESLALRLRAWRERAHAWQAADELFRVDSWTHVLMGQGIVPEQHHPLARALSDRDLRRLLDGIAQPIRHAVEQMPSQQAFIDAYCKAGAGVWGLRSPVVT

SEQ ID NO: 89308 - protein, 505 aa, Xanthomonas arboricola
  REGION 1..505: note = tr|A0A2S6YU55|A0A2S6YU55_9XANT Tryptophan halogenase; OS = Xanthomonas arboricola OX=56448 GN=XarjCFBP7652_08825; PE = 4 SV=1
MSQAPIRNVVIAGGGTAGWIAACALSHQFRELLEITLVESEQIGTVGVGESTVPPIRSFHRFLQIDEQEFLRAVAGTFKLSISFEHWRHQGERYIHPFGITGQSTLVCAFHHLWLESQRRGMPGSFGDYCLETVASRVDRFALLREPAVNYAYHLDAALYARFLRTRSEACGVRRIEGRIQQVTLQPDSGDVASLLLEDGQVLEGDLFIDCSGFRGLLIEQALHTGYEDWSHWLPCDRAVAVQTEALGPPVPYTRAIAHEAGWRWHIPLQHRVGNGLVFSSKHLSDDEAHAKLLRDVAAPALKDPWLVPFRTGRRLKAWNKNVVSLGLASGFIEPLESTSIHLTIAAVVRLISLFPADGIAPSQVQLFNDISRAEMEHVRDFIILHYHATQREEPLWRQCRTMELPESLALRLRAWRERAHAWQAADELFRVDSWTHVLMGQGILPEQHHPLARALSDRDLRRLLDGIAQPIRHAVEQMPSQQAFIDAYCKAGASVWGLRSQVVT

SEQ ID NO: 89309 - protein, 501 aa, Tolypothrix sp.
  REGION 1..501: note = tr|A0A218QV22|A0A218QV22_9CYAN Putative tryptophan halogenase OS=Tolypothrix sp. NIES-4075 OX=2005459; GN = NIES4075_66370 PE=4 SV=1
MSTLPKFTQVLVIGGGPAGSTTATLLAREGFDVTLMEKAVGPRYHIGESLLPSSMEILELTNAKEKVEAYGFQRKEGAYFEWGTDKWSFDFGQLNGKQKYSYHVRRADFDKLLLDHATSQGVKVFEGTEVRELSFNGARPQSAIWSQNSGDNSSGEISFDILVDASGRAGVMATRYLKNRQQNQVFQNIAVWGYWKGAGKLTEAPAGAFVGGSTEDGWLWGIPLHDGTLSVGVVMHKESYKARRSTSLEEFYLGAIAESPLMTKLLTQAELVSSVQAEQDYSYAAENFCGPGYFLIGDAACFLDPLLSTGVHLANLSALLASASITSLLRNEVSENQAISFYEKSYRQAYLRFLSLVSFFYDKKRGTEAYYEEAQELAHNDYRDSAPNTAFVNLVSGMEDLTEAQNGIDNLVIEKISQRAARSLSLEQVQEDLDGEKMDTQIMNVMEGMYTFSKDLSVEAAIDGFYVVTRPRLGLGRVSEKVEESAQKRLADSNAPSPSIR

SEQ ID NO: 89310 - protein, 500 aa, unidentified
  source 1..500: note = Dehalococcoidia bacterium
  REGION 1..500: note = tr|A0A2D6N4L5|A0A2D6N4L5_9CHLR Tryptophan halogenase; OS = Dehalococcoidia bacterium OX=2026734 GN=CL878_05025; PE = 4 SV=1
MRSDFKPRRIIVAGGGTAGWMAAAAIAHTMGDAIDLTLVESDAIGTVGVGEATIPPLVLFNRLIGIGEADFMRETQATFKLGIEFENWKRDGEKYFHSFGNTGRDHWSAGFQHFWAEGRERGHTVSYDDYCLELVAAYAKKFAHLPENGLNYAYHLNATAYAAYLRRIAEQAGAKRVEGKIGQVDIDGETGNIAAIGLEDGTRLEGDLFVDCTGFRALLIEGALHVGYDDWSHYLPCDSAIAVQTELAGPPVPYTRAIAHDAGWQWRIPLQHRGGNGIVYCSRYLSQDAAHDRLMSTLEGKPISEPRAIPFTTGARRKQWHRNCIAIGLSSGFLEPLESTSIHLIQRAVIRLLRMMPAGDVSERDIAEFNDQQLTDMIQVRDFLILHYKATERRDSPFWRQCATMDIPDSLTQKIELFRETGRVFRKNEELFVENSWIQVMLGQGIMPRAFHPVAKKMTDEELAHFLQTLCEKVARTVANLPDHHAYVAEYCGAKTAQAA

SEQ ID NO: 89311 - protein, 521 aa, unidentified
  source 1..521: note = Aliiglaciecola lipolytica
  REGION 1..521: note = tr|K6X7J4|K6X7J4_9ALTE Tryptophan halogenase; OS = Aliiglaciecola lipolytica E3 OX=1127673 GN=GLIP_3983; PE = 4 SV=1
MTNSVHTHQPKKLLIVGGGSAGWITALYLHKYFNQQGQHLDISLIESDHIGPIGVGEATVHSIRFLFAALGLDEAELMRDTNATLKSGILFRNWMKPVNGKTHEYFHPFEQQRHSGNLDISSEWILGEHYLHQRYDQGTCASSAFLEGMQCPKAPMSHPYQGLVPYGYHLDATLLGQFLQKKGLEAGIKRVVDTIEVVHVEDGEISSVSSKSTTYEADFYIDCSGFRGKLIEALAEDNWISFEDELPCNKAVAIQREYLPGEVPKPYTTATALSHGWAWQIDLVNRQGTGYVYDGKRLSKDQAEQELRALLGDAVTTKDALHLDMKVGCRKAFWVGNCLSVGLSAGFIEPLESTGLHLINLGARLFATHFTAGQCNQTIRDSYNRQLSGIYDDLKQFIVLHYCLTDRDDSAFWQQAQRSADNNPQLTEKLQIWKHKICEFMDLAGGFTTTFSDENYRYVLYGMQHFPSLHACIDKQQNHTLFSQLKKHSDNLMRQSSSHQAFLERLHQRPLFERQETKNER

SEQ ID NO: 89312 - protein, 505 aa, Xanthomonas campestris; identical to SEQ ID NO: 89083
  REGION 1..505: note = tr|A0A1T1RBS7|A0A1T1RBS7_XANCA Tryptophan halogenase; OS = Xanthomonas campestris pv. vitiscarnosae OX=487900; GN = Xvtr_04955 PE=4 SV=1

SEQ ID NO: 89313 - protein, 496 aa, unidentified
  source 1..496: note = Proteobacteria bacterium
  REGION 1..496: note = tr|A0A3E0MQY4|A0A3E0MQY4_9PROT Tryptophan 7-halogenase OS=Proteobacteria bacterium OX=1977087; GN = DWQ28_11990 PE=4 SV=1
MSHQPIKRVVIVGGGTAGWNAAALLARTLSKVISVTLVESDDIGIVGVGEATIPPIINFNNALGFNEADFLKATNGSIKLGIQFENWGEDGDSYMHAFGNIGKDFAFCTFHNFWLRSQAEGIESNFWDFSLNYQTAKNNKFAKVQQLPGTDLAGIAYAYHFDAGLYAKYLRGFCEAKGVKRVEGIINKVNQCPDTGFIQSVALESGQVVEGDLFLDCSGFRGLLIEQALETGYEEWGHWLPCDRAMAVPTASTGEIRPYTRSIAHKAGWQWNIPLQHRTGNGHVYCSRYISDDEARKVLLDHVEGEPLAEPRNIPFKTGRRKKQWNKNVISFGLASGFLEPLESTSIHLIQAGLRRLVQHFPHNGIRETEVDEFNRQSQIEFEKIRDFIILHYKVNQRTDSQFWIDCRNMDIPDSLAHRIELFRSSGKVFKDNDELFHEIAWQQVMIGQRLMPEDYHPLAHSITSEQLEGLLGDLKTLIGNTVSKLPSHNQFLQSQ

SEQ ID NO: 89314 - protein, 589 aa, unidentified
  source 1..589: note = Microcystis novacekii
  REGION 1..589: note = tr|A0A552J4H1|A0A552J4H1_9CHRO Tryptophan halogenase; OS = Microcystis novacekii Mn_MB_F_20050700_S1D OX=2486266; GN = EWV54_06575 PE=4 SV=1
MNTTQALHYDVVIMGAGFAGLCQARHLMLKIPNIRVALVDPRPEQRTDKDLKIGESTIEIAALFLAKELGLHDYLIENHAPKQGLNFHWPKNPAKTETIDDYYHAGSNRQVPIPSFQINRAKFEQDLLKMDKAMGITFYNGQVVDVDLTPGDAIKTVKIKVGDERMELQAKHVIDAAGRKFIIGRKTDNLLFGPENLMGLNTGSAWVRVKNVDRTIFHSGYDPLNASTSHYYSTNHYFGEGHWLWMIPIDTQTMELSIGVIHHHDVINSTQVNSREKFHDFLRNNHQILANIIDSGEAVDFHYWPRISHTSKTLFSPDNWYVLGDAAYIFDAFYSYGTTTIALAIEGITEIVRAKLAGEESAEQKRAAYNEFNLAYSRSVNCLYRGHAKQLGQASVMSWRIYFEYMWWFGVQVPMYVGKWHLDLTYIPIFLKTLNSNIDGLFADLNEQFTELADKDVNIGLMDCYRGDQLFNGYHTLKHFDDFLENTKLEPRRCNVFAGLKATCFYAALWYALFQWKGFGIQGCLHPHHIYHFLRLLGLSGQATIGELIYKFKTKGLPANSEIEAMRQEFKTYQYQPKLQPWLTEATNS

SEQ ID NO: 89315 - protein, 505 aa, unidentified
  source 1..505: note = Thalassotalea sp.
  REGION 1..505: note = tr|A0A4U1B9R9|A0A4U1B9R9_9GAMM Tryptophan 7-halogenase OS=Thalassotalea sp. ZS-4 OX=2572245; GN = E8M12_01340 PE=4 SV=1
MNKKRLLILGGGTAGWMTALLMAKRLGENIDIILVESPDIPVIGVGEGTTPYIKQFFKQLDIREQDWMRECQATYKCGIRFPDWSTKIGYQSYFHPFFSPLDKQVGEAFFHNVNCRRAGIDVNANPSHYFVTSYLGERGLSPHCYQALPFELDYAYHFDAALLGNYLRKIAVEIGIIHRQANIISVGHQVNGNIEALITDSGDKLTADLFIDCSGFRALLLAEELNVPLHSYADSLLNNAAVAIQVDHQQSSCLDTLLPTETRSSALSNGWMWNIPLNQRWGNGYVYSRDYISANSAEQELRVALAIDDSVDARHLSMQVGRRTRHWQNNVIAVGLSQGFVEPLEATALMLVQYTIEHACAVIEKSDSQNLQDIADGEKRTFNDIINAMFDGVRDYILVHYLTNSRDDTKYWRDNRHGLMIPDTVRHLLEVWQSDADIEQELGGYFKTSMYSKASWYCLLAGMGVFPELVDDNKRSSHSIAPLEPVIAYNQNCMQHFRPQREIIG

SEQ ID NO: 89316 - protein, 420 aa, Shewanella woodyi
  REGION 1..420: note = tr|B1KLX6|B1KLX6_SHEWM Tryptophan halogenase; OS = Shewanella woodyi (strain ATCC 51908 / MS32) OX=392500; GN = Swoo_4606 PE=4 SV=1
MQTASATQGKQADIDVVIIGAGPSGSIAASLLHQAGKRVVVIEKQHFPRFSIGESLLPCCMQLIEEANMLDAVNAAGFQFKNGAAFRYRDQYINFDFTDKFTPGPGTTFQVERGNFDKLLADTAAEQGVEIRYGETVESVDLSADPTLSIRDEAGKLYTIEAKYLLDASGFGRVLPRLLNLEKPSNLANRSAVFTHIQDNIGDKEVDGKPFDRNKILVSVHPKNRDIWYWLIPLSEGKCSLGVVGEPHLLSGLEDNLEEMLLDMVKQEPGLNQLLSDAEVLRECALLKGYSANVSTLATDKFALLGNAGEFLDPVFSSGVTIAMQSASMAVKCIARQLNGTPVNWEQEYSIPLMRGVDTFRTYVEAWYDGRFQDVIFYDDPDNKIKQMICSILAGYAWDESNPFVNDSRKRLNLIVELCK

SEQ ID NO: 89317 - protein, 506 aa, Xanthomonas arboricola
  REGION 1..506: note = tr|A0A2S7AFM2|A0A2S7AFM2_9XANT Tryptophan halogenase; OS = Xanthomonas arboricola OX=56448 GN=XarjCFBP7645_12865; PE = 4 SV=1
MIPAPLRNIVIVGGGTAGWMAAAAFARVLGPGFKVQLIESEQLGTVGVGEATVPHIKAFNNLLGIDEAEFVRQTQGSFKLGIEFVDWQRPGTSYIHGFGTQIGHPLGLLPFHQYWIKQRARGKAQPLGTYTLNTVAAMRGKFMTSAGDVPANSPLANIAYAYHFDATQYARFLRTYAEQRGVTRIEGLVEQVRLHADSGHVQALQLASGQVVGGDLFIDCSGFRGLLIEEALHTGYHDFTHWLPCDRALAVPSENVGPPTPYTRSTARAAGWQWRIPLQHRTGNGYVYSSAHISDDEAAATLLANLEGKPLADPRPLRFTTGRRKQFWNRNVVALGLASGFLEPLESTSIHLIQAGISRLLELFPREGISPVLVQRYNDRLAFEFDRIRDFLVLHYHATERDDSAFWRHCRTMPITPELQTTLDLFRDSGRFYRNAEEMFAEISWVQVMVGQGILPRGYHPLVDQVPDHDAERFLASVAQTIGHCVDVMPTHQQFIDRYCKAAAPR

SEQ ID NO: 89318 - protein, 530 aa, unidentified
  source 1..530: note = Thalassotalea sp.
  REGION 1..530: note = tr|A0A4U1B3M8|A0A4U1B3M8_9GAMM Tryptophan 7-halogenase OS=Thalassotalea sp. ZS-4 OX=2572245; GN = E8M12_11735 PE=4 SV=1
MNNIAPNDRENRQRPIQRVLIVGGGTAGWLTANHLASQLKPSPDKGVEIILVDSEHIPAIGVGEGTVPMLRHSLQAFGIDEGRLIQECDATFKQGIKFIDWLDTPPFGQSSHYHHLFDYPLISEIPDLTAYWLQLPVDKRPAYTDFVAFQGQVCDKGLAPKHITSAQYQGHCQYAYHLDAAKFTRLLQQHATEHFGVTLIKANVSDVTLDPQGDIAAVVTDCAGAINADLFVDCSGFNAILLEKALGVGFIRKNQSLFVDKALAVQVPYQDAEQPIPSFTKATAKSAGWVWDIGLTTRRGCGYVYSSAHLSESLAEQDFRNYLGDTKEDYEIRQIDMNVGYRQTFWHKNCVAIGLSQGFVEPLEATGLLLFDVTAKMLAQQFPSHRALMPLVAEQFNQNVRHSWERVIDFIKLHYFLSRRDDSDFWHDNRQWSGLSPVLQERLQRWQWQLPSAYDFASGYEIFNLENYLYVLYGMEFCTDLSQSQYRYNEQQRVAQLQHQLQQHRQQLLKQLPEHRQLLAKIRQFGLQRQ

SEQ ID NO: 89319 - protein, 512 aa, Lysobacter capsici
  REGION 1..512: note = tr|A0A0S2FWZ2|A0A0S2FWZ2_9GAMM Tryptophan halogenase family protein OS=Lysobacter capsici OX=435897; GN = LC55x_4850 PE=4 SV=1
MHNDAERGASATRPIKRVVIAGGGTAGWMAAAAISNIFGATLQISLIESEEIGTVGVGEATIPTLSTFHRLLDIDEREFMAATQGTIKLGISFENWTTEQHRYIHSFGSTGKDHWSAGFQHFWRRGRELGLAGSYDDYCVELQAALQGKFAHLKNYRMNYAYHLDASLYARFLRTMSEGNGCRRIEGKIVEVLTDADSGFITALRLERGEVIEGDLFIDCTGFRALLIDKTLGVGFEDWSHWLLNDSAIAVQTTSVCDPVPYTRAIAEQWGWQWRIALQHRVGNGIVYSSRHVGDDEAKQALLCSVDGEILKNPWPVRFRPGRRLQCWSHNCIALGLAGSFIEPLESTTIHLIQRGITHLIRSFPQVISQAGVDEYNTQMADELQHVRDFVVLHYHATQRRDSPYWEYVSSMTLPDTLRRRIELFRETGTVFHVPGELFAENSWIQVMMGQGITPKTHHPTADTMSEADLRRFLDDIRNHVDTIVRALPSHQAYLNQYCPSAPRATVPAHVA

SEQ ID NO: 89320 - protein, 522 aa, unidentified
  source 1..522: note = Proteobacteria bacterium
  REGION 1..522: note = tr|A0A3E0N6X7|A0A3E0N6X7_9PROT Tryptophan 7-halogenase OS=Proteobacteria bacterium OX=1977087; GN = DWQ28_06005 PE=4 SV=1
MVNHPIQHIVIVGGGTAGWLTANVIAARFRPEQGLGVRVTLVESPNVPTIGVGEGTWPSMRTTLKDIGISEADFIRSCDASFKQGTWFKDWIHKGDSCYYHPFSLPEGFDTVNLAEHWLAGEAGEISFAEAVTPQYAACELGKAPKQIGIPNYAYTVNYGYHLDAGKFASLLTKNATEKLGVTHISADVVSVNSDNDGYITSVMTEQSGEIYGDLFVDCSGFQSLLLGQHFGVENVSIDQYLFNNAAVAVQVPYAEEDAPIATTTHSTAQENGWIWDIGLQHRRGVGHVFSKAFQTHDQTLQVLDTYLKETGHTTGLDDLAPRLLEFEPGYKRHFWVKNCLGIGLSAGFIEPLEASALVLVELSATALANQMPRHRGDMEVISGRFNREFASRWSQIIDFLKLHYVLSKRDDSAYWQENREGDSIPDSLKENLVVWANRPPWYHDDLRRDEMFPAASYQYVLYGMGFESQPAFMATRTGDQQREVARRLFAETQKKAGKYGQFLPPNRFLMNQLRDQDFARI

SEQ ID NO: 89321 - protein, 491 aa, Nocardia terpenica
  REGION 1..491: note = tr|A0A291RRG3|A0A291RRG3_9NOCA Tryptophan halogenase; OS = Nocardia terpenica OX=455432 GN=CRH09_30915 PE=4 SV=1
MSVEDFDVVVAGGGPGGSTVAALVAMQGHRVLLLEKETFPRYQIGESLLPATVHGVCRMLGVTDELAEAGFPLKRGGTFRWGARPEPWTFHFSISARMAGSTSFAYQVERARFDEILLNNAKRKGVVVRVGCPATDVVEDGERVTGLRYTDPDGNEREVSARFVIDASGNKSRLYSHVGGTRNYSEFFRSLALFGYFEGGKRLPEPASGNILSVAFDSGWFWYIPLSDTLTSVGAVVRREMAEKIQGNREAALEALIAECPMISDYLSQARRVTTGKYGELRVRKDYSYQQTNFWRPGMILVGDAACFVDPVFSSGVHLATYSALLAARSINSVLAGDLDEKTALTEFEARYRREYGVFYEFLVSFYQMNVNEESYFWQAKKITKNQNTEIESFVELIGGVSSGETVLTAADKIAERSAEFAAAVDRMAGGDTDNMVPMFESQVVQQAMQEAGQVQMKAILGEDAEPELPLFPGGLVASPDGMKWLPYHPE

SEQ ID NO: 89322 - protein, 169 aa, unidentified
  source 1..169: note = Proteobacteria bacterium
  REGION 1..169: note = tr|A0A4Q6F4Y1|A0A4Q6F4Y1_9PROT Tryptophan halogenase (Fragment) OS=Proteobacteria bacterium OX=1977087; GN = EOP02_29720 PE=4 SV=1
MDGKAIKAIVIVGGGTAGWMAAAALSKVLGRTYDIRLVESDAIGIVGVGEATVPHIRAFNSLLRIDETAFVRETQGTFKLGIEFVDWRRIGESYMHGFGTEIGHPLGLLPFHQYWIKARQAGRAGDLGQYTLNTVAAMAGRFMVSATDVPPNSPLANISYAYHFDAALY

SEQ ID NO: 89323 - protein, 506 aa, Xanthomonas arboricola
  REGION 1..506: note = tr|A0A2S6Y8J6|A0A2S6Y8J6_9XANT Tryptophan halogenase; OS = Xanthomonas arboricola OX=56448 GN=XarjCFBP7653_15265; PE = 4 SV=1
MLPAPLRNIVIVGGGTAGWMAAAAFARVLGPGFKVQLIESEQLGTVGVGEATVPHIKAFNNLLGIDEAEFVRQTQGSFKLGIEFVDWQRPGTSYIHGFGTQIGHPLGLLPFHQYWIKQRARGKAQPLGAYTLNTVAAVRGKFMTSAGDVPANSPLANIAYAYHFDATQYARFLRTYSEQRGVTRLEGLVEQVQLHADTGHVQSLQLASGQVVSGDLFIDCSGFRGLLIEEALHTGYHDFTHWLPCDRALAVPSENVGPPTPYTRSTARAAGWQWRIPLQHRTGNGYVYSSAHISDDEAAATLLANLDGKPLADPRPLRFTTGRRKQFWNRNVVALGLASGFLEPLESTSIHLIQAGISRLLELFPREGISPVLVQRYNDRLAFEFDRIRDFLVLHYHATERDDSAFWRHCRTMPITPELQTTLDLFRDSGRFYRNAEEMFAEISWVQVMVGQGILPRGYHPLVDQVPDHDAERFLASVAQTIGHCVDVMPTHQQFIDRYCKAAAPR

SEQ ID NO: 89324 - protein, 506 aa, Xanthomonas arboricola
  REGION 1..506: note = tr|A0A2S6YUE2|A0A2S6YUE2_9XANT Tryptophan halogenase; OS = Xanthomonas arboricola OX=56448 GN=XarjCFBP7652_06485; PE = 4 SV=1
MIPAPLRNIVIVGGGTAGWMAAAAFARVLGPGFKVQLIESEQLGTVGVGEATVPHIKAFNNLLGIDEAEFVRQTQGSFKLGIEFVDWQRPGTSYIHGFGTQIGHPLGLLPFHQYWIKQHARGKAQPLGAYTLNTVAAVRGKFMTSAGDVPANSPLANIAYAYHFDATQYARFLRTYAEQRGVTRIEGLVEQVQLHADSGHVQSLQLASGQVVSGDLFIDCSGFRGLLIEEALHTGYHDFTHWLPCDRALAVPSENVGPPTPYTRSTARAAGWQWRIPLQHRTGNGYVYSSAHISDDEAAATLLANLDGKPLADPRPLRFTTGRRKQFWNRNVVALGLASGFLEPLESTSIHLIQAGISRLLELFPREGISPVLVQRYNDRLAFEFDRIRDFLVLHYHATERDDSAFWRHCRTMPITPELQTTLDLFRDSGRFYRNAEEMFAEISWVQVMVGQGILPQGYHPLVDQVPDHDAERFLASVAQTIGHCVDVMPTHQQFIDRYCKAAAPR

SEQ ID NO: 89325 - protein, 569 aa, unidentified
  source 1..569: note = Fimbriimonas ginsengisoli
  REGION 1..569: note = tr|A0A068NLR1|A0A068NLR1_9BACT Tryptophan halogenase; OS = Fimbriimonas ginsengisoli Gsoil 348 OX=661478; GN = OP10G_0332 PE=4 SV=1
MESLTTDVAIIGGGPSGSTCGGFLKKYQPDSKVLILEREQFPRDHIGESQLPLIGRILDELGVWDRVEAAGFPVKIGGTYRWGTTDDLWDFDFLPFGQFDDAPRPGRYEGQRKRTAFQVDRSAYDKILLDYAEELGCEVRQRSAVREVRRKGDRVEGLVLADGTEIEAKWYVDATGHSGLLRRAMDVEIDEPSSLKNVAGWYYWRNAEWAVSLGVGGTRIQILSLGYGWIWFIPISPDRTSIGFVCPADHYKKSGLSMEELYRRAIAEEPRLQRLIQNATREDRFTTTKDWSFVANRMAGPNWLLVGEAAGFADPILSAGMTLAHAGAREAAFLIMEAARGGNVPWMAENYERRNERRVRQHIRFADYWYKANTNFTDLKEYTSEIARDAGLELSGDQAFQWLGTGGFIEEDMEVAGLALIRLDQLHSLTGRLSEAPATSSLDGYSVFLPHLSGAEQVKVARFENGGVKAMVALRRDGKFLPLYGLFGLMVDALKFSPLLNEAFGFVQRTMGDAFNHELHARLTECLDAMIREGWVRPKKFGEAPAVRHELPMETAAIHQHTPDRGDGV

SEQ ID NO: 89326 - protein, 506 aa, Xanthomonas arboricola
  REGION 1..506: note = tr|A0A2S7BE07|A0A2S7BE07_9XANT Tryptophan 7-halogenase OS=Xanthomonas arboricola OX=56448; GN = XarbCFBP7697_21350 PE=4 SV=1
MIPAPLRNIVIVGGGTAGWMAAAAFARVLGPGFKVQLIESEQLGTVGVGEATVPHIKAFNNLLGIDEAEFVRQTQGSFKLGIEFVDWQRPGTSYIHGFGTQIGHPLGLLPFHQYWIKQHARGKAQPLGAYTLNTVAAVRGKFMTSAGDVPANSPLANIAYAYHFDATQYARFLRTYAEQRGVTRIEGLVEQVQLHADSGHVQSLQLASGQVVSGDLFIDCSGFRGLLIEEALHTGYHDFTHWLPCDRALAVPSENVGPPTPYTRSTARAAGWQWRIPLQHRTGNGYVYSSAHISDDEAAATLLANLEGKPLADPRPLRFTTGRRKQFWNRNVVALGLASGFLEPLESTSIHLIQAGISRLLELFPREGISPVLVQRYNDRLAFEFDRIRDFLVLHYHATERDDSAFWRHCRTMPITPELQTTLDLFRDSGRFYRNAEEMFAEISWVQVMVGQGILPRGYHPLVDQVPDHDAERFLASVAQTIGHCVDVMPTHQQFIDRYCKATAPR

SEQ ID NO: 89327 - protein, 119 aa, unidentified
  source 1..119: note = Rhizobiaceae bacterium
  REGION 1..119: note = tr|A0A4Q3HLD0|A0A4Q3HLD0_9RHIZ Tryptophan halogenase (Fragment) OS=Rhizobiaceae bacterium OX=1913961; GN = EOP17_21765 PE=4 SV=1
MAQPLEVVIVGGGTAGWMTAAALTSVVRPEFRRVRLIESDQIGTVGVGEATLPQMKDFNDWIGVIESEMMRETNATFKLAIEFRDWGFKGSSYLHPFGAHGQPISGVAFHQHWLRAAQA

SEQ ID NO: 89328 - protein, 502 aa, Rhodanobacter lindaniclasticus
  REGION 1..502: note = tr|A0A4S3KJZ5|A0A4S3KJZ5_9GAMM Tryptophan halogenase; OS = Rhodanobacter lindaniclasticus OX=75310 GN=B1991_04430; PE = 4 SV=1
MQAQPIQRVVIVGGGTAGWMAAALLARALGKAVRIRLVESDEIGIVGVGEATIPQIRHINTFLGIDEDDMLRATQGTFKLGVQLNDFGRLGDSYLHAFSDIGLPLGLIGFHHYWLRERRRDPASDLWAYSLNTQAANEHRFARMEKVGDTPLGGIKYAYHFDAGLYGQYLRKRCDPAVVQRTEGKVVEVRLREGDGFIESVRLASGETIEGDLFVDCSGFRGLLIEGALHAGYESWQHWLPCDRAMAVACARSEPLWPYTRATARAAGWQWRVPLQHRTGNGLVYASAHMGDDEAAATLLAHLDGEPLGEPRPLRFTTGMRRKAWQRNCVALGLAAGFMEPLESTSIHLIQSGISRLLAMFPDRQCDPVLVDEYNRQTRFEYESIRDFLILHYKATERDDTPFWRQCAAMDIPPGLARKLALFRGHGQIFREREELFTEVAWLQVMIGQRIEPQAYHPLADALGTAQLDGFLTDIRTLVGRAAASMPDHARFVADHCRAGDS

SEQ ID NO: 89329 - protein, 536 aa, Serratia plymuthica
  REGION 1..536: note = tr|A0A1B1KWB6|A0A1B1KWB6_SERPL Flavin-dependent tryptophan halogenase PrnA OS=Serratia plymuthica PRI-2C; OX = 1154756 GN=prnA PE=4 SV=1
MSKPIKNIVIVGGGTAGWMSASYLVKALQQQANITLIESAAIPRIGVGEATIPSLQKVFFDFLGIPEQEWMPQVNGAFKAGIKFVNWRTSPDHSRNDYFYHLFGNVPSCDGVPLTHYWLRKREQGFQQSMAYACYPQPGALDGNLAPCLHDGTRQMSHAWHFDAHLVADFLKRWAVDRGVNRVVDEVVEVNLNEHGFISSLFTKEGRKLEADLFIDCSGMRGLLINQALKEPFIDMSDYLLCDSAVATAVPNDDAQVGVEPYTSSIAMNSGWTWKIPMLGRFGSGYVFSSKFTSRDQATTDFLNLWGLSDNQSLNQIKFRVGRNKRSWVNNCVSIGLASCFLEPLESTGIYFIYAALYQLVKHFPDTSFDPRLADAFNAEITYMFDDCRDFVQAHYFTSSREDTPFWLANRHDLRLSDSIKEKVERYKAGLPLTTTSFDDSTYYETFDFEFKNFWLNGNYYCIFAGLGMLPDRSLPLLQLRPESIEKAEAMFARIQREAERLRVSLPTNYDYLRSLREGGVGLSRPGPTPASPESR

SEQ ID NO: 89330 - protein, 548 aa, unidentified
  source 1..548: note = Dehalococcoidia bacterium
  REGION 1..548: note = tr|A0A2E7SAY8|A0A2E7SAY8_9CHLR Tryptophan halogenase; OS = Dehalococcoidia bacterium OX=2026734 GN=CL886_05915; PE = 4 SV=1
MTLPNSNEQFDIIVIGGGPAGSTTATMLAKYGYSVLLLERSEFPRDHVGESLLPASIPVLEELGVIDEIRQAGFLPKWGATMIWGVDKDPWSWHFRETNEQYPYSYQVWRPEFDKILLDNSRNHGVDVREGHRVLNVLFDGSKAVGVQYTDSYGYSNVASAEYIVDASGQQNLLGSQLKTKREDPFFRNLAVYGYYTGVPKLPEPDQNNIFIESYENGWTWNIPLHNGFNSVGVVVDCDANQSSIQEYGAQKFYTEELSKTSYMSKLLQTAVLESMPSVVKDWSYSCSPMVGDGYILVGDAACFIDPLFSSGVHLALMSGVLSSTYINTSMKDKTLGLACREVYESLYMKEYGHFRELARLFYSSNRSVESYFWEARRVLDNDSSLSPRSAFIQAVAGQSARGYERVVLQHGDLPKSFVGSINRIESEVRRRAEQFPLDEDSIVLEGATLIPKLAKGVVLERKPVLGEGIFDWGYVLTTLNRNNGIECSELVAILLSKVDGESTLDDLLALFRERASEDDWPTLRKALLNSVRLLYMDGVIERFDPKD

SEQ ID NO: 89331 - protein, 500 aa, Shewanella woodyi
  REGION 1..500: note = tr|B1KHC5|B1KHC5_SHEWM Tryptophan halogenase; OS = Shewanella woodyi (strain ATCC 51908 / MS32) OX=392500; GN = Swoo_1140 PE=4 SV=1
MDNKIKKVVIAGGGTAGWMTAAALSKLMGKHLDIVLVESDEIGTVGVGEATIPTLHIFHRLLGLKEQEVMAATNATFKLGISFENWKELNQSYLHSFGFLGKDCWACGFQHFWLKGKKQGIASEIGDYCTEHVAAREGRFAILPNQDQNHAYHMDASLYAKYLRKFAEQHGMSRIEGKIADVLQHQDSKSNSNGHIKALVLESGQVINGDLFIDCTGFKALLIEQTLNTGFEDWSHWLPCDSAIAVQTEATNSPIPYTRSIAHQSGWQWRIPLQNRTGNGMVFCSKFISDDDATQQLLSNIEGEPINKPRVIKFKTGTRRLHWHKNCVAIGLSSGFLEPLESTSIHLIQRSIIRLMQLFPTQEFAQQNTDEFNAQTKFEMDNIRDFIILHYKATNRDDSRFWRYCKEMSIPDSLRHRIEMFNETGNIYKFGNELFGESSWIQVMIGQGIMPKEYHSIVDSMEDEELTSFLHQIKSAAKRKVETLPPHFDFVQHYCKSTVV

SEQ ID NO: 89332 - protein, 523 aa, unidentified
  source 1..523: note = Aliiglaciecola lipolytica
  REGION 1..523: note = tr|K6YIZ1|K6YIZ1_9ALTE Tryptophan halogenase; OS = Aliiglaciecola lipolytica E3 OX=1127673 GN=GLIP_3982; PE = 4 SV=1
MKSNTRVIKQVVVLGGGTAGWLSACHLAKKLLPNHPDGIRVMLVDSPDIPTVGVGEGTVPAIRESLQYLGISETDLLQTCDATFKQSIQFINWQPPMADGKMHSYHHVFDYPAPGFQQDLPYWALGHAGDSSFADSFSIQSSLCDAQLAPKLITQPEYQGTCNYAYHFDAGKFGKLLCDHGVNKLGVEHRQAKISLIETDEQGNISALVTDKNERISGDFFVDCSGSQSILLGKTLQVPFVSKKHMLFTDTALAVQVPYSKPTDEIPSCTLATAQTAGWIWDIGLTSRRGVGLVYSSAHLSDSEAELQLAEYLKGTNGQRVQVEPRKIPMRTGYHQEFWKNNCVAIGLSQGFVEPLEATGLLLFDISARMLAENFPSHQELMPLAANKFNKKVRLAWDKVLDFIKLHYCISQREDSDFWQDHRQSSSMSEQLAEDLARWQWQLPNQYDFTERAAIFNLENYLYVLYGMNFKTDLSQSAYRFEQVNVAKTNFQRYADMAAQAKQQLPGHRDLLDRIQRFGLQRI

SEQ ID NO: 89333 - protein, 524 aa, Shewanella woodyi
  REGION 1..524: note = tr|B1KET1|B1KET1_SHEWM Tryptophan halogenase; OS = Shewanella woodyi (strain ATCC 51908 / MS32) OX=392500; GN = Swoo_3837 PE=4 SV=1
MDKPTQKIVIVGGGTAGWITAGWLAAHHKVTSGSPVEVILVESPDTPSIGVGEGTWPTMRNSLIKMGISETDFIRECDATFKQGAKFAKWVDGSDDDFYYHPLVLPQGFTQHDLAPYWASLHAESNEESKHSFSNAVCFQESVCEQGLAPKTIRTAEYSDVANYAYHLDAGKFSQFLQRHCTEKLGVTYLSAHVTAINEHSNGDIASLTTQTTDKLEKEIEGDLFVDCSGFKSLLLGQHYQIPFIDCSNVLFIDTALAVHVPYDEENSPIASHTISTAQEAGWIWDIGLQHRRGVGHVYSSRYTDEATAMQALADYIGPKFDSLTVRKIPIKSGHRKTFWHKNCVAVGLSAGFLEPLEASAIVLVELSAQMISEQLPANREVMDIVAKRFNQTFNYRWERIIDFLKLHYILSRRCDSDFWKDNRDPKTIPDSLQDLMKVWQHRAPADMDFTSNNEVFPAASYQYVLYGMGFDTDYSVTPHLLNDWQYAHRQFAKNQYLIERATVQLPSNRELINKIKQYGFSQI

SEQ ID NO: 89334 - protein, 545 aa, unidentified; identical to SEQ ID NO: 85286
  source 1..545: note = Dehalococcoidia bacterium
  REGION 1..545: note = tr|A0A3D2YWB9|A0A3D2YWB9_9CHLR Tryptophan halogenase; OS = Dehalococcoidia bacterium OX=2026734 GN=DHW65_10305; PE = 4 SV=1

SEQ ID NO: 89335 - protein, 534 aa, unidentified
  source 1..534: note = Dehalococcoidia bacterium
  REGION 1..534: note = tr|A0A352UBF2|A0A352UBF2_9CHLR Tryptophan halogenase; OS = Dehalococcoidia bacterium OX=2026734 GN=DC056_01155; PE = 4 SV=1
MPDAVVIGGGPGGGTAATLLARRGYSVVLLEREIFPRAHVGESLLPASMPVLEELGVLGQIESENFPKKYGATMVWGRDDTPWSWYFRETNRTYPYAYQVSRPRFDQILLDNAKSSGVDVRENCNVFETLSDSESGAIHGVRFRRDSGIVESVEADFVMDASGQSALLARSMNLRTWDTFFQNLAVYGYYRGAKRLPSPDETNIFIESYGLGWTWTIPLKDGLASVGAIVDSESAQAMLADIGPDEFLRQQISQTARTNDMLSDAELTGAPRVVRDWSYTTNRMVGDGWILLGDAACFVDPLFSSGVHLALMSAVMAAAYVHGAKTDPTLRVPAGQVYEQLYRKEYAHFRELASLFYASNRTEESYYWQARRLLGDTNVGARESFIRAVAGQPPRGYERSALSRGELPSEISEMFASVASDKRLRDATVAMGLSLNLVPRLAGEAKLERRPIFVEGEFQWSAVLSSATRPEGTPLSNFVAALVNLVDGKRNIGQILDKFTQGVEDSEQIEQAHDSMINAISILYVDGAIDSLMG

SEQ ID NO: 89336 - protein, 537 aa, unidentified
  source 1..537: note = Dehalococcoidia bacterium
  REGION 1..537: note = tr|A0A357FK75|A0A357FK75_9CHLR Tryptophan halogenase; OS = Dehalococcoidia bacterium OX=2026734 GN=DEA18_00020; PE = 4 SV=1
MEKSDEVDILVIGGGPAGSTAASMAAKSGLSVKVCERSKFPREHVGESLLPASIGILEELGLNEAISNAGFLPKYGATMVWGKDETPWSWRFSETNKQNIHSYQVSRPIFDEILLKRSAELGVLVEEESSVSKILTDDSNRGVVVTNKMGQEYFQPAKFIVDASGQSALLARNFDLRQWDEHFQNLAIYGYFAGAKKLDAPNENNIFIESYENGWVWVIPLNDDTTSVGAVVDSNETNAKLRKTDPITFLKDQLSLTNRTSHMLSEAELKSDVKILKDWSYTTSKMAGNGWVLAGDAACFIDPLFSSGVHLAMMSGVLASAYAVTCLKDKILGIVSASVYETTFRQEYDHFRDLALLFYSSNRTVDSYFWEARRIFKEENYFSDRISFIRAVSGQSVRGYERVALERGELPKEFMSAISLHNKKSEDRNAELLFIQDSILEKIPCLASEAKLEKKPVLSEGEFKWGTIITTPYRKEGVPCSNLVANLLMKIDGEKSIRKILENLSTSASEDTRKQLLKYGIEAISILFIEGVIDSLN

SEQ ID NO: 89337 - protein, 509 aa, Sphingopyxis sp.
  REGION 1..509: note = tr|A0A0Q7Z2T5|A0A0Q7Z2T5_9SPHN Tryptophan halogenase; OS = Sphingopyxis sp. Root1497 OX=1736474 GN=ASD67_13920; PE = 4 SV=1
MAKTVERVVIVGGGTAGWLAAARLAAARPTLDVTLIEAPDIPTIGVGEGTWPTMRATLAAIGIPEGEFLAACDGSFKQGSRFDGWVDGAVDGAADDRYLHPFTTPPALPTGELLAAWQATAADRPFGAAMTAQAAVCDLDLAPRQRAMPDYQGAANYAYHLDAGKFAALLRDHATRRLGVRHLADHVTAVTRGEGDTLAAVATRAHGEIAGDLFLDCTGHAALLIGGELGVEWIDRSDTLFNDRALAAQVPVAEGSAIASQTISTAHRAGWIWDIGLPGRRGIGCVYASRFLGDDAAEAELRAYIARVLPGAPDVPVRRLSFPTGHRARFWQGNCVAIGLSAGFIEPLEASAIVLIELSLNALIDNFPASASAMPIHAERFNTLFRYRWDRIVEFLKLHYLLSKRPEPYWLAQRDPASVPQRLTDMLALWQEQPPSAWDFPQVDEIFSAESHQYILYGMRHQVPAGLQSSDRAVAALAEQRQRARSLASALPTNRDYLDALTATATAAE

SEQ ID NO: 89338 - protein, 512 aa, unidentified
  source 1..512: note = Thalassotalea sp.
  REGION 1..512: note = tr|A0A4U1B3S5|A0A4U1B3S5_9GAMM Tryptophan 7-halogenase OS=Thalassotalea sp. ZS-4 OX=2572245; GN = E8M12_11740 PE=4 SV=1
MNQTAVRSITIVGGGSSGWMTALYLNKLYNHQQSQVAIRLIESKDVGILGVGEATVHSIRFFFAAMGLDEAELLRETNATLKTGILFNNWMQPENGVMHQYFHPFEHQPLGNILDISTSWILRSRHLFERYDQGVSLSAALMAHNHCPKMPDSRPYEGITPYGYHLDASAMARFLRRKAVQAGVKHIEALVQEVVVEGGNIHSVMTDKGEFSSDIFIDCSGFKGLLIEPLKADNWQSFQHQLPCDKAVAMQVAYRDQQTPRSYTTATALSHGWAWEIDLTSRRGSGYVYDSRYIDKAQAEQELREHLGDDVEVLKTLHLDMKVGCRKEFWLGNCIAIGLSGGFIEPLESTGLHLINVGAKLLSTHINSRDISQATRDSYNRLMNGVYDDLKRFIVLHYCLSDRDDSQFWRNAQRSVDYCPQLSQQLQTWQHKTCEFMDLAGGYATTFTDENYRFILYGMGHYPSLHMPFDQASCDQIFDRLQSMSQRALQVSMPHERFLASIHPEKQCITGA

SEQ ID NO: 89339 - protein, 534 aa, unidentified
  source 1..534: note = Dehalococcoidia bacterium
  REGION 1..534: note = tr|A0A3B9HFV5|A0A3B9HFV5_9CHLR Tryptophan halogenase; OS = Dehalococcoidia bacterium OX=2026734 GN=DCF86_06980; PE = 4 SV=1
METTDIVVIGGGPAGSTAASMSARAGLSVVLLERERFPRDHVGESLLPASMPILEELGVYSRIADAGFPPKYGATMVWGKDNTPWTWRFAETNNTYKHSYQVSRRDFDLILLNRSRELGVDVREECTVNKILLDGDRIVGVEYQDREDNRVSLMARFVIDGSGQSAIISRLKGARKWDKNFRNLAVYAYFKGIARLPSPDQNNIFVESYADGWIWNIPLKDGLSSVGAVVDAKKATKVLKHQSIQEFFENQISATSHNREMIKIAEQVGHPTVVRDWSYISEEMAGPGWASAGDAACFIDPLFSSGVHIALMSGILSSAYAVTSLESPDMSEPTAAVYQEMILREYSLFRELANLFYESNRSVDSYFWEARRIAGTREDTDARSAFVRAVSGQSVRGYERAVLERGDLPNTVSLALDGVAKELKMRQDVLHNIGSSIPDAVPVLHPDTRIVRKPVLSEGRFEYGVLLYSPGRIEGTVCSRFVEMLVNYIDGCSTVKQITKRLATQAENTSEEALRDYVKEAIKILYFEGAIQRL

SEQ ID NO: 89340 - protein, 208 aa, unidentified
  source 1..208: note = Proteobacteria bacterium
  REGION 1..208: note = tr|A0A3E0N7Q6|A0A3E0N7Q6_9PROT Tryptophan halogenase (Fragment) OS=Proteobacteria bacterium OX=1977087; GN = DWQ28_05610 PE=4 SV=1
MSQRTVEKVVIAGGGTAGWMAAAALSRLVGRKISVTLVESEEIGTVGVGEATIPTILTINRLLQIPEPDFIKLTSGTFKLGIRFENWRKQGEDYIHSFGDTGKGSWAAGFHHFWLRAKEMGLAEDYGEYCTELKAAEAERFAITSQNKLNYAYHLDASKYGMYLRKLAESSGTTRIEGKIQRVETSSEDGFIEALHLEDGQRIDGDLF

SEQ ID NO: 89341 - protein, 511 aa, Shewanella woodyi
  REGION 1..511: note = tr|B1KFL8|B1KFL8_SHEWM Tryptophan halogenase; OS = Shewanella woodyi (strain ATCC 51908 / MS32) OX=392500; GN = Swoo_3936 PE=4 SV=1
MTKPITQVIIVGGGTAGWMSAASLGRYAQGKNLTITVIESSQLPTVGVGEATIPNIVEFNHSIGLNEIEFIKATQASFKLGIKFENWSQTSPSFFHPFSDYGLPINKVDFHQYVNRLAIENYKLEGHKLEGHNFKLEDYSFSSVLAQQGNFAQPHPNPPSPLADYSYAYHFDAGLYAELLKSHSLKMGVEHVDATIDQVNLHKNGFIESVSLHDGRVLEADLFIDCSGFKALLIEQAMKTGFDDWSEWLLCDTALAVQTKSTSSPNPYTRSIAHNSGWQWHIPLQHRTGNGYIFSSQFENKASAEQNLLTSLTGEPISQIRQFSFTPGRRKQIWNKNCFAVGLSSGFLEPIESTSISLIQSAIAKLLSFFPDTSFNEHDINEVNRLHNSELEHVRDFIILHYKLASGIDSPFWQYCQEMRVPETLSHKIDVYRSQGHIILRENESFEAASWLTMYHAFGVLPNRYDPRVDAIPLETVKQNLAQMKHSIINAASQSVSHQTFIDRHCKAVSQ

SEQ ID NO: 89342 - protein, 506 aa, Erythrobacter sp.
  REGION 1..506: note = tr|A0A125QJZ9|A0A125QJZ9_9SPHN Tryptophan halogenase; OS = Erythrobacter sp. YT30 OX=1735012 GN=AUC45_13240 PE=4; SV = 1
MTAEFSPLKSIVIVGGGSAGWMTAAALSDALGKACSITLIESEAIGTVGVGEATIPPIRTFNQRIGIDEATFIKETAGSYKLGIQFVDWARKGHSYFHPFGQYGAEFDKVPFYHYWMRESLAGTVDGPIDEFSMCWAMAKAGKFAHPEPDRRKIQSTFDYAYHFDAGLYAAFLRRFSESRGVKRLEGKVVEVSVRGEDGFIEAVTLDGGERVGGELFIDCSGFRGLLIEGALEAGYENWQHWLPCDRAVAVPCAKGPEITPYTRSTAKEAGWQWRIPLQHRTGNGYVHCSEFISEDEATETLMNSLDGEAQADPRTLRFVTGRRKKFWDKNCVAIGLSAGFMEPLESTSLHLIQYGILRLIALLPDSEMSPLLAQEYNAQTATEYERIRDFLILHYKATTRDDAELWRYCSAMEIPDSLQYKMEHFRNYGLLVADERELFANPSWIAVYLGQDIVPQRAPAITEMRSSVPVAERMQMISNAMTQAVDQMPPHADFLARHCRSPLAV

SEQ ID NO: 89343 - protein, 504 aa, unidentified
  source 1..504: note = Thalassotalea sp.
  REGION 1..504: note = tr|A0A4U1B6X8|A0A4U1B6X8_9GAMM Tryptophan 7-halogenase OS=Thalassotalea sp. ZS-4 OX=2572245; GN = E8M12_04545 PE=4 SV=1
MKTDTRADATTSPFNIVILGGGSAGWMTAAALANTLPQEHFNISLVESEQIGTVSVGEATIPGIHDFNRFLNINEQELVKATNATFKLGIEFEGWTKGGKYLHPFGPYGLNKNGVPFHQLWLKAKLAGEDVGELVNFNMEGLAAQQNKFSPKLNIPNFPIKHLNYAFHLDAVLYANYLRQYAEPKGVKRIEGQFEQARLNNEGFIQSLTLTDGREVPGDFFIDCSGFKALLIEKTLHARYEDWRHWLPCDSAVAIQSKSQPQVNSFTKAIAHEHGWRWQIPLQNRVGNGLVYSSRFMTEDQALEKLQSLVKEELITEPNQLRWVNGCRPEPWRKNCVAIGLSAGFIEPLESTGLQLIQSAIFRLLSLFPDKHFNQSNIDTYNRFANAEIASIRDFVILHYKQTDNDHSPFWNYCRNMDVPDSLKDKMEMYQQNGNLFRENNELFSELNWLSVMNGQGMLPKTTHPLTRQFTTQEIMSDLQQIESGYSRIVDSLPSHDEFLAMLG

SEQ ID NO: 89344 - protein, 506 aa, Xanthomonas arboricola
  REGION 1..506: note = tr|A0A0E3UFG2|A0A0E3UFG2_9XANT Tryptophan halogenase; OS = Xanthomonas arboricola OX=56448 GN=XB05_16190 PE=4 SV=1
MIPAPLRNIVIVGGGTAGWMAAAAFARVLGPGFKVQLIESEQLGTVGVGEATVPHIKAFNNLLGIDEAEFVRQTQGSFKLGIEFVDWQRPGTSYIHGFGTQIGHPLGLLPFHQYWIKQHARGKAQPLGAYTLNTVAAVRGKFMTSAGDVPASSPLANIAYAYHFDATQYARFLRTYAEQRGVTRIEGLVEQVQLHADSGHVQSLQLASGQVVSGDLFIDCSGFRGLLIEEALHTGYHDFTHWLPCDRALAVPSENVGPPTPYTRSSARAAGWQWRIPLQHRTGNGYVYSSAHISDDEAAATLLANLDGKPLADPRPLRFTTGRRRQFWNRNVVALGLASGFLEPLESTSIHLIQAGISRLLELFPREGISPVLVQRYNDRLAFEFDRIRDFLVLHYHATERDDSAFWRHCRTMPITPELQTTLDLFRDSGRFYRNAEEMFAEISWVQVMVGQGILPQAYHPLVDQVPDHDAERFLASVAQTIGHCVDVMPTHQQFIDRYCKAAAPR

SEQ ID NO: 89345 - protein, 483 aa, unidentified
  source 1..483: note = Aliiglaciecola lipolytica
  REGION 1..483: note = tr|K6YCF8|K6YCF8_9ALTE Tryptophan halogenase; OS = Aliiglaciecola lipolytica E3 OX=1127673 GN=GLIP_1665; PE = 4 SV=1
MAANLFANQWSNKGIKITLVESPEIGIVGVGEGSTPTLKRFFNILNIPESSWMPRCNATYKTNIRFAGWSPRSGIEHYSHPFSCQTDTFTQKSFLVNCQTRRLGLDTHVTPEDFFINGLLAAQGKGPIATENFPFTMEYGYHFDSHLLGSFLSEHAKTLGVEHQQVKIQDVITHNNGEIASLVASNGDSIHGDFFVDCTGFASVLMQKTLGVSFTNFNQNLFNDAAVVMPTPMHDENIPVETTSTALSNGWAWKIPLTNRYGNGYVYSSDFISPEEAEIELRQHLGLQESAESGRHLKMRVGQLEKHWHKNCLGLGLSQGFIEPLEATALHLVQVCIEMFITEFEKGQFSNQHQQSFNRLISERFEKVRDYIVAHYKLNTRDDSEYWRANRNNEHLSDSLIQLLNCWYQRNDLNAEIHRQQINHHFDSLSWHCLLAGYGAFPPLAEKQPGTGDLYKEQGIAEFNRRCGLNFSSHKINLQRLQS

SEQ ID NO: 89346 - protein, 502 aa, Shewanella woodyi
  REGION 1..502: note = tr|B1KEB2|B1KEB2_SHEWM Tryptophan halogenase; OS = Shewanella woodyi (strain ATCC 51908 / MS32) OX=392500; GN = Swoo_2208 PE=4 SV=1
MHSPIKKIVIVGGGTAGWMAAAMLVRFLGKQLTITQIESDKVGTVGVGEASIPPLKMFNQALDIDEHEFLKATNGTYKLGIEFDNWAQEGDSYMHAFGPLGKDLALTPFHHYYLNHYLKSEHQISKQLGKYSLNYLSAKKNNFQPLDAIAGTGLPGLTYAYHFDASLYAKYLKSYSKQAGVDSIEGLVIRTNLNSSNGAIDSVTLASGQTIEGDLFIDCSGFKGLLIEQALNSGYEDWRHWLPCDSALAVASEVKKPISPYTRSTANEAGWQWRIPLQSRTGNGIVYSSQFINDEQAEKLLFKQLDGKPLTLPQKVNFVTGRRKHQWLKNCISLGLASGFVEPLESTSLHLVQSGIIRLLKLFPSQEMEQANIDQYNQQSKQEFEQIRDFIILHYRLSGQKQTPFWQYCREMPIPNSLQQKLDLFKASGVVSRYQDELFTENAWVQVMLGQRFTPNTYSTLTENINTTQNIQFLNDLHKIFDTTSSKLMSHDSYLTQYCGLK

SEQ ID NO: 89347 - protein, 506 aa, Pseudoalteromonas luteoviolacea
  REGION 1..506: note = tr|V4HJB2|V4HJB2_9GAMM Tryptophan halogenase; OS = Pseudoalteromonas luteoviolacea 2ta16 OX=1353533; GN = PL2TA16_01281 PE=4 SV=1
MIKKIVIVGGGTAGWLAANHLGKRFLGSETVVKLIESANIPTIGVGEGTVPMMRQTLEYFGIDEGEFIKECNVAFKQGISFENWMAPQAGKTHRYYHPFDFFSSELGLVTAWLNDNSGIHFADFVGFQSTLCDHNLAPKLITQPQFDGAASYAYHLDAGAFSELLKKNAINNLGVVHHYNELDEVALDNDGAISHLVTDAGVETADLYIDCTGFKSLLLGTAMKTPFVAKGDVLFADKALAVQVPYADNEQIPSYTRSTAQTAGWIWDIGLYSRKGIGHVYSSSHTTETQAYAELESYIGTNLDSLNVRNIDMKVGYRSKAWSKNCVALGLSQGFVEPLEATGLLVFDVTAKMLADTLPTSTLAFETVAKHFNNTVTNMWSKVIDFIKLHYCISDRCDSQFWLDNRSPESIPDSLREKLELWKYKVPTNYDFGGKFDVFDIDNYLYVLYGMSYPTCVDSNLISPAEIRRMSDVIGTIKYQQKQARELAIDNKSLLEKIHQFGLAKQ

SEQ ID NO: 89348 - protein, 444 aa, Variovorax paradoxus
  REGION 1..444: note = tr|C5CVR8|C5CVR8_VARPS Tryptophan halogenase; OS = Variovorax paradoxus (strain S110) OX=543728; GN = Vapar_3957 PE=4 SV=1
MTPGPFTSTEPDVVVIGGGPAGSTVAALLADKGHDVVLFEKAHHPRFHIGESLLPMNMPLFDRLGVRTEVEAIGIAKHGAEFVSPWHDHTSHFFFGEAMDKSFPYAVHVRRSEFDELLFRHAGKRGARTFEGQRVMGVDMDAGKGADKRALVKIKAEDGSETSWRPRFVIDASGRDTVLSNQFDAKQRNRKHASAALFGHFANAERRPGRYEGNISLFWFDHGWFWYIPLKDGTVSVGAVASPAYFKRRKGTLEEFLMETIALAPKLAARLKNATLMEGATTTGNYAYDSKFCRGDRFMMVGDAYAFVDPMFSSGVYLAMNSAFESATAADLWLRGEMKEAEKAFRRFDKVMKHGPKMFSWFIYRITSPAIRRLFMNPRNIWRMQEALLSILAGDLFRNTPIGPRFWGFKITYYASCIGILPQAIKTWAWRRRNLKESLEAAKT

SEQ ID NO: 89349 - protein, 505 aa, Shewanella woodyi
  REGION 1..505: note = tr|B1KFM0|B1KFM0_SHEWM Tryptophan halogenase; OS = Shewanella woodyi (strain ATCC 51908 / MS32) OX=392500; GN = Swoo_3938 PE=4 SV=1
MMENSKQVIRSIVIVGGGTSGWMTAAALSHFFKDKPVKLTLIESSTIGTIGVGEATIPTLRRFYSKLGFSDFDVIKATNATCKLGIEFKDWKQKGSRFIHPFGLFGQGTKEVDFHHYWNRARLAGEAELLSEFSLGASLALNNKFVLPSITPSSQLDIFDWALHFDAALFANLMKEFSLAHGVMLKDNVVEKVNVAQSTGNIASVTLDSGELVEGDLFVDCSGFKSLLLQEALKTGYQDWSDYLVCDRAVAVQTQARENPIVRTISQAQESGWTWKIPLQHRTGNGHVYSSQFISDDEATSTLVEQLDGEMLHTPRMFSFTPGRAEKAWNKNCIAVGLSSGFLEPLESTSIALVETAIEKILLSVKDASYTEQVRDRFNQVTALEYERVRDFIILHYKLTHRTDSAMWRYCQQMAIPEELASKMQAFSRDGSIKSYPWEIFGKDSWLAIYDGFDFRPDNFSPKALNMELGYLKKHLNFMKSSIDNAVELAPTHAEFLAQVAADEA

SEQ ID NO: 89350 - protein, 547 aa, unidentified
  source 1..547: note = Dehalococcoidia bacterium
  REGION 1..547: note = tr|A0A2E2VGK4|A0A2E2VGK4_9CHLR Tryptophan halogenase; OS = Dehalococcoidia bacterium OX=2026734 GN=CL895_02815; PE = 4 SV=1
MTAHEQSPDVVVIGGGPAGSTAATMLARQGVSLLLLERERFPREHIGESLLPASIPILEELGVLPAVEAAGFLTKWGATMVWGSDPTPWSWYFRETNQRNPHSYQVWRPQFDQLLLENSRAHGVDVREGHRVLEVLWQDGKATGVRYQSDDGETGTIQCRYVVDASGQTGLLARDLNLRQWDPFFQNLAVYGYFRGAHPLPEPDETNIFIEAHPHGWLWSIPLHTGWTSVGAVVDSATSQNEISTGSLDGFLQAQIDQAPHTSKMLRDAHLESGPFIVKDWSYVCERVAGDGYVLAGDAACFVDPLFSSGVHLALMSGIMAAAYVTSALKDPEIVEAAAAAYHELYLKEYGHFREMARLFYSSNLTSDSYFWEARRLLEDAGNFTPRQAFIQAVAGQPPRGYERAVLEQGQAPLEFASSVRQVESERERRRVRWEAALSGTDNGDPIMAAVPRLAPETQIQRKPVLGAGEFVWGTVLTTVSQPEGIPCSGLISAMVSQIDGARTVAQLLDELASLGEPSQADQIRQTALAALGILYVDGTVEELGGL

SEQ ID NO: 89351 - protein, 507 aa, Shewanella woodyi
  REGION 1..507: note = tr|B1KIV0|B1KIV0_SHEWM Tryptophan halogenase; OS = Shewanella woodyi (strain ATCC 51908 / MS32) OX=392500; GN = Swoo_1306 PE=4 SV=1
MKIKRIAIVGAGTAGWLAANHLGSELSADQDVEITVIESKDVPTIGVGEGTVPYIMNSLKRFGISEAELLYSCDTTFKQGIKFVNWLDSGSRGDNFYYHPFDVPYPSGFDVSPYWVAHGGKRPFDDVGIQARICELGLAPKRKSSGEYEGALTYAYHFNALKFAQLLAKNAQKRFNVTHQFATVVGAKKAENGDITHLITKDDTELVFDFYVDCSGFSSILIDKELKVPFVSKADELLTDSVLVQQVPLKDEDELPPYTTATAHSAGWIWDIPLTTRRGTGFVYSSRHMSDEQALSEYADYLGVEQGTISPRKLPMEIGYREAFWSQNCVALGLAQGFVEPLEATSILVTDFSAELLARNFPRNTSDIEALIPHYNKVVTYVWERVVDFIKLHYCISDREDSQFWLDNRKEDTFSDELKQRLTKFKVSTPKQSDFFSKFDLFNDKNFLYVLYGMEFKTKAISISAKEIEHCSMLLQSNDNLVKTAADELLSHKSWLLGLKAAMSPNG

SEQ ID NO: 89352 - protein, 512 aa, Lysobacter capsici
  REGION 1..512: note = tr|A0A291A6D6|A0A291A6D6_9GAMM Tryptophan halogenase; OS = Lysobacter capsici OX=435897 GN=CNO08_21905 PE=4 SV=1
MHNDAERGASATRPIKRVVIAGGGTAGWMAAAAISKIFGATLQISLIESEEIGTVGVGEATIPTLSTFHRLLDIDEREFMAATQGTIKLGISFENWTTEQHRYIHSFGSTGKDHWSAGFQHFWRRGRELGLAGSYDDYCVELQAALQGKFAHLKNYRMNYAYHLDASLYARFLRTMSEGNGCRRIEGKIVEVLTDPDSGYITALRLERGEVIEGDLFIDCTGFRALLIDKTLGVGFEDWSHWLLNDSAIAVQTTSVCDPVPYTRAIAEQWGWQWRIALQHRVGNGIVYSSRHVGDDEAKQALLDSVDGEILKNPWPVRFRPGRRLRCWSHNCIALGLAGSFIEPLESTTIHLIQRGITHLIRSFPPVISQAGVDEYNTQMADELQHVRDFVVLHYHATQRRDSPYWEYVSSMTLPDTLRRRIELFRETGTVFHVPGELFAENSWIQVMMGQGITPKTHHPTADTMSEADLRRFLDDIRNHVDTTVRALPSHQAYLSQYCPSAPRATVPAHVA

SEQ ID NO: 89353 - protein, 542 aa, unidentified
  source 1..542: note = Dehalococcoidia bacterium
  REGION 1..542: note = tr|A0A2E1E0Z2|A0A2E1E0Z2_9CHLR Uncharacterized protein OS=Dehalococcoidia bacterium OX=2026734; GN = CL899_00250 PE=4 SV=1
MKKIVIVGGGTAGYMTAATLLSEFPEKEITLIEPADIPTIGVGESTVAGGQGGFSGILHWLRMVNIKDEEFMPHTDAVYKHSIAFENWYRKDSGRFHYPFGQPYLEGSELALKDWHLKKLKYPETPTRDYADCMYPGMALINQNKSMFTDTFSSAHGRARLEEDPYLHEVQLLSHYSYQFDAAKFGNWLRDKYCKARYPDRFTHFVSKVQVVRTREDGEGGIEYLFLEGGQQVYADLFIDCTGFRALLINSKMHVPFIPYDHIFPNNKAWATRIPYTNPNKQIVNYTNCTAIENGWVWEIPLWSRMGAGYVFSDKFISSEDALKEFKQTLVKKGYQKVEDLEYNLIPMKCGIQSKLWVKNVCAIGLAAAFIEPLQSNGLQSMHEFLFNLTRILERGHISQWDRDEFTAKCHSDFDRFVMGVSLPYALSHRDDTDYWKALQKKDWSSLLSYTKGQLSGFLKEPFSKRHTDFNYGQANNLTNCMAVGLNWNPLDSHTLKYKLALSSLKTVESRKDKLDERKKRWNKEVKNFPTPYEYLRKRFHA

SEQ ID NO: 89354 - protein, 495 aa, unidentified
  source 1..495: note = Aliiglaciecola lipolytica
  REGION 1..495: note = tr|K6Y8R6|K6Y8R6_9ALTE FADH2 O2-dependent halogenase I OS=Aliiglaciecola lipolytica E3 OX=1127673 GN=prnA PE=4; SV = 1
MQKAVRKVVIAGGGTAGWMTAALLRKVLQQTIEIELVESEAIGIVGVGEATIPPIQIFNQYLGLDEKEFLRETKGTIKLAIKFENWRVQGESYYHTFGAPGANIGFCSFQHFWLKAKEAGNEHTLWDYDLNYLACEQGKFNKINTQNPVYDMQYAYHFDSGLYGQYLRKLAEKAGVKRTEGIIAQVNQDPRSGFITSLELNNGQKIEGDLFIDCTGLRALLSRKTLGVKYESWDHFLPADSAIAVPTERFEHTVPYTRSIAHANGWQWRIPLTHRNGNGIVYSSKYCSDDEAMQTLMGNLDSKPLDEPRKIQFETGRTEQQWHKNVVAIGLSSGFLEPLESTSIHLIQSGIVRLLKMFPNQGITPAMVEMYNQESKQEFETIRDFIILHYHVNQRNDSDFWKDLRNMDIPPRLQQKINAFKESAAIFNDNNDIFRDASWLQVMLGQGINPTDYHPAAKVHGDKALLDIMHKIYHAKQQPLTKMLPHDEFLARYTG

SEQ ID NO: 89355 - protein, 537 aa, unidentified
  source 1..537: note = Dehalococcoidia bacterium
  REGION 1..537: note = tr|A0A349K873|A0A349K873_9CHLR Tryptophan halogenase; OS = Dehalococcoidia bacterium OX=2026734 GN=DCS57_05430; PE = 4 SV=1
MQKSDEVDILVIGGGPAGSTAASMAAKSGLSVKVCERSKFPREHVGESLLPASIAILEELGLKEAISNAGFLPKYGATMVWGKDETPWSWRFSETNKQNIHSYQVSRPIFDEILLKRSAELGVVVEEESFVGKIMTDDSNRGAVVINNNGQKYFQPAKFIVDASGQSALLARNLKLRQWDDNFQNLAAYGYFTGAKKLPTPDENNIFIESYENGWVWIIPLNGGITSVGAVVDSNESAAELLKIDPITFLKDQISLTNRTSDMLSQAELKSDVKILKDWSYTTSKMAGDGWVLAGDAACFIDPLFSSGVHLAMMSGVLASAYAVTYLKDKALGKESALVYETIFRQEYDHFRDLALLFYSSNRTVDSYFWEARRIFKEENYFSDRVSFIRAVSGQSVRGYERVALERGELPNEFMSAISLHNKNSEDRNVELHFIQDSILEKIPCLASEAKLEKKPVLSEGEFELGTVITTPYRKEGVPCSNLVANLLMEIDGEKSIRKIVEDLSASTSEDTKKQLLKYSIEAISILFIEGVIDSLD

SEQ ID NO: 89356 - protein, 517 aa, unidentified
  source 1..517: note = Thalassotalea sp.
  REGION 1..517: note = tr|A0A4U1BB29|A0A4U1BB29_9GAMM Tryptophan 7-halogenase OS=Thalassotalea sp. ZS-4 OX=2572245; GN = E8M12_00895 PE=4 SV=1
MNQPVRRIIIVGGGSAGWLSAGLIAAEHETKNSNSIEVVLIESANIPTVGVGEGTWPSMRASLKKMGISETQFLTECDASFKQGSKFSNWLHGGGDSYYHPFTPPVGFFETNIAQHWYPHRDKVSFADAVTCQGQLCDNNLAPKQIATPEYAFHANYGYHLDAAKFSKLLQQHCTQELGVKHILDDVTDINSCPHSNDIASVSTLEHGDIQGDLFIDCTGSKSLLLGGYYGVEFIDQSSVLFNDSALAVHVSYQTPDAEIASHTLSTAQTSGWIWDIGLPSRRGVGHVYASDYISDEQAEQQLRDYIRADIGDQANTLDIRKISIKPGHRKTFWHQNCVAVGMSAGFIEPLEASALALIEQSAKMIAEQLPANRQIMDITAKRFNQRFSHHWQRIIEFLKLHYVLSKRSEPYWQDNRAQHSIPEPLQELLTLWQYQTPFTFDSSRTEELFPAASFQYVLYGMGFDTDLSWLQKRHVPMQSVQQYFNENNKKTQHLLRTLPTNRELLNKIRQFGLSKV

SEQ ID NO: 89357 - protein, 501 aa, Erythrobacter sp.
  REGION 1..501: note = tr|A0A109LR18|A0A109LR18_9SPHN Tryptophan halogenase; OS = Erythrobacter sp. YT30 OX=1735012 GN=AUC45_13225 PE=4; SV = 1
MGTHINKLVIVGGGTAGWITAAAFSRLLGKTLSIELVESDAIGTVGVGEATIPQIIRLNTILGLDEHDFVKRTNGTFKLGIEFVDWGQLGSSYLHTFGDAGMNLASVPFHHYWKRAENAGLNKDLWHYSLHKCAADQAKFGKLDRVGNTSMTGLAYAYHFDASLYAAYLRAYSEKHGVKRTEGIVQTVARNAESGDLTAITLDNGQEIAGDFFIDCTGFRALLLGQELGVEYQDWSKWLPCNSAQAVPSERLETLVPYTRATAKTAGWQWRIPLQHRTGNGHVYCSDFISDDEAGETLLAGLDTKPLADPRPIRFTTGRREQFWSHNCAAIGLSSGFLEPLESTSIHLIQSHVSRLLQLFPTSANPEKERAEYNRRCVAEFEQIRDFLILHYHQTEREDSGFWRYCKNMEVPDSLSHKQELFASSGRIGRDADDLFREASWVQVMLGQGVTPEAYDPMANGLADAQLGEFLGNVRTLIERAVHSLPTHEQYLQKHCASAGS

SEQ ID NO: 89358 - protein, 534 aa, unidentified
  source 1..534: note = Dehalococcoidia bacterium
  REGION 1..534: note = tr|A0A3D1ZBS6|A0A3D1ZBS6_9CHLR Tryptophan halogenase; OS = Dehalococcoidia bacterium OX=2026734 GN=DEW32_03610; PE = 4 SV=1
MPDAVVIGGGPGGGTAATLLARRGYSVVLLEREIFPRAHVGESLLPASMPVLEELGVLGRIESENFPKKYGATMVWGRDDTPWSWYFRETNRTYPYAYQVSRPRFDQILLDNAKSSGVDVRENCNVFETLSDSESGAIHGVRYRRDSGIVESVEANFVMDASGQSALLARSMNLRTWDTFFQNLAVYGYYRGAKRLPSPDETNIFIESYGLGWTWTIPLKDGLASVGAIVDSESAQAMLADIGPDEFLRQQISQTARTNDMLSDAELTGAPRVVRDWSYTTNRMVGDGWILLGDAACFVDPLFSSGVHLALMSAVMAAAYVHGAKTDPTLRVPAGQVYEQLYRKEYAHFRELASLFYASNRTEESYYWQARRLLGDTNVGARESFIRAVAGQPPRGYERSALSRGELPSEISEMFASVASDKRLRDATVAMGLSLNLVPRLAGEAKLERRPIFAEGEFQWSAVLSSATRPEGTPLSNFVAALVNLVDGKRNIGQILDRFTQGVEDSEQIEQAHDSMINAISILYVDGAIDSLMG

SEQ ID NO: 89359 - protein, 521 aa, Xanthomonas campestris; identical to SEQ ID NO: 88966
  REGION 1..521: note = tr|A0A1T1R980|A0A1T1R980_XANCA Tryptophan halogenase; OS = Xanthomonas campestris pv. vitiscarnosae OX=487900; GN = Xvtr_06400 PE=4 SV=1

SEQ ID NO: 89360 - protein, 545 aa, unidentified
  source 1..545: note = Dehalococcoidia bacterium
  REGION 1..545: note = tr|A0A3B8NSE7|A0A3B8NSE7_9CHLR Tryptophan halogenase; OS = Dehalococcoidia bacterium OX=2026734 GN=DCE26_01580; PE = 4 SV=1
MNVTDLSADVVVIGGGPAGSAAATMLARKGWQVTVLERENFPRDHVGESLLPASIPILEELGALPAVEEAGFLPKPGATMVWGSGSSPWSWYFKETSQRYPHSYQVWRPQFDQILLDNARAAGVTVVEGAHVSEVIFDDGEAVGVEFTNADGVEGEAECRFIVDASGQSTLLARHLEYKQWDPFFQNLAVYAYFTGGDPLPEPDQNNIFIESYQHGWLWSIPMHTGRTSVGAVVDSKIGQEGIQKEGAKAFLESQLSQSTHTKNMLAKAAMDSEPTVLLDWSYTSEKLFGPGFILAGDAACFVDPLFSSGVHLALMSGVLAAAYVTTALNDPSLAEDAGQVYQELYLKEYNQFREMARLFYSSNLSAESYFWEARRITNASHYSPRESFIQAVAGQPPRGYERVVLERGHAPEEFTESIRAVETERRARTEWLAALAGDPQRNQLLNAIPQIAEGVKVEEKPVLAEGEFVRGHVLNTISQPEGTPCSPIVAAVITAVDGQKSVADIVDSLGQHLDQSAHAQLEEAVSRTIEILFVDGAITGLTTE

SEQ ID NO: 89361 - protein, 496 aa, unidentified
  source 1..496: note = Thalassotalea sp.
  REGION 1..496: note = tr|A0A4U1BAD1|A0A4U1BAD1_9GAMM Tryptophan 7-halogenase OS=Thalassotalea sp. ZS-4 OX=2572245; GN = E8M12_00880 PE=4 SV=1
MTDKKIQNVVIAGGGTAGWMAAAALTKLLGKTISVTLVESDEIPTVGVGEATIPTLHIFHRMLGINEAEVMAATNATFKLGISFENWRDVNKDYVHSFGFLGQDCWACGFHHFWLKGLQKGLVGDIGDYCPEHLASREGKFAVMANQDLNHAYHLDAGLYAKFLRNIAEQHGCQRVEGKIQKVVLNSDNGYIEKLHLANGKTVEGDLYLDCTGFRGLLIEQALHSGYDDWSHYLPCDSAIAVQTKSTERPVPYTRSIARDAGWQWRIPLQSRTGNGLVFCSKYMSDEEAKQTLLDNIDGELLNEPRVIKYKTGARRTHWKKNCIAVGLASGFIEPLESTGIHLFQKAIVRLMQLFPHHGIQQSDVDEYNAQTREEANNIRDFIILHYHLTDRRDTPFWRYCANMDIPESLQHRMKLFKESGRNFKKQDDLFGESSWVQVMLGQGLMPEQYHPIVDMMGDKELEAFLNKIKNGVRKKVDSWPDHNDFIQHYCRAANS

SEQ ID NO: 89362 - protein, 504 aa, unidentified
  source 1..504: note = Aliiglaciecola lipolytica
  REGION 1..504: note = tr|K6WW98|K6WW98_9ALTE Tryptophan halogenase, putative OS=Aliiglaciecola lipolytica E3 OX=1127673; GN = GLIP_0069 PE=4 SV=1
MSPQNPIQKIVIVGGGTAGWMTAAALSNSLLKGVSITLIESEDIGTVGVGEATIPPIKTFNNTLGISENEFLKNTHGSFKLGIEFVNWGKLNNRYFHPFGQYGRQFDIVNVHQHWLAAEQSGTAHPLDEYCMAWAAAKQRRFSPPQPDPRNVLSTYEYAYHFDAGAYAMFLRKYSEQRNVKRIEGKIKHSQLNPNSGFVDAVVLDNDQLIKGELFIDCSGFRGLLIEQALKTGYEDMSEYLPCNSAWAVPCELKDFTPYTRSTAHTAGWQWRIPLQHRTGNGHVFSNEFISEQEALDTLMQNLDGEPLADPRLLKFTTGRRKRFWNKNVVAIGLSSGFLEPLESTSIHLIQAGIAKLLALFPTTDFDQHVIDEYNRIAINEFEAIRDFLILHYKLTERDDSEMWRYCKNMPIPETLESKLLHFESFGRVIKGEMDLFADASWLAVYIGQGLRPKQRDPLMSYRNSEGDVWLSKLHQALHQAAQQLPSHADYITKHCRSDINFMS

SEQ ID NO: 89363 - protein, 502 aa, Shewanella woodyi
  REGION 1..502: note = tr|B1KFL9|B1KFL9_SHEWM Tryptophan halogenase; OS = Shewanella woodyi (strain ATCC 51908 / MS32) OX=392500; GN = Swoo_3937 PE=4 SV=1
MTPESIKKFVIVGGGTAGWIAAATLGNIFRHSEVEIELVESDDIGVIGVGEATIPPLLTILESLGIDLVDFIKHTQASFKLGIQFDDWHTIGEGYFHPFGTLGRSIDGHDFFQCWLKSKAEGDDTPLMAHSPEAVLAQQGRFFLPFEAQGTPLASTTFALHLDAVLAGKYLRKFAEKSGVKRTEGLVESVSRSDKGLIKSVTLQSGVEIAGDFFIDCSGFKGLLIEEALETGYEDWSEFLPCNRAVTVQTENMGDTTPYTIATARAAGWTWRIPLQHRTGNGYVFCDKYCSDEEAIETLLSSIEGQPLTEPRVIPFTTGVRHKAWNQNCLALGLAQGFLEPLESTAIHLVSKSLALFVRLFPTAECDTQLSDEFNRRVRQDYEEIRDFLVLHYCTTQRDDTPFWRWCQQMELPVKLKAKLDLFKVHGGLIPGTEELFQPTSWYAVFDGMGVEPVGYNPTLDAIDYHKLKQSLHSGKTAIQTSAATQPSHDEFLRTYCPAPKI

SEQ ID NO: 89364 - protein, 492 aa, unidentified
  source 1..492: note = Dehalococcoidia bacterium
  REGION 1..492: note = tr|A0A3D1M1V1|A0A3D1M1V1_9CHLR Uncharacterized protein OS=Dehalococcoidia bacterium OX=2026734; GN = DEP04_07150 PE=4 SV=1
MQGTNTNKRHVTIVGGGNAGLICALILRRVFSEYEITVVKSEKIGTIGVGEGSTEHWLGFMNFVDIPVAELLVATLGTHKKGIRFEGWTNHTPDYFHSISSLPDGVPHVSNFNGAYAKLLVEGQLFTDAISPLGIKDNKVHAIYPHRAVNQFHFDTQELNDFFISKAKSRQIDFVEGEVKTVNVSEDWIGSVELEDGTKLTSDFWIDASGFNRVLMSCLPDEKWNSFSDYLLTDSAIAFRTPSDESGQIRPYTRSRAMSSGWAWEIPTQTERGNGYVYSSQHCTEEEAISEMEELLNIRISDYKHFQFDPGYLEKAWVGNCVAIGLSGSFVEPLEATSIGTSINQSFALITPLSSFRKGHTWVAKEYNRVFEKMMLNILNMIRLHYISDRDDSSFWVAQQEMPIPDELEHLLGVWSERTPVESDVHGLWNLFGFAHFYYVGQGQGVISPQSAQESINALGLENITDKFLWELRESRNSHPLKDHAETLKELT

SEQ ID NO: 89365 - protein, 497 aa, Sphingomonas sp.
  REGION 1..497: note = tr|A0A345WRD7|A0A345WRD7_9SPHN Tryptophan halogenase; OS = Sphingomonas sp. FARSPH OX=2219696 GN=DM480_12765 PE=4; SV = 1
MNAVTPRRIVVAGGGTAGWMAAAALMRTLGRTATVTLVESDAIGTVGVGESTIPPLITFNRLLGINEAEFMAATQATFKLGIQFDGWKGPEDRYFHAFGLTGKDHWAAGFQHFWLEGQVRGHHQSYDDYCLELIAAREGRFAHLPDDRMSYAYQLDSTLYGRFLRRMAEGDGATRIEGRIADVDLDAQSGDIAALVLDDGRRVEGDLFLDCTGFRALLIERALHVGYDDWTHWLPCDAAIAVQTQSVRPPVPYTRAMAHGAGWQWRIPLQHRVGNGIVYCSRYLNQDAALAQLLGNVEGTVLTEPNRIRFVTGARRKQWYRNCIAVGLAGGFMEPLESTSIHLIQRAILRLIRLLPAAGPISPHDIAEFNDQQLTDMDQIRDFLILHYKVTERRDSPFWRQCAAMEIPDSLAQKIGLFRETGRVFRRNDELFAENSWIQVMLGQGIVPEAHHPIAAKLPDEELARFLTGLRDQVATTVRTLPAHAAYVAHYCAAAAA

SEQ ID NO: 89366 - protein, 492 aa, unidentified
  source 1..492: note = Sphingomonadales bacterium
  REGION 1..492: note = tr|A0A4Q3DFL0|A0A4Q3DFL0_9SPHN Tryptophan 7-halogenase OS=Sphingomonadales bacterium OX=1978525; GN = EOP61_00050 PE=4 SV=1
MPEQLVKRVVIAGGGTAGWVVAAALGRHLGPLLDIVLVESEEIGTVGVGESTIPTARTFHAFLGVDEREFMRETGSSFKLGILFENWARIGDRYVHSFGQVGKGTWMGDFQHFWLHAREQGYAGDLGDYCFELQAALAEKFATGENAQINYAYHLDAGRYARFLRGFSEKLGVRRIEGKITQVEQHPESGHIDAILLESGDRIEGDLFIDCTGFRGLLIEQTLGAGYEEWSDWLPTDSALPIQTAAVGPAVPYTRAMAHSAGWQWRIPLQHRVGNGLVWCSAFMSDDEAQATLHASIEGEIRVQPRAIRFKAGRRRKVWDKNCVAFGLSSGFVEPLESTSIHLFMIGVTRLIQLFPFAGFNQPLIGRYNELARGELERIRDFIVLHYKLTERDDSAFWRHCRDMPIPDSLAERIDMFRENGHAWQTPDDLFRIDSWVQVMLGQRVEPKAWHEMGRLLGDEPLREALADLKGNIARAVAGMPRHQDFLDRYMA

SEQ ID NO: 89367 - protein, 534 aa, unidentified
  source 1..534: note = Dehalococcoidia bacterium
  REGION 1..534: note = tr|A0A2D9LZ34|A0A2D9LZ34_9CHLR Tryptophan halogenase; OS = Dehalococcoidia bacterium OX=2026734 GN=CL879_11535; PE = 4 SV=1
  VARIANT 198: note = Xaa can be any naturally occurring amino acid
  VARIANT 327: note = Xaa can be any naturally occurring amino acid
MPDAVIIGGGPGGGTAATLLARRGYSVVLLEREIFPRAHVGESLLPASMPVLEELGVLGQIESENFPKKYGATMVWGRDDTPWSWYFRETNRTYPHAYQVSRPRFDQILLDNAKSSGVDVRENCNVFETLPDSESGAIHGVRYRRDSGIVESVEADFVMDASGQSALLARSMNLRTWDTFFQNLAVYGYYRGAKRLPXPDENNIFIESYGQGWTWTIPLKDGLTSVGAIVDSESAQAMLADIGPDEFLIQQISQTARTNDMLSDAELTGPPRVVRDWSYTTNHMVGDGWILLGDAACFVDPLFSSGVHLALMSAVMAAAYVHGAKTXPTLRVPAGQVYEQLYRKEYAHFRELASLFYASNRTEESYYWQARRLLGDSNVGARESFIRAVAGQPPRGYERSALSRGELPSEISEMFASVASDKRLRDATVAMGLSLNLVPRLAGEAKLERRPIFAEGEFQWSAVLSSATRPEGTPLSNFVAALVTLVDGKRNIGQILDRFTQGVEDSEQIEQAHESIINAISILYVDGAIDSLMG

SEQ ID NO: 89368 - protein, 519 aa, unidentified
  source 1..519: note = Aliiglaciecola lipolytica
  REGION 1..519: note = tr|K6XQF2|K6XQF2_9ALTE Tryptophan halogenase; OS = Aliiglaciecola lipolytica E3 OX=1127673 GN=GLIP_1265; PE = 4 SV=1
MLDNEIRKIVIVGGGTAGWLTAGVIAAEHMANSEQGVAVTLIESPDVKPVGVGEGTWPTMRGTLRKMGVTETDFIRCCDATFKQGAKFAKWVTGADDDAYYHPLVLPQGYEQINLVPFWQQQASNIPFADAVSFQGQICERNLAPKQNTTPEFAHVANYAYHLDAGKFAAFLQQHCIEKLGVKHVLDTVVEVSSHDNGDIRSLVTKQHGELSGDLFIDCSGFHALLIGKHYQIPFINKKDILFNDAALAVHVPYLDEHSPIASHTISTGQSAGWIWDIGLPSRRGVGHVYSSAHISDEQAEVELRQYIRDSVGDKAEELSVRKIPIVPGHRETFWHKNCVAVGLSAGFLEPLEASALVLVELSAAMISEQLPANRKVMDIVAKRFNDKFRYRWDRIIDFLKLHYILTQRKDTQYWIDNCHIDTIPDALTELMELWQHHSPWHSDFTQVDEVFPSASYQYVLYGMGFKTQQAKTERRSNNQQLALESFRQNQQMTEKLLRGLPTNRELINKIQQYGLQRI

SEQ ID NO: 89369 - protein, 117 aa, Erythrobacter sp.
  REGION 1..117: note = tr|A0A3B9AUW0|A0A3B9AUW0_9SPHN Tryptophan halogenase (Fragment) OS=Erythrobacter sp. OX=1042 GN=DCF81_01200; PE = 4 SV=1
EGIRDYIVAHYRLNQRSDTRYWRDNAANEALSDNLKGMITAWFTHKDLREVNLRQHDGNPHYASMSWHALFAGYGTFPPEAKMVPTPTGLVTAEVDHTRRMLSACATNFLRYAPLSD

SEQ ID NO: 89370 - protein, 520 aa, unidentified
  source 1..520: note = Aliiglaciecola lipolytica
  REGION 1..520: note = tr|K6XUI9|K6XUI9_9ALTE Tryptophan halogenase; OS = Aliiglaciecola lipolytica E3 OX=1127673 GN=GLIP_2684; PE = 4 SV=1
MGADPIQNIVILGGGSAGWLTAGLIAAEHNTSSNQGIKVTLIESANVPTIGVGEGTWPSMRNTLQRIGISETELFRECDAAFKQGAKFAKWVTGAEDDFYYHPLVLPHGFNDSDLVSPWLQQNHGMSFADAVCCQSHICERGLAPKQITTPEYASVANYAYHLDAVKLGILLHKHCTQKLQVNHIVDHVIDVTSTEQGDIKGLMTQQHGEIEGDLFVDCSGLTSLLLGQHFNIPFISKKETFFNDTAIAMHVPYPNEEAPIASHTISTAHSAGWIWDIGLPTRKGVGIVFASDYMDDDSAENALREYVRASVDAETEKNLSCRKISFDPGHRKTFWHRNCVGIGLSAGFLEPLEASALVLVEQSASMLVNDLPANRQVMDVIAKRFNTRLQYYWDTIVDFLKLHYVLTKRTDSQYWLDHCDRKTWSDTLNESLALWKTQIPNKYDFPLREEMFPEASWQYVLYGMGFKTNPPASGLKADKIEKANQYMRESAQLTQRYIKALPTNRDLIKKIMQYGMQKV

SEQ ID NO: 89371 - protein, 500 aa, Erythrobacter sp.
  REGION 1..500: note = tr|A0A3B9B3R0|A0A3B9B3R0_9SPHN Tryptophan halogenase; OS = Erythrobacter sp. OX=1042 GN=DCF81_08660 PE=4 SV=1
MSSDYKPRRIVVAGGGTAGWMTAAALAKTMGDAIDLTLVESDAIGTVGVGEATIPPLINFNRLLGINEAEFMRETQATFKLGIEFENWKRDGEKYFHSFGSTGRDHWSAGFQHFWGEGLLRGHDYSYDDYCLELCAAYAGKFAHLPDNRLNYAYHLNATAYAAFLRRIAEGAGASRVEGKIAHVELDGESGNIAAIGLENGQRLEGDIFVDCTGFRSLLIEGALHVGYDDWSHHLPCDSAIAVQTELSASPVPYTRANAHDAGWQWRIPLQHRGGNGIVYCSRYLSKDAAHDRLMSTLEGKAISEPRAIPFTTGARRKQWHRNCIAIGLSSGFLEPLESTSIHLIQRAVIRLLRMMPAGEVSERDIAEFNDQQLTDMIQVRDFLILHYKATDRRDSAFWRQCATMDIPDSLTQKMELFRETGRVFRKNDELFVENSWVQVMLGQGILPQAFHPVAKKMSDEELSKFLEMLRTNVARTVQGLPAHHTYVAQFCGAKEVAAA

SEQ ID NO: 89372 - protein, 528 aa, Shewanella woodyi
  REGION 1..528: note = tr|B1KHC8|B1KHC8_SHEWM Tryptophan halogenase; OS = Shewanella woodyi (strain ATCC 51908 / MS32) OX=392500; GN = Swoo_1143 PE=4 SV=1
MHQAISNIIIVGGGTAGWITAGILAAEHNTDNGKLLTTPKLNITLIESPDIPPIGVGEGTWPSMRNTLTKIGISETQFIIECDASFKQGSRFINWHSELSAPHTPNNANDYLHPFSLPFAHQEIDLAPFWLAHQEEVSFALAVSSQDQLTQLGLAPKSISTPEYHFHNNYGYHLDAGKFSQLLMKHCTEKLGVNYISDHVVGINEHTNGDIKSVQCTQSGSVSGDLFVDCSGLKSLLLGKHYQEPFLSQKSVLFNDSALAIQIPYPEENSPIASCTLSTAQESGWIWDIGLPTRKGVGYVYSSEHASDQEAEKALLDYIGKDAYKRAKTEIRKLEIAPGYHQKCWRNNCIAIGMAAGFIEPLEASALALVEWSATTLAQQLPPNRASMELIATRVNNRYVQHWQQIIDFLKLHYVLSSRNNTPYWRDHQQTSSIPDSLQSQLEFWHYQVPCSQDIDHKDPLFPAASFQYVLYGMGFQTQKPTCIKPSMLQQAQTMFVENQKRTRSLSQTLPSNRELLDKVKQFGFPTL

SEQ ID NO: 89373 - protein, 503 aa, Brevundimonas sp.
  REGION 1..503: note = tr|A0A0F3LB85|A0A0F3LB85_9CAUL Tryptophan halogenase; OS = Brevundimonas sp. KM4 OX=1628191 GN=VH88_10780 PE=4 SV=1
MTPAPLKRILIVGGGTAGWMAAAALAHVTRGTIKVELIESEVIGTVGVGEATIPPILLFNQLLGIDENEFIRATQATYKLGIQFHDWFQKGQSYFHPFGTYGTRIDAASFHQYWLRLNKAGLDDDLDAYSVTTMAARMGRFSRPDTDPRGAASQMTYAFHFDAGLYARFLRKRAEANGVVRHEGKIADVRLRDGDGFIQSVRLDDGRELEADFFIDCSGFRGLLIEGALKTGYEDWTHWLPADRAVAMPCTRVGDPTPYTQSTALEAGWRWRIPLQHRTGNGYVYCSPFISDDEAQAKLRASLDGEAMAEPNFLRFTTGRRKKTWNKNCLALGLASGFLEPLESTSIHLVQSGISKLLLHFPDTGFAQADIDNYNRMMRLETERIRDFIILHYHATARDDSPLWRHVRAMPIPETLKQKMDQFRSRGRIFRYEDELFQETSWIAVLLGQGVIPERHDPITETIPLEQVQQWLQKMKAMIQQGVARMPTHEAFIAANCKAPPIN

SEQ ID NO: 89374 - protein, 506 aa, unidentified
  source 1..506: note = Thalassotalea sp.
  REGION 1..506: note = tr|A0A4U1B6T0|A0A4U1B6T0_9GAMM Tryptophan 7-halogenase OS=Thalassotalea sp. ZS-4 OX=2572245; GN = E8M12_04235 PE=4 SV=1
MSEQNPFHIVILGGGTAGWMAANLFAKRWQNQAQHRPVKITLIESKDVGIIGVGEGSTPTLKRFFEDLQIPESEWMPLCDATYKINIRFKGWSPKSGIEDYSHPFTTQVDTFTKRAFLVNGRTRRMGLDTHTRPDDFLLNGVLASQGKGPITPNNFPFIMEYGYHFDSAKLGEFLKQKAIAAGVNYQTAHISQSKRAATGELEALIDDQGNVFSGDFFIDCSGFSSLLMQKAMQVPYKSFKSNLFNDSAVVMPTPIDRIVPVETEATTLSSGWCWKIPLTSRYGNGYVFSSDFISRDQAETEFRQHLGMLDSEQECRFLSMQVGQLSEHWSHNCLGLGLSQGFIEPLEATALHLVQISIELFANLLEKGNFSHHYAHEYNQKISERFERVRDYIVAHYKLNTRDDSEYWRANRNNDQLSQSLISILDCWYQRNDLSEEIQRQNLDTHFDAISWNCLLAGYGTFPPLAPNQPGKGDLYKEKGIASFLQGCSLNFNDHHNNLRALNKS

SEQ ID NO: 89375 - protein, 524 aa, Roseateles depolymerans
  REGION 1..524: note = tr|A0A0U3D5M5|A0A0U3D5M5_9BURK Tryptophan halogenase; OS = Roseateles depolymerans OX=76731 GN=RD2015_4477 PE=4; SV = 1
MKAIEDILIVGGGTAGWLTAAFLAQQLGTAHGGVRITLVESSDIGIIGVGEGTFPSIRGTLSAIGISESRFLQACSATFKQGVQFNDWVRPPVNDRGPGESGRDHYFHPFSLPSQRPGAPELLPYWLMGEAGPDRAFAEAVTLQKAVVDARHGPKRPTDGDYLGALNYAYHFDAGRFAGLLAEQAQSLGVKRVIATVDQVELDEQGAIAAVVTREAGVLRAGLYVDCSGFHARLIGQALGSSFTSLNDVLFVDRALAMQVPYARPDAPIASCTLSTAQRNGWIWDIGLQERRGIGHVYSSRHTDDEQAERELRRYIGPASDALSPRKLTLNVGYRETQWVKNCVAVGLSGGFLEPLESSGIGLIETAAYLIAQLFPFDGDTAPVARHFNRFMAERYARIVDFIKLHYALTKRRDTAFWRDNADPATHPDSLKDKLAMWRQRPPQRLDFITDVEMYLPASWQYVLYGMEYETQLDAARAPLQRAEDARKEFGMIAQLGQHAVRDLPRHRDLIETMLSRAGLKMAA

SEQ ID NO: 89376 - protein, 500 aa, unidentified
  source 1..500: note = Aliiglaciecola lipolytica
  REGION 1..500: note = tr|K6YAW2|K6YAW2_9ALTE FADH2 O2-dependent halogenase I OS=Aliiglaciecola lipolytica E3 OX=1127673 GN=prnA PE=4; SV = 1
MNTNTTPARKRVIVAGGGTSGWLAAAALGKVLGKQLDVSIIESEAIGRIGVGEATIPPLRTFHRLLGINERQLMSEIQATFKLGIEFNNWGNEGDSYIHSFGVNGKDCWACDFQHFWLAGRKKGLNNDLIGAYCRELIAAKQGKAMGGDSSGVQYAYHLDAGLYAEFLKRLAIGNGVKHIEGIITNVNTNEINGNIDSLDMQDGSKVEGDLFIDCTGFSGRLIHGALNTSYKPYGHYLPCDSAVAIQTEKVGPPRPYTQAIAHKFGWQWRIPLQHRVGNGMVYSSRFVSDDEALSTLLANLEGKPITEPRAFKYATGRRTKVWNKNCIAIGLSAGFLEPVESTSIHLAMSSILRLLKLFPQQEIKQSYIDEFNKQSIEEMDRVRNFIILHYHATERSDSAFWRYCKNMEIPAELAHRIQLFRDTGTIPLTEKELFRTDSWSQVMLGQHIMPETYHPIVDMMETVELERFLEGLKAKVNQEVAQMPSHQNFIDHYCKAKPM

SEQ ID NO: 89377 - protein, 506 aa, Xanthomonas campestris
  REGION 1..506: note = tr|A0A1T1R1K2|A0A1T1R1K2_XANCA Tryptophan halogenase; OS = Xanthomonas campestris pv. vitiscarnosae OX=487900; GN = Xvtr_13150 PE=4 SV=1
MIPAPLRNIVIVGGGTAGWMAAAAFARVLGPIFKVQLIESEQLGTVGVGEATVPHIKAFNNLLGIDEAEFVRQTQGSFKLGIEFVDWQRPGSTYMHGFGTQIGHPLGLLPFHQYWIKQHARGKAQPLGAYTLNTVAAARGKFMTSAGDVPANSPLANIAYAYHFDATQYAHFLRRYSQQRGVTRIEGLVEQVQLHPESGHVQSLQLASGQVVHGDLFIDCSGFGGLLIEQALHTGYHDFTHWLPCDRALAVPCEKVGPPAPYTRSTARAAGWQWRIPLQHRTGNGYVYCSAHISDDEAAATLLANLDGKPLADPRPLRFTTGRRKQCWNRNVVALGLASGFLEPLESTSIHLIQSGISKLLELFPREGISPVLVQRYNDRLAFEFDRIRDFLLLHYHATERDDSAFWRHCRHMPITPELQATLDLFRDSGRFYRNAEEMFAEISWVQVLVGQGILPQGYHPLVDQVPDRDAEGFLASVAQTISHCVDVMPSHQQFIDRYCKAATLP

SEQ ID NO: 89378 - protein, 455 aa, Variovorax paradoxus
  REGION 1..455: note = tr|C5CNW2|C5CNW2_VARPS Tryptophan halogenase; OS = Variovorax paradoxus (strain S110) OX=543728; GN = Vapar_2969 PE=4 SV=1
MSLPQATSSISSAPPAADESCDVLVIGGGPAGSTISALLAQQGRKVVLLEKEHHPRFHIGESLLPANVELFDRLGVRDQVEKIGMPKFGIEFVSPEHEHRSYVDFAEGWDKSLDSAWQVRRSELDELLFRNAAARGAQALEGCKVRDVAFDANGATVQAQMDDGARRSWRARFVVDATGRDTLLANKFRCKEKNPDHNSTALFGHFTNAERLEGKKEGNISICWFAHGWFWFIPLADGTTSVGAVCWPYYLKTRDKPLKDFFYDTIALCPVLVDRLKHATLVDDAVHATGNFSYSSTHATGDRYLMLGDAFTFIDPMFSSGVYLAMHSAFDGAGLVATALDRPAELAPVRENFEAMMRKGPREYSWFIYRVTNPTIRDMFMHPGNPFRVKEGLMSLLAGDIYRGTPIWRALGMFKFLYYFISITHLRRTWAGWKRHRFNIRDMGALKGETILKSE

SEQ ID NO: 89379 - protein, 495 aa, unidentified
  source 1..495: note = Proteobacteria bacterium
  REGION 1..495: note = tr|A0A2W4MTR3|A0A2W4MTR3_9PROT Tryptophan halogenase; OS = Proteobacteria bacterium OX=1977087 GN=DIU71_04010 PE=4; SV = 1
MQKLVIAGGGTAGWLAAAALAQQFRGILDVTLIESDEIGTVGVGESTIPTIRGFHRLLGIDEQAFMRATSATFKLGIHFENWKLPQHRYAHAFGRVGLSTWICGFHHFWLHSLTRGMCSELEDYCVERLASKQHKFATSPDSEINYAYHLDAGVYAKFLRKMSEHDGARRIEGKITEVRQHPDTGFIESLVLDSGQVVEGDFFIDCTGFRGLLIEQTLQSGFEDWSHWLPCDRAVAVQTESVGPAVPYTLSAAHEAGWRWRIPLQHRVGNGLVYCSRYMSDEEATGKLLREVQGRTLTQPRVIRFRAGRRRCTWNKNVVALGLASGFLEPLESTSIHLIMSGITRLMQLFPFGGVQPCLVEHYNRATRTELESIRDFIVLHYHATEREDTPFWRHVRSMAIPESLAHRLEMFRSCAHVWQHEGELFRTDSWLQVMLGQGVQPRRYHHYARAMSDHDLERLLTGLRRSVAETVRELPSHQEFLDRYCRATEILDAS

SEQ ID NO: 89380 - protein, 552 aa, unidentified; identical to SEQ ID NO: 85276
  source 1..552: note = Dehalococcoidia bacterium
  REGION 1..552: note = tr|A0A2A5EVZ4|A0A2A5EVZ4_9CHLR Tryptophan halogenase; OS = Dehalococcoidia bacterium OX=2026734 GN=COA56_15520; PE = 4 SV=1

SEQ ID NO: 89381 - protein, 517 aa, Erythrobacter sp.
  REGION 1..517: note = tr|A0A3B9B0X4|A0A3B9B0X4_9SPHN Tryptophan halogenase; OS = Erythrobacter sp. OX=1042 GN=DCF81_08675 PE=4 SV=1
MSGEFTNLVIVGGGTAGWLSACILAARRPELAITLIEAPDIPTVGVGEGSWPTLRETLAVIGIDETEFLKECDASFKQGSRFDGWVDGSERDCYYHPFSAPLSGSMPDILTAWKMQNDGQPYAEAVSPQAAICNRDLAPRQRTMPPFAGALNYGYHLDAGKFGALLASHAVKRLGVRHVHGKVTGTERGVDGLFTRLLLDNGSAIEGDFFIDCTGMASKLIGEELEIGWVDRSDVSFNDRALAVQVPVVPDSAIASQTIGTAHRAGWLWDIGLPTRRGVGCVYSSRFLSDDEAQAILMNYIGARIAGAGQTALTPRGLKFSTGYRDKFWAGNCLAIGLSAGFIEPLEASAIVLIELSLKALADGYPQSRAALPRLADRFNSLFRYRWERIVDFLKLHYVLSTRTEPYWQAHRDPATIPSSLAAHLDLWRDHAPSSGDFPQIDEIFSAASHQYVLYGMRFPQPADISSAPSSEVQRQFAKVAERSRALSAALPSNRAYFDALCSSMDKNSARGVPTRQ

SEQ ID NO: 89382 - protein, 499 aa, Erythrobacter sp.
  REGION 1..499: note = tr|A0A3B9UKQ0|A0A3B9UKQ0_9SPHN Tryptophan halogenase; OS = Erythrobacter sp. OX=1042 GN=DCL34_10325 PE=4 SV=1
MTERKPPHVVVLGGGSAGWITACLLHHRWHSRGGKVTVVESPEIGIIGVGEGSTPQLKAFFDHLGIDEDDWMAACDATYKLGIRFTGWSERPGFESYFHPFPGPVDLHTEPGFVHNCKLRRRGFDVPAHPDDWFLAEVLADDHRGPHPRDNFPFMPSYGYHFDAHKLGQFLRDWATERGVSHRPLRVTDVEQGAQTEIVALLCEDGTRIEGDIFVDCSGFRSVLAQQKLGAQFIPFGENLFNDRAVVLPSAHGTRFKPQTDSIAMRAGWRWSIPLTTRVGNGYVYSSKYVSDEDAEAELREAIGMQDEGEARILEMRVGRIAESWTGNCLAAGLSQGFIEPLEATALHIVIATALDFADAYEKGGYGSAHRDRFNQRIAAKYEGIRDYIVAHYRLNQRSDTQYWRDNAANDALSDNLKGMITAWFTHDDLREVNLRQHDGNPHYANMSWHALFAGYGTFPPEAKMVPTPTGLVTVEVDHTRRMLSACATNFLRYAPLSD

SEQ ID NO: 89383 - protein, 143 aa, Erythrobacter sp.
  REGION 1..143: note = tr|A0A3D0WKH9|A0A3D0WKH9_9SPHN Tryptophan halogenase (Fragment) OS=Erythrobacter sp. OX=1042 GN=DEP68_06985; PE = 4 SV=1
ADEFNRQSAFEWSAIRDFLILHYAANERSGEPFWDRARAMDLPASLATRIELFRSTGYLSREHDELFTEAGWTQVLLGQGILPRATHPNADALGPAALERLLAGIESDIADTVGAMPGHAQFLRSYCMPQTANRPAATKETAR

SEQ ID NO: 89384 - protein, 396 aa, unidentified
  source 1..396: note = Sphingomonadales bacterium
  REGION 1..396: note = tr|A0A4Q5T1U9|A0A4Q5T1U9_9SPHN Tryptophan 7-halogenase (Fragment) OS=Sphingomonadales bacterium; OX = 1978525 GN=EOP59_08145 PE=4 SV=1
GDVAIVCAGHVADLALDAEDAALDGPAARKFEFPNEDPASIRSTFSYAYHFDAGLYAEFLRRWAIERGVLRIEGKVRDVARADNGDIAALNLESGETVAGDFFVDCSGFRALLLGQTLGVGWEDWSEWLPCDRALAVPTARAEDFTPFTRVTAQEAGWIWRIPLQHRTGNGYVFSSRFTDEERACEILLGAIDGEPIAEPRLLRFSAGRRAEGWRGNCVGIGLASGFLEPLESTSIFLIQAAVHDLITLMPARGSGIDPRLAAEFNRLCEIQYDRVRDFLVLHYTANRRLGQPLWDHVRSMKLPDSLVHKIALFEARGAVPNYQFGLFARDSWLSVLVGQGIVPRTYDRLADALDLDEAEERLDDFASRIALNVAAMTSHQDFIQSYCAAGREVAA

SEQ ID NO: 89385 - protein, 494 aa, unidentified
  source 1..494: note = Sphingomonadales bacterium
  REGION 1..494: note = tr|A0A4Q3A4L2|A0A4Q3A4L2_9SPHN Tryptophan 7-halogenase OS=Sphingomonadales bacterium OX=1978525; GN = EOP60_00465 PE=4 SV=1
MSAAGIRHTVIVGGGTAGWMCAAALGKTLGPGHRITLIESDAIGIVGVGEATVPSIREFNKLLQIDEDAFLRATRATIKLGIEFVDWSGAGQSYLHPFGYFGVDMSGVGFHHHWLRHVAEGGDADPWHYNLEAQAARSGRFERGMRHGPVNHAFHFDAGLYARFLRGEAEKRGVSRVEGEIVDVALDGESGHVTGLTLRSGARIEGDFFIDCSGFRGLLIEGALKTGYIDWSHWLPCDRAVAMPCARGDGPVTPVTRSTAREAGWQWRIPLQHRTGNGYVYSSAHLDDDRAVELLVSRLDGEQLAEANRLRFTAGRRRKSWNGNVVALGLASGFLEPLESTSIHLIQTGIIRLLGLYPRNSIDPAVVDRFNADTAHEYELLRDFVLAHYAVSSGIDAPFWRDVRATPLPDSLAARLDAFRTSGNILNEPTEFFGPTNWFAILWGQGLRPGDYHPLADTLPADERVRRLTLLRQRISEGLADLPPHEAFLAQHAV

SEQ ID NO: 89386 - protein, 519 aa, unidentified
  source 1..519: note = Sphingomonadales bacterium
  REGION 1..519: note = tr|A0A4Q5RUJ3|A0A4Q5RUJ3_9SPHN Tryptophan 7-halogenase OS=Sphingomonadales bacterium OX=1978525; GN = EOP62_13600 PE=4 SV=1
MDTSVRRIVIVGGGTAGWLAACLIAARANPDAVEPLSVTLIESPDIPTIGVGEGTWPTMRRTLERIGISEADFLLACDASFKQGSRFDGWRTGAADDSYYHPFVPPIDGDPHALVAAWQQAGDMPFAAAMGPQPRIAALHLAPRQRAMPDYAGALNYAYHLDAAKLAGLLSRHAVQRLGVEHIRDHVTGVTMAENGDIAAVQTRGSGELEGDLFLDCTGHAALLIGEQFGVPFIDRSDVLFNDRALAVQVPVAPDSPIASQTTATAHAAGWIWDIGLPARRGVGCVYSSKYMTDEVAAETLGAYLRATMPAGEVAPSFRRLVFRSGHRERFWERNCLAVGLSAGFLEPLEASAIVMIELSLEALLDNFPSTRGAMDLHARRFNDRFRYRWDRVVEFLKLHYVPSKRDEPYWQANRDPASIPPRLCDLLEIWRDQPPSITDFPMADEIFPAASYQYVLYGMGYPPPAPGAIRRQASEAIAGHMRQAEQRGRALAASLPENRAYLDALRAERPSSDKRMAE

SEQ ID NO: 89387 - protein, 500 aa, Erythrobacter sp.
  REGION 1..500: note = tr|A0A3B9UNG8|A0A3B9UNG8_9SPHN Tryptophan halogenase; OS = Erythrobacter sp. OX=1042 GN=DCL34_13690 PE=4 SV=1
MSSDYKPRRIVVAGGGTAGWMTAAALAKTMGEAIDLTLVESDAIGTVGVGEATIPPLINFNRLLGINEAEFMRETQATFKLGIEFENWKRDGEKYFHSFGSTGRDHWSAGFQHFWGEGLLRGHDYSYDDYCLELCAAYAGKFAHLPDNRLNYAYHLNATAYAAFLRRIAEGAGASRVEGKIAHVELDGESGNIAAIGLENGQRLEGDIFVDCTGFRSLLIEGALHVGYDDWSHHLPCDSAIAVQTELSASPVPYTRAIAHDAGWQWRIPLQHRGGNGIVYCSRYLSKDAAHDRLMSTLEGKAISEPRAIPFTTGARRKQWHRNCIAIGLSSGFLEPLESTSIHLIQRAVIRLLRMMPAGEVSERDIAEFNDQQLTDMIQVRDFLILHYKATDRRDSAFWRQCATMDIPDSLTQKMELFRETGRVFRKNDELFVENSWVQVMLGQGILPQAFHPVAKKMSDEELSKFLEMLRTNVARTVQGLPAHHAYVAQFCGAKEVAAA

SEQ ID NO: 89388 - protein, 513 aa, Erythrobacter sp.
  REGION 1..513: note = tr|A0A2D8MDV2|A0A2D8MDV2_9SPHN Tryptophan halogenase; OS = Erythrobacter sp. OX=1042 GN=CL949_11610 PE=4 SV=1
MKQSGQSRSGGSRKRRVVVLGGGTAGWMTAAGLVRLLPDAVDVQLVESEDIGIVGVGEATLPHIRSFIETLGIDEAAFMEATHATYKLGIDFRDFGRIGTSYIHPFGSFGEELNGVGFHHYWLELHRHGLAGQLGDYSLAVAAALANKFRPPAADESLASTYGYAYQFDATLFGPFMRSFSTEAGVTRHEGKVVAVQRNTANGDVAALELDDGRLIEGDLFVDCSGFRSLLLGEELGEQWEDWSHWLPCDRAAAMPCTHSSEDISPYTTATAMPAGWRWQIPLQHRMGNGYVFSSTHVSEDRACEAIIGHVDGKPLADPRILRFRPGRRRRSWSHNVIGVGLASGFLEPLESTSIYLAQMAITYLIELFPQADAIDASDRDEFNRLVDMEYDRIRDFLILHYHVTTRDDSEFWNDMRTMRVPDTLADKLELWRRTGRVAKYSEGLFFEPSWVAVYIGQGLLPEQHDARPAALDRTKLTRAVDRLEQAVRAEVQGMPRHRDFLRSDASRLAPAA

SEQ ID NO: 89389 - protein, 500 aa, unidentified
  source 1..500: note = Sphingomonadales bacterium
  REGION 1..500: note = tr|A0A4Q3D8E6|A0A4Q3D8E6_9SPHN Tryptophan 7-halogenase OS=Sphingomonadales bacterium OX=1978525; GN = EOP61_10490 PE=4 SV=1
MTDRKIRSIVIVGGGTAGWMSAATLARILSTQYASITLIESDEIGIVGVGEATIPQMATFNRMLGLDEDQFMRETQGSFKLGIQFVNWGRQGHTYYHPFGKYGLDMQGVSFHAFFLRLHQMGEAPNIDDWSLQATASRANKFMRPIDAGNSPLSEIPYAFHFDAGLYAKFLRRYAEGLGVVRREGKIVDVKLRGEDGFIQSVVMENGDAVEADLFIDCSGFRGLIIEQVLKAGFTDWSHWLPCNRAVAVPCESVDEWTPYTRSTAHTAGWQWRIPLQHRTGNGHVFSVDYMSEDEATQILLDNLDGKPLADPRIVRFTTGHRNKFWIKNCVSMGLAGGFIEPLESTAIWLIQSGLSRFLTMFPDRDFNQADIDRYNRIMTTDYEEIRDFIILHYHATERDDSPFWNYCRTMDIPERLAEKMRVFRSHGRCFRENEELFNDTSWFAVMHGQLMNAQSYDPVADIMSLDETRSRLAHIKEAISASADYMPKQRDFIREHCAA

SEQ ID NO: 89390 - protein, 505 aa, unidentified
  source 1..505: note = Sphingomonadales bacterium
  REGION 1..505: note = tr|A0A4Q2ZKL0|A0A4Q2ZKL0_9SPHN Tryptophan 7-halogenase OS=Sphingomonadales bacterium OX=1978525; GN = EOP60_10155 PE=4 SV=1
MTAPQPIRSIVIVGGGTAGWMAAAAFSRLVRTGVKVTLVESDAIGTVGVGEATIPPIRNFNGLLGIDENEFLAKTQGTIKLGIDFVGWHREGERYFHPFGEYGVDIEGVKFHQFWRKMAASGQASDIGDYNLCAMAMRLGRYAPPSPDPASILSRMAYAYQFDASLYAAFLRDYAEKRGVVRVEGRVIDVPLRGSDGHIEAVVLEGERRIDGELFIDCTGFRALLIEETLGAGWESWAHWLQCDRAVAVPCESMPDGTITPYTRCTARTAGWQWRIPLQHRLGNGYVYCSGDISDETARDTLLANLDGKPLRDPFMLRFEAGRRRKAWHKNCVALGLSSGFLEPLESTSIHLIQTGISKLMALLPDAGFSAVERDEYNRLTDAQMEQVRDFIILHYHANARQDGDLWRRAREMAIPETLRRKLDLFRGRGRFFRYDDELFAESSWIAVMLGQGVMPAGWDPLADATDPAQVRHTLDRIRTLFAQAAQSMPRHEEWLARNASGRAA

SEQ ID NO: 89391 - protein, 276 aa, unidentified
  source 1..276: note = Sphingomonadales bacterium
  REGION 1..276: note = tr|A0A4Q5SQX8|A0A4Q5SQX8_9SPHN Tryptophan 7-halogenase OS=Sphingomonadales bacterium OX=1978525; GN = EOP59_13395 PE=4 SV=1
MLIEGALKSGYVDWRHWLPCDSAVAMPSERQGDPPPFTRSTAREAGWQWRIPLQHRDGNGYVYSSAHLGHDDAVANLTERLPGKALADPNRLRFVAGHRRVIWNRNCVAIGLAGGFLEPLESTSIHLIQTAIIRLLALLPRDGFDPGVAARFNRETINEVERIRDFVIAHYALAGRDDTDFWRDIAAAPIPDSLAERIAVFRATGNILFEPGDLFGPTNWYCVLAGQGARALSWHPIADGLAPEELARRLATLRGRVAEQLAELPPHTAYLASLAR

SEQ ID NO: 89392 - protein, 516 aa, Erythrobacter sp.
  REGION 1..516: note = tr|A0A354VU16|A0A354VU16_9SPHN Tryptophan halogenase; OS = Erythrobacter sp. OX=1042 GN=DDZ54_07430 PE=4 SV=1
MSSEFNRLVIVGGGTAGWLSACLLAARRPELDVTLVEAPDIPTIGVGEGSWPTLRETLAAIGIDEARFLSACDASFKQGSRFDGWVDGSADDSYYHPFTPPASGQMADILSAWSAQPRKTASFAGAVTPQIAVCDRDLAPRQRAMSAFTGALNYGYHLDAAKLGALLAEHGTAHLGVKHVRAHVTGVERGEDGLLAKLMLRGSDTVEGDFFIDCTGMAARLIGDELGVGWRDRSDVSFNDRALAMQVPVAPGSAIASQTVGTAHKAGWLWDIGLPTRRGIGCVYSSRFLSDEDAETILADYITAKVPGADPGALASRKLQFATGHREQFWRGNCLAVGLSAGFIEPLEASAIVLIELSIKALADAYPHSRSALPRLADRFNALFRYRWDRIVDFLKLHYVLSKRGEPYWRAQRDPATIPETLAAQLELWRDHPPSAADFPQVDEIFSAFSQQYVLYGMGFPLPSAARPAPGHDALRRLAEVSERSRALTAALPSNRTYLDTLRAAQTGRGAQGAIA

SEQ ID NO: 89393 - protein, 521 aa, Erythrobacter sp.
  REGION 1..521: note = tr|A0A357H8I5|A0A357H8I5_9SPHN Tryptophan halogenase; OS = Erythrobacter sp. OX=1042 GN=DD861_10345 PE=4 SV=1
MRPDDGQAQAIGSICIVGGGTAGWSAAALLSQVLRGSGCRITLIESSAIPTVGVGEATIPPIFDFLRNIGADEVEFIRRCRATFKLGIQFRDWLHHNHAYWHPFGNLGVTINRRPFHHYYCMNRAAGYGETLADLCPSVALAEDGKFAFPSPDGQWPGGAVAYALHFDAGLVAAFLRDHAVAAGVERLDRRIVGATRGEGERIARVQFDDGESLEADFYIDCSGFRGLLIEETLGAGFEDWKHWLPCDSAVAAPTAAQEQRAPYTVATARSAGWQWRIPLQHRTGNGLVYASDFISDADAQAQLLAGLDGEPQADPRVLRFTAGLRKRAWVGNCLAIGLSAGFLEPLESTSIHLIHTGLNRLLDLFPDRRFDPALIAAYNRDVHREYAHIRDFLLLHYVPNRREGEPFWDHMRGLDLPDTLAEKIELFTRTGRIMSRQRELFSDISWFYVMHGMGLTPAALDPLAEAAPFGEVRKVIDQLRGAMQAFRSAAPTHDAILDRLLDPAETRRPQFGTGGGWTTR

SEQ ID NO: 89394 - protein, 68 aa, unidentified
  source 1..68: note = Sphingomonadales bacterium
  REGION 1..68: note = tr|A0A4Q5TAA0|A0A4Q5TAA0_9SPHN Tryptophan halogenase (Fragment) OS=Sphingomonadales bacterium OX=1978525; GN = EOP59_05865 PE=4 SV=1
MSGAPSHIVVVGEDAALWLAVSTLHAALRGAGVSVQAVELPPRLRAADVLVTQPSLEALHGRLGIQED

SEQ ID NO: 89395 - protein, 500 aa, unidentified
  source 1..500: note = Sphingomonadales bacterium
  REGION 1..500: note = tr|A0A4Q3A216|A0A4Q3A216_9SPHN Tryptophan 7-halogenase OS=Sphingomonadales bacterium OX=1978525; GN = EOP60_02845 PE=4 SV=1
MTDRKIRSIVIVGGGTAGWMAAATLSRILGIDYASITLIESDAIGTIGVGEATIPQMATFNRMLGLDENQFMRETQGTFKLGIQFVDWARKGHRYFHPFGKYGLDMKGVSFHAFFQRLHQMGEAPDIDAWSLQAMASRDNKFMRAIEAGNSPLSEIPYAFHFDAGLYARFLRNFSENLGVVRREGKIIDVKLRGEDGFVQSVVLEDGSEVEGDLFVDCSGFRGLIIEQALKAGYTDWSRYLPCNRAIAVPCESIDDWTPYTRSTAHTAGWQWRIPLQHRIGNGHVFCSEFMSDDEATGILLANLDGKPLADPRVVPFMTGHRNKLWVKNCVALGLAGGFIEPLESTAIWLVQSGLSRFLTMFTDRDFNQADIDRYNRIMTTDYEEIRDFLVLHYNATERDDSPFWDYCRNMEVPERLAEKMRVYRSHGRCFRENEELFNDTSWFAVMHGQLMKAHSYDPVADTMSLDETRARLAHIKEAIANSADYMPRHRDFIREHCAA

SEQ ID NO: 89396 - protein, 538 aa, Pseudomonas sp.
  REGION 1..538: note = tr|A0A1H3R230|A0A1H3R230_9PSED Tryptophan halogenase; OS = Pseudomonas sp. NFIX28 OX=1566235 GN=SAMN03159453_02632; PE = 4 SV=1
MNKPIKNIVIVGGGTAGWMAASYLVRALQQQANITLIESAAIPRIGVGEATIPSLQKVFFDFLGIPEREWMPQVNGAFKAAIKFVNWRKSPAPSRDDHFYHLFGNVPNCDGVPLTHYWLRKREQGFQQPMEYACYPQPGALDGKLAPCLSDGTRQMSHAWHFDAHLVADFLKRWAVERGVNRVVDEVVDVRLNNRGYISNLLTKEGRTLEADLFIDCSGMRGLLINQALKEPFIDMSDYLLCDSAVASAVPNDDARDGVEPYTSSIAMNSGWTWKIPMLGRFGSGYVFSSHFTSRDQATADFLKLWGLSDNQPLNQIKFRVGRNKRAWVNNCVSIGLSSCFLEPLESTGIYFIYAALYQLVKHFPDTSFDPRLSDAFNAEIVHMFDDCRDFVQAHYFTTSRDDTPFWLANRHDLRLSDAIKEKVQRYKAGLPLTTTSFDDSTYYETFDYEFKNFWLNGNYYCIFAGLGMLPDRSLPLLQHRPESIEKAEAMFANIRREAERLRTSLPTNYDYLRSLRDGDAGLSRGQRGPKFAAQESL

SEQ ID NO: 89397 - protein, 274 aa, unidentified
  source 1..274: note = Moraxellaceae bacterium
  REGION 1..274: note = tr|A0A4Q6EL99|A0A4Q6EL99_9GAMM Tryptophan 7-halogenase (Fragment) OS=Moraxellaceae bacterium; OX = 1889775 GN=EOO68_07120 PE=4 SV=1
LHTGFEDWSHWLPCDRAVAVQTKSVREPFPYTRSIAHPAGWQWQIPLQHRVGNGLVYCSRYLSDEGAKKVLLENVEGETITEPRVIHLRIGRALKQWNKNCISIGLASGFLEPLESTGLHLIQTGIIRLIKMFPAGEIDLTEVEEYNRQSKYEYERIRDFIILHYHVTNRSDSPFWNYCRTMSIPETLSNRIKIYKATTSVFRDHDELFHEGSWQQVMHGQGIVPNGYHPVVNKLSVEELKRFLSNIDMEIEKLVNLMPTHQQYIEKNCKANLI

SEQ ID NO: 89398 - protein, 451 aa, unidentified
  source 1..451: note = Moraxellaceae bacterium
  REGION 1..451: note = tr|A0A4V2BBY6|A0A4V2BBY6_9GAMM Tryptophan 7-halogenase (Fragment) OS=Moraxellaceae bacterium; OX = 1889775 GN=EOO68_06050 PE=4 SV=1
MIQKHIVIVGGGTAGWMTAAALANQFNSDEIKITLIESESIGTVGVGEATIPHLRYFNQRLGIDEREFVRATNATYKLGIELVNWSAQPGSYIHPFGDFGEKLGSDEFYLGWLAHKRHYASADFSKCSTAVVAAKKHKFDYPKAQSEDWQGYSYAFHFDALLYAHYLRAYAERKGVIRREGVIKSVDFEQGESLTGDMFMDCSGFRSLLLTGALKVAFDDWSEWLICDRAIAVPSQSDQQFRPYTQAEAMSCGWRWEIPLVNRTGNGLVYSSAHMSDDNACAYLKSKIIGDTLAEPNFIRFKAGRREHCWARNCVAIGLASGFLEPLESTSIYLIQLGIMKFLELYSPHSNNIGARQEFNAVMGLEYERMRDFVILHYFAAQRIDSDFWRYCASMSLPASLQERLDIYRATGLIDQYDLGLFKTPSWASVLIGQHYFPDELLRRVAHLDKN

SEQ ID NO: 89399 - protein, 491 aa, Sphingomonas sp.
  REGION 1..491: note = tr|A0A0Q4HYZ5|A0A0Q4HYZ5_9SPHN Tryptophan halogenase; OS = Sphingomonas sp. Leaf22 OX=1735687 GN=ASE70_00640 PE=4; SV = 1
MTRMRIVIAGGGTAGWLAAALLTRQLSSLVEVTLVESEDIGTVGVGEATIPTIRSFHALLGLDEADFMGATGASFKLGIAFENWARAGDRYLHSFGEVGRSTWMGDFQHFWLEARAQGVAGPIGAYCLEHEAAEAGRFATGPDAPLNYAYHFDAGRYAAYLRTRSEAQGLTRVEGRIARVERVGESGDIAALVLDDGRRVAGDLFLDCTGFHALLIEQTLGVGFEDWGHWLPTDRALAVQTVATGPAPPYTRAIAHDAGWRWQIPLQHRVGNGLVYSSRHLSDDAARDRLLASVEGQTLTEPRLIRFRTGRRLTTWERNCVAISLSSGFVEPLESTSIHMVMIALTRLVQLLPFGHPGEAARARFNEQSRREIEAVRDFVLLHYHLNQRPEPFWRERREIAPPDTLAERIALFAQGAHAYQSADDLFRVGSWLQVMLGQGLEPAAHHPLAKMMPPGQLAAVLRDLNDGIAARVAALPAHQQFLDQYCRSSA

SEQ ID NO: 89400 - protein, 499 aa, Alteromonas sp.
  REGION 1..499: note = tr|A0A1L8MBI9|A0A1L8MBI9_9ALTE Tryptophan halogenase; OS = Alteromonas sp. V450 OX=1912139 GN=BK026_04445 PE=4 SV=1
MNKPIHIVIAGGGTAGWMAANYFAHKWSSGKVNITLVESSDIGIIGVGEGSTPTLKRFFDELNIPENDWMPKCNATYKVSIQFNNWSPGSGINQYRHPFISQTDTFTQRAFEVNCRTRRLGLDTHVAPEDFLINGMLAKQNKAPLTPDNFPFRMEYGYHFDSALLGNYLRELAIGKGVTHVNAIISDVVLHPSGDISHLVTDKAIIEGDFFLDCTGFSSTLLQQALGVKFNSYSENLFNDSAVVLPTQAQKNIKVETQSTALSSGWCWTIPLQNRTGNGYVYSTAHLSKDQAEEELRRHLGFESTDVEARHLKMKVGQVGQHWHKNCLALGLSQGFIEPLEATALHLVQICIEYFSDTFEKNGFSTKPCSNYNSFARERFDRVRDYIVAHYKLNTREDSDYWHDNRENMVMSDSLNSILSAWFSRQDLASEIKRQNIGMHWDSVSWHCLLAGYGAFPPLEKNQPGRGDLYKEQNIERFIQGCALNFSDHNVVLNSQSRL

SEQ ID NO: 89401 - protein, 557 aa, unidentified
  source 1..557: note = Nitrospirillum amazonense
  REGION 1..557: note = tr|A0A248JVE4|A0A248JVE4_9PROT Tryptophan halogenase; OS = Nitrospirillum amazonense CBAmc OX=1441467; GN = Y958_17370 PE=4 SV=1
MADTEAPTDDARAKGAPVKNVLIVGGGTAGWLAAAYLARTLSIGQPGSARITLVESADIGILGVGEGTFPNIQRTLRRIGIDESVFMRESEATFKQGIRFDHWQHAPGPSATGAGQRDHYFHPFQSAIGPQDLDLIPYWLLGAAGDGVPLDTALTMQKRVADAALAPKRSGDADYAAPLNYAYHFDAVKFARLLRVVATDLGVRHVIDTVDAVPLDETGAVAGVVTRENGTLTADLYIDCTGFRAQLIGQALKSPYQSCRKWLFCDRAVALQVPYDQPDAPIPSYTISTAHEAGWTWDIGLETRRGIGHVYSSDHTDDARAEQVLRDYIGPAAADKTARTFRFEAGYRPEPWVRNCVAIGLSSGFFEPLESTGIVLIEVASVLLTSLFPWAGDMATAARQFNRIMRQRYERALDFLKLHYCLTRRTDTAFWRDNADAATVPDTLHDLLDRWRHRPPEGLDFDLNLDTFSEASWQFVLYGMGYHTDLSAQAGAFRHMDEARQQFAAIRAGTEQALAALPRHRDLITQIYRHGLRPRTPFGGAPSGRANLSSGMAGLSR

SEQ ID NO: 89402 - protein, 497 aa, Croceicoccus marinus
  REGION 1..497: note = tr|A0A217EYZ0|A0A217EYZ0_9SPHN Tryptophan halogenase; OS = Croceicoccus marinus OX=450378 GN=A9D14_18570 PE=4 SV=1
MGGTMHDFVIVGGGTAGWMAAAALARFLPRERSVALVESDAIGTVGVGEATIPQIRLFNQSLGIDDAELIRQTNGTIKLGIEFVDWSQNGSRYYHAFGTIGRRLGLVPFHHYWLRHQAQQPDADLWAFSTSALAAGANRFAPDQGRPDLPTGLAWAFQFDAALYAAFLRSYAEGRGVRRTEGRVADIRHDGASGLIQAVQLDDGRSIAGRFFIDCTGFASMLLGGKLGVGFDDWSRWLPCDRALAVQCEGVRPLTPYTRATARVAGWQWRIPLQHRTGNGLVYSSAHMDDQQAADTLLTNLDGRPLSQPRPLRFRAGRRRRAWVGNCLALGLAAGFLEPLESTSIHLIQSGIARLLELLPAADVAPALAAEYNRQTEREWQAVRDFLILHYHANDRPEPFWAERRSTPLPDRLQHRIDLFRATGQIARDPDDLFTEVAWLQVMVGQGIVPARHHPLANAPTPAELAEFLALARRHSAATVDRMPSHEAFLAALETPA

SEQ ID NO: 89403 - protein, 508 aa, unidentified; identical to SEQ ID NO: 86020
  source 1..508: note = Alteromonadaceae bacterium
  REGION 1..508: note = tr|A0A2D5M4H6|A0A2D5M4H6_9ALTE Tryptophan halogenase; OS = Alteromonadaceae bacterium OX=1916082 GN=CL579_13515; PE = 4 SV=1

SEQ ID NO: 89404 - protein, 522 aa, unidentified
  source 1..522: note = Alteromonas mediterranea
  REGION 1..522: note = tr|F2GAR4|F2GAR4_ALTMD Tryptophan halogenase; OS = Alteromonas mediterranea (strain DSM 17117 / CIP 110805 / LMG 28347 / Deep ecotype) OX=1774373 GN=MADE_1019530; PE = 4 S V=1
MTTATPITHIVVVGGGSAGWLTAGRIAAQHQCATRKDIKVTLVESPNVPIIGVGEGTWPTMRSTLIALGISETTFIKECDATFKQGAKFAKWTTGEESDFYYHPLMLPQGFSQTNLGPYWQTVAPELNESFSHAVCVQEAICEAGCAPKSIRHAEFAGTANYAYHLDAGKFTAFLTKHCTEKLGVHHVLADVNHVESFDNGDIKALHTEQGVIVEGDLYVDCTGFKSMLLGEHYKVPFIPCDDVLFIDRALAVHVPYDTPQSPIASHTISTAQDAGWIWDIGLQSRRGVGHVYSSRHQNKDEAYARLDTYVRQTSSLNGIDDINVKDITIQSGHRQRFWQNNCVAVGLAAGFLEPLEASALVLVELSASMIAEQLPANRAVMAIVAKRFNDTFSYRWQRIIDFLKLHYMLSKREDSAFWRDNRDSHTIPDSLKELLALWQYHPPSDKDFTSNNEVFPAASYQYVLYGMGFTSQLGTHQQWVNADFAKQQLMQNRKARSMAVEKLPKHRELINKIHQFGLQAV

SEQ ID NO: 89405 - protein, 538 aa, Burkholderia thailandensis
  REGION 1..538: note = tr|A0A5F1BZ17|A0A5F1BZ17_BURTH Tryptophan 7-halogenase OS=Burkholderia thailandensis OX=57975; GN = C6946_25200 PE=4 SV=1
MSNPIKNIVIVGGGTAGWMAASYLVRALQQQANITLIESAAIPRIGVGEATIPSLQKVFFDFLGIPEREWMPQVNGAFKSAIKFVNWRKSPERSRDEYFYHLFGSVPNCDGVPLTHYWLRKREQGFQQPMQYACYPQPEALDGKLAPCLPDGTRQMSHAWHFDAHLVADFLKRWAVERGVNRVVDEVVEVHLNDRGYISSLSTKESRTLEADLFIDCSGMRGLLINQALKEPFIDMSDYLLCDSAVASAVPNDDARVGIEPYTSSIAMNSGWTWKIPMLGRFGSGYVFSSKFTSRDQATADFLDLWGLSDKQPLNQIKFRVGRNGRAWVNNCVAIGLSSCFLEPLESTGIYFIYAALYQLVKHFPDTSFDPRLADAFNAEIVDMFDDCRDFVQAHYFTTSREDTPFWLANRHDLRLSDAIKEKVERYKAGLPLTTTSFDDSTYYETFDYEFKNFWLNGNYYCVFAGLGMLPDRSLPLLRHRPESIDKAEAMFARIRREAERLRTSLPTNYDYLRSLREGDAGLSRSQPGPTLATPEIL

SEQ ID NO: 89406 - protein, 510 aa, Stenotrophomonas sp.
  REGION 1..510: note = tr|A0A1E7RTA7|A0A1E7RTA7_9GAMM Tryptophan halogenase; OS = Stenotrophomonas sp. BIIR7 OX=1904462 GN=BIY45_00440; PE = 4 SV=1
MNAANTTTQGRIRKVVIAGGGTAGWLAGCALAHQFRDQLEITLVESEQIGTVGVGESTVPPIRTFHRFLQIDEQEFLREVAGTFKLSISFENWRRPGERFIHPFGTIGQNTWATPFHHFWLDSQRRGMASDLGDFCLESVASRGDQFSLQTQPQVNYAYHFDAGLYAKFLRRKAEANGLRRVEGKIREVRQHAHDGSVQALVLEDGQVLEGDLFIDCTGFRGLLTEQTLHTGYEDWNQWLPSDRAVAVQTESVKPPVPYTRAIAHEAGWRWHIALQHRVGCGLVFSSRHMSDDEAQAKLLRDIEGEPLRDPWLVPFRSGRRLKAWNKNVVALGLASGFIEPLESTSIHLTISSVVRLIQLFPIEGITPTLQALYNDVGQKEMEHVRDFIILHYHATQRDEPMWKAAREMELPESLAVRLRAWRERAHAWQDPGELFRVDSWTSVLMGQGIQPGPAHPLASAISDDDLRTLLQRIRQPIQQAVATMPSQADFIAQYCKASEDVWPRRMATA

SEQ ID NO: 89407 - protein, 496 aa, unidentified
  source 1..496: note = Alteromonadaceae bacterium
  REGION 1..496: note = tr|A0A2E7GVA4|A0A2E7GVA4_9ALTE Tryptophan halogenase; OS = Alteromonadaceae bacterium OX=1916082 GN=CL578_22170; PE = 4 SV=1
MQKDSIKHIVIAGGGTAGWMTAAALGKLFGANIKVTLIESDAIPTVGVGEATIPTLHLFHDLLKIKESEVMAATNATFKLGIKFEDWYQRNQSYIHSFGRFDHGCWAAGFQHFWLRGRQLDIASEIGDYCPEHLACRMGKFATAPKQERNHAFHLDAGLYAKFLREFAEQYGVRRIEGKIDNVNLNHNNGFIQSISLESGQRVEGQLFIDCTGFRGLLIEQALHTGYEDWSHWLPCDSAVAVQTELNESNVPYTRSIAHDAGWQWQIPLQTRVGNGLVFCSKYISDDEAKTQLLNNIRGKTLNPPRVLKFKTGVRRKLWNKNCVAIGLAGGFIEPLESTSIHLIQQSIIRLMQSLPSAHMESPIIDKFNATMRNEIDNIRDFIILHYHATARKDSAFWRYCKDMPIPTSLHERMEQFAHSAHVHQGNGELFGEASWLQVMLGQGITPKAYHPIVDLMPVQELASFLDNVKQQTARRVSSLPNHLAFIRYYCKRAAV

SEQ ID NO: 89408 - protein, 533 aa, Xanthomonas sp.
  REGION 1..533: note = tr|A0A3Q9Q5L7|A0A3Q9Q5L7_9XANT Tryptophan halogenase; OS = Xanthomonas sp. ISO98C4 OX=1680158 GN=AC801_21310 PE=4; SV = 1
MGMWPVERGQLAPFAYPSAVLAQECIGMIPAPLRNIVIVGGGTAGWMAAAAFARVLGPTFKVQLIESEQLGTVGVGEATVPHIKAFNNLLGIDEAEFVRQTQGSFKLGIEFVDWQRPGSTYMHGFGTQIGHPLGLLPFHQYWIKQHARGKAQPLGAYTLNTVAAARGKFMTSAGDVPANSPLANIAYAYHFDATQYAHFLRRYSQQRGVTRIEGLVEQVQLHPESGHVQSLQLASGQTVHGDLFIDCSGFGGLLIEQALHTGYHDFTHWLPCDRALAVPCEKVGPPTPYTRSTARAAGWQWRIPLQHRTGNGYVYCSAHISDDEAAATLLANLDGKPLADPRPLRFTTGRRKQCWNRNVVALGLASGFLEPLESTSIHLIQSGISKLLELFPREGISPVLVQRYNDRLAFEFDRIRDFLLLHYHATERDDSAFWRHCRQMPITPELQATLNLFRDSGRFYRNAEEMFAEISWVQVLVGQGILPQGYHPLVDQVPDRDAEGFLASVAHTISHCVDVMPGHQHFIDRYCKAAAVP

SEQ ID NO: 89409 - protein, 502 aa, unidentified
  source 1..502: note = Sphingopyxis flava
  REGION 1..502: note = tr|A0A1T5AUR2|A0A1T5AUR2_9SPHN Tryptophan halogenase; OS = Sphingopyxis flava OX=1507287 GN=SAMN06295937_1004179; PE = 4 SV=1
MSDSRITKVVIVGGGTAGWMAAAALSRTMDGLSIRLVESEEIGTVGVGEAAIPSIRLFNALIGIDEDDFVRETRGSFKLGIEFQNWGRIGDVYMHAFGQIGRSLGMLPFQQFWLRGRAEGVAGRFGTYSLNETAALQNRFARLPHIPNTGLDGIAYAFHFDAALYAAYLRRIAEAAGVDRTEGKIAEVRWDGESGHVEAVVLEDGTAIDGELFIDCSGFRALLIESALQTGFEDWTHWLPCDRAIAVPSENIGPARPYTQAIAHQSGWQWRIPLQHRTGNGHVFCSDFISEDEAAAVLLAHIGGRLLAEPRTLRFRTGMRSRAWSGNVVALGLASGFLEPLESTSIHLIQNGIARLLAHFPGRDFDAANVDAYNRRVRFDYERIRDFIILHYHANQRTDSAFWTRCREMAIPETLMQKIDLFRSQGRIVREGDELFVEIGWFQVLTGQNVAPRAYHPMADQLSRDELSGFFGDIKTIVAGTASRLPTHDDFIAQHCAAGVTV

SEQ ID NO: 89410 - protein, 517 aa, unidentified; identical to SEQ ID NO: 86919
  source 1..517: note = Alteromonadaceae bacterium
  REGION 1..517: note = tr|A0A2D9KM56|A0A2D9KM56_9ALTE Tryptophan halogenase; OS = Alteromonadaceae bacterium OX=1916082 GN=CL582_22815; PE = 4 SV=1

SEQ ID NO: 89411 - protein, 514 aa, Stakelama pacifica
  REGION 1..514: note = tr|A0A4R6FL87|A0A4R6FL87_9SPHN Tryptophan halogenase; OS = Stakelama pacifica OX=517720 GN=EV664_10688 PE=4 SV=1
MVARTRHIVIVGGGTAGWLTAGLIAAKHRARIPHDLTVTLVESPTTPILGVGEGTWPTLRSTLARIGVSETDFFRECDAAFKQGALFARWTTGAADDAYYHPLMLPQHFSKLNLVPHWLAQQEASSFCDAVCPQGRLCDDGLAPKTIATPEYDGVANYAYHLDAGKFAPFLQRHCCEKLGVCHVLADVREVRLHEHGDIRAIDTEQAGEIAGDLFIDCTGFRSLLLGDAMGVGFKDCSDILFCDTALAVQMPYPDEHSPIATHTISTAQSAGWIWDIGLPTRRGIGHVYSSRHQSQDAAERELRAYLGPGGADLPIRQIAIRSGHRETFWKRNCVAVGVAAGFLEPLEASAIVLIELSAKMIAEQLPACREVMDVIASRFNETTHYRWGRIIDFLKLHYVLSKREDSEFWRDNRLPETVPDRLRDLMLLWRYQSPWFHDEFDRVEEVFPPASYQYVLYGMGFETEVEPALLVSDRRLADQAMRENAVQTQRMRQGLPRHRDLIDRIHQHGLQPV

SEQ ID NO: 89412 - protein, 501 aa, Sphingomonas sp.
  REGION 1..501: note = tr|A0A0Q4GTZ1|A0A0Q4GTZ1_9SPHN Tryptophan halogenase; OS = Sphingomonas sp. Leaf22 OX=1735687 GN=ASE70_08975 PE=4; SV = 1
MEARDRIRRVVILGGGTAGWMTAAALSRSFGRAVDVTLLESEAIGTVGVGEATIPTIHWFNELIGLDEREFLRATKATFKLGIEFVDWTAPGHRYFHPFGQFGAALPGVAFHHRWLKARADGMDVPLPALSLAAQLARQGRFAKPVGDARSILSTLGYAYHFDAGLYAAYLRQMSEAGGVRRVEGKLQAVDRDGETGFVTALTTERGERIDGDLFIDCSGFRALLIGEAMGEPFEDWSHWLPCDRAVAVPCARLPATTPYTRSTARAAGWQWRIPLQHRTGNGYVFASRYVSEDEATATLMANLDGEALAEPRLLRFTAGTRRRPWRDNVVAIGLSSGFLEPLESTSIHLIQSGITKLLTLFPNRDCDPALADRFNDVFTRDMDGIKDFLILHYHATSGRSEPLWQHCRTMELPATLVARETQYRRSGRLILDGDELFRDASWLAVLNGQGIVAQGYNPLADAIDADGNRAQVRQIADVIARAAPTLPLHDVALAQAMGAT

SEQ ID NO: 89413 - protein, 508 aa, unidentified
  source 1..508: note = Nitrospirillum amazonense
  REGION 1..508: note = tr|A0A248JVG6|A0A248JVG6_9PROT Tryptophan halogenase; OS = Nitrospirillum amazonense CBAmc OX=1441467; GN = Y958_17360 PE=4 SV=1
MAEAMRSGRRIVIVGGGTAGWMAAAVLARVLKGRYGTIELVESAEIGTVGVGEATIPPIQFLNHLLGIDEVDFVRKTQATFKLGIEFVDWTRLNHRYFHPFGPHGHTIDAVSFHHYWLRQRAKGDTSDIGDYSPSTVAARMGKFQPPAPDARPGGPVIAYAYHFDAGLYAQYLRGIAERNGVKRTEGKIVQVTRRAPDGFIDSLVLENGTRVAGDLFVDCSGFRGLLIGETLKAPYEDWSHWLPCDRAVAVPCEGVAAITPYTRSTARPAGWQWRIPLQHRIGNGHVYSSRFISDDEATATLLANLDGRPLADPRPLRFTTGRRRNSWTKNCISLGLASGFMEPLESTSIHLVQSGLFRMVSLLPRDGFEQATVDEYNRLTNIEYEQIRDFLILHYHAVERDDSPLWNYCRTMEIPDSLRHKIDLFRARGRIARFDEQLFAEPSWVAVFLGQGIQPHSYDPVADVMPEAEVTARLARIREAIRRMADALPTHADFINRHCRADRPVAA

SEQ ID NO: 89414 - protein, 517 aa, unidentified; identical to SEQ ID NO: 86008
  source 1..517: note = Alteromonadaceae bacterium
  REGION 1..517: note = tr|A0A2D5LYC1|A0A2D5LYC1_9ALTE Tryptophan halogenase; OS = Alteromonadaceae bacterium OX=1916082 GN=CL579_02375; PE = 4 SV=1

SEQ ID NO: 89415 - protein, 513 aa, Sphingomonas sp.
  REGION 1..513: note = tr|A0A1H8DIM9|A0A1H8DIM9_9SPHN Tryptophan halogenase; OS = Sphingomonas sp. S6-262 OX=1166340 GN=SAMN05192583_1943; PE = 4 SV=1
MQQVRNIVIVGGGTAGWLTAGVIAAKHQGRRPHGFTVTLVESPNVPTIGVGEGTWPTLRTTLKRMGVSETEFFRQCDAAFKQGARFNRWTTGAADDGYYHPLMLPQQFGQVNLAPHWLADDGDEDFCDTVTPQGRICDEGLGPKTMATPEFEGQANYAYHLDAGKFYHFLQRHCCDTLGVRHVLADVTQVQLAENGDIAGVETAQAGTIHGDLFIDCTGFSALLIGGAMQVPFKPCNDVLFCDTALAMQVPYDTPAAPIASHTISTAQSAGWIWDIGLPTRRGVGHVFSSSHIDADTAEQQLRAHVGEAARDLTVRRIPIRAGHRERFWVRNCVAVGLAAGFLEPLEASAIVLIELSAKLIAEQMPACREVMDTVAARFNATTSYRWGRIIDFLKLHYALTKRTDTDFWRDNLRAETMPDRLRALMELWQYQSPWLHEEFDRADEVFPSASYQYVLYGMGARTAVMPGSLDEDMALARRARRENQVQTQRLLSSLPGHRELIDRIVRHGLQPI

SEQ ID NO: 89416 - protein, 554 aa, Nostoc sp.
  REGION 1..554: note = tr|A0A252E3A1|A0A252E3A1_9NOSO Tryptophan halogenase; OS = Nostoc sp. 106C OX=1932667 GN=BV375_04615 PE=4 SV=1
MSQYVQNIVIVGGGSAGWMTAAYLSKALKKNVHITLVESSNITKVGVGEATFSSIKSFFDFLGLQEYEWMPKCNATYKMGIKFVDWNSDRRHFYHPFERFDFIDGFSISEWWLKLKSFNEPFDYSCFMAPTLCDHQRSPRYLNGKIFDDRVEHLFSEKHFSEKNLITLADAEGQYPYAYHFDANLIARFLKDYSRQRGVKQIVDDVVDVNLTEDGSIDSLNTKEHGIVSGDLFIDCTGFRGLLINKALGEPFISYSESLLCDRAIAMQIPSDIQKNGINPYTTATALSSGWVWDIPLYGRNGTGYVYSSAFISAEEAEQEFRHHLGNVAHNCKASHIHMRIGRNRNSWVKNCVAIGLSSGFVEPLESTGIFFIQHGIEELVNHFPGKSFNEELICNYNKAVANCIDGVRDFLVLHYFASDRADTKFWQATKQEIKVPAELQEKFKLWRRRLPNKKNINPYFHGFETYSYSVMLLGLNHKPEGSLPLLEHLDNEKALAKFTAIKEKARYLSTNLPSQYEYLTYVIKSQEHSEYLSENHLPASFVSDSAHQIPIAS

SEQ ID NO: 89417 - protein, 519 aa, Stakelama pacifica
  REGION 1..519: note = tr|A0A4R6FYV1|A0A4R6FYV1_9SPHN Flavin-dependent dehydrogenase OS=Stakelama pacifica OX=517720; GN = EV664_101606 PE=4 SV=1
MDDGKGKPDHINTVTVVGGGTAGWLAACRIAAEARRMGREIRLCLVESDRVPPIGVGEGTWPTMRNTLAKIGVSETDFVRECDATFKQGARFTGWADGSPGDSYYHPLNPPAGATRIDLARFWPGEGGGASFAGWIDFQAALCDAGLAPKAITSAEYQGQANYAYHLDAGKFAAFLKEHATSRLGVEHIVGDVADAVLDDSGDIGHLTLSDGRSVSGDLFIDCTGFAALLIGKVYAVPFRSCRDILFADRAIAMQVPYAQENAPIASQTISTATGAGWIWDIGLWARRGVGHVYSSAHCDDERAEKMLRDYIGPAAKDLTSRRIDIDAGYRTRFWQNNCVAVGLSAGFLEPLEASALMLVETSLDAIAERLPQNRQAMRIAARQFNTTFLHHWARIIEFLKLHYGITRRRDTDFWRDNADPASFPDELAERLEFWRHHSPNAQDFTHAREVFGWPSYQYVLNGMGFAADRSSLGDGSPNAAVARGLLEQLDRLRSEALTRLPAHRDLIRAIREHGLQRI

SEQ ID NO: 89418 - protein, 534 aa, Sphingomonas sp.
  REGION 1..534: note = tr|A0A1H8DGZ9|A0A1H8DGZ9_9SPHN Tryptophan halogenase; OS = Sphingomonas sp. S6-262 OX=1166340 GN=SAMN05192583_1924; PE = 4 SV=1
MNEHTIRNVVIVGGGTAGWMAAAALSRFLNNGVTRITLVESEEIATVGVGEATIPPLLTFNRMLGIDENQFIRETGGTYKLGIEFAGWGDIGERYFHPFGAHGHDLGGVHFHQLYLRERRRRVMQDISAWSMSAVAAQAGKFARPAEGAQSAVKELMYAYHFDAGLYARFLRRYAEDNGVQRIEGKVVDVTVRPDDGHVTAVTLEGGRSVEGELFIDCSGFRGLLIEEALATGYEDWRHWLPCDRAVAVPSRYHGDPDPFTRATARGAGWQWRIPLQHRMGNGLVYCSEFMTADAAERELLGNLEGEPIADPRHLSFTTGRRKLAWNRNVVALGLSSGFVEPLESTSIHLIQSGIARLVALFPDRRFNPVERDEYNRQMRDLYEDVRDFVILHYKATRRTDTPFWDRCRTMSVPDSLQRKIDLFRAKGRIFRDAAELFATTSWVSVCLGQHVVPEEHEPAADALDEDKVAAAMEQMRQGYLQVEAQLPGHGDFLRHTGAGPANAPQPAPTPVPAGEPQFSFASETPFNFSATPL

SEQ ID NO: 89419 - protein, 513 aa, unidentified
  source 1..513: note = Pseudoalteromonadaceae bacterium
  REGION 1..513: note = tr|A0A2D6VQ94|A0A2D6VQ94_9GAMM Tryptophan halogenase; OS = Pseudoalteromonadaceae bacterium OX=2026783; GN = CMK61_07770 PE=4 SV=1
MQKNEVKKVVILGGGTAGWLSAGLIAAQPHLTHNAQITLIESPDIATIGVGEGTWPTMRQTLKTIGISESEFIQRCDASFKQGSRFDGWCDDEGDAHYYHPFSLPVAYQQLNIAPYWFANKDAVSFSHAVASQTYLCDHHKAPKNHLHSAYQGEANYGYHLDAGKFAMLLQKHCTTKLNVEHIVSHVECINSDEDGYISSLQTRDHGTIAGDLFIDCSGTHAKLLHQHYGIELIEQHDVLFNDRAVAVQVPYLNPQQEILSYTKATAQDAGWIWDIGLQSRRGLGMVYSSRFANSEDAKQALSQYIAKTQPGTAQNELIFREISFTPGYRRRFWYKNCLAIGMSAGFIEPLEASALVMVELGLNNLLANFPTHRAAMPTLAKRFDEQCHYRWQRIIEFLKLHYVLSKRTSPYWQAHKEANSIPLQLQENLALWQYQSPWLNDFDRAQEVFSAASYQYVLYGMKQLPQFPVLAMPAAIIEHFSANQQQAKRGLQQLPTNRELLNHIQQFGIQPI

SEQ ID NO: 89420 - protein, 507 aa, Ponticaulis sp.
  REGION 1..507: note = tr|A0A2E7F217|A0A2E7F217_9RHOB Tryptophan halogenase; OS = Ponticaulis sp. OX=2020902 GN=CMK08_15260 PE=4 SV=1
MEEAVKHIVIVGGGTAGWITAGTIAARHPDRSENGVQITLIESPDVPTIGVGEGTWPTIRRTLSRMGITEAEFLKTCDASFKQGSRFDRWVTGDASDSYHHPFDLPVSQNGTDVLHAWKTFAPEKSFAEAVCAQGSAPLNNLCPRQKGMPDYLGAMNYAYHLDAVKLAHLLKSHVLGKLGVRYVQDHVTEIVGAPDEDVSAVRCRDAGLIEGDLFVDCTGQASLMLGQHYGVGLHDQSHILFNDSAVVAQLPVAPDSPIVSQTVSTAHEAGWIWDIGLTTRRGIGCVYASRYMDADKAEATLRNYMGNSDVKVRHLNFTSGYRDEFWHRNCVAVGLSAGFIEPLEASAIVMVELSAEMIAENLPVSRAVMLLEADRFNKLFTYRWERIVDFLKLHYVLSKRTEPYWQENRDRETIPERLRNLLEIWKHRPPGPHDFEHASEVFPAPSYLFIMYGMGMEHQMHPTLQPRVQDQLQKEMQNVIRKQRSFASGLPTNRAYLSAYSAEPAL

SEQ ID NO: 89421 - protein, 496 aa, unidentified
  source 1..496: note = Moraxellaceae bacterium
  REGION 1..496: note = tr|A0A4Q6ERM5|A0A4Q6ERM5_9GAMM Tryptophan 7-halogenase OS=Moraxellaceae bacterium OX=1889775; GN = EOO68_03675 PE=4 SV=1
MAQSIQKIVIVGGGTAGWMAAAALSQYLKNKPVSIQLIESDAIGTVGIGEATVPAIHEFNRYLNISELEFIKFTKATFKLGIEFQHWFKEGHSFFHPFADYGVPINGISFYQCWLRMQQTGNSYDLEKFCLATQMAKQHKFAQPDSEVETPLALYNYAYHFDATLYAKFLRNYAEQNGVTRIEGKILHVHQHPTTGFIESVSLESEQKIEGELFIDCSGFSGLLIDKVLKTEYVDWSKWLQCDRAVAVQTINAESPVPYTKSTALAAGWQWKIPLQHRVGNGYVYASSVISDDEAIASLMKNIEGEALTTPRVIKFTAGMRKEFFVKNCVALGLASGFIEPLESTSISLIQTGISKLINFFPDLDFDPAKIAEVNRFNEMEYSRLRDFIILHYKANQRETNDFWRSLAAMDVPDSLQQKLEAFKTNGTLISYELETFQNPSWLSMYNGFNVVPERCSSEALALDPKQLKVAMDKIKSAIEQGVVHAPTHQDFLLQL

SEQ ID NO: 89422 - protein, 504 aa, Sphingomonas sp.
  REGION 1..504: note = tr|A0A0Q4HY45|A0A0Q4HY45_9SPHN Tryptophan halogenase; OS = Sphingomonas sp. Leaf22 OX=1735687 GN=ASE70_16530 PE=4; SV = 1
MPKPATVSTTDALVRQVVIVGGGTAGWMAATALSRALGPVGRHITLIESDAIGTVGVGEATIPPIRAFNAMLDIAEDRFLRETMGSYKLGIEFVDWGRIGQRYFHPFGAAGQDFHGVPFHQLWLRHRARGGDTGLTDYSMCTVTAREGRFGIPPAGDRTPLAHIAHAYHFDATLYAALLRRVAEEQGVVRHEGRVVQVDRDGGTGDVTAVRLDDGRTIAGDLFVDCSGFAGLLIEGALVTGYHDWRHWLPMDRALAMPTTRLDPLPPYTRATAHSAGWQWRIPLQHRTGNGHVYSSGFTTADDAERLLRDHVPGEPCGDVRSLSFTTGMRRKAWSHNVVALGLAAGFVEPLESTSIHLIQHGIQRLIALFPGAAVHPAERDAYNADMARAFEAVRDFVVLHYKATTRDDSDFWRTMRAMTVPDSLAHRIELWRAQGRLIPQAGDIFAVPSWAAVLTGQELWPAAYEPGVDRLNADSVEAALRDMHAAYRRAARSLPMHAAALPR

SEQ ID NO: 89423 - protein, 528 aa, Rheinheimera sp.
  REGION 1..528: note = tr|A0A1B7UMY4|A0A1B7UMY4_9GAMM Tryptophan halogenase; OS = Rheinheimera sp. SA_1 OX=1827365 GN=A5320_10470 PE=4; SV = 1
MDNSIRNIVIVGGGAAGWITAGLLAAEHNADQGVLAAIPKLTISLIESPDVPIIGVGEGTWPSMRLTLQKIGISETEFLLCCEASFKQGSKFINWRGQTTANRTLPDSYLHPFSLPIGQQELNLCPFWLPHQQDVAFADAVCQQFQLTELGLAPKQIATAEYSFINNYGYHLNAGKFSQLLQKHITEKLGVRYIADHVLTIHSQVNGDIKSVATREHGEIAGDLFIDCSGLRSILLGEHLQVPMISQQQVLFNDSALAVQMPYPTADAPIASCTHSTAQSCGWIWDIGLPTRRGIGHVYSSSHISDSAAEQQLRSYLTADFGETAANSAEFRKLSIAPGHRALCWKNNCIAIGMAAGFIEPLEASALALVEWTAKTLSSQLPANRAVMDIVAARLNKAFLQHWQQIIEFLKLHYVLSQRADHDYWHDHRESSSIPASLQDALRLWRYQVPSAMDISHSDVLFPAASYQYVLYGMGFQTQLSGSQKPSLQRKAQQLFNENIQRIQTLKKALDDNRGLLQKIRLHGLPTI

SEQ ID NO: 89424 - protein, 511 aa, Croceicoccus marinus
  REGION 1..511: note = tr|A0A1Z1FB83|A0A1Z1FB83_9SPHN Tryptophan halogenase; OS = Croceicoccus marinus OX=450378 GN=A9D14_07225 PE=4 SV=1
MNGEPIRKIVIVGGGTAGWMAAAATSRIMGAFPGLTIELVESEAIGTVGVGEATIPQIISFNMMLGIDEAEFVRETRATYKLGIEFVDWLRIGHSYVHPFGSYGIDMLGIDFHHFWLRGQRAGLDMPLDEFSISAMAGKAGRFIHPRKDQPNSPLARMAYAFQFDAGRYARFLRNRAEAQGVIRTEGRITEVLQDGETGFVTGVRLEDGKIVEGDLFLDCSGFRSLLLGQTLGVGFTDWSKWLPCDRAIAVPCSLAGDNEPLTRSTAQPAGWQWRIPLQHRIGNGHVYSSAHMEDAEAEDILHAGLDGTPLAEPNRIRFTAGHRDRIWEKNVIALGLSGGFLEPLESTAIHLVQSGIARLMILFPSRAFNPKEIERFNRDTFADYLDIRDFLVLHYKATERDDSEFWRYCRNLPPPDGLADKLEMFRSSGRIIREHNELFTEASWLAVMVGQGVEPSGYHPAAALLDEDETRRRLSHIRQTVAHAVSQMPTQDEYLAGIGGAIAGTDRMRA

SEQ ID NO: 89425 - protein, 492 aa, Streptomyces griseus; identical to SEQ ID NO: 87587
  REGION 1..492: note = tr|A0A2P5JGT5|A0A2P5JGT5_STRGR Tryptophan halogenase; OS = Streptomyces griseus OX=1911 GN=BF14_033870 PE=4 SV=1

SEQ ID NO: 89426 - protein, 496 aa, Sphingomonas sp.
  REGION 1..496: note = tr|A0A0Q4I8N6|A0A0Q4I8N6_9SPHN Tryptophan halogenase; OS = Sphingomonas sp. Leaf22 OX=1735687 GN=ASE70_12760 PE=4; SV = 1
MTDPIRTVVIIGGGTAGWMTAAAAGRYLDDGRRRIKLVESDAIGTVGVGEATIPSILNFNKLLGIDEVEFLRETRGSFKLGIEFAGWHTADSRYFHPFGNFGRDIEGVNFHQLWAKLKGQDGIGPIGDYSPATVAARANAFGPPHPDPRSPLSGIAHAYHIDATLYARFLRRRAEADGVARIEGRIVAVEHSANGHVAAVRLDDGRRVEGDLFIDCSGFRSLLLGEAMGVGFEDWSHWLPCDRAIAVPTERTEPVLPYTRATAHAAGWQWRIPLQHRTGNGVVYASRYMDDDAAEALLLSRLDAAPTATPRRLSFTAGQRDAMWAGNVVAIGLSGGFLEPLESTSIHLIQQGISKLFALFPDRGFSPVERDEYNRQMADNYRSIRDFIILHYHATVRDDSPFWNHVGTMDVPDSLTRKIELFRQKGRIFRYEDELFATPSWVAVLLGQGVEPVGYDPVADALDEERLLPAIRQMRSATAAAVATLPQHGAVLTRLK

SEQ ID NO: 89427 - protein, 498 aa, Croceicoccus marinus
  REGION 1..498: note = tr|A0A1Z1FGZ8|A0A1Z1FGZ8_9SPHN Tryptophan halogenase; OS = Croceicoccus marinus OX=450378 GN=A9D14_16930 PE=4 SV=1
MESQGIRRVVIAGGGTAGWMAAAVMSKTFGAQDLSITLVESPSIGTVGVGEATIPPILTLNRLLGLDEDELVRRTGATFKLGIEFRDWGGLGERYIHPFGHYGANLRGVSFHQHWLLHGDAPLGDYSMTVAAAREGRFTRPSADPKHIHSRLSYALHFDAALYAEFLREQAAARGVRHVQGRIEHVELDDRGHVAALALDQDRRIEGDLFIDCTGFRGLLIGEALGTAYDDWSRWLPMDRALAVPSQAVTPRTPYTRSTAGKAGWRWRIPLQHRTGNGHVYCSAHLSDDEAAAQLLDGLDSPASGDPRPLRFTTGRRQKMWDRNVVALGLASGFLEPLESTSIHLIQQGVVTLMSLFPDRGFAQADIDEYNRTMADEFEKVRDFIILHYHQTRRDDSDFWNDMRTMEVPGSLRRRMDLFASHGRVFIKPDELFTETSWVTVMLGQGLRPRNADPVAAAMPKGEIAPQLTRMRQLVQNGVEAMPTHDQFIAAHCAAEAA

SEQ ID NO: 89428 - protein, 505 aa, Xanthomonas sp.; identical to SEQ ID NO: 83174
  REGION 1..505: note = tr|A0A3T0G0S3|A0A3T0G0S3_9XANT Tryptophan halogenase; OS = Xanthomonas sp. ISO98C4 OX=1680158 GN=AC801_15025 PE=4; SV = 1

SEQ ID NO: 89429 - protein, 133 aa, Caulobacter sp.
  REGION 1..133: note = tr|A0A257WXD8|A0A257WXD8_9CAUL Tryptophan halogenase (Fragment) OS=Caulobacter sp. 12-67-6 OX=1970329; GN = B7Z44_14660 PE=4 SV=1
MADGGLKSLTIVGGGTAGWMSAAMLSRALGSTVAITVVESDEIGTVGVGEATIPAIKLLNTFLGLDENDFLATTNGTIKLGIEFVDWHTVGQSYLHAFGPVGRPLGLAAFHHYWNRRRLQGHDESLWDYSLNA

SEQ ID NO: 89430 - protein, 497 aa, unidentified
  source 1..497: note = Nitrospirillum amazonense
  REGION 1..497: note = tr|A0A248K3Z3|A0A248K3Z3_9PROT Tryptophan halogenase; OS = Nitrospirillum amazonense CBAmc OX=1441467; GN = Y958_30445 PE=4 SV=1
MRRIVIVGGGTAGWMAAASLTRFLRNLKCDIVLVESEQIGTVGVGEATIPPIMNFIRVLGIDEDDLIRQTNATFKLGIRFQDWTRLGHSYFHPFGHTGFEMEGIGFPAYWMRQRLAGAAAPLEEYSLQAQAAAHNRFMRPVKAPGSPLEGITYALHFDAALFARYLRTYSEARGVTRVEGKVVKVDLRPEDGFIDALRLEDGRRVEGDFFIDCSGFRGLLIEEALQAGYENWQSYLPCDSAVAVPSERAGAPPSYTLAAAREAGWQWRIPLQHREGNGVVYARDFLDDEAARETLLANLAGKPLADPRILRFVTGRRRETWKRNCLSLGLASGFLEPLESTSIHMVHRGLALFIQMLPDRRCEPADVARYNRMVAFEYERIRDFLVLHYATNERRDTDFWRHCAGIEWPDSLKSKIELFQSHGRIQREDTELFPEQSWLYVFTGQGLVPRRYDPLTDLLDPEKMRGALANIHDVIGWVVQTMPHHQAFIDRYCAAQS

SEQ ID NO: 89431 - protein, 491 aa, Nonomuraea sp.
  REGION 1..491: note = tr|A0A429AFX3|A0A429AFX3_9ACTN Tryptophan halogenase; OS = Nonomuraea sp. WAC 01424 OX=2203200 GN=DMB42_42905 PE=4; SV = 1
MSVEEFDVVVAGGGPSGSTVAALVAMQGHRVLLVEKEVFPRYQIGESLLPSTVHGVCRMLGVADELAAAGFPVKRGGTFRWGARPEPWTFSFAVSPRMTGPTSFAYQVERARFDEILLNNAKRKGVEVREGCSVTGVVEEGERVTGLRYTDPDGGAHEVRARFVIDASGNKSRLYSNVGGSRNYSEFFRNVALFGYFENGKRLPEPYSGNILSVAFDSGWFWYIPLSDTLTSVGAVVRRDMAEKIQGDREKAYDALIAECPLISEYLSQARRVTTGRYGELRVRKDYSYHQTTFWRPGMVLVGDAACFVDPVFSSGVHLATYSGLLAARSLNSVLAGDLDEKTALTEFEARYRREYGVFYEFLVSFYEMNVNEESYFWHAKKVTNNEHTELESFVELIGGVSSGEAALTASGRIAERSAEFAAAVDRMAGSDDGDMVPLFKSQVVKQVMLEGGQVQLRAALGEGAEPEEPLFPGGLVTSPDGMKWLPYRPA

SEQ ID NO: 89432 - protein, 521 aa, Croceicoccus marinus
  REGION 1..521: note = tr|A0A1Z1FB33|A0A1Z1FB33_9SPHN Tryptophan halogenase; OS = Croceicoccus marinus OX=450378 GN=A9D14_07220 PE=4 SV=1
MSARKVIVTNNRIDRIVVVGGGTAGWMAAAAFSRYFDNGRRKIIVVESDAIGTVGVGEATIPAIKGFNAMLDIPENEFLRETRGTFKLGIEFVNWGRQGDRYIHPFGAFGTDLHGIPFHQLWLREHARGGGGDITDFSMSAAAAALGRFGRPAVGARPPVSEINYAFHFDATLYAAYLRRLAERQGAIRQEGRIVKVHRDGESGDVTSVELEGGRLVEGDLFLDCSGFRGLLIEDALETGYEDWSHWLPMDRAIAMPTANRSSPDPFTRATAHAAGWQWRIPLQHRTGNGHVFCSAFMQEDEAERILRDTVEGEELADPRLIRFTTGMRRKAWSHNVVSLGLSSGFIEPLESTSIHLVQNGIARLFGLFPEKDISPVERDEYNRGMREIYEDVRDFIILHYKATQRDDTEFWRSVRDMDIPASLARKMELWRLHGRVFRENAELFTLPSWVAVMLGQNVWPERYDPIADTLDENRVAQAMEKMRAGYRQTAQQLPPQEQFLRSANAWAVSDEMPLSMGVAR

SEQ ID NO: 89433 - protein, 496 aa, Ponticaulis sp.
  REGION 1..496: note = tr|A0A2D7XR37|A0A2D7XR37_9RHOB Tryptophan halogenase; OS = Ponticaulis sp. OX=2020902 GN=CMK09_01575 PE=4 SV=1
MLKNILIVGGGSAGWITANLLNHFIQRFELPCQITLVESPDIPTIGVGEATVPSIRRTMSLIGIAEGDLMASSEATFKCLIRFENWNDGQSYDHPFDRRHRTQTDPLAEAWTAQNGKDFDRTFSVLTNLADHNIAPKSPQTPQYLANFPYAYHLDAIKMALRLAEFGRSKGILHKRANITEANVSPEGLIESVETDQGETLSADLFVDCTGFRSVLMGGALGVGVKDYSKYLLCDRAVTMRVPYEVHKPERIVTYTRSIARDHGWQWDINLHTRRGLGYVYSSQFLSDDEAEASLRKFEGPHTDGLSAGRLKFASIQRKQAWKGNCVAIGLSAGFLEPLESSGLYMIEFAAQMLGNTLIDYINAPAAAQRNFNRNMDDLYEEVMGFINLHYVTSTRRDTEFWRAATSQEAIWDGLQDKLEIWRNRSPIDYDFHGSQRLFALDSFEFVLHGMKWVNPPPRGNYALPDHSELLAQCRQKLPTHEQFLELLIRSASQAR

SEQ ID NO: 89434 - protein, 274 aa, unidentified
  source 1..274: note = Moraxellaceae bacterium
  REGION 1..274: note = tr|A0A4Q6DWE1|A0A4Q6DWE1_9GAMM Tryptophan 7-halogenase (Fragment) OS=Moraxellaceae bacterium; OX = 1889775 GN=EOO68_18190 PE=4 SV=1
MNPIKKIVIVGGGTSGWIAASMLSYHLKSDLCEIELVESDDLGTIGIGESTIPPVVRLIQNLGIDEQQFIQNTQACFKLGIKFIDWRQKNESYFHPFGVIGKRIGSHDFYQCWLKATMQGDTSPLQDFSPCSVMAEQEKFFWPTQLQNTPIGGASYAVHLDAKLVVEYLHSYAYERGVKRTEGTVEQVTKTENGNIEKLILSDGREIQGDFFIDCTGFKALLIEKTLGVGFEDWSKYLPCDRAVVVKTSAQEKRPPYTTATARKAGWGWKIPLR

SEQ ID NO: 89435 - protein, 486 aa, Sphingomonas sp.
  REGION 1..486: note = tr|A0A0Q4IDD7|A0A0Q4IDD7_9SPHN Tryptophan halogenase; OS = Sphingomonas sp. Leaf22 OX=1735687 GN=ASE70_00400 PE=4; SV = 1
MTAAALANRLQGLGVRVQLIESDEIGTVGVGEATLPHIRAFNTTLGIAESDLMRATEATYKLGIEFCDWGRIGDRYIHPFGNYGPTDDGIPFYHQWLRLRELGDATRLDEYSFPVIAAEHNRFRHPGSDVRQVESSFGYAYQFDASLYARFLRRYAETRGVERIEGKVVDFALYGENGHVRNVTLADGRVLDADLFVDCSGFRGLLIEGALQSGYDDWSNWLPCNRAVAVPTYSRGPLGPYTRATARTAGWQWRIPLQHRVGNGHVYCSSFISDDDAQDQLIANLDAPMQAEPRRLRFTTGRRRDFWKRNVVAIGLASGFLEPLESTSIHLIQDGITELLALFPTRAFDAGDIAEYNRRMALHFERVRDFLLLHYVATEREDSEMWRHFRALTLPDSLQAKIDAWLTRGYVVPYQFGLFLPPSWVAVMLGQRLMPKGYDPRVLAQDDATIAARAAALRRAVAQAVQATPDHADYIRRSPAAAGLAA

SEQ ID NO: 89436 - protein, 497 aa, Ponticaulis sp.
  REGION 1..497: note = tr|A0A2E0U4W7|A0A2E0U4W7_9RHOB Tryptophan halogenase; OS = Ponticaulis sp. OX=2020902 GN=CMK06_03645 PE=4 SV=1
MLSSILIVGGGSAGWITANLLNAFVKRLGLPTRISLLESPDIPTIGVGEATVPTIRRTMAQIGISEQDLMVSAEATFKSLIRFVDWNLGESYDHPFDRRLRPQTDAAVRQWSADNGKAFDETFSVLTKISNENFAPKSPQTPQYIANFPYAYHLDAIKMAVRLAEFGRENGIVHHLANVRHVHISAGGQIEDIETDTEETLNAELYVDCTGFRSVLLGGALNVPVKDYGKYLLCDRAVTMRVPYDLHTPERLLPYTKATARDFGWQWDINLQTRRGLGYVYSSKFLSDDDAEAALRRYEGPHTKDLTAARIRFASTKREASWKGNCVAIGLSDGFLEPLESSGLYMIEFAAQMLGTMLTDYQAAPDATRRNFNRNMSDLYEEVLEFINLHYVTSTRCDTPFWRAATSEEAVWDGLKDKLEVWRQRSPSEMDFHGSLRLFALDSFEFVLHGMKYVRSVERGNATLPDHNDVVAQCRQKLPSHETFIKLLEAAANRHSN

SEQ ID NO: 89437 - protein, 111 aa, unidentified
  source 1..111: note = Moraxellaceae bacterium
  REGION 1..111: note = tr|A0A4Q6DNN5|A0A4Q6DNN5_9GAMM Tryptophan halogenase (Fragment) OS=Moraxellaceae bacterium OX=1889775; GN = EOO68_23580 PE=4 SV=1
CMTQREDTDFWRWCKNLELPESLQERIALFKGHGLVREGTDELFKASSWQSVFEGMGIRPNKYCPRVDNMDYQEISDTLKVARQAIQSMVKNLPTHDDFLRQHCDDASEKS

SEQ ID NO: 89438 - protein, 505 aa, Caulobacter sp.; identical to SEQ ID NO: 83752
  REGION 1..505: note = tr|A0A257X338|A0A257X338_9CAUL Tryptophan halogenase; OS = Caulobacter sp. 12-67-6 OX=1970329 GN=B7Z44_07395 PE=4; SV = 1

SEQ ID NO: 89439 - protein, 499 aa, Ponticaulis sp.
  REGION 1..499: note = tr|A0A2E0U545|A0A2E0U545_9RHOB Tryptophan halogenase; OS = Ponticaulis sp. OX=2020902 GN=CMK06_04195 PE=4 SV=1
  VARIANT 30: note = Xaa can be any naturally occurring amino acid
  VARIANT 165: note = Xaa can be any naturally occurring amino acid
MQKKIRKYVIAGGGTAGWMAAAMLSKTMGXEISITLVESDALGTIGVGEATIPPILRFNQLLGINEAEFMRETMATFKLGIQFENWKTGDDAYLHAFGNLGKSHWSCGFHNFWLAGKQRGMGGDFGEYCLETQAARLSRFAQLPDNGLHYAYHLDATRYAAYLRXLAEENGVVRQEGKISDVVLDAQTGNIASLKLETGDNVEGDFFLDCTGFRALLMGRALHVGYDDWSHYLPCDSAIAVQTKSVGPPVPYTRAIAHDAGWQWRIPLQHRTGNGLVYCERHLDKDMAVERLLSNIEGETLTDPLFIRFQTGSRRKQWHKNCVALGLASGFMEPLESTSIHLIQKSVMRLIRLLPSSHLIDADIREFNDQTLEDMLAIRDFLILHYKLTERRDSDFWRYCADMEIPDTLQQKIDLFRESGRVFRKNDELFAENSWIQVMLGQGLIPKTYHPLADKMTDEELTYFLDQIKADFARHAARLPRHEDFVRQYCGQAEAREMA

SEQ ID NO: 89440 - protein, 292 aa, unidentified
  source 1..292: note = Moraxellaceae bacterium
  REGION 1..292: note = tr|A0A4Q6CT55|A0A4Q6CT55_9GAMM Tryptophan 7-halogenase (Fragment) OS=Moraxellaceae bacterium; OX = 1889775 GN=EOO68_36890 PE=4 SV=1
MNAENNIKRIVIVGGGTSGWMVAAALAKLFVGKDCLITLVESEEIGTVGVGEATIPAILHFNKIIGLDEDDFLKFTQGTFKLGIEFVNWGKCGDSYYHPFGGYGTRIDRLAFQHYWQRLFNKGKVPDLPEFSFNVMASKANRFTRPINLERSPLQEVAYAFHFDAGLYAKYLRGIAESLGVIRVNNIVDSVKLRETDGFIESVLLKNGELVEGELFIDCSGFRGLLIEGALKTGYEDWSHYLPCNKAVTVPSQRLNPLPPYTRATALEAGWQWRIPLQHRTGNGYVFCDKYI

SEQ ID NO: 89441 - protein, 500 aa, Sphingomonas sp.
  REGION 1..500: note = tr|A0A1H8GNR6|A0A1H8GNR6_9SPHN Tryptophan halogenase; OS = Sphingomonas sp. S6-262 OX=1166340 GN=SAMN05192583_2832; PE = 4 SV=1
MTGPAPYRIVIAGGGTAGWMAAAAIARTMGKAVDLTLVESDAIGTVGVGESTIPPLATYNRLLGINEADFMRATRATFKLGIMFDGWKRAGDSYFHSFGLTGKDHWSAGFQHFWLEGLRRGHTQPYDAYCLELLAAADNRFAHLPDERMNYAYQLDSTLYGRFLRGLAEADGARRVEGRIQQVALDGESGNIAALVLDSGVRIEGDLFLDCTGFRALLIEQALHAGYDDWTHYLPCDSAIAVQTESAEPPPPFTRAMAHDAGWQWRIPLQHRTGNGIVYCSRYLDHDAAQERLLGNVQGPVLTEPNRLRFVTGTRRKQWHRNCIAIGLSGGFMEPLESTSIHLIQRAILRLIRMMPAGPVSERDIAEFNDQQNADMLQIRDFLILHYKVTERRDSPFWRQCAAMEIPDTLAQKIELFRETGRVFRRNEELFAENSWVQVMMGQGIVPQERHPIAGKLRDDELAKLLETLRETTRRTVAGLPDHGAYVARYCGVLPQGQAR

SEQ ID NO: 89442 - protein, 519 aa, unidentified
  source 1..519: note = Nitrospirillum amazonense
  REGION 1..519: note = tr|A0A248JX12|A0A248JX12_9PROT Tryptophan halogenase; OS = Nitrospirillum amazonense CBAmc OX=1441467; GN = Y958_19595 PE=4 SV=1
MTVERTILIVGGGTAGWLAAAYLAKYLGVREGGPIGITLLEAPDIGIVGVGEGTFPTIRGTLRFLGLNEAQFMRDTSATFKQGIRFARWVDGGEDDSFFHPFEAPFPTDGAGLVPYWLLQDGDRRPPFAQAMTFQQQVTDARRAPKRGPEGDFEAPLNYAYHFDAAKAAQALAARARELGVRHLRGTVTDVALAADGAIAHLVTREYGAIAADFYVDCSGFRAELIGRALGVPQKSVKSILFTDRALSCKVPYEAADTPLESCTVATAHAAGWTWEIGLEGARGVGCVYSSDHMSDDEAEEVLRAYVAPHLDSGVEPPPLRKTAFDAGYRETPWVRNCVAIGLAGGFLEPLESTSVVLIEVAVGMLAELFPHDGRWDAPAARFNELMTRRFENIVNFLKLHYCLSKREEPFWRDNRDPATIPPALRDLLAQWRTRPPSRFDFALDLEAFAFFNYQYILYGMGFETDLSAARAAFPQAEAAQKTFARIRAYGDHATKDLPAHRALIRRMSQISALGKVGT

SEQ ID NO: 89443 - protein, 499 aa, Stakelama pacifica
  REGION 1..499: note = tr|A0A4R6FWX9|A0A4R6FWX9_9SPHN Tryptophan halogenase; OS = Stakelama pacifica OX=517720 GN=EV664_102251 PE=4 SV=1
MEGSIVVPIRVVILGGGTAGWMTAAALSILLSRQMAQVTLVESEEVGIIGVGEATLPHIRAFNERLGIDEADFMRATGATFKLGIEFRDWARIGDSYIHPFGVFGHDVEGVGFHHYLNRAGRIATLFDYSVPIVAAREARFAPPAADPRSLASTYGYAYQFDATRYGPYLRNRAEAAGTRRIEGRVEAVERSEHGDIAALRLSDGRRVEGDLFVDCSGFRSLLLGQACDEPFEDWSRWLPCDRAVAVPCEGKGPLLPYTSAVAMSAGWRWRIPLQHRTGNGYVYSSAHIGDDAAREQLLSELEGPPLAEPRLLRFKAGRRRRNWVRNVIGIGLSGGFLEPLESTSIYLIQIAITRLIELFPQRPAAAIDRDAFNRAIDLEYDRIRDFLILHYHATQRDDSPFWNHVRTMEVPESLSEKMALFRKRGRVARYREGLFLEPSWLAVYFGQRIVPTGYDQRADGPDDGALTRALDQLRQEVAAAAAALPDQSVYLERVGALA

SEQ ID NO: 89444 - protein, 465 aa, Stakelama pacifica
  REGION 1..465: note = tr|A0A4R6FX29|A0A4R6FX29_9SPHN Tryptophan halogenase; OS = Stakelama pacifica OX=517720 GN=EV664_102252 PE=4 SV=1
MTSRAIRTIAVVGNGIAGWSAAAALKKRVPGISVALVPVADLKPGLADLCASAAPSIGDFHSDIGLSERDIVRRTGAAFRLGSRYQDWHGPGSGFFHAYGPAGFAQGQLPFAALWLRAGSPRPYQDYAPGAVLAEQGRFLPGGTDLPGDYAHGLMLDLHVYPRFLAAYARHLDVLVSEGTLAGMDVSDGRVTGLRLSDGSTLRADMYVDASNVAASLMRALADPDWQDWRQWLPADTLERSRTAPDPGLPPFDRVRAISNGWEATISLPACTETLRVTAKPGDAGASAVRFASGRRAQAWSGNVVAIGDAYAVIEPLEGAPLHLLHSQIDRLVGSLPDRDFDAIELAQYNRETGEEADRVRDFLIAHYVLSGRCDAAPPLLAETLALFAHRGRLPMRDGESFDKHSWLALLFGHGTVPAHADPLAVALDTGEAQRALADHRLHLEQGAAKAPAHSAYLKSLEASA

SEQ ID NO: 89445 - protein, 511 aa, Sphingomonas sanxanigenens
  REGION 1..511: note = tr|W0A9T2|W0A9T2_9SPHN Tryptophan halogenase; OS = Sphingomonas sanxanigenens DSM 19645 = NX02 OX=1123269; GN = NX02_07560 PE=4 SV=1
MVNPVRNIVIVGGGTAGWLTAGVIAARHQGRIGAGGFTVTLVESPNIPIIGVGEGTWPTLRTTLSKIGVSETDFFRECDAAFKQGARFARWTTGAVDDGYYHPLMLPQGFGQVNLAPHWLAGDDGKSFCDAVCPQGHICDDGLAPKTIATPEFDAIANYAYHLDAGKFADFLRRHCCDVLGVRHVLADVQRVVQTESGDIAHLVTEQAGEIAGDLFVDCTGFKALLIGQTMGVRFKPLSDTLFCDTALAVQVPHADAHAPIASHTISTAQSAGWIWDIGLPTRRGTGYVFSSAHISDEDAERELRAYLGPIADGLDVRKIAINAGHRETFWRGNCVAVGLAAGFLEPLEASAIVLIELSAKLIAEQMPACREVMDVIASRFNATTHYRWGRIIDFLKLHYALTQRQDSDFWRDNQRPETMPDRLRELMLLWRHHSPWFHDEFDRVEEVFPPASYQYVLYGMRFRTEVDPAALAQDARAATRAMQENAAQTERLRGRLPRHRDLIEKICVGR

SEQ ID NO: 89446 - protein, 511 aa, unidentified
  source 1..511: note = Nitrospirillum amazonense
  REGION 1..511: note = tr|A0A248K3F8|A0A248K3F8_9PROT Tryptophan halogenase; OS = Nitrospirillum amazonense CBAmc OX=1441467; GN = Y958_30430 PE=4 SV=1
MDRPIQHIVIVGGGTAGWLTAGVIAARHKARMASGFKVTLVESPNVAIIGVGEGTWPTMRTTLEKMGVSETEFFRHCDTAFKQGGKFVGWTTGAPDDAYYHPLMLPHGWSQVNLVPHWLQDARGRTFSAAVCPQEAICEEGLAPKTIATPEYRGLANYAYHLDAGKFASFMQKHCTQKLGVHHVLADVTQVKQDESGDIASLVTEQAGEITGDMFVDCTGFRALLIEKTLGVGFKDCRDVLFCDTALAIQVPHESEDAPMASQTIATAQSSGWIWDIALPTRRGLGYVYSSDHIDEEAARVELARYAGTQAEARKIPIRSGHREMFWKNNCVAVGLAAGFLEPLEASAIMLIELSAKIIADQLPARRSVMDVVARRFNEVTHYRWGRIIDFLKLHYVLTQRTDTAFWRDNVDPASTPERLQDLLRLWKYRAPWFLDEFDRLEEVFPAASYQYVLYGMGFRTEVDPAENSADALLASRIMAENAAMAQKMRANLPKNRDLVRKIRDHGMQSI

SEQ ID NO: 89447 - protein, 487 aa, Caulobacter sp.; identical to SEQ ID NO: 88085
  REGION 1..487: note = tr|A0A257X9P3|A0A257X9P3_9CAUL Tryptophan halogenase; OS = Caulobacter sp. 12-67-6 OX=1970329 GN=B7Z44_01870 PE=4; SV = 1

SEQ ID NO: 89448 - protein, 492 aa, Sphingomonas sp.
  REGION 1..492: note = tr|A0A1H8AJQ5|A0A1H8AJQ5_9SPHN Tryptophan halogenase; OS = Sphingomonas sp. S6-262 OX=1166340 GN=SAMN05192583_0947; PE = 4 SV=1
MSGPKRRVVVAGGGTAGWVAATALVKQLGPLVDVTLVESDAIGTVGVGESTIPTTRSFHDLIGVDESAFVRATGATFKLGISFENWLREGVRYFHPFGSIGRAMPLADFQHFWLEARAQGHGGNFIDYSAEALAAAERRFSADADAGLAYAYHLDATAYAAFLRGLAEAAGARRVEGRIAEVDQDGDTGDIRALVLDDGRRIEGDLFIDCTGFRALLIGGALKTGYEDWSGWLPTDSALAVQTEVVEPPVPFTRATAHRAGWRWRIPLQRRVGNGLVYASAEMAEEEARALLLGALDGAPLFDPRLIRFTTGMRRRMWNRNCVSLGLASGFIEPLESTSIHLVMIAVTHLLQSFPFGTETETLADRYNTRARAEWEDVRDFIILHYTLNDRPEPFWRRAATMDLPDSLTRRIRLFREHGMAHQDQDQLFRTDSWVQVMLGQGVMPTGHHRMPAAIPPGELRTALESLSAGIRRRVSAVPPHHQFLSRYRQAG

SEQ ID NO: 89449 - protein, 515 aa, unidentified
  source 1..515: note = Nitrospirillum amazonense
  REGION 1..515: note = tr|A0A248K1A7|A0A248K1A7_9PROT Tryptophan halogenase; OS = Nitrospirillum amazonense CBAmc OX=1441467; GN = Y958_27480 PE=4 SV=1
MTFAPLRDIVIVGGGTAGWMAAALFSHILGPGGHRIHLVESEEIGTVGVGEATIPPIAIFNRALGLDENDFLRQTQGTIKLAIEFVDWLRPGHRYLHSFGAFSRSLGLGHFQDFWLRAHRLGMTDDWEPYILNSVAARRGRFIQPDPRRQSPLEPLAHAFHIDAGLYARYLRRFAEQRGVRRTEGKIVRTVLRAHDGFVDAVEMADGTRIAGDLFIDCSGFRGLLIEQALNTGFEDWTHWLPCDRAWAVPSAHDGSAAALTPYTRSTARPAGWQWRIPLQHRTGNGYVYSSRHVSDDEAAATLMANLDGEALAEPRQLRFTAGRRRRFWNRNVVAVGLASGFMEPLESTSIHLVQSAISRLITLLPNHSLANGGVDPAVADEFNRASAIEYERIRDFIILHYAATERADSPFWRACRDRPVPEELARRMRVFRALGRVARDHDELFSEVSWLHVFLGQGVWPRDHHPLADQLSEEDLHCFLDDIKAAVAREVDAMPTHADFIAHHCKADSLTRTA

SEQ ID NO: 89450 - protein, 505 aa, Sphingomonas sp.
  REGION 1..505: note = tr|A0A1H8CTS0|A0A1H8CTS0_9SPHN Tryptophan halogenase; OS = Sphingomonas sp. S6-262 OX=1166340 GN=SAMN05192583_1753; PE = 4 SV=1
MAPPDRIVILGGGTAGWMAACLMARAWPASAITVVEAPDIPIVGVGEGSTPQLRAFFDRLGIPESTWMAACHATYKVGIAFRGWSDRPGHQSYFHPFAGPADLHTEAAFHHSTLARRLGHDVEAHPDRFFLSTRLASQRLAPLAPAHFPFGPGYGYHFDAHLVGAFLAEWATARGVTHLRRRVEDVLITEGGDIASVLVEDGEAILGDLFVDASGFGGVLIQQALGESFLPFADNLFCDRAVVVPTPADPAGPEVHTTATALNHGWAWRIPLTTRTGNGYVYASRYVSPDGAAAELRAHLLLPDDAPVRHLSMKVGRVDRSWVGNCLAVGLAQGFIEPLEATALHMVQATVEGFIDALEAHGFTTAGRDDFNARIARRYEGIRDYIVAHYRMNQRADTDFWRDNAGHDRLSDTLKAMMTAWFTGRDLPAEVQRLDIGGYYAPLSWGCLFAGYGVFPEPARLHAAPSPVDLPAIDRLLDRCLLNFRPQTAVLPQRAGTPRTSREIA

SEQ ID NO: 89451 - protein, 405 aa, Nonomuraea sp.
  REGION 1..405: note = tr|A0A429AZK6|A0A429AZK6_9ACTN Tryptophan halogenase; OS = Nonomuraea sp. WAC 01424 OX=2203200 GN=DMB42_27750 PE=4; SV = 1
MINTHDEFDVVVIGGGPGGSGTAGLLAQRGHRVLVLEREKFPRYHIGESLITGSMPTLEELGLKDRLDQMGFVKKYGGTLLWGKNQGTWDFRFAEASNYEYAYQVRRADFDSLLLARARELGATVFEEATVKDLEFEGERVTGVTYTVKGDAEPRTARCRLLIDATGQQHLLARRFDLIEYHDDLRNIAVWSYWQGCKRYGGTRFGDTVTENRPAGWFWFIPLHDGTVSVGYVTPIDEYKKSGKSLEDLYASELAAAEEVRALTEGATRVSGFRSIRDWSYTCTKFHGPGWALVGDAAAFIDPLLSTGVGLALRGAHGLAGAADEILNDPASEEAVLARYEKDYREFLDSLLDFVRFFYDRTKHKEEYWDRAQKTLDPTKLRPRKIDFATMLSGVSGIHAIFHDD

SEQ ID NO: 89452 - protein, 512 aa, Croceicoccus marinus
  REGION 1..512: note = tr|A0A1Z1FAM5|A0A1Z1FAM5_9SPHN Tryptophan halogenase; OS = Croceicoccus marinus OX=450378 GN=A9D14_05580 PE=4 SV=1
MDKVDSIVIVGGGTAGWLTAGVIAARHQGRRPHGFSVTLVESPNVPIIGVGEGTWPTLRSTLRKIGVSETDFFRECDAAFKQGARFNRWTTGEADEGYYHPLMLPQGFARLNLVPHWLENGDESFCDAVTPQGRICDQGLAPKTIATPEYEGLANYAYHLDAGKFSKFLTKHCVEKLGVRHVLADVSEVVQAPNGDVACVKTADGQAIDGDLFIDCTGFKALLIEEAMKVPFRDCNDVLFCDTALAVQVPYADPSDPVASHTISTAQSAGWIWDIGLPTRRGVGHVFSSSHVDADHAERELRDYIGPAARDLTVRRIPIRSGHRETFWKGNVVAVGLAAGFLEPLEASAIVLIELSAKMIAEQLPPNRDVMDVIARRFNDTTAYRWGRIIDFLKLHYTLTKRTDTDFWRDNTRAETIPDRLQGLMELWKYQTPWLHDEFDRAEEVFPAASYQYVLYGMGYRTDVPPGDVAAERELAQRVRRENDALTARLLAGLPGHRDLLSKISQHAMMPV

SEQ ID NO: 89453 - protein, 503 aa, Sphingomonas sanxanigenens
  REGION 1..503: note = tr|W0ADV6|W0ADV6_9SPHN Tryptophan halogenase; OS = Sphingomonas sanxanigenens DSM 19645 = NX02 OX=1123269; GN = NX02_18010 PE=4 SV=1
MQQDPTSDRVVKRVVVAGGGTAGWVTATALVRHLGPLLDVTLVESDEISTVGVGESTVPTFKGFHDLLRIKEDVFMSAAQATFKLGIEFENWGRIGDRYIHPFGIIGRRASWMAPFHHFWLHARARGFGGDLGEYCLEHMAGEANRIALDAAPNLGYAYHVDATRYARFLRGLAEPAGVRRVEGKIRAVELHPESGFVDAIVLDSGERIEADLFIDCTGFRSLILGEALGVPFEDWGRWITTNSAVAVQSRSVRPPQPYTSAIAHEAGWRWRIPLQHREGNGLVFCNEFMSDDEARAKLLAEIAGEPLVEPWLLRFKTGMRVDSWSRNCIALGLAGGFIEPLESTSIHLMMAGVTRLIEDFPFNGCSPGLVRRFNEKSRLEFECIRDFIILHYHVTERDDSAFWRRARTMEIPDSLQARLALWREDARAYQLDHELFRIESWSSVLLGQRFAPRGYHRLAEMMPEDALRDFLDRTRGEIAGIVATMPTHPEFLARYCPAPPPE

SEQ ID NO: 89454 - protein, 500 aa, Sphingomonas sp.
  REGION 1..500: note = tr|A0A0Q4HXI7|A0A0Q4HXI7_9SPHN Tryptophan halogenase; OS = Sphingomonas sp. Leaf22 OX=1735687 GN=ASE70_15985 PE=4; SV = 1
MPNEPVRSIVIVGGGTAGWMAATYLARRLTHLNLSIIVVDSAAIGTVGVGEATVPAIRDFLSAIELGEPDVLRETGGTIKYGIRFDGWGGEGHRFFHPFGLYGVGAQGVAFHHYWLKLNAADRAGPLADYCLATQLARNGLFLPPADQPANDLGVFNFALHFDAAAFAAMLRRLALANRVAHVDGRIGAVATDPARGHVTGVTLDDGRTIEGDLWIDASGFRSLLLGDALGVPYIDWRHWLPCDRAIAIPCKAAAGDPTPYTVATARKAGWQWRIPLRHRIGNGSVYCSAFQSDGDAENALLATLEGAPLADPNRLRFTTGHRERFWSGNVIGLGLASGFLEPLESTSISLIQSGLERLVALFPDRDCDPRLAATYNRQSVLEFERLRDFLFLHYLANGRNEPFWQAIRAVEPPEPLQIKLDAWRSGGEFVRNEWDTFQDPSWLSLYAGFGDLPARHSPLADAIDEDTLADSFARMREAIGKTLAHAEPHGRFLARVTGA

SEQ ID NO: 89455 - protein, 84 aa, Pseudomonas sp.
  REGION 1..84: note = tr|A0A2N7XT07|A0A2N7XT07_9PSED Tryptophan halogenase (Fragment) OS=Pseudomonas sp. GP01-A4 OX=2070571; GN = C1X83_37465 PE=4 SV=1
FLRQFSEARGVTRVEGKIGQVHQHPETGFIEALELADGRRIEGDLFIDCTGFRGLLIEQTLQAGYEDWSHWLPTNRALAVQTKA

SEQ ID NO: 89456 - protein, 506 aa, Colwellia sp.
  REGION 1..506: note = tr|A0A1V0KMV1|A0A1V0KMV1_9GAMM Tryptophan halogenase; OS = Colwellia sp. PAMC 21821 OX=1816219 GN=A3Q33_00830 PE=4; SV = 1
MSKTVKNIIIIGGGTAGWLSAAIIAAHHKDAKTTELKIKLVESSDIPTIGVGEGTWPTMKNTLHKIGLKESDVFRKCYATFKQGGKFVEWVHGNGDFYYHPFTVPLGYGQIDLAPYVSNVENFAQESNFQYDICEAGLAPRTLADSEYQGQCNYGYHLDAGALAELLKRHCIDTLNVEHVVDTVDECISENGERIDAVVLNKAGKLTADLFIDCSGTRSLLLGQTLNVPFKKVDDVLFNNRALAMQVPYESEDSPVACHTIATAQNAGWIWDIGLTSRRGVGHVYSSKFLSDEEAEQNLRNYLGDAANGLEARKISFEPGHREQWWKGNCVAVGMAAGFVEPLEATAIMLVELSARYIAENLPADDSLMPVVAKRFNTQMSYRWQRIIDFLKFHYMLTKRPEPYWQAHCDPKTFPESLKEDMALWQYRGPTTNDFNSAMELFPAASYQYVLYGMEFKPDFTRQGYLHNQQQKAEQVINRNEQLTQQMLQSLPPHRDYIEKWLATST

SEQ ID NO: 89457 - protein, 507 aa, Streptomyces thermoautotrophicus
  REGION 1..507: note = tr|A0A132MSZ3|A0A132MSZ3_9ACTN Tryptophan halogenase; OS = Streptomyces thermoautotrophicus OX=1469144; GN = LI90_1884 PE=4 SV=1
MIVGGGTAGWMSATYLKAAFGDRVSVTLVESDRVSTIGVGEATFSTIRHFFDYLDLPEEKWMPHCSASYKLAIRFENWRKPGHHFYHPFERLRVVDGFHLAEWWLQLGEDTAAFDRACFLTPWLCEAKRSPRNLDGSLFVAGLDGPLGRSTLAEQRAQFPYAYHFDADLLAKFLARFGIERGVRHVVDDVIAVGQDERGWITHVRTKGHGDLTGDLFIDCTGFRGLLINQTLGEPFRSFQNVLPNNRAVSLRVPRDIERVGIAPYTTATAMEAGWIWTIPLYGRIGTGYVYSDEFCTPEEAEQTLRKFAAPGQDDLEANHIRMRIGRNERSWVANCVAIGLSSAFVEPLESTGIFFIQHGIEELVKHFPDATWNPVLVDSYNRRVARVVDGVKEFLILHYRAAARDDTLYWKETKTREIPESLAERLALASTMLPDENNIYPYYHGFEPYSWVTMVLGLGGVRTKARPALASMDPSAARRQFAVLRREADLLTASLPSCYEYLATLN

SEQ ID NO: 89458 - protein, 491 aa, unidentified; identical to SEQ ID NO: 83444
  source 1..491: note = Alteromonadaceae bacterium
  REGION 1..491: note = tr|A0A2D9KDJ5|A0A2D9KDJ5_9ALTE Tryptophan halogenase; OS = Alteromonadaceae bacterium OX=1916082 GN=CL582_07460; PE = 4 SV=1

SEQ ID NO: 89459 - protein, 587 aa, Microcystis sp.
  REGION 1..587: note = tr|A0A552CDD8|A0A552CDD8_9CHRO Tryptophan halogenase; OS = Microcystis sp. Msp_OC_L_20101000_S702 OX=2486218; GN = EWV60_14240 PE=4 SV=1
MIKTTNSVRQFVYDVVIMGAGFAGVCQARHLMLKVPNIKIALIDPRPENRSDKDLKIGESTVEIANLFICKELGLYEYMIENHPPKFGLNFHWPKDSHKTDTIEDYYHIWTNRQPPLASSQMNRAKFERDLLRMNKETGVDFYNGRVVDVTIHPGNDPHQVKVKLHDEVIELTAKHLVDAAGRQFIIGKKTDNVIFDPEHLCGVNTGSAWVQVKNIDRTLFHSGYDPEATSCSHYYATNHWFGQGHWLWMIPTDTDTQEISIGVIHHHEIIPADYLNQEQKFYAFLKANHKLLYDLLSSGEKIDFHYWPRIAHTSKEVLSADNWYVIGDAAYIFDAFYSMGTSLTTFAIESVTEVIRSKLAGEADAEVKRVAYNQFNLAQAEGVNQLMRDHKTQLGHASIMSWRIYFEYIWWFGILVPLYVGKWHLNVSFIEGFVKIHRQTVNSLFVEIYEQLNQLVERKANLGLLDCYRGDQLLGDYQPLVHFDSFLENVQYEPFRSNIFTSIKYTHFYGAIWYLVFQWRGFGLGGVIAPKHLYHFLRLLLLSGVASFGEFYHRLKMKKIPHNHQIACTTEEFKHYQYQSSLNPWF

SEQ ID NO: 89460 - protein, 482 aa, unidentified
  source 1..482: note = Rhodobacteraceae bacterium
  REGION 1..482: note = tr|B9NM47|B9NM47_9RHOB Putative tryptophan halogenase OS=Rhodobacteraceae bacterium KLH11 OX=467661; GN = RKLH11_934 PE=4 SV=1
MTTETEICVIGGGPAGAATALRLAQLGRQVCLLERAAFPRQHVGESLPPSIWPVLQLLGVDDLVAQAGFLRATGSVLHWGGGFERRGRNSTRPGLLVDRGRFDALLLQAAAAAGVQVPQPARAYRPVRHGDGWKIPVHSSAGHHAITAQILVDAAGRQAGLGRRFRPTSKPLLALYAYWQVPPGFGAQARVEAGRAHWYWGALLPGGVVNAMVFVDPATCTGLSPAARRDLYLNLLAQSTLLSPCLEQRRIGPVRRSDATSLTETTRPAPDLLRVGEAAFTVDPLSSQGVQLSMGQAVQAAVVLNTILNSPEKGDLALSFYADRQAERVQTHAALAAGFYAKQQAITPAPFWANRSTPLEPGRTAQPDLNPDELRSDQLVHLSPLTSLQVSGVQSATRIEAAPVLTHPNLPRPVACLEGTPLAPLLQRLEGRATVGQIRQRWSDMLGPEHAMRLVHWLWHHRILVPAGESDVIPVSSARRMT

SEQ ID NO: 89461 - protein, 495 aa, unidentified
  source 1..495: note = Permianibacter aggregans
  REGION 1..495: note = tr|A0A4R6V587|A0A4R6V587_9GAMM Tryptophan halogenase; OS = Permianibacter aggregans OX=1510150 GN=EV696_101318; PE = 4 SV=1
MTTTTPIKKIVIAGGGTAGWMAAAALVKLLGKTLSVTLIESDEIGTVGVGEATIPSLVFFHQLLGINEQAFMSATQGTFKLGIQFENWRKLDHRYIHAFGVTGKDCWAAGFQHFWLKGLEKGFSADFGDYCLERRAAEAHRFAHLPKNGLNYAFHMDATQYAQFLKQLSLPLGVERIEGKIQRVNTDNESGFIRSLSLNDDRTIEGDFFIDCTGFRGLLIEQALHTGYEDWSHWLPCDSAVAVQTESVAPPLPFTRSIAHDAGWQWRIPLQHRVGNGLVFCSKYLGDEQAKALLARNIEGKVLTEPRVIKFKTGRRLKQWNKNCVALGLASGFLEPLESTSIHLIQQGIVRLLRMFPHHGVRQVDIDEYNKQTDFDVEHIRDFIILHYHATERDDSPFWNYCRQMKVPDSLAHRIQLFKETGRVFRDGNELFDDSWQQVMIGQGVMPEQYHPIVNTMPDGELKAFLEHIRSSIDKTVERLPSHQEYLNQYCPGNR

SEQ ID NO: 89462 - protein, 520 aa, unidentified
  source 1..520: note = Alteromonadaceae bacterium
  REGION 1..520: note = tr|A0A2E9KC88|A0A2E9KC88_9ALTE Tryptophan halogenase; OS = Alteromonadaceae bacterium OX=1916082 GN=CL587_20615; PE = 4 SV=1
MTNRVVIVGGGAAGWLTAGILAAKNGEKSGCTHPVRIELVESPNVKNLMVGEGTWPTMRDTLRQIGISEKDFMQFCNAGFKQASKFVGWQYGNGEHYYHPFTAPAGYGAVNLSQYFLKNRPGSDFETLVCAQGAVCEQSLAPKTLATPEFAFALNYGYHLNAGKFTEMLRLHCTQELGVVHTTGHVEQVNGAPDGDIASVTLSDGRVIEGDLFIDCSGFKALLLNGFYNVPMVCRRDQLFNDAALALQVPYRDEHAPVASATVATAQKHGWIWDIALSGRRGIGHVFSRQYCSADQAQDALMQYVKNDPHLDASNAEPRLITFEPGHRSVFWHRNCVAIGVSAGFVEPLEATALVLVEKSVEWISHQFPRCRNAMTVLAKRYNEITHSRWEEIIDFIKLHYVLSSRDDSEYWRAHRDASSVPQSLKDSLALWQTQPPWLYESDRRLELFSSASKQYVLMGMQSTFGEACTGLSQHEMRVADKALNDVLRSTEQLLNGLPTNREFLSRLAGAVKKDCRATA

SEQ ID NO: 89463 - protein, 499 aa, unidentified
  source 1..499: note = Alteromonadaceae bacterium
  REGION 1..499: note = tr|A0A3R7WRC6|A0A3R7WRC6_9ALTE Tryptophan 7-halogenase OS=Alteromonadaceae bacterium TMED7; OX = 1986650 GN=CBB67_015485 PE=4 SV=1
MTTPPKQIVIAGGGTAGWIAAAALARKMGPLVNIRLVESSTIGTIGVGEATIPPLRTFHKLLQIDEQAFMRATAATFKLGIRFENWGRIGEQYIHSFGMTGQQSWLAEFVHFYLSAKARGLEGDYGDYCFELEAARQHKFATSAQSNIQYAYHLDAGNYVAFLKRFCNNLGVNHCEGVISQVLQHENGDIKALRLDSGELIEGDFFIDCTGFKGLLIEETLHTGYEDWSHWLLCDSACAVQTTSTAPAAPFTRSAAHHAGWQWEIPLQHRTGNGNVYSSAFMDDNEASEQLMQNVQGEAITTPRTLRFKTGRRNKAWHRNCLALGLASGFVEPLESTSIHLVIMGITRFMQLFPHGGNDQALADEYNQQTQLELERIRDFIILHYHVTDRDDSPFWEHCKNMTVPDSLQTRIALFKEQAHAFQKQNELFRVDSWAQVMLGQGVTPDYHHPAAAMLSDAQLNQSMQQQRQQVLQAVAQLPAHDDFIRRYCATPQEATALS

SEQ ID NO: 89464 - protein, 495 aa, unidentified
  source 1..495: note = Alteromonadaceae bacterium
  REGION 1..495: note = tr|A0A2E9K4H1|A0A2E9K4H1_9ALTE Tryptophan halogenase; OS = Alteromonadaceae bacterium OX=1916082 GN=CL587_06990; PE = 4 SV=1
MTSGVRKLVIAGGGTAGWMAAALFKKVLADNIEVELIESEDIGIIGVGEATIPPIQTFNQYLGLDEKAFLKETHASIKLAIRFENWKQEGSSYYHTFGAPGATLGFVGFQHYWLRAAQNGLTQSLWDFDLNYLACLEGKFNKIQTDNPVYQLPYAYHFDATLYGQFLRRMAENAGVKRTEGTIEHVKQNATTGFVEALQLKSGQQIAGDLFLDCTGMRGLLLQKTLGTEYEDWSHWLCADRAWAVPSQRHEHTAPFTRSIARSTGWQWRIPLTHRNGNGLVYSSKYMDDDTARDMLMTNLDTPALDEPRKISFRTGRTVKQWSKNVIGIGLSSGFLEPLESTSIHLIQSGLVRLLKMFPHKEINPSMETVYNAESKEEFETIRDFIILHYVVNERDDSEFWRDMRTMPIPARLEQKINAFKDTATIFNEQNDIFRDASWLQVMAGQGIMPRDHHPAANTQTVHQLLDVMGKVLQAKQQPLTQMLPHDEFLKRFTQ

SEQ ID NO: 89465 - protein, 501 aa, unidentified
  source 1..501: note = Alteromonadaceae bacterium
  REGION 1..501: note = tr|A0A2D9RZK1|A0A2D9RZK1_9ALTE Tryptophan halogenase; OS = Alteromonadaceae bacterium OX=1916082 GN=CL586_05755; PE = 4 SV=1
MQTQLKKIIILGGGSAGWMTAAALGKILSKHPCDIQVIESEEIGTVGVGEATIPQIQLFNDLIGLDEDTFIKRTQGTFKLGIQFQNWRKPGHSYYHAFGEVGKNMEGVHFYQYWLKMRQQGKAAPLDEYTLSSLACNEKRFMRPFEAGNSPLSNIAYAFHFDAGLYAKFLREVAESHGVQRTEGKVTEVRQHPDGAIQSLILENGSEHGADFFIDCSGFRALLIEQTLKTGYEDWRHWLPCDRAVTAPSSLTETPWPFTRAAAQQAGWQWRIPLQHRVGNGHVYCSEFMTDEEAEKTLRLNIEGDLLADPRQIRFITGKRNKFWHKNCLAVGLSGGFMEPLESTSLHLVQVAISKLFSYFPFQQPCQSDIDQYNAEMDFEFTRIRDFLILHYHVTEREDTEFWRYCKHMAIPDTLQEKIDHFKANGRISRFNNELFNDLSWFEVMYGQGLRPEGYHALADIFPEEELARRLEGIQRVVRKSVDYMPGHAEFIAKTCAANRD

SEQ ID NO: 89466 - protein, 506 aa, Ensifer sp.
  REGION 1..506: note = tr|A0A1S1T1F9|A0A1S1T1F9_9RHIZ Uncharacterized protein OS=Ensifer sp. LCM 4579 OX=1848292; GN = LCM4579_23690 PE=4 SV=1
MLDLRNARRIGIIGGGIVGWLAAIALSRVFDPAVEVTVIETTALFPLGLGEGGSLNLIDTLCRNDLDLDVFIGEAGATYKHGVLYENWTGGGVPDRYYHLFGGPGIPEIEHHVDGFFPLLSARIAVGASLHTCIPGFEAIARNASHQEIDELMATGQSGLYPSYHFDDIGFEQYLKRVGLARGITSRESPVCDIRLDNRGHACALQLQGEQLEVDFAVDASGLARMGLGTAFNPHWRSFANVLPTDQAITFDLQPAGSSRQPLTRSTAMTAGWIWEVPLNRTTKAGYVFSSRHADHTMAIAEVQHRFGCDVQPRRELSFDQGYLETAWVNNVVALGTASGFVEPLGAALAAHTFEQLRNLERILTNGGGIAPAQAIEAFNRANVRSWTGVRDYLRLHYNGSRNDTPFWRDLASAELPESYAQLRACFQKRTPRFIDIEPYVGSGWQSLFHQVDWISVAAPLGVVPSTAARAELSQLPMEWQSKAQAYLDLLKGTSPTFRPRSGWRH

SEQ ID NO: 89467 - protein, 499 aa, unidentified
  source 1..499: note = Alteromonadaceae bacterium
  REGION 1..499: note = tr|A0A2E7GP03|A0A2E7GP03_9ALTE Tryptophan halogenase; OS = Alteromonadaceae bacterium OX=1916082 GN=CL578_10755; PE = 4 SV=1
MKKTAITILGGGTAGWMTAAILAKGLPKDKFHICLVESPDISSVGVGEATIPPMTSLLAYLELDESSFLKRLNGTFKYGIQFENWSELGNQYMHAFGDIGTPLGTLSFTQAWLKSAAALNFTELGSYIPSAVAAKTGKFHPPVDIPQGANPTHFYPLSLLFYAYQFDATELASLLKDYATDHSVKHIVGMVNRVNNKRNGDISSLSLRDGRNIAGDYFVDCSGMRGRLNKSHFGCEFDDWSNELPCNSAIAVQTKRDTPAAPYTKSIAMSAGWRWEIPLRDRTGNGYVFSSRFLTDEQALQELNEALAGEQFITEPKIIHFKTGCLTTPWHRNSIAIGLASGFTEPLESTSIHLIHKYALELKDALLCGQDLAHEAKRFNHMFYQEALSIKDFLLAHYHVSKRTDSPFWQHCKNMPITQTLQNYLAEFARNGYINLPESSLFPFQSWFQVLVGQGYLADYCAFSDKQFDAQQAKPFFNNVKLAIQSEVARLAPHQSYLQ

SEQ ID NO: 89468 - protein, 518 aa, unidentified
  source 1..518: note = Alteromonadaceae bacterium
  REGION 1..518: note = tr|A0A2E9KB44|A0A2E9KB44_9ALTE Tryptophan halogenase; OS = Alteromonadaceae bacterium OX=1916082 GN=CL587_18845; PE = 4 SV=1
MSKRVLIVGGGTAGWITAAYMARMLAADTPGGVSITLVESDEIGTLGVGEGTFPIIRKTMKRIGIDESDLIKHADATFKQGIRFNNWKYNPADKPDDSYLHPFQVASQHTDMDLLPYWLLGVAGDVPWAKACSVQSTVIDEKLAPKLITHPQFDAPLNYAYHFDATKLAALVRNKATDTGVRRLVDTIDNVTLAEDGSIASVTAREHGELTADLYIDCTGFRARLIGETLGMPFTSFKKELFCDRAVALQVPYDNPQAGIPSCTYTTAKEAGWIWDIGLHHRRGVGYVYASEYCDEETAVKTLKAHIGPAAKDLSHRLLKFEPGYRQTQWHKNCIGVGLSVGFIEPLEATGISFAEVAALMLCNLFPWSGDYEASARQFNEAMCKRFEHVKDFIKVHYYLSERYDTAFWRDNRAPDSASEYLKGKLAQWRHRPPSFLDIDASHDIFDENSWQYILYGMGFKTDISARADALRFYDDARREFHSIQQQSRNAMTAVPAHRQLINEVASGGFRPRAGGRR

SEQ ID NO: 89469 - protein, 517 aa, unidentified
  source 1..517: note = Alteromonadaceae bacterium
  REGION 1..517: note = tr|A0A424TAB6|A0A424TAB6_9ALTE Tryptophan 7-halogenase OS=Alteromonadaceae bacterium TMED7; OX = 1986650 GN=CBB67_021860 PE=4 SV=1
MSHSANPVNTPEVKRVVIVGGGSSGWMCAAAIARIAPPETRITLVESEDIGVIGVGEATIPTLMEFNDFLGIKEHDLLRECQGTYKLGIDFVDWYQKGESYFHPFGFYGRDTPEFSFHQLWLRLNAMAEKGEIPADAPGIISDYNLCSVAAKQGRYAPPQGGADTILSTMRYAYHFDSARYGQLLRRYAEQHNVGRIEGIVNSVKQDHNTGLLQSVTLNSGQILEGDLFVDCSGFKALLIDGAMQSEFVDWHHYLPCDRAIAVQTKLAGSPDPFTRSTADDAGWRWRIPLQTRLGNGHVYSSDFMEQDEALQKLLAGVEGEPVTQPLPLKFRTGHRKAFWEKNCVAIGLAGGFIEPLESTSIHLTQMGIQRLVNLWPGRGCNRSEIAQYNALMTADYERLRDFIVLHYNATEREDTEFWRYVKHMEIPDTLAAKLEIFRSSGRVIPSPEDLFTPHSWLAVMLGQGIYPQNYDVLVDRVPAQALLKNMQMLRMSVAKTAESMPTHEEFIRRYCQAAAA

SEQ ID NO: 89470 - protein, 520 aa, unidentified
  source 1..520: note = Alteromonadaceae bacterium
  REGION 1..520: note = tr|A0A2E7GPT9|A0A2E7GPT9_9ALTE Tryptophan 7-halogenase OS=Alteromonadaceae bacterium OX=1916082; GN = CL578_12120 PE=4 SV=1
MSHRSIKNILVVGGGSAGWLTAGIIAAEHQCNKQNSKIKVTLVESPEVNIVGVGEGTWPSMRNSLQRMGLSETDFIRHCGAAFKQGSKFVGWKNGADNDFYYHPFVIPNGYGQANQYSAWKTHGQGHAFADVVCAQSQICQAGLAPKQNATPEYAGVLNYGYHLDAGKFSQMLQQHCVQNLGVTYIQDHVEGVVSHDNGDIKALQTRANGELNADLFVDCSGARSLLLGQHFNVPFIDKKSVLFNDSAMALHVPYSTPDEPIASATISTAQEAGWVWDIGLQDRRGVGYTYSCKHTDDQQALRTLKAYVAQSVGGEVADSLSARKISFEPGHRSHFWHKNCVAVGLSAGFLEPLEASALALVELSATAIAENLPVTAQHMQITRDNFNRRFLLHWENIVEFLKLHYVLSERTEPYWQQMRAPDSVSPRLNDLLTQWRYQPPNRSDFVQNEIMFPSASYQYVLYGMGFETLNDVSSREFDAPQSAIKHLQENQQRLHKLMGGLKSNRQLLKHVVQYGFQKV

SEQ ID NO: 89471 - protein, 497 aa, unidentified
  source 1..497: note = Alteromonadaceae bacterium
  REGION 1..497: note = tr|A0A2E7GQM4|A0A2E7GQM4_9ALTE Tryptophan halogenase; OS = Alteromonadaceae bacterium OX=1916082 GN=CL578_13535; PE = 4 SV=1
MNKKPIKRVVIAGGGTAGWMAAAALAKLLGKNLSVSLIESDDIPTVGVGEATIPTLHIFHRLLGINEQEFMAATNATFKLGIKFENWKAQNDDYIHSFGFLGQGCWAAGFQHFWLKGKEKGMVTQIGDYVPEHLACREGRFAVLANQEQNHAYHLDAGLYAQFLRKIAEQHGCKRVEGKIQTVTLNEDSGDISSLTLASGETVEGDLFIDCTGFRALLIEQALHTGFEDWSHWLPCDSAVAVQTTAKPNRVPYTRSIARDAGWQWRIPLQNRTGNGLVFCSKYVSDEQAKAALLANIEGETLNEPRVIKYKTGTRRKHWNKNCLAVGLSSGFIEPLESTGIHLFQRAIVRLMLMFPSNGIEQADVDEFNAQSRADVEDIKDFIILHYHQTERTDTPFWRYCKNMPIPDTLAHRMDLFAGTGKVFKKAEELFGETSWIQVMLGQGIMPKQYHPIVDMMSDDELQRFLNNIKANVKRKVANWPDVNDFIRHYCQSQAAQ

SEQ ID NO: 89472 - protein, 516 aa, Sphingomonas sp.
  REGION 1..516: note = tr|A0A0Q4QYI0|A0A0Q4QYI0_9SPHN Tryptophan halogenase; OS = Sphingomonas sp. Leaf242 OX=1736304 GN=ASF09_06920 PE=4; SV = 1
MRKRILIVGGGTAGWLTAGYLAKRLGADLAGGVSITLVESRDIGILGVGEGTFPTIRRTLATIGIDEAELVRRCGATFKQGAKFVHWRHEPGQSRTDHYLHPFQIADASDGLDLLPYWLLGYGGPDNWDEVSNPQKKAADQMRAPKLASNPDYVGPLNYAFHFDAVALAGLLREQGVKNGVRHLTDTVTEVLLDADGAIGGVRTEQNGLLDADLYIDCTGFRAELIGKAMKIPYRSCRDVLFCNRAITAQLPYARRDAPIASYTISTAQESGWIWDIGLDRRRGIGHVYSSDHSDDETAERVLRGYLGAGGDEADVRHFKFDAGYREVNWYKNCVAVGLSSGFFEPLEATGIAFAEVSAGMIANLFPWGGDYETSARQFNANMLRRYERALDFIKLHYCISERRDTAFWRDNVADSSVPDSLLELLDRWRFRPPNELDIDGQVDIFTDASWQYVLYGMGWKTDLSAKAGALRYPDDARRAFAEVQRQAQYAIANLPSNRALVDYAQTHRFGARAPA

SEQ ID NO: 89473 - protein, 550 aa, unidentified
  source 1..550: note = Nitrospirillum amazonense
  REGION 1..550: note = tr|A0A248JXS7|A0A248JXS7_9PROT Tryptophan halogenase; OS = Nitrospirillum amazonense CBAmc OX=1441467; GN = Y958_21300 PE=4 SV=1
MTAAEGAQRRILIVGGGTAGWLTAAYLAKTLGANLSGGTEITLIESSDIGIIGVGEGTFPTIRSTLAAIGIDEARFLRESTATFKQGVHFVDWAETPAPDASPTQALGAVAGHTHYFHPFNFPHQGNGPELLPYWLLGGAGDLAFAEAVTLQKAVADAARGPKRPIDPPYAAPLNYAYHFDANRLAVLLRTVAIELGVRHRVGTVTDVVLDGSGAVARVETREHGSLSADLYIDCSGFRAEIIGRALKVPFKSYQDVLFNDRAVALQVPYDRPDAPIPSYTVATAHEAGWTWDIGLNDRRGTGYVYSSRHTDDARAEQVLRRYLGPAAEGRDVRLLKFDSGCRTAQWVGNCVAVGLSGGFFEPLESTGIMLIEVAAHMIAQYFPWGETGLDSAQTAASMAATARTYNALMGKRYERIVDFLKLHYCITRRTDSAYWRDNADPATIPESLRDRLAVWAHRPPGRFDFVADHETFLPASYQYVLYGMGFKTDLEPARALHRRMDEAGHEFRGLRTVAPQAVSSLPTHRELVEEVYRNGFRPPQAAPAVGGRR

SEQ ID NO: 89474 - protein, 101 aa, unidentified
  source 1..101: note = Alteromonadaceae bacterium
  REGION 1..101: note = tr|A0A2D9RYT6|A0A2D9RYT6_9ALTE Tryptophan halogenase (Fragment) OS=Alteromonadaceae bacterium OX=1916082; GN = CL586_04370 PE=4 SV=1
MTNSTQQPESIVIVGGGTAGWMCAAYLAAKWSKRYRITLIESAQIGTVGVGEGSTPFLKQFFAELGWQESDWMPACDATYKTGIEFSNWSNSKRFKRYFHP

SEQ ID NO: 89475 - protein, 505 aa, unidentified; identical to SEQ ID NO: 86934
  source 1..505: note = Alteromonadaceae bacterium
  REGION 1..505: note = tr|A0A2D9KC84|A0A2D9KC84_9ALTE Tryptophan halogenase; OS = Alteromonadaceae bacterium OX=1916082 GN=CL582_05150; PE = 4 SV=1

SEQ ID NO: 89476 - protein, 217 aa, unidentified
  source 1..217: note = Alteromonadaceae bacterium
  REGION 1..217: note = tr|A0A2E6EFP3|A0A2E6EFP3_9ALTE Tryptophan halogenase (Fragment) OS=Alteromonadaceae bacterium OX=1916082; GN = CL577_03395 PE=4 SV=1
MHTDNQHHTAVKKVVIAGGGTAGWVAAAALSKRLKGQIDVVLVESAEIGTVGVGESTIPPVQLFHNLLGIDEQEFMRATDATFKLGISFENWGQLGDRYIHPFGVTGKGSFLADFQHYYLHGRTLGIDEPFGSYCYELQAALAGKFAKTDSSNISYAYHLDATRYARFLRAFSEAQGAVRIEGKIAQVQQQVNGDIRALVLEDGTEISGDLFIDCTG

SEQ ID NO: 89477 - protein, 498 aa, unidentified
  source 1..498: note = Alteromonadaceae bacterium
  REGION 1..498: note = tr|A0A3R7XAB6|A0A3R7XAB6_9ALTE Tryptophan 7-halogenase OS=Alteromonadaceae bacterium TMED7; OX = 1986650 GN=CBB67_005595 PE=4 SV=1
MAQKKTRVVVAGGGTAGWLTAFSLVTRLGNVLDIILVESDQIGTVGVGEATIPTMCNFHQLMGINEGEFMAATNATFKLGIQFDNWANDGDSYIPSFGEIGQRSWMAEFHEFWMEAAANGQQDSLEDYCLELKAAKANKFATKIGNRPLNFAYHLDATAYAAYLRKKSEAAGVTRCEGKIQSVDTDPQNGNLTRLTLDTGIAIEGDVFIDCTGFRGLLIGEHLGVGYEDWSHWLAADRAIAIQTQSTEAPKPYTIATAHKAGWQWRIPLQSRVGNGIVYSSRFLSDDDALATLKQNIDGEMLTEPRYLKFKTGRREKAWHKNCIAVGLASGFLEPLESTSIHLVTTALIRLMKLFPFSSDHELLAEQYNRETQKEMETIRDFIILHYNLTKRTDSDFWDHYRTMDIPEPLAHRMAIFAQNGYVWPDDVALFRVDSWVQVMMGQGLMPAQHHGASRMLPTDGLKQQLSAFKQSVDNALGQLPAHADFIARYCPAGEQVK

SEQ ID NO: 89478 - protein, 497 aa, unidentified; identical to SEQ ID NO: 86910
  source 1..497: note = Alteromonadaceae bacterium
  REGION 1..497: note = tr|A0A2D9KIB3|A0A2D9KIB3_9ALTE Tryptophan halogenase; OS = Alteromonadaceae bacterium OX=1916082 GN=CL582_15955; PE = 4 SV=1

SEQ ID NO: 89479 - protein, 485 aa, Streptomyces sp.
  REGION 1..485: note = tr|A0A0F5W0Q6|A0A0F5W0Q6_9ACTN Tryptophan halogenase; OS = Streptomyces sp. WM6386 OX=1415558 GN=TN53_09955 PE=4; SV = 1
MTREYDLIVVGGGPAGSTAATVVAKRGHRVLLLERETFPRYQIGESLLPATVHGLCRILGVADEVQQAGFTLKRGGTLRWGRDPEPWQFSFAMTPRVPEPTATAFQVERSRFDEILLRGARRAGVEVREGSPVRRVVADDERVRGVEYTDADGTSRTAYAPYVIDASGNTSRLHGGVGGGRVYSDFFRNLAVFGYFAGGARLPEPNSGNIFCAAFDAGWLWYIPLRDDLTSVGAVISPEHTPAVQRDARAAWRDMIAACPEVSRLVAGVPEATERPYDQVRVRKDWSYWKKSFWTPGMALVGDAACFVDPVLSSGVHLATYGALLAARSVNSALDGSVSEERGFAEFEARYRREYRVFYDFLISFYDMERNENSYFWSAKKITEVELGEAAAFAELAGGLVSGDTAVVHTGWHTAAAQLDSAVGKLAASDGRINPLLSAPVVGETFRTGNDLQEQALYGGPLDDPGPADPDGLAVTPDGLAWVKA

SEQ ID NO: 89480 - protein, 496 aa, unidentified; identical to SEQ ID NO: 86056
  source 1..496: note = Alteromonadaceae bacterium
  REGION 1..496: note = tr|A0A2D5M3L7|A0A2D5M3L7_9ALTE Tryptophan halogenase; OS = Alteromonadaceae bacterium OX=1916082 GN=CL579_11905; PE = 4 SV=1

SEQ ID NO: 89481 - protein, 515 aa, unidentified; identical to SEQ ID NO: 86917
  source 1..515: note = Alteromonadaceae bacterium
  REGION 1..515: note = tr|A0A2D9KIA1|A0A2D9KIA1_9ALTE Tryptophan halogenase; OS = Alteromonadaceae bacterium OX=1916082 GN=CL582_15960; PE = 4 SV=1

SEQ ID NO: 89482 - protein, 497 aa, unidentified; identical to SEQ ID NO: 86127
  source 1..497: note = Alteromonadaceae bacterium
  REGION 1..497: note = tr|A0A2D5M4G5|A0A2D5M4G5_9ALTE Tryptophan halogenase; OS = Alteromonadaceae bacterium OX=1916082 GN=CL579_13245; PE = 4 SV=1

SEQ ID NO: 89483 - protein, 105 aa, unidentified
  source 1..105: note = Alteromonadaceae bacterium
  REGION 1..105: note = tr|A0A2D9S2P7|A0A2D9S2P7_9ALTE Tryptophan halogenase (Fragment) OS=Alteromonadaceae bacterium OX=1916082; GN = CL586_11545 PE=4 SV=1
MSRSANPVNTPEVKRVVIVGGGTSGWMCAAAIARIAPPHTHITLVESEDIGVIGVGEATIPTLMEFNDFLGIKEHDLLRECQGTYKLGIDFVDWYQKGQSYFHPF

SEQ ID NO: 89484 - protein, 499 aa, unidentified
  source 1..499: note = Alteromonadaceae bacterium
  REGION 1..499: note = tr|A0A2E9KB27|A0A2E9KB27_9ALTE Tryptophan halogenase; OS = Alteromonadaceae bacterium OX=1916082 GN=CL587_18800; PE = 4 SV=1
MDSNTQSEKTRVVIAGGGTAGWLTAAALAKKLGPLVDITLVESSDISTIGVGEATIPPLRVFHQLLGINEAEFMRATSATFKLGIQFTDFGNKQTEYIHSFGQTGQSGWLAEFFHFWREAHERGIPGEYGEYCLELEAAKANKFFTSTQNSPLNYAYHLDAGAYAAYLKKLAVNSGITHIVDNIDAVNRAPSGDIYALLLRQQGLLTGDLFIDCTGFKALLIGEALNTGYEDWSHWLFCNRALAVQTELAPPLRPYTVASAHEAGWRWEIPLQHRMGNGFVYSSQFLTDEQAELQFQKTLNSAPLQIIRRIEFKTGRRDHAWQNNCVAIGLSAGFVEPMESTSIHLIVTGITRLMQLFPYRGDATRLRNEYNNQTRAEIEKIRDFIILHYHVTERDDSEFWKMCKKMNIPDSLAERIELFREHGHAFQKNGELFRVDSWTQVMLGQGILPGSWHPAAKMMSSGQLSAAMEKGKQEIKQRVAQLPGHEAFVSQYYASVKH

SEQ ID NO: 89485 - protein, 495 aa, unidentified; identical to SEQ ID NO: 83233
  source 1..495: note = Alteromonadaceae bacterium
  REGION 1..495: note = tr|A0A3R7Y6P5|A0A3R7Y6P5_9ALTE Tryptophan 7-halogenase OS=Alteromonadaceae bacterium TMED7; OX = 1986650 GN=CBB67_007285 PE=4 SV=1

SEQ ID NO: 89486 - protein, 533 aa, Sagittula sp.
  REGION 1..533: note = tr|A0A2K8W9F9|A0A2K8W9F9_9RHOB Tryptophan halogenase; OS = Sagittula sp. P11 OX=2009329 GN=CDO87_06930 PE=4 SV=1
MHSMAEPVTSITVVGGGTAGWLAATYLRSKCAPKIAITLIESPNVPTVGVGEATVPHMPVTLREMGIDDKEFFRRCNTSFKMGVMFRGWNVDHKGRPFDYMNPFAPPPKIDGVEVGHYFQAFGAGRRDYIQSFSPLMDLLDAGKGPLSFNAANDPMPRAGYAYHLDAGAFAKMLAEVGVARGVEHVLDDVDGVELDDTGHVAALKLRQTGRRPVQLVIDCTGFKGLVIREALGEPFENYSDYLANDRAMALPIPHPDPERLPAATSSTALGAGWSWAVPLYHRIGTGYVYSSAHRTDDAARDEFLAHLGDRAPKGAEPRVIPMRIGRMRRAWVKNCIALGLSGGFIEPLESTAIHMIDMGIRWLLQYFPSQDYEESTRAAYNRCADEMYNEVRDFICLHYRLGNRTDTDYWRDARGLKISDRLEGWLDLWQRQLPVEMDIGRANLFDHNTFQAVLLGKRVYENGWGAARLNRSFALSEKRWKGFLRDSAARNMAVVKVKADHRRALRVLRGEAKDGAVTRQTLGVVADEAVLF

SEQ ID NO: 89487 - protein, 498 aa, unidentified
  source 1..498: note = Alteromonadaceae bacterium
  REGION 1..498: note = tr|A0A2E7GNR0|A0A2E7GNR0_9ALTE Tryptophan halogenase; OS = Alteromonadaceae bacterium OX=1916082 GN=CL578_09095; PE = 4 SV=1
MSQPFNIVILGGGTAGWMAANLFAHKWADRLANNELTVTLVESPDIGIVGVGEGSTPTLKRFFSMLGIADADWMRQCNATYKMNIAFKGFSPASGIDCYSHPFVSQIDTFTQRAFLVNARTRRLGLDTHTEPADFLLNGVLAKQNKGPQTPANFPFRMEYGYHFDSHLLGVFLQQHAISLGTEHIQANVDQVKQHENGDIAALCCKDGRELNGDLFVDCSGFSSVLMQKTLGVKFNRYQENLFNDSAVVVPTPIGKHIPVETTSTALSAGWCWKIPLTNRFGNGYVYSSDFISANHAERELKQHLQLGEDIECRHLSMQVGSLAKQWQNNCLGIGLSAGFIEPLEATALHLAQISVEQFILEFEEGGFTNRLQGQYNTKMHHRTERTRDYIVAHYKLNTRNDSEYWRANRNNMHLSESLLQILDVWYKRGDLEAEINRQNLSSHFNAVSWNCLLSGYGAFPPLAAKQPGTGDLYKEQNIESFLQGCALNFSNHAENLR

SEQ ID NO: 89488 - protein, 501 aa, unidentified
  source 1..501: note = Alteromonadaceae bacterium
  REGION 1..501: note = tr|A0A424T9U5|A0A424T9U5_9ALTE Tryptophan 7-halogenase OS=Alteromonadaceae bacterium TMED7; OX = 1986650 GN=CBB67_022275 PE=4 SV=1
  VARIANT 6..7: note = Xaa can be any naturally occurring amino acid
  VARIANT 39: note = Xaa can be any naturally occurring amino acid
  VARIANT 42: note = Xaa can be any naturally occurring amino acid
  VARIANT 58: note = Xaa can be any naturally occurring amino acid
  VARIANT 71: note = Xaa can be any naturally occurring amino acid
  VARIANT 83: note = Xaa can be any naturally occurring amino acid
  VARIANT 85: note = Xaa can be any naturally occurring amino acid
  VARIANT 92: note = Xaa can be any naturally occurring amino acid
  VARIANT 94..95: note = Xaa can be any naturally occurring amino acid
  VARIANT 100: note = Xaa can be any naturally occurring amino acid
  VARIANT 103..104: note = Xaa can be any naturally occurring amino acid
  VARIANT 106: note = Xaa can be any naturally occurring amino acid
  VARIANT 112: note = Xaa can be any naturally occurring amino acid
  VARIANT 129: note = Xaa can be any naturally occurring amino acid
  VARIANT 134: note = Xaa can be any naturally occurring amino acid
  VARIANT 137: note = Xaa can be any naturally occurring amino acid
  VARIANT 161: note = Xaa can be any naturally occurring amino acid
  VARIANT 165..166: note = Xaa can be any naturally occurring amino acid
  VARIANT 170: note = Xaa can be any naturally occurring amino acid
  VARIANT 185: note = Xaa can be any naturally occurring amino acid
  VARIANT 196..197: note = Xaa can be any naturally occurring amino acid
  VARIANT 200: note = Xaa can be any naturally occurring amino acid
  VARIANT 202: note = Xaa can be any naturally occurring amino acid
  VARIANT 206: note = Xaa can be any naturally occurring amino acid
  VARIANT 209: note = Xaa can be any naturally occurring amino acid
  VARIANT 225: note = Xaa can be any naturally occurring amino acid
  VARIANT 237: note = Xaa can be any naturally occurring amino acid
  VARIANT 241: note = Xaa can be any naturally occurring amino acid
  VARIANT 245: note = Xaa can be any naturally occurring amino acid
  VARIANT 295..296: note = Xaa can be any naturally occurring amino acid
  VARIANT 302..303: note = Xaa can be any naturally occurring amino acid
  VARIANT 305: note = Xaa can be any naturally occurring amino acid
  VARIANT 311: note = Xaa can be any naturally occurring amino acid
  VARIANT 321: note = Xaa can be any naturally occurring amino acid
  VARIANT 325: note = Xaa can be any naturally occurring amino acid
  VARIANT 358: note = Xaa can be any naturally occurring amino acid
MQTQLXXIIILGGGSAGWMTAAALGKILSKHPCDIQVIXSEXIGTVGVGEATIPQIQXFNDLIGLDEDTFXKRTQGTFKLGIXFXNWRKPGXSXXHAFGXVGXXMXGVHFYXYWLKMRQQGKAAPLDEXTLSSXACXEKRFMRPFEAGNSPLSNIAYAFHXDAGXXAKFXREVAESHGVQRTEGXVTEVRQHPDGXXQSXIXENGXEHXADFFIDCSGFRALLIXQTLKTGYEDWRXWLPXDRAXTAPSSLTETPWPFTRAAAQQAGWQWRIPLQHRVGNGHVYCSEFMTDEEAXXTLRLNXXGXLLADPXQIRFVTGKRXKFWXKNCLAVGLSGGFMEPLESTSLHLVQVAISKFFXYFPFQQPCQSDIDQYNAEMDFEFTRIRDFLILHYHVTEREDTEFWRYCKHMPIPDTLQEKIDHFKANGRISRFNNELFNDLSWFEVMYGQGLRPEGYHALADIFPEEELARRLEGIQRVVRKSVDYMPGHAEFIAKTCAANRD

SEQ ID NO: 89489 - protein, 504 aa, Sphingomonas sp.; identical to SEQ ID NO: 82615
  REGION 1..504: note = tr|A0A430E3T6|A0A430E3T6_9SPHN Tryptophan 7-halogenase OS=Sphingomonas sp. ABOLH OX=1985881; GN = CA237_14280 PE=4 SV=1

SEQ ID NO: 89490 - protein, 496 aa, unidentified
  source 1..496: note = Alteromonadaceae bacterium
  REGION 1..496: note = tr|A0A3R7XGX6|A0A3R7XGX6_9ALTE Tryptophan 7-halogenase OS=Alteromonadaceae bacterium TMED7; OX = 1986650 GN=CBB67_010275 PE=4 SV=1
MPEAIKKVVIAGGGTAGWMTAALLNKVLGNSVTIELVESEQIGIVGVGEATIPPIQTFNRFLGIDEKAFLRETQGTIKLAIKFENWRKPGESYYHTFGAPGTTMGFCSFHHYWLKAKEAGLDKSFWDFDLNYLACQQGKFNKINTQNPLYDMPYAYHFDSALYGQFLRRFAEQGGVKRTEGIIEHVQQHPQSGFITGLQLTDGRQIEGDLFIDCTGLNGLLIRKTLGVNYEDWSHWLPADSAQAVPSERFDKTLPYTRSIAHSCGWQWRIPLTHRNGNGIVYSSQFTTDEQANETLLGNLDTQALGEPRTIRFNTGRTDQQWCKNVVAIGLSSGFLEPLESTSIHLIQSGIIRLMKMFPNQGISPTMVDMYNAESKDEFETIRDFIILHYHVNERDDSEFWRAMREMTIPERLAQKIEAFKETAAIFNEQNDIFRDASWVQVMMGQGLSPRDYHAAVNAMDNQTLLSAMQQIQQAKMQPVAKLLGHDEFIERYTSA

SEQ ID NO: 89491 - protein, 510 aa, unidentified; identical to SEQ ID NO: 86095
  source 1..510: note = Alteromonadaceae bacterium
  REGION 1..510: note = tr|A0A2D5M4V9|A0A2D5M4V9_9ALTE Tryptophan halogenase; OS = Alteromonadaceae bacterium OX=1916082 GN=CL579_14115; PE = 4 SV=1

SEQ ID NO: 89492 - protein, 521 aa, unidentified
  source 1..521: note = Permianibacter aggregans
  REGION 1..521: note = tr|A0A4V3D8D4|A0A4V3D8D4_9GAMM Tryptophan halogenase; OS = Permianibacter aggregans OX=1510150 GN=EV696_101321; PE = 4 SV=1
MQGEIQQIIILGGGAAGWLTAGILAAQHQLNPAIRITLVESPDVKILGVGEGTWPTMRDTLRKMGVSETAFIRECDASFKQGTQFQSWVNGDDKDCYFHPFSLPQGHFDGLPTRYWPMLADKLSFAEAVSTQPLLCQQFRAPKQPQTPEFAGVVNYGYHLDAVKFADFLRRHCTEKLGVHHHYAHVTGVTVDEQEHITALQTLGEPIIGDLFIDCSGFQAQLIHQHYHIPFHDLRHVLFNDSAMVWQQTHDTENSSLASATISTAQAAGWIWDIALPTRRGLGYVYASEHLSDEQAAAGLQDYIRKHFAGSDPESITPRKISFNPGYRTKFWHRNCIAIGTSAGFIEPLEASALVLIELSASYLSQQLPRTREQMNIVAKRFNEVFQYRWQRITEFLKLHYVASQRRDHDYWLAHQMPDSIPEALRENLLLWQHNTPSRFDFPHAEEVFPAASYQYILYGMGVHANTPVPNQTMQRSLAEQYLKQTLELGQKQLQYLPSNRELLAHIHHHATDPQRLQGIT

SEQ ID NO: 89493 - protein, 500 aa, unidentified; identical to SEQ ID NO: 86875
  source 1..500: note = Alteromonadaceae bacterium
  REGION 1..500: note = tr|A0A2D9KDZ5|A0A2D9KDZ5_9ALTE NAD(FAD)-dependent dehydrogenase OS=Alteromonadaceae bacterium OX=1916082; GN = CL582_08225 PE=4 SV=1

SEQ ID NO: 89494 - protein, 500 aa, unidentified
  source 1..500: note = Alteromonadaceae bacterium
  REGION 1..500: note = tr|A0A2E7GNW8|A0A2E7GNW8_9ALTE Tryptophan halogenase; OS = Alteromonadaceae bacterium OX=1916082 GN=CL578_10725; PE = 4 SV=1
MLPIPQNITIVGLNVHGLLTALLLRKTYKPAVTGITLVGLKEEDSPPKAYIAGKALNTLLEHFGYSEANWMRQTQATFKLSNRYVGFSEQEFSVANASEVDILHQPLMLELSKLKRQAYQLDLSLDDFFFAAALAKRNLSPKAQDFPFETDYQYQVDANCLFTLLQKIAAEHSITTRPSTLETLQLDQHGTLKHIECEDQILSGDYFFDCTQSAQLLIGNMPDFRQETLPEVRINDRVLTYTLAVECCASEVVTTALDCGFVLQYTLQDAVHFQYHYSSKFIQDPQAVQRLERHISQQGYKKVLQRHLSASQAYLVSQPWIHNCLAIGPACGLTQGTEDHELSHTFAMLEQFVSSIQSPDDAKDVIKNYNHRIKSRFVYAHSYHSTLQLLNSRRNSPYWQTPQDANALTPIGRSLFSQWLSGEDLSVEPILDINGLTAWYALFSGLGHYPTGELKPHPKSRAIQDNIQDMCRKLAGCCLNFQTHDNLIAEGKHHANVTAV

SEQ ID NO: 89495 - protein, 506 aa, Simiduia agarivorans
  REGION 1..506: note = tr|K4KH12|K4KH12_SIMAS Tryptophan halogenase; OS = Simiduia agarivorans (strain DSM 21679 / JCM 13881 / BCRC 17597 / SA1) OX=1117647 GN=M5M_05405 PE=4 SV=1
MKTNRWIIVGGGTAGWIAASALAHQYRNQAVSITLVESSEIGTVGVGEAVIPPFITFIRNLGLDEQQFIAAVGGTFKLGIEFKNWRRQHHSYFHHFGDLGRPLNGNDFYHCFLHAGRAGDCGDLMDYAPSAVMARQHRFFLPFKLAPDSGLNGANYALHFDASRVAAELRRFACDAGVKRVDAKVERVLTDDAGTIQTLQLSTGEQLDGDYFIDCSGFRSLLLGQTLNIPYDDWSDLLPCNSAAAVQSEHTGDTPPYTTASAQDAGWIWRIPLQHRMGNGYVFSNDYISDDEACASLLAQLTGKPLHDPRILRFTTGMRQQLWAKNCIALGLAGGFLEPLESTAIHLVTRGVQFLLQLLPTVATTETQCQALAAEYNQRMRADYEEIRDFLVLHYCLTERDDSPFWRYVRDMPLPASLKHRLALFDASGQLPPENDELFRKPSWQAVLHGMGRRPAHYHPAVDQLDAAQVNQALNAARQQMANACQQLPTHNEFIQQFCATPQAAQ

SEQ ID NO: 89496 - protein, 518 aa, unidentified; identical to SEQ ID NO: 88853
  source 1..518: note = Pseudoalteromonadaceae bacterium
  REGION 1..518: note = tr|A0A2D7MWE1|A0A2D7MWE1_9GAMM Tryptophan halogenase; OS = Pseudoalteromonadaceae bacterium OX=2026783; GN = CMK62_02575 PE=4 SV=1

SEQ ID NO: 89497 - protein, 507 aa, Croceicoccus marinus
  REGION 1..507: note = tr|A0A1Z1FBB7|A0A1Z1FBB7_9SPHN Tryptophan halogenase; OS = Croceicoccus marinus OX=450378 GN=A9D14_07240 PE=4 SV=1
MIQDGSSPVRVVVLGGGTAGWMTAASLARLLPGQVTVELIESEDIGIVGVGEATLPHIRGFVERLGIDEASFMKATHATYKLGIDFRDFGAIGESYIHPFGGFGEAVQSVGFHHWWLEQRRLGLGSDIGDYSFAVRAARENRFRPPAQDGSLGSTYGYAYQFDATLFGPFMRQFGLTIGVTRHEGIVTSVKRNGESGDVAALLLKDGRRIEGDLFVDCSGFRSLLLGQEMAEEWEDWTHWLPCDRAAAMPCAHESDDLPPYTTATAMPAGWRWEIPLQHRMGNGYVFSSAHLSEDQACDAIRGAARGKPLADPRILRFRPGRRRRSWSGNVVAVGLASGFLEPLESTSIYLAQMAITNLIELFPADGRIEQRDRDEFNRLVDMEYDRIRDFLILHYHVTRRNDSDFWNHVRTMQVPDSLADKIELWRNTGRVEKYGEGLFFEPSWIAVYVGQGLLPERYDPRVPQVDPVRVRGALDRLKQAIDDEVAAMPGHADYLRSEAARLARAA

SEQ ID NO: 89498 - protein, 527 aa, Pseudoxanthomonas sp.
  REGION 1..527: note = tr|A0A3R8MPI8|A0A3R8MPI8_9GAMM Tryptophan 7-halogenase OS=Pseudoxanthomonas sp. SGD-10 OX=2493089; GN = EIM50_03065 PE=4 SV=1
MDNNRIRKVVIAGGGTAGWVAACALTHQFRDLLEITLVESEEIGTVGVGESTIPTIRTFHRLLQIDEREFMKAVAGSFKLAISFENWKRPGERYFHPFGTTGVNTWSCDFHQFWLESRRRGIHSDLGDYCLETAAARLDRFALFDANDSAQQWSMRWTKAATRLERSDVSYAYHFDAALYAAFMRAKCEGRGLKRIEGKIREVRQDPDNGYVKTLVLEDGQLVEGDLFIDCTGFRGLLIEQTLKTGFEDWNNWLPCNRAVAMQVESDVPPVPYTRAIAHEAGWRWHIALQHRVGCGWVFSSEHMSDDEAAARLRAAYPDDRLVREPWVVPFRTGRRRQAWNKNVVSLGLASSFIEPLESTSIHLTLSAVTRLVQLFPFEGISQAVVDRYNKVSRDELEHIRNFIILHYHLNQRDEPMWKQCREMQLPPELAERIQVFRDTAYAWQGEDELFRLDSWTHCMLGQGVVPKDHHPLTRGLSDADMQTLLQGVRRPIERAVQAMPQHHEFLKRYCPADPSVWHNRRRSTVG

SEQ ID NO: 89499 - protein, 492 aa, Sphingomonas sp.
  REGION 1..492: note = tr|A0A1H8AWD4|A0A1H8AWD4_9SPHN Tryptophan halogenase; OS = Sphingomonas sp. S6-262 OX=1166340 GN=SAMN05192583_1093; PE = 4 SV=1
MIEQTVIVGGGTAGWMAAAAIARGLGRHQRVTLIESDRIGTVGVGEATVPSIRDFNRYLGLDEDQFVSATGGTFKLGIEFQGWNGPGSRYFHPFGFLGPDTSGVDFHHLWLRHVADGGSRDLVAISPEASAARDNRFGRTTPHGALQYAFHIDAARYAALLREQAEANGVVRIEGEVIGVERDPATGDVAAVVLADSRRISADLFVDCSGFRAVLVGEALGSGYVDWSRWLPCDRAVAVPSTRLDTMPPFTRAEVRETGWQWRIPLQHRTGNGYVFASGFEREDDAVRALSARLDTDAIAEPRLLRFTAGHRRAPWSHNCVSLGLAAGFLEPLESTSIHLIQTAIIRLLALFPHRSIDTRLVERFNRDTIAEYEAVRDFVIAHYRTSDGMDTAFWAAVRDQSPPDSLLARLEAFTATGTILYERGDLFGPTNWLAVLTGQGLWPLDHHPIAAAMPQDAVALRLKQLRDRAAAMAASLPSHASFLMDRGVRSL

SEQ ID NO: 89500 - protein, 495 aa, Alteromonas sp.
  REGION 1..495: note = tr|A0A1L8MJ75|A0A1L8MJ75_9ALTE Tryptophan halogenase; OS = Alteromonas sp. V450 OX=1912139 GN=BK026_04440 PE=4 SV=1
MNKTVKNVVIVGGGTAGWISAAVIKRLIGAGVDVTLVESEEIGTVGVGEATIPPIITLNNVLGIEEKEFLRETNATMKLAIKFENWRVQGESYFHTFGAPGKSYAFCHFHHYLKRAQELGLADSIWDYDLNYLACKAGKFAHIKSPDPIIEMPYAYHFDASLYARFLRKKCESMGVTRREGIITDVQQDADSGFITGVTLKDGTDIEGDLFIDCSGFKGLLTQQTLNTGYEDWSHWLPCDRAVAMPSERHEHTRPYTRSIAHSAGWQWRIPLQHRNGNGLVYSSNYYSDEQALDILSSNLDTKPLAEPNFIRFKTGRRRKQWNKNVVAVGLSSGFLEPLESTSIHLIQSAVVRLIHLFPHDGFKQHQIDEYNKQSQLEFEQIRDFIILHYHVNERTDSHFWKDLREMDVPDNLTHKIELFRASGNLFREQNDLFLESSWLQVLIGQGVIQKDYHPLANALSEQKLQELLQNIKRIKNEPIGKIATHDDFLKQFCS

SEQ ID NO: 89501 - protein, 495 aa, unidentified
  source 1..495: note = Alteromonadaceae bacterium
  REGION 1..495: note = tr|A0A2E6SJH7|A0A2E6SJH7_9ALTE Tryptophan halogenase; OS = Alteromonadaceae bacterium OX=1916082 GN=CL590_00740; PE = 4 SV=1
  VARIANT 77: note = Xaa can be any naturally occurring amino acid
  VARIANT 82: note = Xaa can be any naturally occurring amino acid
  VARIANT 114: note = Xaa can be any naturally occurring amino acid
  VARIANT 117: note = Xaa can be any naturally occurring amino acid
  VARIANT 132..133: note = Xaa can be any naturally occurring amino acid
  VARIANT 136: note = Xaa can be any naturally occurring amino acid
  VARIANT 147: note = Xaa can be any naturally occurring amino acid
  VARIANT 180: note = Xaa can be any naturally occurring amino acid
  VARIANT 195: note = Xaa can be any naturally occurring amino acid
  VARIANT 204..205: note = Xaa can be any naturally occurring amino acid
  VARIANT 220: note = Xaa can be any naturally occurring amino acid
  VARIANT 223..224: note = Xaa can be any naturally occurring amino acid
  VARIANT 243: note = Xaa can be any naturally occurring amino acid
  VARIANT 301: note = Xaa can be any naturally occurring amino acid
  VARIANT 319: note = Xaa can be any naturally occurring amino acid
  VARIANT 337: note = Xaa can be any naturally occurring amino acid
  VARIANT 361: note = Xaa can be any naturally occurring amino acid
MPQTIQNVVIAGGGTAGWMTAALLRRVLSPTIRIELVESEQIGIVGVGEATIPPIQTFNQFLGIDEKAFLRETHATXKLAIXFENWKTQGDSYYHTFGAPGTTMGFCSFHHYWXKAXQAGLAQSLWDFDLNXXSCXQGKFNKINTPXPLYEMQYAYHFDSALYGQFLRKTAEQAGVVRTXGIIEHVQQDPDSGFXTALQLTNGXXIQGDLFIDCTGLRGXLIXXALGVSYEDWSHWLPADSAXAVPSERFDKTLPYTRSIAHRVGWQWRIPLTHRNGNGIVYSSQYLSDDEAGQTLLNNLXTKALDTPRTIRFKTGRTXQQWCKNVVAIGLSSGFLXPLESTSIHLIQSGIVRLMKMFPNXGISQAMVDLYNAESKDEFETIRDFIILHYHVNQRDDSDFWRDMRNMAIPDRLAQKIAAFEDTAAIFNEQSDIFRDASWVQVMMGQGLDPKDYHPAADAMDNAQLMDAMQQIYKAKQQPLDKLMSHDEFIKRYTA

SEQ ID NO: 89502 - protein, 496 aa, Sphingomonas sp.; identical to SEQ ID NO: 82659
  REGION 1..496: note = tr|A0A430E9T7|A0A430E9T7_9SPHN Tryptophan 7-halogenase OS=Sphingomonas sp. ABOLH OX=1985881; GN = CA237_04325 PE=4 SV=1

SEQ ID NO: 89503 - protein, 532 aa, Serratia rubidaea
  REGION 1..532: note = tr|A0A3S5AZ98|A0A3S5AZ98_SERRU Geranylgeranyl reductase family OS=Serratia rubidaea OX=61652; GN = NCTC10036_03604 PE=4 SV=1
MSKPIKNIVIVGGGTAGWMSASYLVRALQQQANITLIESEAIPRIGVGEATIPSLQKVFFDFLGIPEREWMPQVNGAFKAGIKFVNWRKPPSPSHNDYFYHLFGNVPNCDGVPLTHYWLRKREQGFQQSMAYACYPQPGALDGNLAPCLHDGSRQMSHAWHFDAHLVADFLKRWAVDRGVNRVVDEVVEVKLNEHGFISNLLTKEGRQLEADLFIDCSGMRGLLINQALKEPFIDMSDYLLCDSAVASAVPNDDTQAGVEPYTSSIAMNAGWTWKIPMLGRFGSGYVFSSKFTSRDQATSDFLNLWGLSDNQPLNQIKFRVGRNKRAWVNNCVSIGLASCFLEPLESTGIYFIYAALYQLVKHFPDTAFDPRLADAFNAEIVYMFDDCRDFVQAHYFTSSREDTAFWLANRHELRLSDAIQEKIERYKAGLPLTTTSFDDATYYDTFDFEFKNFWLNGNYYCIFAGLDMLPDRSLPLLQLRPDSIDKAEAMFASIQHEAERLRTSLPTNYDYLRSLQKGYAEQSRPASPEIL

SEQ ID NO: 89504 - protein, 502 aa, Streptomyces sp.; identical to SEQ ID NO: 87728
  REGION 1..502: note = tr|A0A3S8X3R9|A0A3S8X3R9_9ACTN Tryptophan halogenase; OS = Streptomyces sp. WAC 01438 OX=2203204 GN=DLM49_32970; PE = 4 SV=1

SEQ ID NO: 89505 - protein, 519 aa, unidentified; identical to SEQ ID NO: 83219
  source 1..519: note = Alteromonadaceae bacterium
  REGION 1..519: note = tr|A0A424TAB7|A0A424TAB7_9ALTE Tryptophan 7-halogenase OS=Alteromonadaceae bacterium TMED7; OX = 1986650 GN=CBB67_021865 PE=4 SV=1

SEQ ID NO: 89506 - protein, 530 aa, Nonomuraea sp.
  REGION 1..530: note = tr|A0A429AX30|A0A429AX30_9ACTN Tryptophan halogenase; OS = Nonomuraea sp. WAC 01424 OX=2203200 GN=DMB42_29135 PE=4; SV = 1
MVKNVVIVGGGTSGWMTAAYLRAAFGDRIAVTLVESKNIATIGVGEATFSTIRHFFDYLGLDEREWMPECHATYKLGIRFENWRAPGHHFYHPFERLRVVDGFPLTDWWLGTRPGGDFDRDCFVISWLCEAKRSPRYLSGELFEQDFTENPDERAYRTTLTEQNTQFPYAYHFDAALLASYLTRFGTERGVRHVLDDVVDVRLDERGWIDHVLTKEHGELAGDLFIDCTGFRGMLLNKALSVPFVSYQESLPNDRAVALRVPADMAARGLRPCTTATAMDAGWIWTIPLYGRVGTGYVYAGDYCTPEEAERTLREFVGPEADDLEANHIRMRIGRSERSWVNNCVAVGLSSGFVEPLESTGLFFIQNAIEQLVKHFPADRWDDRLRESYNRQVANVMDGVREFLALHYHAAARSDNDYWKDAATRPVPDGLAERLELWQARLPDSETVFPHYHGFESYSYIAMLLGLGGVPVQAPPALRHFDHGRAERELRLVREQAEALVANLPSQYEYIAALNGDTLPGRRPELSRTR

SEQ ID NO: 89507 - protein, 508 aa, unidentified
  source 1..508: note = Alteromonadaceae bacterium
  REGION 1..508: note = tr|A0A2E7GR55|A0A2E7GR55_9ALTE Tryptophan halogenase; OS = Alteromonadaceae bacterium OX=1916082 GN=CL578_13265; PE = 4 SV=1
MLKAVNKIVIVGGGTAGWLTAAIIAAQHKTDDNQGLQILLVESSDIPTVGVGEGTWPTMKNTLQQIGLKESDVFARCHAGFKQGGKFVDWVHGNGDFYYHPFTVPLGYGRIDLAPYVDNIENYAVESNFQHHVCEAGLAPRSMAEGEYKGQCNYAYHLDAGEFAEVLKEHCKNNLNVSQIIGTVASVNLTPEGAIGSILLSNQQQIDGDLFVDCTGFSSLLLGQALEVPFISADKVLFNDSALALHMPYESGTSPIASHTIATGQNAGWIWDIGLTHRRGVGHVYSSQYLSDDEAEANLRRYLGPTSDDIPVRKINFKSGHRAQVWKQNCVAVGMSAGFVEPLEATAIMLVEISARFIADNIPPDASLTPIIAKRFNQQMAYRWSRIIDFLKLHYMLTKRPEPYWQAHTDPDSIPDSLKEDLALWKFRGPISADFDAAIELFPAASYQYVLYGMGFKPDFSRQAHLYNQQQNAQKVMLRNQQLTQQLLETLPPHREYIERWLSTQSMR

SEQ ID NO: 89508 - protein, 496 aa, Sphingomonas sp.
  REGION 1..496: note = tr|A0A0Q4HV89|A0A0Q4HV89_9SPHN Tryptophan halogenase; OS = Sphingomonas sp. Leaf22 OX=1735687 GN=ASE70_12770 PE=4; SV = 1
MKQGEGRKVRVVVVGGGTAGWMTAAGLVGLLPAACDVTLVESEAIGIVGVGEATLPHLRLYLERLGIDERAFMAATDATYKLGIEFRDFGRIGDRYIHPFGTYGRPLAGVAFHHYWLRRDRAGAVQPIGAFSAGVVAAERRRFERPGNDPGDPTTSFGYAYQFDATRFAPFLRDWAEARGVTRIEGRIVGADRQGDSVAAVELDDGRRIEGDLFVDCSGFRSLLLGETLAEPWEDWSHWLPCDRAVAVPCASPSGPIEPYTRATAMPAGWRWRIPLRHRVGNGYVYASAHCSDDEAVAALLAGLDGEPLADPRPLRFRAGRRRRSWSGNVVAVGLASGFLEPLESTSIYLVQAAITSLIEHFPDTRVAPADRDGFNAAIDAEYDRIRDFLILHYHATERADSPFWNHVRTMTIPDTLADKLALWRGSAQVARYGHGLFLEPSWVAVYLGQRVVPTGWDPRADQPDAAGLDRALGSLAQAIADRVRAMPGHDAALGL

SEQ ID NO: 89509 - protein, 506 aa, unidentified
  source 1..506: note = Alteromonadaceae bacterium
  REGION 1..506: note = tr|A0A2E7GNW2|A0A2E7GNW2_9ALTE Tryptophan halogenase; OS = Alteromonadaceae bacterium OX=1916082 GN=CL578_10730; PE = 4 SV=1
MQTSLPFKKIIIIGGGTAGWMSACYLAKMWQDYDLEIKIIESDAIGTIGVGEGTTPSIKGFFEQLGIEAKEWMPACNATYKTGIRFVNWSSDPNYKSYFHPFYSQLDEYFQHEFFQNIQLKHRGFDVHAHPDQYLLASELAQQRKAPIEPEHYPFDMAYAYHFDATLLAQFLKKKALQWNVTHQVATINEVKQKDDGSIASVVTESGATIEADFFVDCSGFRSLLLGKSLKVPYNSFADSLLNDSAVTIVTEREDTTPSMTLSTALSCGWAWRIPLTNRFGNGYVFSSRFQSPQDAEEEFRRHLALPESAQFNHLKMRVGHFAKGWEKNVLAVGLSQGFIEPLEATALHFATQSVVDFVSAVDNSTDQAGYSNQTAYNNKLSDRFSCVRDYIELHYLANSRHDTPYWKAARSHTPSRRLQRILTTWHQGKSVPRVLDEEAVSLQLFGHESWLCLLAGKGVFPESEHTIDALPTAMRIDMQKIKHFVETSAKHYPLHDDALAALKQS

SEQ ID NO: 89510 - protein, 492 aa, unidentified
  source 1..492: note = Alteromonadaceae bacterium
  REGION 1..492: note = tr|A0A2E9K370|A0A2E9K370_9ALTE Tryptophan halogenase; OS = Alteromonadaceae bacterium OX=1916082 GN=CL587_04360; PE = 4 SV=1
MNNKKQRVVIAGGGTAGWMAAAALTRLLHNRVDVTLVESSDIGTVGVGEATIPTLVFFHQLLKIDEKAFMAATNATFKLGINFENWRTTQDSYLHAFGATGQDCWAAGFQHFWTRGRQLGLSGDFGQYCLERVAAEAHKFAHLPKNGLNYAFHIDAGRYAGFLRQLAEEAGLKRIDARIEKVVTRPADGFITQLQLDNGDRVDGDLFIDCTGFRGVLIEETLHTGYTDWSHWLLCDSAVAVQAESHAPPLPYTRCIAHEEGWQWRIPLQNRTGNGLVFCSKYLSDDAATQRLTGNIEGAALNDPKVIKFRPGRRVKQWNRNCVSLGLASGFIEPLESTSIHLIQQGIVRLLRMFPHGEVQQSVVDEFNRQSVDEIEHIRDFIILHYHVTERTDSAFWRHCKQMDVPDSLARRLTIFRESGQIHRKNNELFDDSWQQVMIGQGLLPEAYHPIADMMSEQELQNFLTHIKTNIDRTVAGLPTHRQYLNSLFNRA

SEQ ID NO: 89511 - protein, 494 aa, unidentified
  source 1..494: note = Alteromonadaceae bacterium
  REGION 1..494: note = tr|A0A2E7GRH7|A0A2E7GRH7_9ALTE Tryptophan 7-halogenase OS=Alteromonadaceae bacterium OX=1916082; GN = CL578_12125 PE=4 SV=1
MNSEKVKNVVIAGGGTAGWMAAASLSKLLGKSLNITLVESDEIGTVGVGEATIPPIRTLHKLLNIDEQAFMRATNSTFKLGIEFSHWGQKSDSYIHSFGVTGKECWAGEFHHFWLRGKELGINVPFGDYCYELQASKQGKFAFSANSPMNFAYHLDATLYAQFLRDFCADVVTRIEGKIATVNKHTNNGFIRSLTLESGQEVEGDFFIDCTGFKGLLIEGALHTGYEDWSHWLPCDSAVAVQTQSTSDPLPYTRATAHDFGWQWRIPLQNRVGNGMVFCSRYASDEQAKQALLANLEGDPITEPRVIKFKTGRRRKGWNKNCVALGLASGFVEPLESTSIHLIMTGIVRLMRLFPFDGVRQSGIDEYNEKLTSELHSIRDFIVLHYKVTQRDDSDFWRHCQSMEVPDTLAHKIHLFKETGRVFLDDGDIFRVDSWTQVMLGQGLEPKQYHRIVNEMSEEELTRFLAGLRSAIEQRVNQLPSHQQFITRYCNASA

SEQ ID NO: 89512 - protein, 490 aa, Sphingomonas sp.
  REGION 1..490: note = tr|A0A1H7ZET7|A0A1H7ZET7_9SPHN Tryptophan halogenase; OS = Sphingomonas sp. S6-262 OX=1166340 GN=SAMN05192583_0652; PE = 4 SV=1
MADRVRRVVIVGGGTAGWMTAAALSKALGKTDTAITLIESEEIGTVGVGEATIPTIHWFNTLVGLDEARFMADTGATWKLGIEFRGLQGEGSAYFHPFGTFGGPGDAAMFPHRLIRAWNVGEAAPIEEYSLTTQVARAGRFAKPVPDPRSLLSTLGYAFHFDAARYAAHLRVLAESRGVVRHEGRVVQVDRDAATGNVTTLQTATGDAIGGDLFIDCSGLRGLLIERAMGAGFEDWSHWLPCDAAWAAPTRAMERRPLYTQASADTAGWRWRIPLKHRTGNGYVFSSRFEEPDAARDRLLAALGEAVLAEPRLIRFTPGRRRRAWVGNVVAIGLSAGFLEPLESTSIHLIQSGIGRLLSLFPRADASPLLAEQYNRLSAREFEEVRDFIILHYHRTQGRTEPLWRYCQQMPIPDTLASRIDQFRASGRLMLATDDLFRDASWFAVLTGQGVRAEDHNPLLDVISDADNARQLAAMRQAIRSAALQVPLAQ

SEQ ID NO: 89513 - protein, 508 aa, unidentified; identical to SEQ ID NO: 88857
  source 1..508: note = Pseudoalteromonadaceae bacterium
  REGION 1..508: note = tr|A0A2D7MYT5|A0A2D7MYT5_9GAMM Tryptophan halogenase; OS = Pseudoalteromonadaceae bacterium OX=2026783; GN = CMK62_07010 PE=4 SV=1
  VARIANT 33: note = Xaa can be any naturally occurring amino acid

SEQ ID NO: 89514 - protein, 530 aa, Lechevalieria fradiae
  REGION 1..530: note = tr|A0A1G8BL30|A0A1G8BL30_9PSEU Tryptophan halogenase; OS = Lechevalieria fradiae OX=200378 GN=SAMN05216553_119115; PE = 4 SV=1
MEDHRISNVVVLGGGTAGWMTASYLGKALGRYATITVLEAPSIPKIGVGEATVPNLHKTFFDFLGIPEEEWMRECNASFKMAVKFVNWRTPGEGEPVGRQLRGRPDHYYHLFGLLPTHQNLPLSHYWAAKSLGGQTTEQFDYACYRESPIIDARLSPRFADGTKWTNYAWHFDAHLVADFLKRFAIEKQGVVHVEDEMVDATIDQRGHITSLRTKAGRTIEGDLFVDCSGFRGLLINKLMREPFLDMSDHLLNDSAVATSVPHDDEAHGVEPATSAIAMKSGWTWKIPMLDRFGTGYVYSSRFTDPDEATKDLCALWDLDPEEQPLNHVKFRVGRNRRAWVRNCVSIGLSSCFLEPLESTGIYFITAALYQLGKHFPDKRFDPVLIESFNREIETMFDDSRDFLQAHFTLAPRRDTPFWRACKDLVLPEDIQHKIAQYRAGLAVNMPVTDEATYYENFEAEFRNFWTNSSYYCIFAGLDVLPEHPLPALAFRPDAVEGAEPVFAQIKQKQAELLKTLPTTHEYLRELHGR

SEQ ID NO: 89515 - protein, 516 aa, unidentified
  source 1..516: note = Permianibacter aggregans
  REGION 1..516: note = tr|A0A4R6UFQ0|A0A4R6UFQ0_9GAMM Tryptophan halogenase; OS = Permianibacter aggregans OX=1510150 GN=EV696_11946 PE=4; SV = 1
MPVSEREQSMNTNAIKNVVIVGGGTAGWMTAAALSKVFGQRLSIHLIESEEIGTVGVGEATIPQIRVFNGMLGIDENEFVRSTQGTFKLGIEFADWLRPGHRYMHAFGAVGGRDLGSVPFHQYWLKMRLVNQAAALDDYTFNSVAAYQNKFMRSVNMPNSPLASIFYAFHFDASLYARYLRAYAETRGVRRTEGKVMHSRLRGQDGFIEAVTLESGEVVNGDLFIDCSGFRGLLIEQAMETGYIDWSHYLPCDRAVAVPSESVTPLLPYTRSTARQAGWQWRIPLQHRIGNGMVFSSNFLSEEKANQQLLDNLDGKALSEPRVLRFKTGMRRKFWNKNCVAIGLASGFLEPLESTSIHFIQSSIAKLVALFPDKQFSDVDIHEYNRQTRYEFERSRDFLLLHYWANERDEPFWQYFRHLKLPETLQHKIELFRSQGRVFKEGDELFGEASWLQVMVGQNVMPERYHPVVDLRSGDDVHSMLSGVNKLLRDCVSVMPDHAEYVKKSCRGISESVKTA

SEQ ID NO: 89516 - protein, 521 aa, unidentified; identical to SEQ ID NO: 83491
  source 1..521: note = Alteromonadaceae bacterium
  REGION 1..521: note = tr|A0A2D9KAM8|A0A2D9KAM8_9ALTE Tryptophan halogenase; OS = Alteromonadaceae bacterium OX=1916082 GN=CL582_02165; PE = 4 SV=1

SEQ ID NO: 89517 - protein, 493 aa, Sphingomonas sp.; identical to SEQ ID NO: 82619
  REGION 1..493: note = tr|A0A430E6L9|A0A430E6L9_9SPHN Tryptophan 7-halogenase OS=Sphingomonas sp. ABOLH OX=1985881; GN = CA237_09695 PE=4 SV=1

SEQ ID NO: 89518 - protein, 507 aa, unidentified
  source 1..507: note = Alteromonadaceae bacterium
  REGION 1..507: note = tr|A0A2E9K4K6|A0A2E9K4K6_9ALTE Tryptophan halogenase; OS = Alteromonadaceae bacterium OX=1916082 GN=CL587_06995; PE = 4 SV=1
MSAPHQIVIAGGGTAGWIAACLMAHHWRDKPVSITLVESADIATVGVGEGSTPTLKRFFSDLNIAESDWMPACNATYKVNIRFKGWSPQSGPASYSHPFISQPDAFTERPFHVNCHNRRRGLDVNVTPENFLLNGWLAGAGKAPVAPPSFPFRIEYGYHFDSALLGRYLKRHAVSLGVHHIEGKIDDVITSLSGHITSLKLQSGEMVEGDFFIDCTGFRSLLLQQTLDIRFNPFSENLFNDRAAVLATPAQAQLPVETSSTALSNGWAWSIPLSSRTGNGYVFSSAHLSDDKAEAELRRHLSVQDNDGDVRFLSMRVGQVEKHWHKNCLALGLAQGFIEPLEATALHLVQLSVEFFIEDYEQGNFSPALQDKFNKDVTERFSGVRDYIVAHYKLNTRDDSAYWRENRNNMALSESLLQLLDVWYRKGDFPAEIQRQNIQSHFGITSWHCLLAGYGIFPPLAKQQPGRGDLYKDNDTEAFFKGCLLNFPDHSAYLKDVARRSPAHQLV

SEQ ID NO: 89519 - protein, 520 aa, unidentified; identical to SEQ ID NO: 86106
  source 1..520: note = Alteromonadaceae bacterium
  REGION 1..520: note = tr|A0A2D5M4Y7|A0A2D5M4Y7_9ALTE Tryptophan halogenase; OS = Alteromonadaceae bacterium OX=1916082 GN=CL579_14120; PE = 4 SV=1

SEQ ID NO: 89520 - protein, 498 aa, Simiduia agarivorans
  REGION 1..498: note = tr|K4KM68|K4KM68_SIMAS Tryptophan halogenase; OS = Simiduia agarivorans (strain DSM 21679 / JCM 13881 / BCRC 17597 / SA1) OX=1117647 GN=M5M_10730 PE=4 SV=2
MQPKRLVIVGGGTAGWMAANLFAARWASAGVHITLVESPDVPTVGVGEGSTPTLKRFFQAIGVQESDWMPAANATYKVNIRFKDWAPDAGAVDYSHPFISQPDTFTQRDFLINARTRRMGLDTHTTPADFLLNGVLAKHGKGPITPDNFPFRIEYGYHFDAGLLAQHLRRTAIDRGVNHLTAHIDTVGQSDDGAITRLHTRDGQSIDGDFFIDCSGFKAMLMRETLGVAHKSFNANLFNDAAVVAATEALHPLPPETLSTALSAGWAWRIPLTNRTGNGYVYSSDFISREQAEQEFRQHLGLSEQQECRHLRMQVGQLEKHWHKNCLALGLSQGFIEPLEATALHLVQICTELFMDLFEKAGFSSQHAQEYNQRVSDRFERVRDYIVAHYKLNNRNDSDYWRACRAMTDLSPSLQGILDCWYKAGDLETEIQRQGIENHFGAVSWNCLLAGYGVFPKLAPTQPGTGDLYQEKRIAQFLEGCALNFSDHAHNLQLLHKK

SEQ ID NO: 89521 - protein, 486 aa, Simiduia agarivorans
  REGION 1..486: note = tr|K4KJB6|K4KJB6_SIMAS Tryptophan halogenase; OS = Simiduia agarivorans (strain DSM 21679 / JCM 13881 / BCRC 17597 / SA1) OX=1117647 GN=M5M_05400 PE=4 SV=1
MAAASLARHFQHTPLTITLVESPEIGTIGVGEATIPTIRRFYRNLGLSDGQVMMATQATAKLGIAFDGWRAPGEQFIHPFGRFGQDLNGIGFHHYWQRLASMGDTRPLSDYCLPIQLAEANKFTTPAPNPSNSLGVFDWALHLNATAFAKLLKETALQMGVQHVEGNITQVQLESDNGFISALQLADGRQLPGQLFIDCTGFRARLLGEALAVPFESWQDQLLCDRAVVVQSELASPTNPPSFTRARAMRAGWQWRIPLQSRQGNGLVYSSHFLSEDEATAHMLDDCGASPLQEPRHLRFTPGMRKVSWEKNCIALGLAAGFLEPLESTSIALIETAIEKIKLLFPNADCDRAIIDEFNNMTRLEYERVKDFILLHYVLNGRQGEAFWQACREVHQPDTLKNKLSLFKARGHLVKYRWEMFQPASWLALFSGFGFQSDMYDPAADAIPEQQLKSIMDSMAKGIQTAVADSPSHQAFLQHLKQAAGA

SEQ ID NO: 89522 - protein, 537 aa, unidentified
  source 1..537: note = Alteromonadaceae bacterium
  REGION 1..537: note = tr|A0A2E7GN06|A0A2E7GN06_9ALTE Tryptophan halogenase; OS = Alteromonadaceae bacterium OX=1916082 GN=CL578_08875; PE = 4 SV=1
MTFNEQLNREKYVQLNSQVKDIVIVGGGTAGWLTAGLLASRLSSRVKSGELNITLCESPDVPTIGVGEGSWPTLRSTLQSIGVAETDFIHQCNVSFKQGSRFVNWQHDCPSQYDHPFDVPQQASQGAEAQHWLSTQSQVPFSQAYCLQTELANNNLAPKLITTPEFTGFANYGYHLDAVLFAEFLREHCIQHLQVKHVLASVKQVEQDENGDITCLHLAPPSQNNSNHPDYINGDLFVDCTGFRALLLGDTLGVCNTQVDDVLFANNAIATQLPYVEQNSPIASFTESTAQDNGWIWDIGLPNRRGIGYVYSDRYCDEQDAHRTLVKFLQKTQQNTDTLSYKQIHFTPGYKQQFWKNNCVAIGLSAGFIEPLEASALVLVEMSANMLAEQLPNTRSCMDVIAKRFNQTFTYRWQRIIDFLKLHYVLSRRSSAFWQDNRAQSSVPDSLKELLALWQHKVPDMNDFPARDEVFQAASYQFVLYGAGFKSQLLSTPDKNLLEAAEQQFLSIRGYTSQLTNKTINNRDLLSKIYRYGLQKR

SEQ ID NO: 89523 - protein, 513 aa, Sphingomonas sp.
  REGION 1..513: note = tr|A0A430E6F9|A0A430E6F9_9SPHN Tryptophan 7-halogenase OS=Sphingomonas sp. ABOLH OX=1985881; GN = CA237_09710 PE=4 SV=1
MRVTQRVRQIVVVGGGTAGWLAACRIAAAADPHAAEPLAVTLIESPDVATIGVGEGTWPTMRGTLARIGIDEATFLRSADASFKQGSRFDGWRTGAPDDFYYHPFTAPADVPAADLLRAWDGGRFAEAVCAQPAVCADDLAPRQPGMAPYAGALNYGYHLDAGKFATLLRDTACNRLGVRHVRDHVTGVEAADDGAITAVLTRGSGRIAGDLFLDCTGHAALLIGGHFGIGTIDRTPILFNDRALAVQVPVAPDSPIASQTNATAHDAGWIWDIGLPDRRGVGCVYASDFLSDDAAEATLRQYLSMTAPGAEAAALAFRQLRFRSAHRERFWQGNCVAIGLSAGFLEPLEASAIVLIELSIDALLDGFPADRSAMPLLARRFNDLFRYRWDRIVDFLKLHYALSERDTPYWCAHRDPGSWTESLRDRMALWRMQPPSPADFAHADEIFPAASHQYVLYGMGVSPPPPGALRPHPGTASALHQVRQRARTLAASLPTNRAYLRALTPPTGMAHV

SEQ ID NO: 89524 - protein, 513 aa, Sphingomonas sp.
  REGION 1..513: note = tr|A0A0Q4R1P4|A0A0Q4R1P4_9SPHN Tryptophan halogenase; OS = Sphingomonas sp. Leaf242 OX=1736304 GN=ASF09_02360 PE=4; SV = 1
MHQIRNIVIVGGGTAGWLTAGVIAARHKGQREHGFTVTLVESPNIPTIGVGEGTWPTLRATLRKMGVSETELFRHCNAAFKQGARFNRWTTGAVDDGYYHPLMLPQQFGSLNLAPHWLAEDGADSFCDAVTPQGRICDEGLAPKTMATPEFDGVANYAYHLDAGKFSHFLQRHCCDTLGVHHVLADVTEVILDETGDIARVETAQGVSIEGDLFVDCTGFAAKLIGDAMGVPFRCCTDTLFCDTALAVQLPYERPDDPIASHTISTAQSAGWIWDIGLPHRRGVGHVFSSSHIDVDAAERELRAYIGPAGKDLPVRKLSIRAGHRETFWKGNCVAVGLAAGFLEPLEASAIVLIELSAKMIAEQMPVCREVMDVVANRFNDTTTYRWGRIIDFLKLHYTLTKRTDTDFWRDNVRPETIPDRLRGLMELWQYQSPWIHDEFDRAEEVFPSASYQYVLYGMGARTTVMPGTIEADAELARRARRENHFQTQRMMSSLPGHRDLIDRIVKHGLQPI

SEQ ID NO: 89525 - protein, 520 aa, Simiduia agarivorans
  REGION 1..520: note = tr|K4KRL8|K4KRL8_SIMAS Tryptophan halogenase; OS = Simiduia agarivorans (strain DSM 21679 / JCM 13881 / BCRC 17597 / SA1) OX=1117647 GN=M5M_18325 PE=4 SV=1
MSSNEIEQILVLGGGAAGWLTAALLAAEHGLKQGGQCRVMLVEAPGIPTIGVGEGTWPSMRDTLRRIGLPEIALFSHCDASFKQGSQFIGWRDGAAGDSYYHPFSLPHGYFQMDLGPYRQGRDYAYGVSAQAAACDAGRAPKQLATPEYAGVLNYGYHFDAGKFGECLREHCVQQLGVAHVQAEVVAVEADSGGFITGLKTSAGDTLAADFFVDCSGSASRLVGEHYRVPWVSKTQVLFNDRAIATQLPYVNAQASIASVTKACAHANGWVWDIALPSRCGIGFVYSSAHQTESEAESAFRQFLQTRAVSAGLDAERIVPDLTLRKLKFEPGHREIFWTHNCVAVGMSAGFIEPLEASALALVEQSAAAIRDFLPVQKSGLRAAANQFNTRFQQHWQSIVDFLKLHYVLSKRTERYWSDHRDQASVPDSLAEALALWRDRAPMGRDIAEAQPLFPAASYRFVLQGMQAECSYLRSPRADRNNAMAGQLLNEVAQQTRRCLDGLPDNRALIDAWLAGPGAH

SEQ ID NO: 89526 - protein, 500 aa, unidentified; identical to SEQ ID NO: 86829
  source 1..500: note = Alteromonadaceae bacterium
  REGION 1..500: note = tr|A0A2D9KL81|A0A2D9KL81_9ALTE Tryptophan halogenase; OS = Alteromonadaceae bacterium OX=1916082 GN=CL582_20905; PE = 4 SV=1

SEQ ID NO: 89527 - protein, 513 aa, unidentified; identical to SEQ ID NO: 83173
  source 1..513: note = Alteromonadaceae bacterium
  REGION 1..513: note = tr|A0A424TWT6|A0A424TWT6_9ALTE Tryptophan 7-halogenase OS=Alteromonadaceae bacterium TMED7; OX = 1986650 GN=CBB67_005590 PE=4 SV=1

SEQ ID NO: 89528 - protein, 496 aa, Sphingomonas sp.
  REGION 1..496: note = tr|A0A0Q4QT61|A0A0Q4QT61_9SPHN Tryptophan halogenase; OS = Sphingomonas sp. Leaf242 OX=1736304 GN=ASF09_14850 PE=4; SV = 1
MTSPTAPVPLKTIVIVGGGTAGWIAAAMLARFVPRTAKIRLIESDAIGTVGVGEATIPQIRLLTAALGIDENAMLAATQGTFKLGIEFVDWTGPGSRYMHAFGAVGRGLGVVPFHHHWLRAQASGTAAPLGDYIASARAAADARFDRHPDLAYAYHFDATLLARGLRGLAETAGVDRIEGRIVTAQRDGETGDLTGVTLDDGRTVEGDFFLDCSGFRSLLLGEALGIGFEDWSHWLPCDRAVAVACEATTPLLPCTRATARPVGWQWRIPLQHRTGNGLVYAAAHLSDDEAAARLLANLDGAAIGDPRPLRFATGKRATFWERNVVALGLASGFMEPLESTSIHMVQSAVARLLSLFPSAGDNAAARTAYNRQTHVEYDTVRDFLILHYHANRRPEPFWQRCRDMPLPDRLAEKIAQFRAAAILTQDVADLFTEPAWLQVMIGQGINPATWSPLAEALSPDQLAEFLADIHDRHAATARALPAHADTVARHCRAKR

SEQ ID NO: 89529 - protein, 547 aa, Sphingomonas sp.
  REGION 1..547: note = tr|A0A0Q4R645|A0A0Q4R645_9SPHN Tryptophan halogenase; OS = Sphingomonas sp. Leaf242 OX=1736304 GN=ASF09_15490 PE=4; SV = 1
MNEHSIRRVVIVGGGTAGWMAAAAFARFLNNGYTEITLVESEEIGTVGVGEATIPPLINFNQMLGLDENAFLAATSGTFKLGIEFVDWGALGERYFHPFGNYGHDLQGVHFHQLWLREKARRPIDDISVWSMSAMAAANGKFGRATGDARSPVRELFYAFHFDASLYARYLRDYAERAGIVRIEGKIAEVNQRPADGYVAAVTLEDGRRIKGDLFIDCSGFRGLLIEETLHTGYESYAQWLPCDRAVAVPCALPNPGEPDAFTRSTAHKAGWRWRIPLQHRMGNGLVYCSKYLGDDEAEAQLLASLEGEQLAEPRRLQFTAGRRRDCWNRNVVALGLSSGFIEPLESTSIHLVQAGIQRLIALFPDKRFDPVERDEFNRQMHDLYEDIRDFIVLHYKATRRDDSPFWNQVRTMDVPESLQRKIDLFAGKGRLFREGYDLFSNPSWVAVCLGQGITPEGWEPAADALDEQKVASALEQMRRGYLDTAQRLPTHGEFLRRTALSPLAAQAAPSSSAPASAPAPTSSDDVPFFAFTAESPFDVGGGGSPL

SEQ ID NO: 89530 - protein, 537 aa, unidentified; identical to SEQ ID NO: 86128
  source 1..537: note = Alteromonadaceae bacterium
  REGION 1..537: note = tr|A0A2D5LY31|A0A2D5LY31_9ALTE Tryptophan halogenase; OS = Alteromonadaceae bacterium OX=1916082 GN=CL579_01895; PE = 4 SV=1

SEQ ID NO: 89531 - protein, 515 aa, unidentified
  source 1..515: note = Alteromonadaceae bacterium
  REGION 1..515: note = tr|A0A2E6SNW6|A0A2E6SNW6_9ALTE Tryptophan halogenase; OS = Alteromonadaceae bacterium OX=1916082 GN=CL590_08385; PE = 4 SV=1
  VARIANT 111: note = Xaa can be any naturally occurring amino acid
  VARIANT 113..114: note = Xaa can be any naturally occurring amino acid
  VARIANT 118: note = Xaa can be any naturally occurring amino acid
  VARIANT 138: note = Xaa can be any naturally occurring amino acid
  VARIANT 144: note = Xaa can be any naturally occurring amino acid
  VARIANT 208: note = Xaa can be any naturally occurring amino acid
  VARIANT 218: note = Xaa can be any naturally occurring amino acid
  VARIANT 220: note = Xaa can be any naturally occurring amino acid
  VARIANT 257: note = Xaa can be any naturally occurring amino acid
  VARIANT 289: note = Xaa can be any naturally occurring amino acid
  VARIANT 295..296: note = Xaa can be any naturally occurring amino acid
  VARIANT 304: note = Xaa can be any naturally occurring amino acid
  VARIANT 316: note = Xaa can be any naturally occurring amino acid
  VARIANT 319: note = Xaa can be any naturally occurring amino acid
  VARIANT 349: note = Xaa can be any naturally occurring amino acid
  VARIANT 372: note = Xaa can be any naturally occurring amino acid
MNTASKKTRVVIVGGGTAGWLTAGIIAARHPLLGENSNTELVLLESPDVKNLGVGEGTWPTMRDTLKQIGLSERAFLSCCDASFKQASKFAGWRQNPAQHYYHPFTAPAGXGXXSLAXAWIEAGYPQDFESWVSAQGXACERQXSPKLPQLPEYAFTYNYGYHLNAGKFVALLQAHCTEKLGVTYRQGHVAHIVSHDSGAIKALQLEXGNTVEGDLFXDXSGFAAVLMGKHFQIPFVSQRGVLFNDTAIAAQVNHAXPQTPIASATVATAQTSGWIWDIALQHRRGIGXVFASEXXAVEDAEQXLRNYIANDPNLXQDXVTTRVIKFDPGHRKYFWHHNCVAIGVSAGXVEPLEATALVLIEKSAEWVAEQXPRSPSAMPVLAKRFNQLTNERWQEIIDFIKLHYVLSDRTDSAYWRAHQQHESWTDSLSEALQLWQSQPPGLYESSNRQELFSSASKQYVLFGMGFRAEQWQSCGRLALQQPLIERFRREVQQQVNRVNAQLLTNREYLQKLRK

SEQ ID NO: 89532 - protein, 496 aa, Simiduia agarivorans
  REGION 1..496: note = tr|K4KR94|K4KR94_SIMAS Tryptophan halogenase; OS = Simiduia agarivorans (strain DSM 21679 / JCM 13881 / BCRC 17597 / SA1) OX=1117647 GN=M5M_18335 PE=4 SV=1
MKKPIRKVVIAGGGTAGWMTAAALAKLMGKNLDITLVESEQIGTIGVGEATIPTLVFFNRLLGIDEAEFLAATQGTYKLGIRFENWRDVGKDYLHAFGVTGKDCWACGFQHFWLKGRELGLASDFGDYCLERRAAETHKFSHLPNNGLNYAFHIDASRYAKYLRGFAEHFGARRVEGKINRVAVHPDSGYIQSLTLDNGQTVEGDFFIDCTGMRALLIEKALHTGYESWTHWLPCDSAVAVQTAKVQEPIPYTRSIAHDTGWQWRIPLQTRVGNGYVYASSFEDDVHARERLLGNIEGEQLTDPLLIKFQTGRRRKQWHKNCLAVGLSSGFLEPLESTSIHLIQQNIVRFLRFFPQQGILDSEVDEFNRQADFEMERIRDFIILHYKVTERTDSEFWRHCRNMAIPDTLANKIDVFRETGHVFREGSELFVDSWQQVMLGQGLTPERYHPLVDTMSQQELADFLSQVKAQVDQTVDKLQSHNAYLAQFTANAKPPM

SEQ ID NO: 89533 - protein, 505 aa, Sphingomonas sp.; identical to SEQ ID NO: 82640
  REGION 1..505: note = tr|A0A430E3Z6|A0A430E3Z6_9SPHN Tryptophan 7-halogenase OS=Sphingomonas sp. ABOLH OX=1985881; GN = CA237_14265 PE=4 SV=1

SEQ ID NO: 89534 - protein, 505 aa, Simiduia agarivorans
  REGION 1..505: note = tr|K4KGG8|K4KGG8_SIMAS Tryptophan halogenase; OS = Simiduia agarivorans (strain DSM 21679 / JCM 13881 / BCRC 17597 / SA1) OX=1117647 GN=M5M_04370 PE=4 SV=1
MTKRIIIVGGGTAGWLAANHLAVELRGEPVEIMLIESDEIGIIGVGEGTVPHIRRSLKKFGIPESELLARCDVTFKQGIRFDGWMSGTDSSYFHPFASPFPNGYDATSCLLSQPDVRFDSVSAAAPLMESGRSPKLISSSEYEGVVDYAYHFDAKKFGELLADNAVSRLGVKRHTATVREVRLSHSGEIESLVAADGKVFTADFFVDCSGFSALLLGGALSIPFMDQSSRIQTDTVLATQQLATPEHIPCFTLAKAHEAGWLWDIPLQSRRGVGFVYSSQSIDRDQAVVALANYCQVVPEDLTYRMLPMRIGYRNAFWSKNCASLGLSQGFVEPLEATSILVTDFSAELLARNIHFGADGMNAAAQYCNRVVRYVWERIIDFVQLHYCISDRRDTDFWRAVTAPSAMSDTLAERLSIWRSRTPLKSDFFSRFDLFDVDNYLYVLYGMKYPTNLKTSTPYEEEFLRQQLVAHQSQAGQWISQLLAHREWLNRFNAAYAAAHAKGQY

SEQ ID NO: 89535 - protein, 412 aa, unidentified
  source 1..412: note = Bacteroidetes bacterium
  REGION 1..412: note = tr|A0A136NGF1|A0A136NGF1_9BACT Tryptophan halogenase; OS = Bacteroidetes bacterium OLB10 OX=1617421; GN = UZ10_BCD003002034 PE=4 SV=1
MEQVDVLIIGAGPAGAVSSAWLNKNKYKVLVLEKQKFPRFVIGESLLPHCMDHLAEVGFIDNVKKHGFQIKTGASFYRGDHKTDFLFADQFTNGWSWTWQVKRADFDNILINSAIEQGVPVKFECEVKTVESNDTEQVTTYTDNSGKTHTVKSRFIIDASGYGRVLPRMFNLDAPVSTPPRGAVFCHIQDTKRKPEESGNIFIHSFNENSAWIWVIPFSDQTTSIGVVSDSSLVQDFYADNGAKFLQHIRNFPELKGRFTSEKTVFEPRTILNYAVGVKQLFGPGYVLCGNSTEFLDPVFSSGVTLATGSGIRAAKLTHKTLSGEKVDWMNDYENILRRGIDVFRTFVLGWYNGDMQTIIYSKTMDPELKRQICSVLAGYVWDENNPVVKKHKTLVPTLAKVIKINQSDPVQ

SEQ ID NO: 89536 - protein, 499 aa, Ponticaulis sp.
  REGION 1..499: note = tr|A0A2E7F220|A0A2E7F220_9RHOB Tryptophan halogenase; OS = Ponticaulis sp. OX=2020902 GN=CMK08_15275 PE=4 SV=1
MQKKIKNYVIAGGGTAGWMAAALLSKTMGNEISITLVESEMIGTVGVGEATIPPILRYNNILGVNEAEFMRETMATFKLGIEFEHWKDVGHKYLHSFGHAGKDHWTAGFQHFWLAGKKRGISTDYGDYCLEVLAANQNRFAQLPDNGINYAYHLDASRYAAFLRRFAEKHGVVRREGKIGDVRLNAETGNIEALQLEAGDVIEGDFFIDCTGFRSLLMGRALHVGYDDWSHYLPCDSAVAVQTKSVGAPVPYTRSIAHAEGWQWRIPLQHRTGNGLVYCERYLGRDEAAERLLANVEGETLTDPLHIRFQTGARRKQWHKNCVVVGLAGGFMEPLESTSIHLIQKSIMRLVRLLPTTHLVDADIREFNDQTFEDMITIRDFLILHYHVTERRDSAFWRFCAEMDIPDSLQQKIDLFCESARVFRKGEELFAENSWTQVMMGQGLEPKSYHPIADKMTDDELTYFLNQIKTDASRAAARLPKHEEYIRQYCASADVMEMA

SEQ ID NO: 89537 - protein, 484 aa, unidentified
  source 1..484: note = Moraxellaceae bacterium
  REGION 1..484: note = tr|A0A4Q6E3J7|A0A4Q6E3J7_9GAMM Tryptophan 7-halogenase (Fragment) OS=Moraxellaceae bacterium; OX = 1889775 GN=EOO68_13910 PE=4 SV=1
MNKPVKKIVIIGGGSAGWLTAGIIAADHIVNKETGIEVILIESPDIASIGVGEGTWPSMRATLKKIGISETQFIRECDASFKQGSKFINWIKGEGEFYYHPFTLPEKYSEINLAEHWLSLKSDMSFSDAVCPQSFLSDRHLAPKQMATPEYAAVVNYGYHLDAGKFAVLLKKHCIDVLGVTYISDNVGHINSTESGDIASLSTRDNGDIEGDIFIDCTGFASLLIGQHYQIPFKEQRNILFNDSALAVQVPYVNPEGDIESCTHSTATACGWIWDIGLPTRRGVGHVFSSAHTTDENAEHLLRKYLEPSIGKAAADKVSPRKLTFNPGYREKFWHKNCVAVGIAAGFIEPLEATALVLIEESAHMISQQLPVNREIMDITASRFNTKFAHHWKKIIEFLKLHYVLTQRTDSDYWRDHCNPDTMTESLKDLLALWKYQVPWTYDTTHVGEMFPSASFQYVLFGMGFDNNYGESSRRLYKSGAEMA

SEQ ID NO: 89538 - protein, 504 aa, Sphingomonas sp.
  REGION 1..504: note = tr|A0A1H8DJ89|A0A1H8DJ89_9SPHN Tryptophan halogenase; OS = Sphingomonas sp. S6-262 OX=1166340 GN=SAMN05192583_1926; PE = 4 SV=1
MAEPDLQRVVVVGGGTSGWMTAAALVRLLPHRCQVHLVESEAIGIVGVGEATLPHIRAFNERLGIAEAEFMAATRATFKLGIEFRDWARIGDSYIHPFGTFGRGSGDVQFHHYYARLLHAGVQMPPIEAFSMACTLARTNRFALPSNDGRQITSTFGYAYQFDAVAFAPYLRRFAEQLGAGRTEGRIVDVRRDGESGDVSALVLEDGRTVEGDLFVDCSGFASLLIGKTLGEPFQDWSRWLPADRAVAMPCRTATAVTPYTSAIAMPAGWRWRIPLQHRTGNGYVFASDFVSDQQAMDALRGAVEGVALAEPRVLRFKAGRRERSWVNNVIAVGLSGGFLEPLESTSIYLVQQAITALIELFPERHVSDVDRDEFNRIVDMEYDRVRDFLILHYHATQRDDSEFWNYVRTMPIPDSLAEKMDLFRRRGRVVKYREGAFLDASWVSVYLGQRVLPAGHDPRAETPSADSLIAGMKALEAEIRAAAVAMPDHLAYLDRYCPMSAAA

SEQ ID NO: 89539 - protein, 495 aa, unidentified
  source 1..495: note = Pseudoalteromonadaceae bacterium
  REGION 1..495: note = tr|A0A2E9T339|A0A2E9T339_9GAMM Tryptophan halogenase; OS = Pseudoalteromonadaceae bacterium OX=2026783; GN = CMK63_11390 PE=4 SV=1
MRHQSIKQVIIAGGGTAGWMTAAALAKLLNKDIKVSLVESDDIGTVGVGEATIPPIRTFHKLLGIDEKLFMKATQATFKLGISFENWHKPQSDYIHSFGMTGKECWAGEFHHFWLHAKKMGNKDDFGDYCYELQAAKQGKFGISPHNPINYAFHMDASRYAAFLREFAENLGVKRFEGKIERVNKHADNGFIKSLLLDDGTEITGDFFIDCTGFKGLLIEQALHTGYEDWSHLLPCDSAVAVQTKGTPEIAPYTRSIAHQSGWQWQIPLQNRVGNGLVYCSRYLSDHDATQLLLNNLSSETLTEPKIIKFKTGRRRKGWNKNCLALGLASGFLEPLESTSIHLIMTGIIRFMRLFPFTGITQHAIDEYNKQLQSELESIRDFIVLHYKVTDRDDSEFWQHCKTMETPKSLAHKVALFKETGRVFLDDGDIFRVDSWVQVMLGQGIMPEQYHHVASLMNDQELSRFMQGIKQQIAQRLQQLPTHRAFIEQYCPVDT

SEQ ID NO: 89540 - protein, 508 aa, Sphingomonas sp.
  REGION 1..508: note = tr|A0A0Q4HWL0|A0A0Q4HWL0_9SPHN Tryptophan halogenase; OS = Sphingomonas sp. Leaf22 OX=1735687 GN=ASE70_15930 PE=4; SV = 1
MPDRGVSARADGPLRRIAIVGGGTAGWMAAAALSRLLGPHGPTITLIESEEIGTIGVGEATIPPIQAFNAMLGIDEDDFVRATQGTFKLGIDFHDWGRVGHRYFHPFGVYGIDAGAVPFEATWRRLHAAGQAGPLADYSICAAAAYAGRFQRPQPGNTPLAQIGYAFHFDAGLYARFLRARAETAGVVRIEGRIVDIGRDGSGWIDAVLLADGRRIDADFFIDCSGFRALLIEGAMGAGFEDWSHWLPNDRAVAVPSANAGPPSPFTRSTARAAGWQWRIPLQHRTGNGYVYSSNHVSDDEAAATLLANLDGPALADPRPLRFRTGRRDRFWVGNCVALGLSGGFLEPLESTSIHLVQAGIARLLEMLPTRACDPADTARYNRLMAAEFDQVRDFVILHFHASERRDTAYWRDQAERSIPETLAERLAIYARTGRVYREGDELFTKTSWLAVMDGQGLRAASYDPLADAMPLDAAAARLQRIGAVVAATAAQMPAHDAFIARHCAAAG

SEQ ID NO: 89541 - protein, 546 aa, Nostoc sp.
  REGION 1..546: note = tr|A0A1Z4S463|A0A1Z4S463_9NOSO Tryptophan halogenase; OS = Nostoc sp. NIES-4103 OX=2005458 GN=NIES4103_21070 PE=4; SV = 1
MIKNIESIVIVGGGTAGWMTAAYLIKAFNKNMQITLVESSNLTTISVGEATFSTMKLFFDFLGLPEYEWMPKCKATYKMAIKFVNWNAQARHFYHPFQRYEVVDGFDVSEWWLKMKKEQDAFDYSCFLIPTLCDNQKSPRYFNGQVFDDKVQKLFSQEKNQEKDVLANLKVQYPYAYHFDAKLLAKFLKDYAMHRGVKLIVDDVVEVGLREDGSIDCIKAKKHGKISGDLFIDCTGFSGLLINQALDEPFISFSESLLCDSAIAMQIPTNMAKDGINPYTTVTALSSGWVWNIPLYGRAGTGYVYSSAFISKQAAQEEFRKHLGEAADNCKALHIKMRIGRNRNSWVKNCVAIGLSSGFVEPLESTGIFFIQHGIEELVSHFPDKSFNEDLIRSYNQAIANCIDGVRDFLILHYYASDRADTPFWKATKQDIVVSEELRERLRLWKSRLPNNKNINQNYHGFESYSYSVMLLGLNYMPEASLPILDLIDDHNAVSIFNEIKQKAEYLSATLPSQYNYLNYLVESSKNKAILKKGEKIENISFLNVD

SEQ ID NO: 89542 - protein, 516 aa, Caulobacter sp.
  REGION 1..516: note = tr|A0A426GLZ4|A0A426GLZ4_9CAUL Tryptophan 7-halogenase OS=Caulobacter sp. 602-1 OX=2492472; GN = EIK80_06260 PE=4 SV=1
MTNTNPNAIKKIVIVGGGSAGWISAAMLAHYFEKGGCQVELIESEEIGTIGVGESTIPPFLQLIASLGIDEREFIQATQASFKLGIRFEDWKQKGQHYYHPFGAIGGPIGPHEFYQCWLRAKANGHPSELQDFAPGTVMADQWKFMLPFKAQRSLIAGASYALHIDARLIAKVLRGFAEARGVKRTEGIVTDVVTHPDGSVAKVIMKNGQEVEGDLFIDCSGFRALLIGKTLDVPFNDWSDMLLCDRAVVVQTENVGEPHPYTLSKAEDAGWRWRIPLQHRAGNGYVFSSRHLSDDEARATLVRNVQGPMLMEPMFIPFKTGMRQRLWEKNVVAVGLAGGFIEPLESTALHLIYRGMDFLLRFFPDRDFSPELAAEYNRRMTADYEEIRDFIVLHYCTTQRDDTPFWRDVRQAPVPDSLKARMELFKAHGVLREGVDEMFRNPSWQSVMEGMGVRPRRYQQLVDTAPYEVISRTLDQSKPMLAAQVAGLPSHGEFLAQNCPAPPPEPVAAPFKTVA

SEQ ID NO: 89543 - protein, 532 aa, Streptomyces sp.
  REGION 1..532: note = tr|A0A3Q8W7U4|A0A3Q8W7U4_9ACTN Tryptophan 7-halogenase OS=Streptomyces sp. W1SF4 OX=2305220; GN = D1J60_27065 PE=4 SV=1
MTGTDSRIQKVVILGGGTAGWMTAAYLGKALQGTVDITVLEAPAIPRIGVGEATVPNLHKVLFDYLGIAEEEWMRECNASFKMAVRFVNWRTGGQGQPDARELENGGPDHFYHPFGILPDSDNVPMSHYWAKRKLEGLTEEPFDYACFREPPVMDAKKSPKWLDGTPSTRYAWHFDAALVADFLRRFATEKQGVHHVQDEMTHAEKDERGFVKALHTKAGRVLDADLFVDCSGFRGLLINQALEEPFIDMSDHLLCDSAVATAVPHDDEANGIEPYTSAIAMSSGWTWKIPMLGRFGSGYVYSSKFTTKEEATREFSALWGLDPETTKFNHVKFRVGRNRRAWVNNVVSIGLSSAFLEPLESTGIYFITAAIYQLAKHFPDRTFNPELANSFNHEIEVMFDDTRDFIQAHFYYAPRNDTPFWRANKELTLPKNIQEKISAYKAGLAINSPIADESTYYGNFEAEFRNFWTNGSYYCVFAGLGLEPDAPLPILAHKPDSVAGAEALFGKVKQEQNHLLDTLPSTYDYLRKLHG

SEQ ID NO: 89544 - protein, 504 aa, Pseudoalteromonas sp.
  REGION 1..504: note = tr|A0A4Q0JCZ8|A0A4Q0JCZ8_9GAMM Tryptophan 7-halogenase OS=Pseudoalteromonas sp. A757 OX=2250709; GN = DRB05_19185 PE=4 SV=1
MKSQKIVILGGGTAGWMAANMMAKSWADKAIEITVVESSSIGTIGVGEGSTPQFKGFMDYLGISEAEWMPACNATYKNGIRFIDWSTKPGFSSYFHPFPAQPDDYSAPAFFHNSFVRRKAIDVEGHPDHFFLATHLADLNKSPIAAENFPFEINYGYHFDSALLGQLLARKAAEFNVKHIDTTITDVRTHVDGDIAALITSEGTEVAGDIFIDCSGFKSLLLQHTLGVGFESFESNLFNDAAVVIPTKQLDTIRSETQSVARQFGWSWHIPLTNRIGNGYVYSQRYCDADQAETELRAALGLLDSEVEARHIKMKVGQVKAHWSKNCIAIGLSQGFIEPLEATALHIVQETVQSFIECYQDADFTDGNRDKHNRALSERYQAIRDYIVAHYRVNSRTDTNYWLDNANNNHLSRSLYQILQTWVSGNNLSDELVRQNVEQYYPSVSWHCLLAGYGIYPEQSQLKSGNALANQHSIEKVNDFIRRCGLNFKDHRMELESFVANVHK

SEQ ID NO: 89545 - protein, 550 aa, unidentified
  source 1..550: note = Thalassococcus profundi
  REGION 1..550: note = tr|A0A369TPY8|A0A369TPY8_9RHOB Tryptophan 7-halogenase OS=Thalassococcus profundi OX=2282382; GN = DU478_08285 PE=4 SV=1
MGQPVRNVTIVGGGTAGWLAAVLLRKVLDDRVAITLIESPNIPTVGVGEATVPNMPQTLKLLGISDQEFFRTCNASFKLGVVFSDWNTDRHGKFISYINPFSSAPQLQGYDWADFYRHFGAGQRDYVQSYSPLMDMVRASKGPRMLNLPKTDSRLPYAFHLDAVKFAELLRGVGVERGVTHILDDVDGVDLDERGFIAAVQLRDHGRHPVELVVDCTGFRSLILGDALKEPFVSYSKYLGNDRAMAVQIPHPHPEKLEPATRSTALGAGWSWRVPLFNRIGTGYVFSSAHRSDDAARDEFLAHLGPAGKGAEPRIIPMRIGRARNAWVKNCVAIGLSGGFIEPLESTAIHMTDMGVRWLATHFPDTDYAEPLRRQYNKTVDALYNEVRDFICLHYALNNRTDSQYWIDARESLDVPDRLAALLELWAHRPPAHTDLETQYLFTTSTYNTVLLGKQVYQTGFGVKRPDSGIRLDRGAWMRALDQTAKVNAAEVKRKADHRSLLRQLRGEAGPVRTPGATTLNQPTLGLPQAGGQPLPRSAKELAENGAGLL

SEQ ID NO: 89546 - protein, 508 aa, Pseudoalteromonas nigrifaciens
  REGION 1..508: note = tr|A0A379I4W3|A0A379I4W3_9GAMM Geranylgeranyl reductase family OS=Pseudoalteromonas nigrifaciens; OX = 28109 GN=NCTC10691_03995 PE=4 SV=1
MNKTIKTVAVIGGGTAGWLSAAIIASHHQSQNGDGLKVMLVESSDIPTIGVGEGTWPTMKNTLQQIGLREVDVFKACNATFKQGGKFVNWTHGNNDFYYHPFTVPLGYGRIDLAPYLDNVENYAQQTNFQHDICEENLAPRSITQGEYQGDCNYAYHFDAGAFADLLKQHCKNNLGVEHIIGTVDKVKLDNSGEINELTLKDSTHTINADLYIDCTGFSSLLLGQTLNVPFKKIDHVLFNDSALAMKVPYGEDDQSIASHTIATAQNAGWIWDIGLTDRRGVGHVYSSKFLSDDEAEENLRNYLGDAAKGLTARKISFESGYREKFWHKNCVAIGMSAGFVEPLEATAIMLVEISARFVAEHMPTDTQVMPIIAKRFNEQMDYRWQRIIDFLKLHYMLSKRPEPYWQAHVKPETIPQSLQEDLLVWGGRGPLIQDFHGSLELFPAASYQYVLYGMGFKPDFTKQAYLYTQHTQAKQIIERNTQLTQQMLQTLPPHRAYINQWLAANSI

SEQ ID NO: 89547 - protein, 512 aa, Xanthomonas campestris
  REGION 1..512: note = tr|A0A125PW14|A0A125PW14_XANCT Tryptophan halogenase; OS = Xanthomonas campestris pv. translucens OX=343; GN = ATB53_12490 PE=4 SV=1
MIAAPLRNLVIVGGGTAGWMAAAALARVLGPDYRITLIESEQIGIVGVGEATVPHIKAFNNLLGINEAEFVRQTQGSFKLGIEFVDWQRPGTSYIHGFGTEIGHSLGLLPFQQYWFKQALAGKAKPLGAYTLNTVAARRGKFMTSASDAPPNSPLGNIAYAYHFDASLYAAFLRRFSEQRGVTRHEGIVEQVQLHPESGDVLSVRLASGDTIAGDLFIDCSGFRGLLIEQALHTGYHDFTHWLPCDRALAVPCAKVGPPTPYTRATARAAGWQWRIPLQHRTGNGYVYSSAHISDDEAAATLLANLDGAALADPRPLRFVTGRRKQVWNRNVIALGLASGFMEPLESTSIHLIQSGISKLLELFPREGISPVLVQRYNDRIAFEFDRIRDFLVLHYTATERDDSDFWRQCRAMAIPPELQATLDLFGDSGRFYRNGDEMFAEISWVQVMVGQGILPRGAGRPAARRAKKRGHAHQGAGLFKIRPKPENGLWRISGKAGRCACYRECAANAMV

SEQ ID NO: 89548 - protein, 504 aa, Pseudoalteromonas sp.
  REGION 1..504: note = tr|A0A2C6E2Q1|A0A2C6E2Q1_9GAMM Tryptophan halogenase; OS = Pseudoalteromonas sp. GCY OX=2003316 GN=CBQ28_19785; PE = 4 SV=1
MNITKIAIVGGGTAGWLAANHLGLALSSNSNVEITVIESLDIPSIGVGEGTVPYIVKSLKKFGISEAELLGSCDATFKQGIRFVSWLDEKVHGAHNFYYHPFEAPYPEGLDITNIWLNLGKKIPFDYVGIQSRVCESGLAPKLKTDGNYQGVLPYAYHFDAAKFAKLLKRNALDRFNVRVLNGTVDESKLDQTGHIESLCMTNGDILHFDFYVDCTGFSAKLISSVSNDSFQDKSEQLLVDTALVQQIERDDPSSLNPYTTATAHKAGWMWEIPLTSRTGTGFVYASKYMSHKEALETYARMLNVDSVNPRKIEMRVGYRNQSWSKNCVALGLAQGFVEPLEATSILLTDFSAEFLSKNFPLSRAEISVFSDHYNDAVNCAWESTIDFIQLHYILSDRVDSDFWVEYRSDVKLSDSLERKLAKFRLRSPQQMDFWSRFELFNEKNFLYVLYGMKFNTHPQTTSQAEFDIGLKLLDKNNEQLRRAKGALLDHGEWLKQFKQYMSS

SEQ ID NO: 89549 - protein, 493 aa, unidentified
  source 1..493: note = Pararheinheimera tangshanensis
  REGION 1..493: note = tr|A0A5C8LZ31|A0A5C8LZ31_9GAMM Tryptophan 7-halogenase OS=Pararheinheimera tangshanensis OX=400153; GN = FU839_04055 PE=4 SV=1
MQQVKKVVVAGGGTAGWVAAAALSKRLQGLIEVVLIESEEIGTVGVGESTIPPVQLFHNLLGIDEQEFMKATDATFKLAISFENWGQTGDQYFHPFGVTGKGSFLTDFQHYYLHGLTLGVDAPFGDYCYELQAAKQHKFGKTDKSNINYAYHLDAGRYARFLRKFSEDLGAVRIEGKIAQVQQHVNGDIRSLVLESGQEITGDLFIDCTGFRALLIEQTLKTGYDHWDHWLPCNKAVVVQTEPGPNIHPYTRAIAHDSGWQWKIPLQHRGGNGLVYASDYLSDEKAKQRLLDGLEAPALFEPRVLSYQTGRRKKFWNKNCVAIGLSSGFIEPLESTSIFLFMSGIIRLLRLFPFNGVTPALMDEYNQQSITEVEKIRDFIILHYHQTERSDSPFWDYCRTMSIPDTLAHRIELFKESAHAFQTGDEMFRLESWSHVMLGQRLRPNSYHQLVAALNQGELSRHLHSIRETINAAVDRLPSHRDFLRQYCPSTIS

SEQ ID NO: 89550 - protein, 497 aa, Pseudoalteromonas sp.
  REGION 1..497: note = tr|A0A4V1K813|A0A4V1K813_9GAMM Tryptophan 7-halogenase OS=Pseudoalteromonas sp. A757 OX=2250709; GN = DRB05_00905 PE=4 SV=1
MNERISNSVPKSIAIIGGGTAGWMSAILLKSHWVNTRVILIESPDVPVIGVGEGSTPALKYFFQSLNIDEKEWMQRCNATYKVGIQFPNWSTVQGYESYFHPFFSALDSQTSTAFVKQAKKWRQGERVNVLPDNFFVAASLAKKHKAIITKKPLPIELDYGYHFDSALLGDYLKEKSIERGVIYQEATVDSVIHSDKNIDSLVLDTKQTVTAELFVDCTGFSGVLVNKALKRDFHSYSDMLFNDAAVAIQTPKVTEQLESKTISAAMSCGWRWQIPLRNRDGNGYVYSSKYLSSDEAEHELRSLLPEQGKGCHARHIKMRVGRLNEHFLGNCLAVGLSQGFIEPLEATALMLVQYTVMSYINGVENEYSAEKLNKKINDQFDSVRDYVVCHYKINSKEGKYWQDCRENNSISANLNAILQAWTSSGDFESSYKELLGDSAYAKASWYSILCGMGLSDLDIEAGTTLDSLATKALAYCEDTADLFIDQAELFASDNTQ

SEQ ID NO: 89551 - protein, 529 aa, Streptomyces sp.
  REGION 1..529: note = tr|A0A1V2RUW3|A0A1V2RUW3_9ACTN Flavin-dependent tryptophan halogenase RebH OS=Streptomyces sp. MP131-18; OX = 1857892 GN=STBA_70240 PE=4 SV=1
MDHRIRKIVVLGGGTAGWMTASYLGKWLGNTVSLTLIESPSVPRIGVGEATIPNLQPLFFDFLGLKEKDWMPQCNASFKIGIDFINWKTGGPGQAQARTVDGRRDSFYHVFAPLPEHQGVPMFQYWDYLRHHGLTEKSFDAACFWESSLLDSRKSPCWLDGRPSTAYAWHFDAHLVADFLRRFSTKEFGVRHVEDEMTGAEQDGRGYVTALRTASGNRYEADLFIDCSGFRGLLINKAMAEPFIDMNDYLLCDSAVATAVPHDDDARGVEPYTSAIAMESGWTWKIPMLGRFGTGYVFSSRFVERDRATRDLCRMWNLDPDRAELNQITFRVGRNRRAWVRNVVGVGLASCFLEPLESSGIYFITTALHHLVRHFPDKRFNETLISQYNREIEFMFEESRDFIQLHFLAAPRDDTEFWRANKNLRLSPQLEQKIAMYRAGLPVNQPIESGAGSYSDAMVNSRLCFPNSSYCCILAGSGVYPDAPLPSLAHQDDVVAASEPMFATVERKRRELAGTLPTTVEYLRAIHAK

SEQ ID NO: 89552 - protein, 516 aa, unidentified
  source 1..516: note = Catenovulum maritimum
  REGION 1..516: note = tr|A0A0J8GN43|A0A0J8GN43_9ALTE Tryptophan halogenase; OS = Catenovulum maritimum OX=1513271 GN=XM47_15395 PE=4 SV=1
MAKPLQDILILGGGTAGWLTAGILAARHQAKIQANQLSITLCESPNIPTIGVGEGTWPTMPKTLQSLGISEAEFVSECDASFKLGSKFNGWDRADSEDYYYHPFEDIHASKEGLTAEYWLYLQSKGQVTDKYSAMYCFSDLLANAGLGPKTPENQAYQSVVNYGYHLDAGKFSKFLTRHCTDKLGVKHVLADITRVNLTPTGEIDSVLTSKNESLTADLFIDCTGFKALLLGEALNIPFISVKDCLFADTAIATQVQYVDAQASISSVTQSTAQRAGWIWDIALPTRRGVGHVFSSKYTDVNTATEDLYHYIEASGSSTKDLKLKEIKFNPGHRQKFWHKNCVAVGLSAGFLEPLEASALILVELSAQMIADQLPPTKTCMEISEQRFNKKFRHHWQNAINFLKLHYVLSQRDTPFWHDNRTVESIPESLLQMLELFKHKVPNAHDFEVVGELFSATNYQFVLYGNQFNTQVAFGLSTAEIDYMARHVTENQHKMRQFLKQMPTNRQLLAKMVSQA

SEQ ID NO: 89553 - protein, 388 aa, unidentified
  source 1..388: note = Myxococcus hansupus
  REGION 1..388: note = tr|A0A0H4X1P3|A0A0H4X1P3_9DELT Tryptophan halogenase; OS = Myxococcus hansupus OX=1297742 GN=A176_005976 PE=4 SV=1
MSEATCDIAIIGGGPAGAAMAVALRDQAPFLSVTLIERTAYDTPRSGETLSPEVRLPLSRLGVWGSFLRDGHLASRGTASCWSRPEPSTQDTHMSPWGSAWHLDRARFDERLSLEATRLGVQMLRLTTLLDSERLGKDGYRLHLSQRKAGATTLRARFVVDATGWKATFAMSQGARRRVRDRCIAVYGTFQRRTGEPFPTEALVESCPEGWWHSALLPNGRVAVALVGDGDSLHGLRWATPQPWMALLDQAPATQARLAVCDFAGESLVAAPILVGQLDAMHGERWVAVGDAACTQDPLSAQGVASAMDSALLAAGAVGQYLRGDSEALRDYEATLQRRFEDHLRLRGHAYREEQRWRDAPFWKNRHEAFPAPPTAHQQHSTPGGLPT

SEQ ID NO: 89554 - protein, 506 aa, unidentified
  source 1..506: note = Catenovulum maritimum
  REGION 1..506: note = tr|A0A0J8JI53|A0A0J8JI53_9ALTE Tryptophan halogenase; OS = Catenovulum maritimum OX=1513271 GN=XM47_15790 PE=4 SV=1
MTQDQSIEKIVIVGGGTAGWMTAAAMAKLIKKPNCTITLIESADIPTVGVGEATIPQIQLFNALLGIDENEFVKATQATFKHGIEFVNWKQNNHKYMHPFGTIGLNFEGVDFHHYWNKLNQTNQAGSIEDYAFNCVAAYNHKMMRSINVPNSPLNNIAYAFHFDAGLYAKWLRNFAEKNGVIRIENTVQEVKLDSKSGFINSVELADGQVVEGELFIDCSGFKGLLIEEALNTGYEHWGHWLPCDRAVVAPSKNVADPVPYTRSTAHGAGWQWRIPLQHRTGNGHVYSSRFMSDDEAKQTLLDNIEGQVLTEPRVVKFTTGTRRKHWNKNCVAIGLSSGFIEPLESTSIHLIQSSISRLMSLFPDKSFEKSVIDTFNSQTKLEVERIRDFIILHYKVTEREDTEFWRYCKNMEVPAYLEQKIKLFSQTGRIFRQDDELFNQSSWLAVMLGQGITPEAYHPLVDNLSLEEIRHRCDNIKKVIKESVERMPKQSEFINKFCRANLESV

SEQ ID NO: 89555 - protein, 510 aa, Caulobacter vibrioides; identical to SEQ ID NO: 82650
  REGION 1..510: note = tr|Q9A9K9|Q9A9K9_CAUVC Tryptophan halogenase, putative OS=Caulobacter vibrioides (strain ATCC 19089 / CB15) OX=190650 GN=CC_0971 PE=4 SV=1

SEQ ID NO: 89556 - protein, 508 aa, Duganella sp.
  REGION 1..508: note = tr|A0A1E7V7X1|A0A1E7V7X1_9BURK Flavin-dependent tryptophan halogenase RebH OS=Duganella sp. HH105; OX = 1781067 GN=rebH_3 PE=4 SV=1
MNPGTRDPNNRRPVRRVVIVGGGTAGWMAAAGIAKVLGKRLDIKLIESDEIGTVGVGEATIPTLMNFHNLLEINEQEFMAETQATFKLGISFESWRNVRQDYIHSFGVTGTDHWTAGFQHFWHKGVERGLAGDYGDYCLELKASLEHRFAHLPDNGMNYAYHLDASRYAKYLRRLSEPRGVQRIEGKIVRYTKHGDNGDVRSVVLESGQEIEGDLFIDCTGFRGLLIGDAMQEPMEDWSQWLFCDRAIAVQTESVGDAVPLTRSMAHQAGWQWRIPLQHRVGNGIVYSSRHLDEDVAMRQLMGNVEGKALIAPRVIKFKPCQRKHTWKGNVVAIGLSSGFLEPIESTSIHLIQRSVVRLMQTFPTDGISQADIDEYNNQCNSEIEHIRDFIILHYHVNNRTDSPFWVEAREMSIPASLQHRIALFRETGRVFRVPNELFAENSWIQVMLGQGIMPRSHHQSADLMGDEELRHFLGGIKSRVDRIVVQLPSHQAYVERYCGRAESARAA

SEQ ID NO: 89557 - protein, 506 aa, Sphingomonas sp.
  REGION 1..506: note = tr|A0A258TKT9|A0A258TKT9_9SPHN Tryptophan halogenase; OS = Sphingomonas sp. 28-66-16 OX=1970435 GN=B7Y45_00850; PE = 4 SV=1
MAEARIGEIVIIGGGTAGWMAAAALARFVGSQVSIRLIESDAIGTIGVGEATIPQLKLFNAGLGIDEAMFVRATSATFKLGIEFDGWREPGARYIHAFGAIGRGHGLIPFHHYWLRHRAEGGTIPLWAFSASAQAAARNRFAPLQEQPDQLPSGMDYAFHFDAGLYAAFLRDYAERLGVRRIEGRIADVVLGGETGFVQAVTLEDGTRLAGDLFVDCSGFRGLVIEQALGAGYDDWSRWLPCDRALAVPSARVDPLTPFTRSSARKAGWQWRIPLQHRTGNGHVYCSAFTSDDDAAATLLAHLDGAPLADPRPLRFTTGKRRRMWIKNCVALGLAAGFMEPLESTSIHLVQAGIARLLQLFPTAGFDPADIAEFNRQSDFEWTSIRDFLILHYHANARDGAFWAACRNIAIPDSLAHKIALFRANGRLFREHEELFTELGWLQVMIGQGIDPAGYHPLADQLAPQELVDFMTLARQHTDRVVASLPDHAAFIARHCAAPARDTVAA

SEQ ID NO: 89558 - protein, 661 aa, unidentified
  source 1..661: note = Emcibacter congregatus
  REGION 1..661: note = tr|A0A2G4YWA7|A0A2G4YWA7_9PROT Tryptophan halogenase; OS = Emcibacter congregatus OX=2043170 GN=CRD36_01725 PE=4; SV = 1
MVKSIVVVGGGAAGWITAGLLGAKYIRGAEASVSVTVVESENIGIIGVGEGTWPTMVDTLRKMGIEEIDFIRNCDATFKQASKFRCWTTGEEDDSYYHPFSLPQRFEEVSLAAEWRDNHRGTPFATAVGLQADLCDRKCAPKQVSSPEYASVENHGYHLDAGKFTKFLTAHCRGKLGVNHILADVVSVNTAENGDILSLTTQQGAEITGDLFIDCSGSAGLLIDKHYQVPFLSQKDVLFIDSALAVQVPYEHPDAEIESATLSTAQTAGWIWDIGLSSRRGVGHVFSSRHISDAEATEQLKNYLRPDVPDVEALSFRKLSFQPGYRAKFWVNNCVAVGMSAGFIEPLEASALVMVELAANTISQHLPASRAAMDVVATKYNETFLFRWQRVIDFLKLHYVLSRRRDSAFWRDNQKAESIPESLQDLLTLWRHQSPSNNGFLSPYDLFPAASYQYILYGMGFRTHPNPLESMPHLTAAARTQLEKVKERKVKVLPRLPGNRELINGLCRPAAAVELNLVKTTSGSWRRVAPDEVDRMANHCPLFFRRDSITAQFECIALVGLAQDETLIEAPEIPVTGGEGETSGITLSPQEEALLEPVKLDIAFSDKSTLLITGLHVVNREKLSGLSARNRRRRTALFQTMQESLQHVSALIEMRNRQLMS

SEQ ID NO: 89559 - protein, 500 aa, Alteromonas macleodii
  REGION 1..500: note = tr|K0D3H4|K0D3H4_ALTMS Tryptophan halogenase; OS = Alteromonas macleodii (strain Black Sea 11) OX=1004785; GN = AMBLS11_13295 PE=4 SV=1
MTTPHRIVIAGGGTAGWMAANLLAHRWADEAVAITLIESEDIGTIGVGEGSTPTLKRFFQTLDISEFEWMEQCQATYKVNIKFTGWSGNDLQSYSHPFISQLDVFSERAFHVNALTRRLGLDVETRPDKFLMAGYLAKKNLAPLPSHNFPFDIEYGYHFDSLKLGQFLRERAKLKGVSHIVGNIESVHTTPSGDISHLVCQDGQTLDGDLFIDCTGFAGLLLQKTLGVSFKDFGNNLFNDSAVVLPTPACASLPVETESVAMSNGWRWQIPLRNRTGNGYVYSQRYQDKDAAECELRRALGLENTDVEAKHLSMRVGQCERHWEKNCLALGLSQGFIEPLEATALHLVQTSIELFADNYSFNETTQQQRQAFNQEVTERFERVRDYIVCHYKLNGRNDSDYWRDNRANMKLSESLLSLLDVWYRKGDIVEEIKRQGIGRHFSTTSWHCLLSGYGIYPPPALNQPASLKESGDLFEEKKLAAFFNRCSLNFDKQSALFRAG

SEQ ID NO: 89560 - protein, 513 aa, Sphingomonas sp.
  REGION 1..513: note = tr|A0A258TD88|A0A258TD88_9SPHN Tryptophan halogenase; OS = Sphingomonas sp. 28-66-16 OX=1970435 GN=B7Y45_11990; PE = 4 SV=1
MSDRRIKKVVIAGGGTAGWVAAAALVKHLGPLIEVTLVESDDIGTVGVGESTIPTARTFHELLGIYEQAFMRATNATFKLGISFENWGRIGDRYLHPFGSVGRAVWMGEFQHFWLQAREEGIAEPYGAYSLEHQAAMQGRFATGGEPALSHAYHLDATAYARFLRSLAEPAGVRRIEGRIDHVVLDPENGFIAALHLANGDRVEGDLFIDCTGFRALLIGAAMGVGFRDWGQWLATDRALAVQTESVGPPVPYTRAIAHEAGWRWRIPLQSRVGNGLVYASAFMSDDEARARLLADIEGRPLFEPRPIRYATGMRAEPWARNCIALGLAAGFIEPLESTSIHLIQIAVTRLIQLFPFDGISDAVVGRFNAQATREWEHVRDFIIMHYKLTERDDTAFWRRCRDMPIPPSLAERIALFRESAQLGLGGEALFRVDSWVSVMLGQRLEPAHWHQLARLLEPGALRQALGDIRRAIDARLATLPAQERFIAGYCPAAPPSAAPARGTVRISVCGRA

SEQ ID NO: 89561 - protein, 501 aa, Alteromonas macleodii
  REGION 1..501: note = tr|K0D8S7|K0D8S7_ALTMS Tryptophan halogenase; OS = Alteromonas macleodii (strain Black Sea 11) OX=1004785; GN = AMBLS11_18850 PE=4 SV=1
MTVSGLDSSNSQTPVKNVVIAGGGTAGWMAATALSRLLGKSINVTLVESKDIGIVGVGEATIPPIRTFHKLLGIDEKAFMRATQATFKLGIEFENWREQGHSYIHSFGITGRECWAGEFHHFWLRAKEYGFGGEFGDYCPELIAAKQSKFATSESMPLNFAYHFDAVAYGRFLKSLACDAGVVHKEGDIEKVVVCSQTGNIQSLQLASGEAIDGDFFIDCTGFKGLLIEQALHTGYDDWQHYLFCDRAVAMQTELTAPPVPYTKSVAHQAGWRWQIPLQKRMGNGLVFCSRFMSDEDALDTLKSQVTGAPINEPRVIRFTPGKRRRGWNKNCVALGLSSGFIEPLESTSIHLIMTGLIRLMRLFPFDGITQSAIDEYNNKFDSEMSAILDFIVMHYKVTQREDSPFWQQCQRMDIPSSLKHKLDLFAESGRVFLDDGDIFRVDSWTQVLMGQGMTPKQYHRVADEMSEQSLRQFMTGLKQQVDNHVANLPPHQAFLTQYLR

SEQ ID NO: 89562 - protein, 493 aa, Alteromonas macleodii
  REGION 1..493: note = tr|K0D8J9|K0D8J9_ALTMS Tryptophan halogenase; OS = Alteromonas macleodii (strain Black Sea 11) OX=1004785; GN = AMBLS11_18405 PE=4 SV=1
MNKSVKKIVIAGGGTAGWTAAAAIAKQMGPTISITLVESDEIGTVGVGEATIPPMRVFHKLLGIDEKEFMQATSATFKLGIQFENWGQNGDAYIHSFGVTGRESFVAPFHHFWLYGKEQGVVKDFGNYCFELQAAKQDKFATSQNSNTQYAYHLDSSLYAQMLHDYCETRGVVRKEGKIEYVHQNKETGYIEYLQLASGEVIHGDFFIDCTGFKGLLIEETLKTGYEDWSQWLPCDRAIAVQTESVGAPRPITMAIAHDSGWQWKIPLQHRTGNGLVYCSQYLSDDDAKQRLLDNVIGKTITTPRVIKFKTGRRLQAWNKNCLALGLSSGFVEPLESTSIHLIIMGVIRFLKLFPNSGVSERIAKEYNRQTLDEIVKIRDFIILHYHATHRKDSPFWQYCHDMEVPETLKHRMQLFEEFGHAFQEDGELFRVDSWTQVMLGQGIIPKSYHSSVRGMPVHELQRFLQGIEMAVQKGLQNMPSHEAFLQHYCSSS

SEQ ID NO: 89563 - protein, 503 aa, Brevundimonas vesicularis
  REGION 1..503: note = tr|A0A2X1B956|A0A2X1B956_BREVE Tryptophan halogenase; OS = Brevundimonas vesicularis OX=41276 GN=NCTC11166_01421; PE = 4 SV=1
MIPAPLKRILIVGGGTAGWMAAAALAHVTRGTVKIELVESKVIGTVGVGEATIPPILLFNQLLGIDENEFVRATQATYKLGIQFHDWHQKGESYFHPFGVYGTRIDAASFHQYWLRLNKAGLDDDLSAYSVTTVASQMGRFTRPDGDPRGVASQMTYAFHFDAGLYASFLRQRAEANGVVRHEGTIADVRLRDGDGFIQSVRLDDGRELAADFFIDCSGFRGLLIEGALKTGYEDWTHWLPADRAVAMPCTRVGDPTPYTQSTALEAGWRWRIPLQHRTGNGYVYCSPFISDDEAQARLRASLDGEVMADPNFLRFTTGRRKKTWNKNCLALGLASGFLEPLESTSIHLVQSGISKLLLHFPDTGFAQADIDSYNRQMRLEVERIRDFIILHYHATTRDDSALWRHVQAMDVPETLKQKMEQFRSRGRVFRYDDELFQETNWIAVLLGQGIVPERHDPITETIPLDHVRQRLQHMKAMIRQGVERMPTHEAFIAANAKAPPLS

SEQ ID NO: 89564 - protein, 506 aa, unidentified
  source 1..506: note = Catenovulum maritimum
  REGION 1..506: note = tr|A0A0J8GR53|A0A0J8GR53_9ALTE Uncharacterized protein OS=Catenovulum maritimum OX=1513271 GN=XM47_18430; PE = 4 SV=1
MENPDHINSYVILGGGTAGWMSAAILARALEHTDAQITVIESPHVPSVGVGEATIPSIIDLLNYLNISQIDFVSQTDATFKLAIRFVDWLKQGTEYWHPFGKIGSQIDGIPFYQHWLKQQKIDPSFEFTDFSPAVALSKQNKFFIPDPKNPTNLSSTSHALHFDASKVAQYLQKYCLNKNVNIITDHLVETDLSIEGNIKTLHLESGRQLDADFFIDCSGQKALLIGKALRVGYDSWQDFLPVDSAVAMQTEKLDIIPPYTLSTAAEHGWRWQIPLQNRTGNGYVYASDYCNNEEAIESLIKHACTNSKAITDPKVIKFVTGKRKKMWHRNCLSVGLSTGFLEPLESTSIYLIMRAMLNFVQVLPSKSICEPSIKEYNRLIDDEYNSIRDFIVLHYCVTQRKDTKFWRMWQNLSIPDSLSEKLALFKSHGRLYKNPSDLFSQDSWYAVLEGMKVRPTSYDPLVDRSNFNLIKQSFIQTKQALWFNASETLNHEDYLKRIKRARMVN

SEQ ID NO: 89565 - protein, 509 aa, Duganella sp.
  REGION 1..509: note = tr|A0A1E7V7F8|A0A1E7V7F8_9BURK Flavin-dependent tryptophan halogenase RebH OS=Duganella sp. HH105; OX = 1781067 GN=rebH_4 PE=4 SV=1
MIRRIVIVGGGSAGWLTAGLIAADHQGTPLHITLIESPDIAPIGVGEGTWPSMRDTLRRIGVSEADFFRECDAAFKQGSRFNHWRGDHPLGSGRDYYFHPFVLPQGYGEVNLPQQWQAQHPDTPFADLVSFQPHLCVNGRAPKQASTPEFASVANYGYHLDAGKFGVFLRKHCLEKLGVHHVPDNVVGITSHDNGDIAALQTQAHGALEAELFIDCTGMQSLLLGKHYEVPFISQKHVLYNDSALAVQIPYPAADYPIASQTSSTAQSAGWIWDIGLPTRRGVGHVYSGAHIGDDQAEAELRRYISATGGPRDIPSPRKLSFNPGYRARFWHRNCVAIGLSAGFIEPLEASALALVEMSAAMVSDELPATRAAMDIVARRFNDAFTYRWERVIDFLKLHYVLSRRRDSDYWRDNTAAVPERLSDLLTLWRHRAPSRNDFNRIEEVFPAASYQYVLYGMGFRSEYTHPQPQQAAQADHYFREAAALTRKMLGALPGNRELINHITQRHHA

SEQ ID NO: 89566 - protein, 510 aa, Rhodanobacter sp.
  REGION 1..510: note = tr|A0A1V3QJF4|A0A1V3QJF4_9GAMM Tryptophan halogenase; OS = Rhodanobacter sp. B04 OX=1945860 GN=B0E46_07495 PE=4; SV = 1
MRRIVVVGGGTAGWMTALTLANSGYGSRLEVTVIESPQVATIGVGEGSTPFLRRFFEDLGIEEAEWMPACNATYKNGITFDKWSTRPGFESYFHAFASMLDNLTMTQFINNVHSRLNHADVHAHPDRFFIASRLARDCRAPKPAHSFPFDIWHGYHFDATLLGAFLLRKALERGVRHVARHVNEVILKDNGDIGSLRLDGDEMLDADFFIDCTGFASMLIGKALKTSFVPYAENLFNNAAIALATPIDGPIMSQTVSTALKNGWAWKIPLTNRYGNGYVYSTDYCSPEQAETELRAHLGVLDADVPARHLKMRVGRVAESWNRNCLAVGLAQGFIEPLEATTLLFVQRTAYMFVAALEKGDLGAEARANFNQTINVQFEGTRDYIVTHYKTNTRTDTDYWRANAANTHLSRPLQHLLTTWLASKPIIPGLKKGVFGQGYPTMSWYSLLAGVGLFPDPQHMRPPTSEEAQHDLAQIDNLLERSAMNYPDQRELLQRIPLKSREPSLQVYLW

SEQ ID NO: 89567 - protein, 516 aa, unidentified
  source 1..516: note = Catenovulum maritimum
  REGION 1..516: note = tr|A0A0J8GTX3|A0A0J8GTX3_9ALTE Uncharacterized protein OS=Catenovulum maritimum OX=1513271 GN=XM47_15800; PE = 4 SV=1
MHLVKNIVIVGGGTAGWMTAAALSKLVMPHGFQVTLIESDKIGTVGVGEATLPHLRYFNQLLGIDEKEFMQATSATFKLGIKLKNWKNLNQDYIHPFGDFGQSIQGANFIHAWLKATQAGLNSDISDFSVGVQVAQNNKFKFPESNPNSVLSSYSYAYHLDAGLYAKFLTDFSIENGVKRIAGEIEKVELNNQGDVFQLILQSGESITGDLFIDCSGFRGLLINQALNVEFDNWQHWLPCDSAVAIASEKTDELLPYSTATAKTAGWQWKIPLQTRVGNGLVYCSQYMNKGQAEDEVLAGLESKPISTFNHLNFKTGKRKQTWHKNVVAIGLSSGFLEPLESTSIYLIQDSIEKLIEFFPHNGLLQVHIDEFNRLVDNEYLRIRDFLIMHYHVNQRSDSQFWLDMQNMAIPESLEEKLTLFKKYAHVPYYGQGLFLEPSWVAVLVGQGMLPENYSPKLTNLNQADLIQMLEKMKDLIKQASLSLPEHSDFLTNFLANENRLSNSKLASKSLYGSRN

SEQ ID NO: 89568 - protein, 506 aa, Rhodanobacter sp.
  REGION 1..506: note = tr|A0A1V3QEA6|A0A1V3QEA6_9GAMM Tryptophan halogenase; OS = Rhodanobacter sp. B04 OX=1945860 GN=B0E46_11885 PE=4; SV = 1
MGDPQIKNIVIVGGGTAGWMAAAAFAKVLGPAYAIRLIESDEIGIVGVGEATVPHLKLFNNLLEIDEIEFVKQVQGTFKLGIQFNDWGRIGDSYIHGFGTIGHDVSLLPFHQFWIKARQQGIADDIGAYSLNTVAAPLGKFMASATDVPASSPLANIAYAYHFDAGLYAKYLRGYAEKRGVRRTEGKIAQTTLRAHDGFVEAVILENGERIEGELFIDCSGFRGLLIEQALHTGYHDFTHWLPCDRAMAVPCERVGPPTPYTRSTARDAGWQWRIPLQHRTGNGYVYSSAHLSDDEAAAMLLANLDGRALGDPRALRFTTGMRKKFWHRNVVALGLASGFLEPLESTSIYMIQSGIARLLNLFPQRDFSEVVIERYNAQAVFEYERIRDFLILHYHATARDDTPFWNQCRTMSIPDRLRDTIELFRDSGRFFRDAEEMFATVSWVQVMIGQGILPRGYHPLVDQMPEQDLRRFITGVAKVIASCVDSMPMHQVFIDRYCAAPDMAA

SEQ ID NO: 89569 - protein, 507 aa, unidentified
  source 1..507: note = Emcibacter congregatus
  REGION 1..507: note = tr|A0A2G4YVR2|A0A2G4YVR2_9PROT Tryptophan halogenase; OS = Emcibacter congregatus OX=2043170 GN=CRD36_00510 PE=4; SV = 1
MMQKKPFGEKHIIILGGGTAGWMAASLFDQAWGADGARITLIESAEIDTIGVGEGSTPYLRQFFRTLNIPENEWMPACNATYKCGIRFPGWSGKPGFESYFHPFFSELDQDTGYAFFHNCALRRGGIDVPVNPDRFFVSAQLAAQHKSPVAGDGLRHTPDYGYHFDAGLLGAFLKKRAEARGINHRIDTVERVAQDESGDITALHLKDGGSVDGDLFIDCTGFAALMIQKSLGERFVSYGDVLFNDRAVALASPLNPAEGLPSETVSTALGHGWAWKIPLTTRFGNGYVYSSAHIDESTAEDALRRHLGPAAKGGEARHLKMRVGRVENHWQKNCLAVGLSQGFIEPLEATALMLVQLTIEKFIQMYGEGDYTSRHQPAFNQRINMFFDGIRDYIVTHYKINGRNDSDYWIENRDNPHISDRLAELLAVWDGGGDFETLLDRYGDALIYLRPSWYAILAGMGRFPSHATSAPAKTPIAPMHQIHDLHTEALAYFPDHRDHLARMYPF

SEQ ID NO: 89570 - protein, 510 aa, Shewanella baltica
  REGION 1..510: note = tr|A0A165JWQ0|A0A165JWQ0_9GAMM Tryptophan halogenase; OS = Shewanella baltica OX=62322 GN=A1L58_16165 PE=4 SV=1
MKIKRIAIIGGGTAGWLAANHLGAELCHDPEIEITLIESLDVPTIGVGEGSVPYLAKGLKRFGISEAELLLTCDATFKQGIKFVNWLDKNVHGDNHYYHAFDAPYPAGIDVSSYWVSHASQRPFDDVGIQARICDLGLSPKRKGSGDYDGALSYAYHFNALKFAGLLAKNAQKKFNVKHQFATIVGVERDQVGLISHLITADNSSLAFDFYVDCSGFSSIIIDKALKVPFESKSSELLTDTVLVQQVPLNAKENINPYTTATAHKAGWIWDIPLTTRRGTGFVYSSRHISDEEALTLYADYLQVDKAQFKPRKIPMEIGYRKEFWHKNCVALGLAQGFVEPLEATSILVSDFSAELLARHFPRTIEDISISTSYYNSVITYVWERVVDFIKLHYCISDRKDSSFWLENQKEDTISFELKQRLARFKLRPPHQSDFFSRFDLFDHKNFLYVLYGMKFKTNHSVLSQQEIKHCETLFSDNDLLVGRAETLLLNHREWLEGLMRAVESKTLKL

SEQ ID NO: 89571 - protein, 523 aa, Colwellia sp.
  REGION 1..523: note = tr|A0A1D8RXD0|A0A1D8RXD0_9GAMM Tryptophan halogenase; OS = Colwellia sp. PAMC 20917 OX=1816218 GN=A3Q34_13470 PE=4; SV = 1
MTTVNNDILIIGGGTAGWLSAAILAKSLNCKAENGIKVTVVESPDIPIIGVGEGTWPNLRATLHKIGVSETDFIRECDATFKQGAEFINWATTPKQNEKSSYYHPLGTVSHSSYDFNLAPYWLLKNKTTRLPYDQAVASQARICDQGLAPKQIVMPEYSAAQEYAYHLNANKFSNFLKKHCIDNLGVKFVSANVTNIVLDENDFITHVETDHCEEKQISADFFIDCSGSKGLIIKQTYNIEWHDISDVLFNDTAFAVQVPYADKKQPIKTHTLSTAQEAGWIWDIGLQERRGVGHVFSSKYISDEKAKQQLIDYIGEDYTDDLVIRKIPIKLGYHQKFWHKNSVAIGMSAGFVEPLEASAIYLFDAAATMIAAQFPRDKKQMLYAEQQFNQNFKIRMERTVEFIKLHYCISARRDSQYWIDNCEPTTIPNKLKQRLEFWKNQPPTKFDFDHAWEPFNLDSYLYVLYGMHYQTDLSGNLSAYPDVKKAEKLFSNVDRQSELLKNQLPKQRDLIEKVKEFGFNKV

SEQ ID NO: 89572 - protein, 521 aa, Erythrobacter sp.
  REGION 1..521: note = tr|A0A176EBZ9|A0A176EBZ9_9SPHN Tryptophan halogenase; OS = Erythrobacter sp. HI0028 OX=1822227 GN=A3723_02385 PE=4; SV = 1
MRPDDGQAQAIGSICIVGGGTAGWSAAALLSQVLRGSGCRITLVESSAIPTVGVGEATIPPIFDFLRNIGADEIEFIRRCQATFKLGIQFRDWLHHGHAYWHPFGNLGVTINQRPFHHYYCMNRAAGHGETLADLCPSVALAEDGKFAFPSPDGQWPGGAVAYALHFDAGLVATFLRDHAVAAGVERLDRRIVGATRGEGERIAAVQFDDGESLEADFYIDCSGFRGLLIEETLGAGFEDWKHWLPCDSAVAAPTAAQEQRAPYTVATARSAGWQWRIPLQHRTGNGLVYASDFVSDADAQAQLLAGLDGEAQADPRVLRFTAGLRKRAWVGNCLAIGLSAGFLEPLESTSIHLIHTGLNRLLDLFPDRRFDPALIAAYNRDVHREYAHIRDFLLLHYVPNRREGEPFWDHMRGLDLPDTLAEKIELFTRTGRIMSRQRELFSDISWFYVMHGMGLTPAALDPLAEAAPFGEVRKVIDQLRGAMQAFRSAAPTHDAILDRLLDPAETRRPQFGTGGGWTTR

SEQ ID NO: 89573 - protein, 543 aa, Shewanella baltica
  REGION 1..543: note = tr|A0A380A3K9|A0A380A3K9_9GAMM Geranylgeranyl reductase family OS=Shewanella baltica OX=62322; GN = NCTC10735_03092 PE=4 SV=1
MQQATHTAINNIVIVGGGTAGWITAALLAAEHNVDKGQLAHSPKLNITLIESPDVATIGVGEGTWPSMRNTLDKIGISETEFIRQCDASFKQGSRFIHWQHDDTEHTKPFGSNQYLHPFSLPHGHQELDLCPFWLPHSDKVSFAQAVSNQDALTQLGLAPKTIATPEYHFQNNYGYHLDAGKFSQLLMQHCTEKLGIKYIRDHVTQVHSHANGDIESLATKEHGVILGDMFIDCSGTKSLLLGEHFNVPFLSQKAVLFNDSALAIQVPYTEENRPIASCTLSTAQPNGWIWDIGLPTRKGVGYVYSSAHCSDDEAEQTLRAYLANDTSTKPQSASSNALDSRKQECRKLNINPGYHAKCWQNNCIAIGMAAGFIEPLEASALALVEWTANTLATQLPTHRGVMDTIAQRVNERYERHWQQIIDFLKLHYVVSRREVDDYWRDHREAASIPERLQQQLDLWRYQAPSSHDISYKEPLFPAASFQYVLYGMGFNTALPTHIKPSQQQVAQRLFSENQQKIHGLSQSLPSNRDLLNKVRQFGFPKI

SEQ ID NO: 89574 - protein, 544 aa, unidentified
  source 1..544: note = Emcibacter congregatus
  REGION 1..544: note = tr|A0A2G4YR78|A0A2G4YR78_9PROT Tryptophan halogenase; OS = Emcibacter congregatus OX=2043170 GN=CRD36_08840 PE=4; SV = 1
MPRWYRYIKSDVWQVFRRNANSEGILRADTAIKSIVIVGGGTAGWLAANYLARCLKAGPGDDFSITLIESPDIPTIGVGEGTVPSMRQTLKFLGISETEFIRECDATFKQSIEFVDWLHVPKDGKHHRYYHLFDDPIRQDFDLTPYWLKGCAGATNYADAVSMQSLFCDQSRGPKHITTPEYEGASGYAYHLDAVKFAKLLTRHATERHSVRHLLGNVTQVVVKDNGHVDYLDTDRCGRLQADFYVDCSGFASLLVGGALGVPFIDKGGELFVDHAVAIQVPYADPEGPIASQTISTARDAGWIWDIGLSARRGTGYVYSSKYTDHDTAEQVIRDYIGPAADELPCRKIPMRIGYRETFWQGNCVAIGLSQGFIEPLEATALLMVDGACRMLAEQFPTDSAALDGAAKRYNRLLRYGYDRVIDFIKLHYYLSRRDDSAFWIDNRRAETVSDHLLERLDQWRYAPPSAYDFFSKFEVFNLENYLYVLYGMDFVTDMASHGARYPEDEAARRLFDQIRQARNNAAVQMPDHRGLIDKIHKFGLQKT

SEQ ID NO: 89575 - protein, 531 aa, Rhodanobacter sp.
  REGION 1..531: note = tr|A0A1V3QNB5|A0A1V3QNB5_9GAMM Tryptophan halogenase; OS = Rhodanobacter sp. B04 OX=1945860 GN=B0E46_00720 PE=4; SV = 1
MPRLKKVLVVGGGTAGWLAACYLAKAMNAVHPDSVQVHLVESDHIGLLGVGEATFPSIRGTLSAIGLDERRFLVGATATYKQGIHYRHWVRPPGTPGSDHFFHPFSQPSQRPGGPELLPYWLLGAAPAGMPFADAVTMQSTLVDHGRGPKRVTDPDYQGPMNHAFHFDAACFAKVLAEHGQETLGVKRHVATVECAELDEYGAIASVVTKELGKLTADLYVDCTGLRSILIGGVMQSSFRSRRDVLFADRAVAMQVPYAKPDTPIPPYTISTAQEAGWIWDIGLQKRRGVGYVYSSRHTDDERAEEVFRRYLGPAGAGLKAMHIKFETGYRPEHWRKNCVAVGLAGGFVEPLESTGIALIELATYLLTHLLPGDADDMESAARHFNEMMVARYDRIIDFIKMHYCLSQRRDSQFWIDNADDASIPQTLQEKLAKWKQRPPHRLDFVGDLEMFMTASWQYVLYGMEFRTDLEPMRSAYPQVEAARREFAMIRQAAVRALDDLPDHRALVEQLCREHMQRIRPDADLAASVGG

SEQ ID NO: 89576 - protein, 519 aa, unidentified
  source 1..519: note = Catenovulum maritimum
  REGION 1..519: note = tr|A0A0J8GNP0|A0A0J8GNP0_9ALTE Tryptophan halogenase; OS = Catenovulum maritimum OX=1513271 GN=XM47_14175 PE=4 SV=1
MSKPIKQIIILGGGTAGWLTAGTIAAEHMSHSDSGVKVTLIESPDVKPIGVGEGTWPTMRGTLKKMGISETDFIRECDASFKQGAKFAGWVTGQTDDFYYHPLVLPQGYTEVNLANYWQQICPNKNFTDAVSFQGYLCEKGLAPKQKNTPEFAHVANYAYHLDAGKFSQFLQKHCTEKLGVKHVLDHVTQVNPEVNGDIKSLSTKANGDLLGDLFIDCSGFKSLLLGQHYQIPFISKKHILFNDTALAVHVPYQTETSPIASHTISTAQSAGWVWDIGLPSRRGVGHVYSSQHISDDQAEAELRQYIRQNLQADDSQLTPRKIDINPGHREVFWHKNCVAVGLSAGFLEPLEASALVLVELSSAMISEQLPETREVMPVIAKRFNQKFRYRWDRIIDFLKLHYVLTKRTDTAYWVDNCRSETIPDDLQELLALWQYHTPWHNDFTQVDEVFPSASYQYVLYGMGFKTQPSASQKRANTNAALAKQHFQHNVQLTEKLLRGLPQNRQLINDIKQQGLHKI

SEQ ID NO: 89577 - protein, 521 aa, unidentified
  source 1..521: note = Massilia yuzhufengensis
  REGION 1..521: note = tr|A0A1I1DMF2|A0A1I1DMF2_9BURK Tryptophan halogenase; OS = Massilia yuzhufengensis OX=1164594; GN = SAMN05216204_101289 PE=4 SV=1
MVSSAIRHVVIVGGGSAGWLTAAVLASSLETQERGGARVTLVESPDVPTIGVGEGTWPTMRDTLRAAGLSESAFFRECDAAFKQGSRFNGWVTGAADDVYFHPFVLPQGWGDADLAGRWLERHSHVPFADMASYQPHLCVQGRAPKQAMTPEFAAVANYGYHLDAGKFGSFLKKHCLEQLGVHFVPDHVTGIASHDNGDIAALHTKAHGALAGDLFVDCSGMQSLLLGQHYGVPFLSQRGVLFNDSALAVQVPYANEHDPIASQTSSTAQAAGWIWDIGLPARRGIGHVYSSAHTSDEQAELALRAYIRATGGPGDIPPPRKLSFHPGYREQFWHRNCVAIGLSAGFIEPLEASALAMVELSAAMLADEMPVTRAQMDISARRFNETFTYRWERVIDFLKLHYVLSRREDSDYWRDNRRSETIPQRLADMLALWTHRPPSRHDFSRIQEVFPAASYQYILYGMGFRPEPGLARRPRVGESDGDTADGFFRQAADLTRRMLPALPDNRALIAHIVRHGLPKH

SEQ ID NO: 89578 - protein, 522 aa, Alteromonas macleodii
  REGION 1..522: note = tr|K0D5T0|K0D5T0_ALTMS Putative tryptophan halogenase OS=Alteromonas macleodii (strain Black Sea 11); OX = 1004785 GN=AMBLS11_17850 PE=4 SV=1
MTTATPITHIVVVGGGSAGWLTAGRIAAQHQCAIRKDIKVTLVESPNVPIIGVGEGTWPTMRSTLIALGISETTFIKECDATFKQGAKFAKWTTGEEHDFYYHPLMLPQGFSQTNLGPYWQSVAPELNESFSHAVCVQEAICEAGRAPKSIRHAEFAGTANYAYHLDAGKFTAFLTKHCTEKLGVHHVLADVNRVESSDNGDIKALHTEQGVIVEGDLFVDCTGFKSMLLGEHYKVPFNPCDDVLFIDRALAVHVPYDTPQSPIASHTISTAQDAGWIWDIGLQSRRGVGHVYSSRHQSKDEAYARLDSYVRQTSTLNGIDGINVKDITIQSGHRQHFWQNNCVAVGLAAGFLEPLEASALVLVELSASMIAEQLPANRAVMDIVAKRFNETFSYRWQRIIDFLKLHYMLSKREDSAFWRDNRDSHSIPDSLKELLALWQYHPPSDKDFTSNNEVFPAASYQYVLYGMGFTSDLATHQQWVNADFAKQQLMQNRKARAMAVEKLPKHRELINKIHQFGLQAV

SEQ ID NO: 89579 - protein, 565 aa, Alteromonas macleodii
  REGION 1..565: note = tr|K0D9Y2|K0D9Y2_ALTMS Tryptophan halogenase; OS = Alteromonas macleodii (strain Black Sea 11) OX=1004785; GN = AMBLS11_18855 PE=4 SV=1
MSDKDSHGNMHRVVIVGGGTAGWLAAGVLAAKLSAKHTITLIESPNIPSIGVGEGSWPSLRDTLLDIGISETEFLTLCQGAFKQGSSFVNWRKGGHCYHHPFTVPTGYNELDIHTCWQELAPNTSYEDAFSLQAVMCRADKAPKQVATPDYAHVLNYGYHFDATKLAELLKKHCVSKLNVAYLVGHIARINPHPNGDIESVLTEDGQKVVGDLFIDCSGSSGLLIKEHFNIPWVPVKQTMLNDRAVAMQVPYSDNDSVIKSTTVATAQTCGWTWDIALQHRRGVGLVYSSEYASEEQAKQTLIDYVSERYPGAQDAQFSCRTLSFEPGYRAQFWVRNCLSLGMSSGFVEPLEASAIAMVELGLRMLCEAYPQNKAHMEIVSKRYNKRFEYRWQRVIDFLKLHYVLSDREEAYWLAQRNEASIPDSLSELLELWKYQSPSRLDLIENEEIFPSASYQFVLYGMGFSTSSSALRLSEEDKRKVLHIRESLQQTKQQYLHGLPSNNALLNDIARRYNELTNQHKHHPHLPSESQTDHHISSSTDNGAEVSKNSTSQKKDASYDRIGFR

SEQ ID NO: 89580 - protein, 503 aa, Caulobacter vibrioides; identical to SEQ ID NO: 82629
  REGION 1..503: note = tr|Q9A4M2|Q9A4M2_CAUVC Tryptophan halogenase, putative OS=Caulobacter vibrioides (strain ATCC 19089 / CB15) OX=190650 GN=CC_2808 PE=4 SV=1

SEQ ID NO: 89581 - protein, 504 aa, Caulobacter vibrioides; identical to SEQ ID NO: 82628
  REGION 1..504: note = tr|Q9A607|Q9A607_CAUVC Tryptophan halogenase, putative OS=Caulobacter vibrioides (strain ATCC 19089 / CB15) OX=190650 GN=CC_2288 PE=4 SV=1

SEQ ID NO: 89582 - protein, 505 aa, unidentified
  source 1..505: note = Emcibacter congregatus
  REGION 1..505: note = tr|A0A2G4YSY8|A0A2G4YSY8_9PROT Tryptophan halogenase; OS = Emcibacter congregatus OX=2043170 GN=CRD36_06820 PE=4; SV = 1
MTAEPIQKLVIVGGGTAGWMSASLLVKLMGADLDITLVESDEIGTVGVGEATIPPIQTFNNVLGLDENAFLRQTQGTFKLGIQFENWGAPGDKYMHAFGPIGRELGFSAFHHFWLRRAKQGASDSLWDYSLNYQAAKADKFARLDHLPGSSLPGLTHAFHFDAGLYARYLRAGSEQMGVRRVEGRITQTQLNSETGFIEAVILEDGTRLEGDLFLDCSGFRSLLMGEALQVGYEDWTHWLPCDRAIAVPAENGPRLRPYTQSIAHQAGWQWRIPLQNRAGNGHVYCSDHISEDEATAVLMNNLEGMPLAEPRTLRFTTGRRAKFWHKNCIAVGLSSGFMEPLESTSIHLIQTAVVRLAQMFPTKAFDAVNEGEYNRQLGFEYERIRDFIILHYHTNQRTDSPFWTTCREMAIPESLQHKMDLFTATGRIFRENNELFTEDGWLQVMIGQGLRPASYHPLADQVPMDTLTDFMANLRGLHQRALTDLPSHTAFIAAHCAAGQVREI

SEQ ID NO: 89583 - protein, 502 aa, Shewanella piezotolerans
  REGION 1..502: note = tr|B8CSA5|B8CSA5_SHEPW NAD(FAD)-dependent dehydrogenase, putative OS=Shewanella piezotolerans (strain WP3 / JCM 13877) OX=225849 GN=swp_3711 PE=4 SV=1
MNIPPRHIIIVGGGTAGWMAANLMSHRWAKLDCTITLVESTKIGTVGVGEGTTPFFQGFFDRLGIHESEWMKAANATYKCGISFPDWITAPQKTSYFHPFYSYIDSPQVPLFFSNANFRREGMDVDAHPDDFFVTSKLAMQCRSPIAKEEVSQRLDYGYHFDAGLLGEFLKKKGVERGVKLVDDKVSDVRLNGKGDISSVITENTGELNADLFVDCSGFKGLLIQQALGEKMISYQSQLFNNSAVAIPTAIDSNEELSSETVSKALSNGWVWHIPLASRYGNGYVYSREYLSPEEAELELRHHLGEKAEGVKALHLSWTPGRISEHWKNNCVAIGLSQGFLEPLEAPMLNIIQRSIENFVELYEKSGFTREYQQEFNSDINSLIDGTRDYLQAHYKLNGRNDSQYWKDCRANVSQSKELKSILDGWIGNRNFDQVLRENIHNQVYFKTSWYCILAGMNHFQESNKPSLRAGKRNHQRAKEACLIKAGGFIKHKEQLAQIYSA

SEQ ID NO: 89584 - protein, 528 aa, unidentified
  source 1..528: note = Catenovulum maritimum
  REGION 1..528: note = tr|A0A0J8JQ34|A0A0J8JQ34_9ALTE Tryptophan halogenase; OS = Catenovulum maritimum OX=1513271 GN=XM47_01485 PE=4 SV=1
MNTGVTNIVVVGGGTAGWITAGTIAAESIKKYGLGVINVTLVESANIAPIGVGEGTWPTMRQTLANMGISEYDFIKKCNATFKQGSQFNAWCSGQIEDSYYHPFSLPADFVNTNLAWHWMSNSHQMPFAELVSPQQVVCQYQLAPKPFPYDEYSAVCNYGYHLDAAAFAEFLKNHCMTKLGVTHIIDDLVAVNAADKLNTKDKCNSQNPIDLDIESITTRKHGNIEGDFFIDCTGQKALLIGEHYQVPFICKKDVLFIDSAIAVQLPTEIEDEIASVTLSTAQPAGWIWDIGLHNRRGIGHVYASDYINDERAQQQLISYLNKQANRTVKQDDLSFRQIKFKPGHRAKFWHRNCVAVGLSAGFVEPLEASSLALVELSAQMIAQQLPSNRAAMSRLAEQFNQRFLYRWQRVIDFLKLHYVLSQRQDSQFWLDNRKPDSIPESLKHQLAIWQDQTPWHYDFDRIEVFPSASYQYVLCGMGFKTNLNGLKPSLQQETIAVENYNRVQASTGQFLAKLASHRKVIQQIRAA

SEQ ID NO: 89585 - protein, 217 aa, Bosea sp.
  REGION 1..217: note = tr|A0A258AAS5|A0A258AAS5_9BRAD Tryptophan halogenase (Fragment) OS=Bosea sp. 12-68-7 OX=1970324 GN=B7Z40_06135; PE = 4 SV=1
MTEPVRTILIVGGGTAGWMAAAALQRTLGPHAKVSLVESDDIGIVGVGEATVPPIRDFNAMIGLDEAEFMRETKATLKVAIVFKDWGHIGNRYVHPFGTFGRGPTLAEFQQTWFALKARGLAGDLSDYSVCSRAADAGKVGDRDPDPRSPKNSLFSAYHFDAGLYAKYLRKVCEGRGVERIEGKIVDVFQRADDGFVTGVTLEGGRVLEADLFIDCT

SEQ ID NO: 89586 - protein, 503 aa, Shewanella baltica
  REGION 1..503: note = tr|A0A165K6M5|A0A165K6M5_9GAMM Tryptophan halogenase; OS = Shewanella baltica OX=62322 GN=A1L58_01700 PE=4 SV=1
MKVKQAIRKIIILGGGTAGWMAAAALANNPVFAAIELCLVESDNIGTIGVGEGSTPHLKRFMDNLGISEKDWMERCHASYKTGIDFINWNGDGQQYFHPFYFQMDVKPAEVFFINANARRRGHGNAIKPDAFFSSGVLAKHNLSPRPNKAMPYINEYGYHFDATELANYLKDYACQRGVRQIIADVVEVSTTQHQQIETLILANGERLSADFFIDASGFSAKLIHKALGVPFQSFAEELLNDSAVTVPVPVPALLDSTQTQQAKYHTRATALSAGWLWQIPLTHRLGNGYVYSSRHLSANAAAKELLHSVNLPESTQVRFLKLRVGVSDKAWHNNVLAIGLAQSFIEPLEATSIMMTQFTLERFMSLFERYQLNKQAETLSRQTLNQAVMQLVLGIKDYIQAHYVTSQRSEPYWMAARKVAISQRLTQLLQAWYQGEDFDLLLYQYDQQLAYFRPSWYALLAGMDYRDPKLKRPFEPISAEITAQAINYCQTLVEQYFQPKHS

SEQ ID NO: 89587 - protein, 499 aa, Shewanella baltica
  REGION 1..499: note = tr|A0A379ZED3|A0A379ZED3_9GAMM Lycopene cyclase family protein OS=Shewanella baltica OX=62322; GN = NCTC10735_02116 PE=4 SV=1
MNKIKDIVIVGGGSSGWMTAAMLARLFKSTLNITLIESEDIGTVGVGEATIPPLQIFNNVLGISEADFINATQATFKLGIQFENWGKPDEAYMHAFGNVGKDIGFTQFHHYWLSTSPKEVNSFWDYSVNYQAAKHNKFQVLQQIPNSPLAGLTHAYHFDAALYAQFLRRFSEQLGVKRIEGQITAVELTPNGDIESVTLGSGQTIKADFFIDCSGFAALLIKKALKVGFDSYQHLLPCDSAYAVPCEKTPAITPYTRSIAHDAGWQWRIPLQHRTGNGLVYCSRYISDDAAKQLLLSNLDGKPLAEPKKINFTTGRRIKQWHKNCVAIGLSSGFLEPLESTSLHLVQSAIIRLSKLFPHQGIAQANVDEFNRQSQLEFEQIRDFIILHYHLNQREDAQENGFWHQCRTMVLPESLQQKIALFRATGTVFRHQDELFTEAAWIQVMLGQGIRPRDFNPLAATIQPQALSEFLLNMRTIIDNTVTKLPTHDQYLAHLSTHK

SEQ ID NO: 89588 - protein, 532 aa, Shewanella piezotolerans
  REGION 1..532: note = tr|B8CL82|B8CL82_SHEPW Tryptophan halogenase; OS = Shewanella piezotolerans (strain WP3 / JCM 13877); OX = 225849 GN=swp_1630 PE=4 SV=1
MNNDIKKVIIVGGGAAGWLTAGVIAAEHINAAATPSQRTLEVILIESPQVPTIGVGEGTWPSMRGTLKKMGISETEFMIECDASFKQGSKFIDWLHSPETASSDKLPLNSQSYYHPFSLPSQFNEINLAKHWQAHKQQVSFTNAVTYQGRLCDQGCAPKLISTPEYECNANYGYHLDAGKFAQFLQRHCSKKLGVQHIVDHVESVSSHGNGDIAAVNTKSNGAISGDLFIDCSGFKSLLIGEHYQVTFIEKKSVLFNDSALAVQVPYENQQSAISSCTHSTAQSSGWVWDIGLPSRRGVGYVYSSSHTDDDRAESELRSYLLSSISKSQAESASLRKITFNPGHRAHFWHKNCVAVGIAAGFIEPLEASALALIEQSAKMISEQLPQNRQSMEIVAKRFNEKFLQRWRQVVDFLKLHYAISQRDDSDYWRDNRDIASIPQSLQQQLALWQYQQPYSYDITETEALFPAASFQYVLFGMGFNSAPPRYIKLAEQEKAMALFQQNIQRSHQLLSALPSNRALLDKVHQFGFPKI

SEQ ID NO: 89589 - protein, 497 aa, Shewanella piezotolerans
  REGION 1..497: note = tr|B8CL79|B8CL79_SHEPW Tryptophan halogenase; OS = Shewanella piezotolerans (strain WP3 / JCM 13877); OX = 225849 GN=swp_1626 PE=4 SV=1
MNTNKPIKNVVIAGGGTAGWMAAAALSKLLGKNLNISLIESDDIPTVGVGEATIPTLHVFHRLLGINEQEFMAATNATFKLAISFENWRDENQDYLHSFGFLGKDCWAAGFQHFWLKGRDKGFASEIGDYCAEHLGSRTGKFAVLPNQDLNHAYHHDAGLYAKFLRKIAEQHGINRIEGKITEVNLNQQDGQIESLLLASGQLVEGDLFIDCTGFRGLLIENALHTGFEDWSHWLPCDSAIAVQTTTTSTPVPYTRSIARESGWQWRIPLQNRTGNGLVFCSKYMTDEQAKQLLLDNIEGDLLTEPRVIKYKTGTRRKHWNKNCVAIGLSSGFIEPLESTSIHLIQRGIVRLMQMFPAQGLVQADIDEFNAQTKFETDNVRDFIILHYHVTQRRDSKFWRYCSSMPIPESLAHRLEMFAAAAKVYKYPNELFGESSWIQVMLGQGIEPKQYHPIVDMMEDEELKAFLNNIKSVVKRKNDNLPHHYDFIQHYCKSPMM

SEQ ID NO: 89590 - protein, 508 aa, Brevundimonas vesicularis
  REGION 1..508: note = tr|A0A1Z3U4Z9|A0A1Z3U4Z9_BREVE Tryptophan 7-halogenase OS=Brevundimonas vesicularis OX=41276; GN = CEP68_01695 PE=4 SV=1
MTPAPLKRILIVGGGTAGWMAAAALAHVTRGTVKVELVESEVIGTVGVGEATIPPILLFNQLLGIDENEFIRATQATYKLGIQFNDWFQKGRSYFHPFGTYGTRIDAASFHQYWLRLNKAGLDDDLDAYSVTTMAARSGRFTRPDTDPRGAASQMTYAFHFDAGLYARFLRQRAEANGVVRYEGKIADVRLRDGDGFIQSVRLDDGRELEADFFVDCSGFRGLLIEGALKTGYEDWTHWLPADRAVAMPCTRVGDPTPYTQSTALEAGWRWRIPLQHRTGNGYVYCSPFISDDEAQAKLRASLDGEAMAEPNFLRFTTGRRKKTWNKNCLALGLASGFLEPLESTSIHLVQSGISKLLLHFPDTGFAQADIDNYNRMMRLETERIRDFIILHYHATARDDSPLWRHVRTMPIPETLKQKMDQFRSRGRIFRYEDELFQETSWIAVLLGQGVIPERHDPITETIPLEQVQQWLQKMKAMIQHGVARMPTHEAFIAANCKAPPLQQGGDA

SEQ ID NO: 89591 - protein, 510 aa, unidentified; identical to SEQ ID NO: 84044
  source 1..510: note = Unknown
  REGION 1..510: note = tr|A0A4S1I4P5|A0A4S1I4P5_9BACT Tryptophan 7-halogenase OS=bacterium M00.F.Ca.ET.141.01.1.1; OX = 2563898 GN=EN784_07680 PE=4 SV=1

SEQ ID NO: 89592 - protein, 468 aa, Brevundimonas vesicularis
  REGION 1..468: note = tr|A0A2X1B804|A0A2X1B804_BREVE Tryptophan halogenase; OS = Brevundimonas vesicularis OX=41276 GN=NCTC11166_01241; PE = 4 SV=1
MSGSDKVWVIRGGGLAAWAAAALLAKTLPSGHSVLMEDAVAPALGEEPEVVIAEPDGVLVQLSEAADLLAQGHGGFFLGSLLRNWRDGRDIAVVEQEPLPGIDGVALVDVVLRAARLSPAAPDYAALLAPLQFQARVMAAGRYAHPSPDRQSPRSLLRPRLRLDARVLTARLRDTALGAGVREGLGDIREIAPFMTVDTRATSAFDGDDDWTARLGYDRCLTLRYAGGDHAPRLDMASLEEGLASRSPLPGGGFASLAYAADRTTADVAKAALAAWLGDVDVAAPSDVALAPGLDTHPWSGRRLALGPAAARFGDPLSLDSAALERQLTQLVASLPGASEQISACAEAYNEAVVRDIAHRADRLHLILLSGSQGQRLAPAGDNLARRIAQFTSRNAGVGLDGDPYDAQHWIMLMASLGIMPRRYDVQADRLDIKAAMASLGRMVIAFDQTLAALPAHSRFVDRLREGG

SEQ ID NO: 89593 - protein, 516 aa, Caulobacter vibrioides; identical to SEQ ID NO: 84523
  REGION 1..516: note = tr|Q9A9K8|Q9A9K8_CAUVC Tryptophan halogenase, putative OS=Caulobacter vibrioides (strain ATCC 19089 / CB15) OX=190650 GN=CC_0972 PE=4 SV=1

SEQ ID NO: 89594 - protein, 507 aa, Alteromonas macleodii
  REGION 1..507: note = tr|K0D0I7|K0D0I7_ALTMS Putative tryptophan halogenase OS=Alteromonas macleodii (strain Black Sea 11); OX = 1004785 GN=AMBLS11_08935 PE=4 SV=1
MQNPQNKPIKRVVIAGGGTAGWLAASLMKKVLGKAVDITLVESEAIGTVGVGEATIPPIRLVNQVLGIDEAQFIHDTKATIKLAIRFENWKTKGQSYYHTFGAPGKSMAFCHFHHYWVKARQQGLTHDLWDFDLNFHAAEAGRFAQINAKDPVVELPFAYHFDASLYAQYLRKLSENMGVVRKEGKIARVQRCSDSGFIQSLHLESGEEIKGDLFVDCTGFKGLLIEGALGAGYDDWSHLLPCDSALAVPSERHEKTAPYTRSIAHDAGWQWRIPLQHRNGNGHVYSSRYISDDQACETLLSNLDTKPLGDPKLIKFTTGRRRKQWYKNVVAVGLSSGFLEPLESTSIHLIQSAIVRLIQLFPHNGFAPTLESEYNKQSELEFEQIRDFLVLHYNVNERTDSAFFNDMRNITLPDSLAHKIELFKESGNLLREQNDLFLESSWLQVMYGQGITPMDYHGLVNSVPESQLNQMLIRLLEIKKEPITKLPTHDEYINGMVAKYKRSMNS

SEQ ID NO: 89595 - protein, 504 aa, Alteromonas macleodii
  REGION 1..504: note = tr|K0D6R7|K0D6R7_ALTMS NAD(FAD)-dependent dehydrogenase OS=Alteromonas macleodii (strain Black Sea 11) OX=1004785 GN=AMBLS11_13790 PE=4 SV=1
MNKLPQEIVIVGGGTAGWMTTCYLARTAELMASNSNVPACASKITLLESAVISTVGVGEGSTPYLRHFFEFLGISESEWMLKCSATYKMGISFERWTATAESKTTRPAFTDSDRYFHPFFSSLDIPTADMYFSAVNEYRQGASQDINPSHYFTAAHMVEKGITPDAICSSANIDYAYHFDAGLLGDFLKEYALNKGVSHQIGTVANVECHKHTITALKLDDGNTLSADFFIDCSGFRGLLGKQALSRRFTSYADTLFNDAAVAIASDATASPDTALQTRSVALSYGWQWHIPLTSRTGNGYVYSSQFCTEAQAEEGLRLALEPDQPHQQARHLKMTVGRLEEHWKGNCLCIGLSQGFIEPLEATALMLVQYALHHFIDCWQSNNPQRVERYNSEINRMFDGIRDYIAAHYYLNTRDDSAYWVACREDLKVPDTLSFLLNAWDKGASFEQALNEVDNKLVYLRPSWYCIFAGMKRFSNNSTPLAQPNILALRTMQQSVDGAYRAR

SEQ ID NO: 89596 - protein, 507 aa, Caulobacter vibrioides; identical to SEQ ID NO: 84517
  REGION 1..507: note = tr|Q9A7G8|Q9A7G8_CAUVC Tryptophan halogenase, putative OS=Caulobacter vibrioides (strain ATCC 19089 / CB15) OX=190650 GN=CC_1755 PE=4 SV=1

SEQ ID NO: 89597 - protein, 505 aa, Sphingomonas sp.
  REGION 1..505: note = tr|A0A258TL38|A0A258TL38_9SPHN Tryptophan halogenase; OS = Sphingomonas sp. 28-66-16 OX=1970435 GN=B7Y45_00875; PE = 4 SV=1
MTEAAPRRIVILGGGTAGWMAATLFAQAWGRMKGTGQAEVTVIESPEIGIIGVGEGSTPQLRAFFAHIGIAERDWMPRCHATYKAGIAFHGWSERPGYAAYFHPFATDLDVHSQDAFFTHAAARRGGYDLDAHPDRFFLPALLARDRLAPIPADNFPFDIGYGYHFDAHLVGAVLRDHARSIGVTHLERRVTEVRIGADGNVSELVTAEGEAIGGDLFVDSSGFASVIAQQALGVPFRSFADTLFNDSAVVMPTPADPGGINVHTKATALSAGWAWDIPLTSRTGNGYVYASGYVSADAAETELRGHLGLLDSAVAARHLKMKVGRIEHSWAGNCLAVGLSQGFIEPLEATALHLVQATVEGFIDAYQQGDFSPRHRDAFNARIAARYEGVRDYIVCHYRLNQRTDTPYWRDNAANNALSGSLKALLHCWFTGGDLVAEVDGQGIAGYYSAISWHCLLAGYGTFPPDARLRAAPGAGENMTRIGDFLTRCARNFRQHDIQLAMLA

SEQ ID NO: 89598 - protein, 499 aa, Streptomyces sp.
  REGION 1..499: note = tr|A0A0H4CCF1|A0A0H4CCF1_9ACTN Tryptophan halogenase; OS = Streptomyces sp. PBH53 OX=1577075 GN=QR97_23410 PE=4; SV = 1
MTAAYLRRALGDKVSVTLVESKRIKTIGVGEATFSTVRHFFDYLGMAEHEWMPRCNATYKLGIRFENWREKGHYFYHPFERLPVVDGFPLTDWWLAKKPGPRFDQDVFLMSSIVDNERSPRFLDGTLFEQEFVERAGDQARTTLSEQSTQFPYAYQFDASLLADYLCEYATERGARHIEDDVLDVVRDERGWISHVVTKEHGDLTGDLFIDCTGFRGLLINQALEEPFVSYQDTLPNDSAVALRVPVDMEKRGLRPCTTATAQDAGWIWTIPLYGRIGTGYVYASDYCGPEEAERTLREFVGPEAADLEANHIRMRIGRTRQSWVNNCVAIGLSSGFVEPLESTGIFFIQHGIEQLVKHFPDAGWDPGLRNSYNTAVARVMDGVREFLVLHYHCAARADNAYWRDAKTRALPDGLAERLEQWRSKLPSMDTIYPHYHGFEPYSYLSMLLGLGGLELKPANAVSLMDDSRAADEFRRIKDLSHDLVKRLPSQYEYLSQMR

SEQ ID NO: 89599 - protein, 504 aa, Rheinheimera sp.; identical to SEQ ID NO: 83482
  REGION 1..504: note = tr|A0A2E6Z4I6|A0A2E6Z4I6_9GAMM Tryptophan halogenase; OS = Rheinheimera sp. OX=1869214 GN=CML21_16415 PE=4 SV=1

SEQ ID NO: 89600 - protein, 499 aa, Caulobacter vibrioides; identical to SEQ ID NO: 84511
  REGION 1..499: note = tr|Q9A9H8|Q9A9H8_CAUVC Tryptophan halogenase, putative OS=Caulobacter vibrioides (strain ATCC 19089 / CB15) OX=190650 GN=CC_1002 PE=4 SV=1

SEQ ID NO: 89601 - protein, 416 aa, Flavobacterium sp.
  REGION 1..416: note = tr|J1KT83|J1KT83_9FLAO Tryptophan halogenase; OS = Flavobacterium sp. F52 OX=1202532 GN=FF52_12351 PE=4; SV = 1
MTKEFVDVLVIGAGPSGCVSASYLFKNNVKVKVVEKTKFPRLVVGESLIPRVMDHFAEAELFDALDAMNFEKKLGARFIRGEEICNFDFSVKFGEGWDWTWQVPRADFDNTMAQEIIRKGIDLEFETEVLEVSFEGKNSKTIVKDKDGNLKEIHAKFIIDSSGYGRVLPRLLDLDTPSKLDPHSSIFTHVKDINREEGVEGTQISFDILETEVWLWVIPFSNGNTSLGVVGPTDFINSLSENKDNAEALRNAIQKSDYYIKRFAGTEFLFEPVKLENYSRAVKRMYGDGFALTGNSSEFLDPVFSSGVAFATESGMLAAKLYLKESQGIPVDWEVEFTQYMKRGIAVFTTYVQEWYTGNLQTLFFHQPENPEVKEKICAVLAGYVWNEENSFVKKHDHVIANMAYLLNMQKEQSSE

SEQ ID NO: 89602 - protein, 504 aa, Caulobacter vibrioides; identical to SEQ ID NO: 84483
  REGION 1..504: note = tr|Q9AA21|Q9AA21_CAUVC Tryptophan halogenase, putative OS=Caulobacter vibrioides (strain ATCC 19089 / CB15) OX=190650 GN=CC_0787 PE=4 SV=1

SEQ ID NO: 89603 - protein, 499 aa, Sphingopyxis sp.
  REGION 1..499: note = tr|A0A0W1CHP2|A0A0W1CHP2_9SPHN Tryptophan halogenase; OS = Sphingopyxis sp. H115 OX=1759073 GN=ATE71_18290 PE=4; SV = 1
MSDRKPVQRVVIAGGGTAGWMMAAAIARTMGHTVDLTLVESEAIGTIGVGESTIPPLVNFNRILGIPEPEFMRATQATFKLGILFDNWKHDGDSYFHSFGLSGKDHWSAGFQHFWLNARERGHEQPYEDYCLELVAGMQGKFAHLPEDRMNYAYHVDATLYGRYLRKLAEADGCTRVEGKITRVELDSETGDIAALHLDGERRVEGDMFVDCTGFRGLLIDGALHAGFEDWSHWLPNDSAIAVQSKHLGPPMPYTQAIAHDAGWQWRIPLQHRMGAGIVYTSGYLSRDEAYDRLMSSVGEPLIEPFDIKFKGGVRRKQWYRNCVAVGLAGGFVEPLEATTVHLIQRAVLRFIRLMPNGRVSERDAQEFNDQQRLDIEQIRDFVVLHYKATNRRDSPFWRHVATMPVPDTLQQKIELFRETGRVFRKYEELFAENSWVQVMMGQGIEPQTYHPIAAKLRDDEVERLFQTLRDNIAQTVATLPEHHAYVARYCGAEEPKAA

SEQ ID NO: 89604 - protein, 515 aa, Sphingopyxis sp.
  REGION 1..515: note = tr|A0A0W1CHP3|A0A0W1CHP3_9SPHN Tryptophan halogenase; OS = Sphingopyxis sp. H115 OX=1759073 GN=ATE71_18305 PE=4; SV = 1
MNSAIERVVIVGGGTAGWLAASLLATSRRAKAAPLSVTVVEAPDVAIVGVGEGTWPTMRATLHTIGLDEGAFLAACDGAFKQASRFDGWVDGSAGDSYLHPFTTPPPIPTGELLAAWQASAPGQSFAAAMSAQAAVCMDHLAPRQRTMPDYQGAANYAYHFAAEKFAALLSAHATQALGVEHIRARVTATRRAANGDIAAVIIADGDAIAGDLFIDCTGFKGLLIDGELGVEWIDRGDHAFNDRAIASQVPVPPGSPIASQTIATAHEAGWIWDIGLPSRRGIGCVYSSRFMDTERAEAILRDYIARELPGAIPEEGAFGVPLKHISFRTGHRARFWEKNCLSIGLAAGFIEPLEASAIVLIELSMRALTDNFPADRAAMDIHAARFNRLFRYRWDRIVEFLKLHYVLSRRDEPYWRAHRDPDHIPPHLVELLTLWRDQPPSSSDFPYVDEIFSAESHQYILYGMGFPAPAGWPASDRALSALAEMRQRARTLAAGLPTNRAYLDTLAADRVAAE

SEQ ID NO: 89605 - protein, 511 aa, Luteimonas sp.
  REGION 1..511: note = tr|A0A290XEJ6|A0A290XEJ6_9GAMM Tryptophan halogenase; OS = Luteimonas sp. 100111 OX=2006110 GN=CNR27_08975 PE=4; SV = 1
MDTAHAAPGRIRKVVIAGGGTAGWLAGCALAHQFRDLLDITLVESDQIGTIGVGESTVPPIRNFHRFLQIDEQEFLRAVAGTFKLSISFEGWGQPGDRYLHPFGPAGQGTWATPFHHFWLDSRRRGMPPSTLADFCLEGVAALADRFSLDTRPQVNYAYHLDAGLYARFLRGIAERHGLVRVEGKIGEVERHAHSGDVAAVVLDDGRRLEGDLFIDCTGFRGLLIEQALETGYEDWSHWLPCDRAIAVQTESARGPVPYTRAIAHEAGWRWQIPLQHRVGNGLVYCSRYLSDDEAQARLMHDMESRPLREPRLVPFRTGRRLRTWNRNVVALGLTSGFVEPLESTSLHLTMSAIVRLIQLFPFEGISPALVDRFNDLGRAEAEHVRDFVILHYHATRRDGPMWAECREMELPASLEQRLRAWRDRAHAWQLGDELFRVDSWAHVLMGQGVQPGPPHPLVRGLGDDALRQLLAGIRAQIAHAAAGMPSQQTFIASYCKAGPGVWSAGMPAPA

SEQ ID NO: 89606 - protein, 483 aa, Sphingopyxis sp.
  REGION 1..483: note = tr|A0A0W1CK51|A0A0W1CK51_9SPHN Tryptophan halogenase; OS = Sphingopyxis sp. H115 OX=1759073 GN=ATE71_16990 PE=4; SV = 1
MTAAALSRTMDNLSIHLVESDEIGTVGVGEATIPAIRLFNALIGIDENEFIRETGGTFKLGIQFHDWGRIGDVYMHAFGQIGRSLGMLPFQQYWLRGRNEGVAGRLGDYSLNETAGRQNRFARLPQIPNTSLDGIAYAFHFDAALYVAYLRKVAEAAGVVRTEGKIVSVRKDGERGHVEAVVLEDGTAIEGELFIDCSGFRALLIEEALETGFEDWTHWLPCDRAIAVPSENAGPARPYTQAIAHKAGWQWRIPLQHRTGNGHVFCSDFISEDEATATLLANVEGRPLAEPRTLRFRTGMRSRAWNANVVALGLASGFLEPLESTSIHLIQNGIAKLIAHFPGRDFDAANIDAYNRRIRFDYERIRDFVILHYHANQRSDSPFWVRCREMGVPETLAAKIELFRSQGQIVREGEELFVEIGWFQVLTGQNIVPCGYHPMADALTSDELAGFFDDIETIVARTASRLPFHEEYIAQHCAAGVPA

SEQ ID NO: 89607 - protein, 503 aa, Duganella sp.; identical to SEQ ID NO: 88139
  REGION 1..503: note = tr|A0A1E7VC17|A0A1E7VC17_9BURK Flavin-dependent tryptophan halogenase PrnA OS=Duganella sp. HH105; OX = 1781067 GN=prnA_1 PE=4 SV=1

SEQ ID NO: 89608 - protein, 508 aa, Brevundimonas vesicularis
  REGION 1..508: note = tr|A0A2X1CWY4|A0A2X1CWY4_BREVE Tryptophan halogenase; OS = Brevundimonas vesicularis OX=41276 GN=NCTC11166_01240; PE = 4 SV=1
MMTQTDAGPIRKVVILGGGTAGWMTAAALSHRLAGSPVSIELVESDEIGIVGVGEATLPHIRAFNTAMGIDEQSLIDQTQATFKLGIQFVDWGRPGDSYIHPFGAYGEPIEGIDFHHVWAARRAMGDAADISDYSYPVRAAEANRFQRPASDPGSILSTFSYAFQFDASLYAAFLCQVSCGRGVVRTEGKVVDHVLNGATGDVDAIVLSDGRRISGDLFVDCSGFRGRLINQALETTFEDWSHWLPCDSAFAVPCQTTAAVGPYTRATARAAGWQWRIPLQHRTGNGHVFSSAHISDEDAVATLMSNLEGPALAEPRRLGFKTGRRQRLWSRNVVAIGLSGGFLEPLESTSIYLIQLGITTLLDLFPDRVGMAADAQEYNRIMALEFDRVRDFLVLHYVANQRDEPFWREMRTMAWPDSLSAKVEAFKSRGLLPDYDIGVFLPPSWLAVLVGQNIVPNAWDPRVDRLEPHVLSAKLAALRDAVRSTVGRTPDHMTFIRQAAQRAGGVR

SEQ ID NO: 89609 - protein, 492 aa, unidentified
  source 1..492: note = Catenovulum maritimum
  REGION 1..492: note = tr|A0A0J8H1G3|A0A0J8H1G3_9ALTE Uncharacterized protein OS=Catenovulum maritimum OX=1513271 GN=XM47_01760; PE = 4 SV=1
MLSIKNKILIVGGGTSGWMTASLLAKKWPDSQIELIESKNIGTVGVGEGSTPYIKQFFNALEIKEADWMPYCSATYKNGIQFVNWSKTPGYEQYFHAFLSDLDEKYASEFEQATIERRNGQAVKAHPDGYFFLQSLTKDLRQPVTDAKVDHENVYAYHFDSGKLADYLKQYCLNLGVKHQYVDVETVELNANGEIAAVISQEQKRFTADLYIDCTGFKALLIQQHLNEPFIPFNNNLLNDRAVTVATKATAHYQPQTISTALSNGWAWKIPLTTRTGNGYVYSSKYISDEEATQELIEFVGEDNLISEPKIIPMKVGRVKRSWVKNCVAIGLSQGFIEPLEATGLHFIQSTIETFILLYEMGEGTDDYQEVYNREIEHLFENVRDYIVSHYLTNTRSDSEYWRACREQIKISDSLKALMNAWCSGKDFRDTLVKAEIANIYPSESWHMLLAGMGFLPPIAGAHEPSMQEQKILAKIASEYQHYVDLYPKTHG

SEQ ID NO: 89610 - protein, 503 aa, Shewanella baltica
  REGION 1..503: note = tr|A0A380A5Q8|A0A380A5Q8_9GAMM Tryptophan halogenase; OS = Shewanella baltica OX=62322 GN=NCTC10735_03095 PE=4 SV=1
MTTAIKRVVIAGGGTAGWMAAAALTKLMGKHLEMVLVESDEIGTVGVGEATIPTLHIFHRLLGLKEQEVMAATNATFKLGISFENWQDINKNYLHSFGFLGKDCWACGFQHFWLKGKQLGMVSEIGDYCAEHLAARQGRFAVLPNQDYNHAYHMDASLYAKYLRKMAEQHGIHRIEGKIKQVLQHHDSGNIKALVLENDETIEGDLFIDCTGFRALLIEQTLNTGFEDWSHYLPCDSAIAVQTQSVGAPIPYTRSIARDSGWQWRIPLQNRTGNGLVFCSKFISDEDATELLLANLEGEPLNKPRVIKFKTGTRRLHWHKNCVAVGLSGGFLEPLESTSIHLIQRSIIRLMQLFPSAGIVQSDIDEFNQQTKLEMDNIRDFIILHYKATEREDSRFWRYCKNMDIPASLKHRIEMFADSGKVYKYGSELFGESSWIQVMMGQGIMPKHYHPIVDVMEEPELEAFLNNIKSTVKRKVESLPAHIDFIQHYCPAEVLANTKPMAM

SEQ ID NO: 89611 - protein, 502 aa, Rhodococcus sp.
  REGION 1..502: note = tr|A0A2A3FHR1|A0A2A3FHR1_9NOCA Tryptophan halogenase; OS = Rhodococcus sp. ACPA4 OX=2028571 GN=CJ178_19510 PE=4; SV = 1
MSSRIDEVDVVVVGGGPGGSSAATLLAKGGHRVVQLEMEQFPRYQIGESLLPATVHGVCRLLGVEKEMEEAGFMRKRGGSFRWGKNPVPWNFLFAITPEFAGPTSYAYQVERMKFDHILLKHASNCGVDVREQAAVTGPILDDNGRVVGVTYTDVDGDVCEVRAKYVVDASGNKTRLTKYAGTERVYSDFFQNVALFGYFNGGKRFPEPDSGNILCAAFDEGWMWYIPLTDELTSVGAVIAKDHAAKIQGDQEHALAKFVKRCAIVDDMLSDATRVTEGVYGQIRTRKDYSYANTKFWGNGMVLVGDAACFIDPVFSTGVHLATYSAVLAARSINSVLSGELTEERAFGEFEGRYRREYAVFYEFLSSFYDMEQSEDSYFWKARRVTNFDRQDMTAFVSLVAGAYSQEDVLTDADAVVKRFSASTKALTDATVKTGGMDTASGQRMNHLFAAPVVREVMEEMNSLQARGATDSIQTPPPLLEGGLVPSPDGLAWAEPAVAAR

SEQ ID NO: 89612 - protein, 504 aa, Altererythrobacter epoxidivorans
  REGION 1..504: note = tr|A0A0M4LWL3|A0A0M4LWL3_9SPHN Tryptophan halogenase; OS = Altererythrobacter epoxidivorans OX=361183; GN = AMC99_02455 PE=4 SV=1
MNDSKPMAKPIKRVVVAGGGTAGWMAAAALARAFGNVIDLTLVESEAIGTVGVGEATIPPLVGYNRLLNINEAEFMRETQATFKLGIEFENWKVDGEKYFHSFGTTGRDHWAANFLHFWMHGKTRGHTASFDDYCLELKAAYAHKFAQLPDNRLNYAYHLDSSRYAAFLRKIAESEGATRVEGKIAEVELDSESGDIAALRLDSGKRIEGDLFVDCTGFRALLIGGALHVGYDDWTHWLPCDAAVAVQTESVREPIPYTRAIAHDAGWQWRIPLQHRQGNGIVYCSRYLDKDAAAERLLSSVEGKTLTDPNFIRFQTGARRKQWHRNCVAVGLSGGFMEPLESTSIHLIQRAVVRLIRMLPAGTIDQSDIDEFNDQQLTDMVQIRDFLILHYKATERGDSPFWRQCRDMDIPDSLQHKIDLFRQTGLVFRKNDELFVENSWIQVMMGQGIVPESYHPIATKLSDSELDNLLTNIRESVEKTVAGLPAHHAYVSQFCGANTKAAA

SEQ ID NO: 89613 - protein, 545 aa, unidentified
  source 1..545: note = Nostoc punctiforme
  REGION 1..545: note = tr|A0A367RFA3|A0A367RFA3_NOSPU Tryptophan halogenase; OS = Nostoc punctiforme NIES-2108 OX=1356359 GN=A6769_19205; PE = 4 SV=1
MSQNVQNIVIVGGGTAGWMTAAYLSKALDKNINITLVESSNITKIGVGEATFSTIKVFFDFLGLQEHEWMPKCNATYKMAIKFVNWNAKGQHFYHPFQRYEVIDGFDISEWWLKMKKDQEAFDYACFLTPWLCDHQLSPRYLDGKVFDRKVQNEFSQEDIVKKNILDKLNIQYPYAYHFDANLLARFMKDYAMERGVKQTVDDVVDIKLTEDGSIDSLITKEYGILSGDLFIDCTGFRGLLINKALGEPFISYSDSLLCDRAIAMQIPTDIKKDGIKPYTTATALSSGWVWNIPLYGRDGTGYVYSSAFISAEDAEQEFRQHLGAATDNRQVSHIKMRIGRNRNSWVKNCVAIGLSSGFVEPLESTGIFFIQHGIEELVSHFPSKSFNQELIHSYNKVIADCIDGVREFLTLHYYASDRTDTEFWKATKNNIKVPEELQEKLRLWKKRLPSNKTINLKYHGFESYSYSVMLLGLNYIPESSLPIFEHVGNHNAEAAFVEIRERANYLTSTLPSQYEYLTHVIKSQEQSEYLSVSDRAYQIPTLVS

SEQ ID NO: 89614 - protein, 509 aa, Brevundimonas vesicularis
  REGION 1..509: note = tr|A0A2X1CVY0|A0A2X1CVY0_BREVE Tryptophan halogenase; OS = Brevundimonas vesicularis OX=41276 GN=NCTC11166_00908; PE = 4 SV=1
MQADPSRKIRKVCIVGGGSAGWMAAALLSEHLKGALGQIELVESDDIGTIGVGESTVPPFLQLLAKLGVDEQVFVREVQASFKLGIEFRDWKAKGQSYFHPFGTIGAPVDLADFYQVWLKAALQGYPGGLQDFAPAAVMAREGRFTLPFKAARTPVGGASYALHVDAKRVARFLRTFAEARGVTRVEGIVEDVRVRADGFVDHLVLKGGRTVEADFFIDCSGFRSLLIGKALKVGYHDWSHWLLCDRAVAVQTENVGPPAPYTLAQAQDYGWRWRIPLQHRTGNGYVFCSQYLSDDEATASLMAQVEGAPVVKPMVVPFKTGVRERLWDKNVLALGLAGGFIEPLESTAIHLIYRGLDFFFRFLPDRDCDPVLADEYNRRMIADYEEIRDFIVLHYCLTERDDTPFWRACRTMELPPELKRKIALFRSGGRLAEGLDELFRAVSWQSVMEGMGVRPHTHHPLTNRIPFDDVPGQLDHAAELLRRVVADLPTHQQFIDRHCAAPSPKVSA

SEQ ID NO: 89615 - protein, 415 aa, Burkholderia ambifaria
  REGION 1..415: note = tr|Q0B9K3|Q0B9K3_BURCM Tryptophan halogenase; OS = Burkholderia ambifaria (strain ATCC BAA-244 / AMMD); OX = 339670 GN=Bamb_3616 PE=4 SV=1
MSEMKSNSVDVAIIGAGPSGAVAAALLRRAGRSVLVLERQHFPRFSIGESLLPQSMQYLEEAGMLQAVVEAGFQFKNGAYFVYRDRMSSFDFREKFSDGWGTAYQVERAAFDDLLIRCAADQGADVRFGHTVQAFHPGDMQRLEVVDEAGCEYSVHASFVLDASGFARVLPRLLDLEAPTGMPTRAAIFSHVEDSLPAGSTDRDKICIAVHPARRDVWFWMIPLTNGRSSVGCVADAGFLDVPQAQQESLLRELLQSEPTLSRLVGSKPFVMLVRRIAGYASNVEHLHGRGYALLGNAGEFLDPIFSSGVTIAMRSAQLAVAVLERQLRGETVDWTHDYDIALRKGIDTFRAFVERWYSGALQDIVFHEDKASDVKRMVCSILAGYAWDESNPFVREPARGLDVLAEFCRAGGLG

SEQ ID NO: 89616 - protein, 505 aa, unidentified
  source 1..505: note = Sphingomonas edaphi
  REGION 1..505: note = tr|A0A418PZ92|A0A418PZ92_9SPHN Tryptophan 7-halogenase OS=Sphingomonas edaphi OX=2315689; GN = D3M59_07620 PE=4 SV=1
MTDSRIRDVVIVGGGTAGWMAASALSSVLGEQLNIRLIESDEIGIVGVGEATIPAIRLFNGLVGINEDEFVAATQGSFKLGIEFQNWGKPGDSYMHAFGMVGQSLGLVEFWQYWLRGRNEGVADRFWDYSLNETAARMNRFGRLPTIPNSNLDGIAYAFHFDAGLYARFLRRIAERNGVTRIEGKITSVQRDGETGFVSSVTLESGEAIGGELFIDCSGFRGLLIEQALETGYDDWTHWLPCDRAIAVPSENVGPARPYTQSIAHQAGWQWRIPLQHRTGNGHVFCSDFISEDEATATLLSNLEGPALADPRSLRFATGMRKRGWNKNVVALGLSSGFMEPLESTSIHLIQNGIAKLISHFPDRGFAPANVEAYNRRVAYDYERIRDFIVLHYYANQREESFWKRCREMAIPDSLRQKIDLFRATGRIFREQEELFVEVGWFQVLTGQNIVPNTYHPLADALTKDELRQFFADLKTIIGGTASRLPPHDIFIRQFCAAASQKVPA

SEQ ID NO: 89617 - protein, 500 aa, Variovorax sp.
  REGION 1..500: note = tr|A0A1E4IQI1|A0A1E4IQI1_9BURK Uncharacterized protein OS=Variovorax sp. SCN 67-85 OX=1660152; GN = ABS94_31655 PE=4 SV=1
MLNLRGISRAVVIGGGTAGWFAALTLRRMFSSQVEIRVIESPDIGIVGVGEGGLLNLVDALRRNGIDLDEFVRETGAAFKLGFSYEGWRTGAEDDRYYHLFGRPGLPETDWVERGFHPLFSGMVHEGIELHRYIPGFAEIASNATQQEAAAMLRHGPVSGLSASFHFDSHKLADYLRRVAVSRGVVHQQARVEELVCDEQRLARSLRLDNGESIDLDLLIDASGLARLGIGKKLGVRWRSFSEHLLLDRAVPFHMPHPQPNPSLVTRAIAMPAGWMWQIPLVERVGAGYVFSSAHTDETQVIDEIHRRIGPKVEPMRTLRFEPGHFEQVWVGNIMAIGLASGFVEPLEATSIGQMLEQLRNFERIVTASNGVVSGYLIEGFNEANARCWSGIRDFLRMHYDCPRRDTAFWRDVAALPLPPGYAELKQCFQQRTPRLIDVENYAMHGWQGIFHVINWLFVAAPLGVVPPEAAAFELASLPAVSRRRVATRVSELRKSSVPG

SEQ ID NO: 89618 - protein, 515 aa, Colwellia sp.
  REGION 1..515: note = tr|A0A3Q9G8X3|A0A3Q9G8X3_9GAMM Tryptophan 7-halogenase OS=Colwellia sp. Arc7-635 OX=2497879; GN = EKO29_00280 PE=4 SV=1
MDKVVKKIVIVGGGSAGWLTAGVIAAEHRIAEQQALEITLIESPDVKSIGVGEGTWPSMRNTLDKIGITELEFIQQCDASFKQGSKFINWQSAQSGDFYYHPFMTPEGYTEVNLSRHWQEQQQKQPFAGTVNAQYHVCEAGLAPKQFTTPAYAGVANYGYHLNAGKFATLLQQHCTKKLAVKHIVAHIENILASPSGDIEKLATKDGQLIEGDLFIDCSGSAGLLISKYFNIPLIKQDKVLFNNCALATQVPYTLQQDIASATLSTAQTSGWIWDIGLPSRRGVGHTYSSAHISDTDAEQQLRHYIAGSIGEKETEKLSIRKLKFTPGYREKFWHKNCVAVGMSAGFIEPLEASALAMIELSVTMISEQLPQTRGQMDIVAERFNSRFSYRWQRVIEFLKLHYILSARRDSEYWRDNQLASSIPERLMQLMQLWQYQPPSRYDFIENEEVFPSASYQYVLYGMGHYTQPRAHQSLFENKQLAEQLFAKVQHQKQQFLQGLPTNRALIDYYCQQPL

SEQ ID NO: 89619 - protein, 497 aa, unidentified
  source 1..497: note = Aliiglaciecola sp.
  REGION 1..497: note = tr|A0A553L446|A0A553L446_9ALTE Tryptophan 7-halogenase OS=Aliiglaciecola sp. M165 OX=2593649; GN = FM019_07860 PE=4 SV=1
MNTTYQNSVKRVIIAGGGTAGWMTAAALSKLIGKSLDITLVESDQIATIGVGEATIPPIRTFHRLLGIDERDFMRATQATFKLGIQFENWRTANDVYIHSFGVTGRECWAGEFHHFWLKAQQLGIAEAFGDYCFELKAAQQQKFGFNEQNPINFAYHLDAIGYAKFLRVFAEKHGVKRVEGKIDKVSVDQATGFISSLSLDKGKTLTADLFIDCTGFRGLLIEQALHSGYEDWSHYMLCDSAVAMQTSPTEAPLPYTRSIAHDSGWRWQIPLQNRVGNGMVYSSSHLSKEQAEQRLRENVTGEPLNQPNHIRFRPGKRKQPWKKNCIAIGLSSGFIEPLESTSIHLIMTSIVRLMRLFPFDGVTQSATDEYNRKLGCEMDCILDFITMHYKVTQRDDSEFWRYCKQMDVPDSLAHKLQLFEDTGRVFLDEFDIFRVDSWTQVMLGQGLVPKQFHRIVDEMDQAELSRFMATIKNDVDKRLTSLPSHTEFLSHYLKQQ

SEQ ID NO: 89620 - protein, 511 aa, Rheinheimera sp.
  REGION 1..511: note = tr|A0A5C7TPV7|A0A5C7TPV7_9GAMM Tryptophan 7-halogenase OS=Rheinheimera sp. OX=1869214 GN=E6Q75_01895; PE = 4 SV=1
MQQGPIRKIVIVGGGSSGWMSAALLSKLLRNRAGAMVEICLVESEQIGTVGVGEATIPAIKVFNQLCGIDEREFIQATGATFKLGIDFVNWGQIGEHYFHAFGAIGRSWEWLSFHQYWLALREAGLALPFDDYCIGAVMAREQRFMQADLSRPQSPVSQIAYAYHFDAGLYAQFLRRHSEARGVTRIAGTISAVTRHAYNGHIHQLVLDDGQVIDGDLFLDCSGSRSLLLGQTLGVGYDDWSHWLPNNSALAVPSAALAELPPFTRSTAHHSGWQWRIPLQHRTGNGMVFASGFVSDSTAEQLLLSSLDTPALAAPRLIRFTTGKRKQMWWGNCVAIGLASGFLEPLESTSLHLVQTAVTRLVNLFPDLSFQQANIDHYNSLAATEMAQIRDFIIAHYKVTQRNDSEYWRYCQRMAVPDSLAQKLEIFAAHGRVHRIADELFREDSWVQVLLGQGLLPSRPDPLCQQKSLAEMQDFAESTAQVIAGCTAQMPTHTDFIRKVAPFSAGAPLR

SEQ ID NO: 89621 - protein, 496 aa, unidentified
  source 1..496: note = Aliiglaciecola sp.
  REGION 1..496: note = tr|A0A553L618|A0A553L618_9ALTE Tryptophan 7-halogenase OS=Aliiglaciecola sp. M165 OX=2593649; GN = FM019_06420 PE=4 SV=1
MNKAIKKVVVVGGGTAGWLSAALLKKVVGGPVEIELVESESIGTVGVGEATIPPIRLVNNVLGINEAEFLRETNATLKLAIKFENWRVQGEGYFHTFGAPGKSMAFCQFHHFWKRAKTLGFDSNLWDYDLNYLCCLEGKFAHINSKDPILELPYAYHFDASLYAKFLRTFSEKMGVVRTEGLVEHVKQDPQTGFVTQLQLNDGKIISGDLFIDCSGFRGLLIQKTLGTGYEDWSHWLPCDRAVAVPSERLEKTLPYTRSIAHKAGWQWRIPLQHRNGNGLVYCSDHCSDDEAASTLMGNLDTQALDEPRVIHFKTGRRRKQWNKNVVSVGLSSGFLEPLESTSIHLIQSGIVRLIHLFPHNGIDPVNVNEYNQQSELEYEQIRDFLILHYHVNERDDSQFWRNMRDMQIPDSLTHKIELFRETGKLFREQNDLFLESSWLQVMLGQGIEPKDYHPIANNLDKERLFSMLNTVKNVKQQPIPQLPTHDEFLKHYCKV

SEQ ID NO: 89622 - protein, 516 aa, unidentified
  source 1..516: note = Aliiglaciecola sp.
  REGION 1..516: note = tr|A0A553L4A1|A0A553L4A1_9ALTE Tryptophan 7-halogenase OS=Aliiglaciecola sp. M165 OX=2593649; GN = FM019_07855 PE=4 SV=1
MHNHHIVIVGGGSAGWLTAGLLAARITAQRSQGIKITVIESPDVATIGVGEGTWPSMRHTLQQIGIPETQFMLHCNASFKQGSSFYGWRSGEKNDYYVHPFTTPPGYAELDIASGWRALHPDRAYSDTVSAQSQVCAYGKAPKQLQTPDYAGVTNYGYHFNADKFVELVKNHCIDQLGVNCLVDHVESVTAHPNNDIDAVTCKTHGMVQGDLFVDCTGMRSLLIGQHFNVPWISQRHVLFNDSAVAVQAPYDSAQTDIVSTTLATAQSEGWIWDIGLSNRRGVGYVFASQYTDAATAEQSLTEYLARSMSKDAMSALTPRVLHFKPGYRQEFWKGNCVAIGMSSGFIEPLEASALAMVELSATMLCDHLPSLMTQMPTVRKRFNQRFRYRWQRVIDFIKLHYAISERTDSEYWRDNRSQNSIPDSLHELLELWRHQSPSRYDFIENEEVFPSASYQYVLYGMDYHTQSTSLSTAELEHCQQLFAKNTEYVSRLLQGLPSNRDWLTAKSQSGLAQTG

SEQ ID NO: 89623 - protein, 542 aa, Duganella sp.
  REGION 1..542: note = tr|A0A1E7VKU4|A0A1E7VKU4_9BURK Flavin-dependent tryptophan halogenase RebH OS=Duganella sp. HH105; OX = 1781067 GN=rebH_1 PE=4 SV=1
MPGRRRTLPMETGKTMKTIPTPVKNILIVGGGTAGWLTAAFLARTLGADADPGAGGDSVRITLVESKEIGIIGVGEGTFPSIRGTLAAIGIDEARFIRECNATFKQGIKFTDWVRPPGTPGNDHYFHPFSLPSQRPGGPELLPYWLQGAAPAGVGFAAAATMQKRVADAAHAPKRFNDADFMGPLNYAYHFDAGKFAALLSTHAQSLGVRHVLATVERVSLDEQGAIGAVHTKEAGELTADLYIDCTGFRAALIGDALGTPFRNINDTLFVDRALAMQVPYDTADAPIPSYTIATAHEAGWTWDIGLHQRRGIGYVYSSRHTDDARAEQVLRAYIGEASDGLNPRQLKLNVGYREQHWVKNCVAVGLSGGFLEPLESSGIGLIETAAYLVSYLFPHDGDMAPVAKVFNEMMKARYERIVDFVKLHYCLTQRRDHAFWTDNTDPASIPASLRDKLAMWRRRAPHRMDFVVDLEMYPPSSWQYVLYGMEYPTAQYANASTLPRFDEARREFQMIEQMSQRALADLPTHRALIDHFLQRGERKTA

SEQ ID NO: 89624 - protein, 495 aa, Sphingopyxis sp.
  REGION 1..495: note = tr|A0A0W1D8R3|A0A0W1D8R3_9SPHN Tryptophan halogenase; OS = Sphingopyxis sp. H115 OX=1759073 GN=ATE71_08735 PE=4; SV = 1
MSARERPVRRIVIVGGGSAGWMTAAALGRALAGQPHSITLVESEMIGTVGVGEATVPPIHEFNRYLRLDQAEFLCATHGTIKLGIEFEGWGGVGHRYFHPFGYLGIEMSGIHFHHYWLRHLAAGGDPDHSPYNLETMAARESRFAPATRHGPVHHAVHFDAAAYARFLRAYAEDKGVVRIEGKVADVRLDGEDGFITALVLDDGRAVDGDFFVDCSGFRGLLIEGALATGYEQWGHWLPCDSAVAMPSESEGDPAPFTRSTAREAGWQWRIPLQHRDGNGYVYSSAHLGHDEAEALLRSRLPGAPLADANRLRFVAGHRKAIWNRNCVAIGLAGGFLEPLESTSIHLIQTTIIRLLSLLPRDAIDPHVVARFNRDALHEYRTIRDFVIAHYALAGRDDTPFWRDVAAAGIPDTLAERIEAFRATGNILFEPGDLFGPTNWYAVLTGQGVRPQSWHPIADGLPDAELAARLATLRGRVAEQLAELPPHVEFLRRSN

SEQ ID NO: 89625 - protein, 494 aa, Rheinheimera sp.
  REGION 1..494: note = tr|A0A356BCL5|A0A356BCL5_9GAMM Tryptophan halogenase; OS = Rheinheimera sp. OX=1869214 GN=DD408_08010 PE=4 SV=1
MVIRAETKVLIAGGGTAGWMTAALLSRLLGPAVKIRLIESDAIGTVGVGEATIPAIQHFNAVLGIPEAEFLNATQGTIKLGIQFEHWGKQGDSYMHAFGPVGRQLGVTSFHHYWLAAQARGDTSGFWDYSLNYQAAKTGKYAPLPQVPNTPLQGLVHAYHFDASLYAALLRRYSEQLGVQRTEGTIASVNKTTSGDIASVTLQDGSSYKADLFIDCSGLRALLIGQELSVGYEDWRHWLPCDTALAVPSEVILPIMPYTRSIAHTGGWQWRIPLQHRTGNGLVYSSQFLTDDAAHNTLLDNLDAPALAEPRKINFVTGRRKQQWVRNCIAIGLSSGFLEPLESTSIHLIQSAVLRLVQCFPGADNIDTVRQEYNRQSQTEYEAIRDFIILHYHLNQRDDNGLWQYCRQMVLPDSLKQRIELFKQSALVFRQQDELFTEVAWQQVMLGQGLIPTAYHPMADNLTDKQLSSFLIDLKHIITHTTQQLPPHQAFLQQ

SEQ ID NO: 89626 - protein, 507 aa, Shewanella sp.
  REGION 1..507: note = tr|A0A2M7LX97|A0A2M7LX97_9GAMM Tryptophan 7-halogenase OS=Shewanella sp. CG_4_10_14_3_um_filter_42_91 OX=1975535 GN=COZ42_05110; PE = 4 SV=1
MKIQSVAIVGGGTAGWLAANHLAKALFNQNITITLIESPDIPTIGVGEGTVPTIRKTLQSFGISETEFITRCDVTFKQSIKFQNWLDSHRHGRDNFYHHLFDPPSSMGDDLSSLWLQNPSDAYSQLVSSQFDVCEANLAPKLITTPEYQAVQGYAYHLNAAKFALLLAENAKQKFAVNHVKANVIDTRLHLDGSIASLVLDKCGEQEFDFYIDCSGFDSILLAKALKVPFVDKSQELFVNKAVVVQVPTDPDAIIPPYTKATAHQAGWIWDIALSNRRGVGLVYSSAHLDDEQAEQKLNRYLSGQLDQYSYRTIPMKVGYRKQFWAKNCVALGLAQGFLEPIEATSIMLTDFAAGYLASRFPSDSSQCESLSERFNQTMSYAWERVVEFAKMHYCLSDRHDSDFWIDNRDPQTIPAGLSNKLALWQEYVPLSEDLFSKFEVFNVENYLYVLYGMKFLTYKKTMSESSLVLAKQHAARIRRHSEQLCQHLPAHRELLSKIHQYGLQKI

SEQ ID NO: 89627 - protein, 498 aa, Rheinheimera sp.
  REGION 1..498: note = tr|A0A356BDH1|A0A356BDH1_9GAMM Tryptophan halogenase (Fragment) OS=Rheinheimera sp. OX=1869214 GN=DD408_09565; PE = 4 SV=1
MHTDNQHHTAVKKVVIAGGGTAGWVAAAALSKRLKGQIDVVLVESAEIGTVGVGESTIPPVQLFHNLLGIDEQEFMRATDATFKLGISFENWGQLGDRYIHPFGVTGKGSFLADFQHYYLHGRTLGIEAPFGSYCYELQAALAGKFAKTDSSNISYAYHLDATRYARFLRAFSEAQGAVRIEGKIAQVQQQVNGDIRALVLEDGTEISGDLFIDCTGFRALLIEQTLHTGFERWDHWLPCNKAMVVQTESGSSLPPYTRAIAHDSGWQWRIPLQHRVGNGLVYAADYLSDDKARQRLLGNLETAPLFEPRMLSYQTGRRKKFWHKNCVALGLSSGFIEPLESTSIYLFMNGVIRLLRLFPFNGVQQPLIDEYNQQSISELEKIRDFIILHYHQTERSDSEFWNYCRTMSIPDTLAHRMELFRASAHAFQTGEEMFRLESWSHVMLGQRLMPQSYHQLVASLPPQQLQAHLQQIRDTISHAVARLPKHSDFIRQYCAAN

SEQ ID NO: 89628 - protein, 505 aa, Duganella sp.
  REGION 1..505: note = tr|A0A1E7V7U8|A0A1E7V7U8_9BURK Flavin-dependent tryptophan halogenase PrnA OS=Duganella sp. HH105; OX = 1781067 GN=prnA_2 PE=4 SV=1
MTNNRIKRVVVVGGGSAGWMAAAAVATYLGKQTSVRLIESEEIGIVGVGEASVPHIRMFNGQMLGIDETEFVKRTQGTIKLGIQFQDWSRIGDSYIHGFGVIGRSLGPLPFHQFWLKLFQSGRAAPIGEYSLQTVMAPQGKFVPGDRNSPPNSPLADIAYAYHFDAGLYARFLRELSEQRGVQRIEGKIVGVNQRADDGFVESVTMENGQVVDGELFIDCSGFRGLLIEQALKTGYVDWSHWLPCDRAMAVPSERIDPITPYTRATARAAGWQWRIPLQHRTGNGYVYSSQYIGDDEAAATLLANLDGKPLADPRPLRFTPGMRKKCWNKNVVALGLASGFLEPLESTSIYMVQSGITRLLGLFPGSDFNPLLAERFNRESAFEYERVRDFLILHYHATERNDTPFWDYCRTMSVPDSLKEAMDLFRSDGRYFRNGEDFFALPSWVQVMLGQRIMPQSYHPIVDDMPEDKLVQYVEDMRATLAHAVAAMPTHGQWIDRYWKASAL

SEQ ID NO: 89629 - protein, 441 aa, unidentified
  source 1..441: note = Caulobacterales bacterium
  REGION 1..441: note = tr|A0A1F8IGJ4|A0A1F8IGJ4_9PROT Tryptophan halogenase (Fragment) OS=Caulobacterales bacterium RIFCSPHIGHO2_01_FULL_67_30 OX=1797584 GN=A2795_09995 PE=4; SV = 1
IQKTQASFKLGIQFEDWTQKGESYFHPFGAIGAPVDVSDFYPVWLKARMNGYDRPLMDFAAAARMADQGRFMLPFKAQRTPIGGASYAVHVDAKRVARYLRDFAEARGVKRTEGIVEDVATRPDGFVSSLKLKSGQTVQADFFIDCTGFRALLIGKTLGVGYTDWSEWLMCDRAIAVQTENVGPPKPYTLAQAQDCGWRWRIPLQHRTGNGHVFCSRYLSDDEATARLLEQVEGRPVVNPMVVPFKTGVREKIWDKNVLSLGLASGFIEPLESTAIHLIYRGMDFLFRLMPDLDCDPNLIAEYNRRMTVDYEEIRDFIILHYALTRRDDTAFWRACRDMVLPEGLQHKLEVFRANGSLVEALDPLFRNVSWYAVMDGMGVRPRSYPPLVDRIDFNGLTDEMDRAANILNAFVADLPTHQAFIDTHCQAPPVEAPAPLVMPA

SEQ ID NO: 89630 - protein, 399 aa, unidentified
  source 1..399: note = Campylobacter virus
  REGION 1..399: note = tr|H6SUC8|H6SUC8_9CAUD Putative tryptophan halogenase OS=Campylobacter virus IBB35 OX=1006972 PE=4; SV = 1
MKVTVIGKGTAGILTTKSLRFNFPDLEIDWIYPESNKFIGVGEALVPGSSKFLKSIGIDNKMILKDFRGSIKAGLKMIGWADKTFNLPFDNSVLLNRYMNKDLYPENFIDFENVSHHFNTFSLQDLYIENINNINRTITSFKDIDSDLIVDCRGFQDSDDFIDPGILKNNIALTTRIPVQNFLNPYSTFFARDFGWCWTIPLQDYISIGYVTNDSFINQASEDLKKHLQENFKTDLKDYNTIRFKTGYKKHQIAKIESHNIFSVGLNGAFIEPLQSSGLRLASHQIQELINYIKNGDTNWNQRFEDMYNRAYQFILNHFILCKKSNEYWDYYKNFNFKDSLFVGSNGNDLFDDKFEQFLYANFQGKPVKYDIDKNIVEGKGALTKLKKFDELLRDYLSK

SEQ ID NO: 89631 - protein, 59 aa, Bacillus sp.
  REGION 1..59: note = tr|A0A292GNC7|A0A292GNC7_9BACI Tryptophan halogenase; OS = Bacillus sp. FW1 OX=1882659 PE=4 SV=1
MAEHLSLFAFIDKHVSLHYDFHIFLKNLKEGIGTFYESYPTHTRYIPAYCARRRHGDRA

SEQ ID NO: 89632 - protein, 508 aa, unidentified
  source 1..508: note = Pseudoalteromonas fuliginea
  REGION 1..508: note = tr|A0A5B0UM07|A0A5B0UM07_9GAMM Tryptophan 7-halogenase OS=Pseudoalteromonas fuliginea OX=1872678; GN = EU508_04540 PE=4 SV=1
MNKTIKTIAVIGGGTAGWLSAAIIASYHQGKNGDGLKVMLVESSDIPTIGVGEGTWPTMKNTLQQIGLREVDVFKACNATFKQGGKFVNWTHGNNDFYYHPFTVPLGYGRIDLAPYLDNVEDFAQQTNFQHDICEASLAPRGIAQGEYQGNCNYAYHLDAGAFAQMLKQHCKSKLGVEHIIGTVDQVKLDDDGAINELTLKDQTRTISADLFIDCTGFSSLLLGQALNVPFKKMDHVLFNDSALAMQVPYDENDDSLASHTIATAQSAGWIWDIGLTHRRGVGHVYSSKFLSDDEAEQNLRNYLGDAANGLTARKISFESGYREKFWHKNCVAIGMSAGFVEPLEATAIMLVEISARFVAEHMPVDTQVMPIVAKRFNEQMDYRWQRIIDFLKLHYMLTKRPEPYWQAHVQPDTIPQTLQEDLLLWGSRGPLIQDFHGALELFPAASYQYVLYGMGFKPDFTKQAYLYSHHVQAKQIIERNSQLTQQMLQTLPPHRAFIEQWLAANPV

SEQ ID NO: 89633 - protein, 538 aa, unidentified
  source 1..538: note = Sphingomonas olei
  REGION 1..538: note = tr|A0A4S4GE62|A0A4S4GE62_9SPHN Tryptophan 7-halogenase OS=Sphingomonas olei OX=1886787; GN = E5988_04200 PE=4 SV=1
MDGRLLWVKRRVGAPTEVSVGVKRQVANIVIVGGGTAGWLAAATIAACADPTAQPPVQVTLIESPDVPTIGVGEGTWPTIRRTLARIGISEAEFLLACDASFKQGSRFDSWRNGAPDDSYLHPFSAPVEADPRALVAAWQAGGEPGFAAAVTPQARACALDLAPRQRAMPDYAGALNYAYHLDAVKLAALLRRHATQRLGVRHVRDHVLSVDRRHDGDIAAVRCRDHGAMEGDLFIDCTGHAALLIGGALGVPFIDRGHELFNDRALAVQVPVAAGSAIASTTNATAHEAGWIWDIGLPTRRGVGCVYSSAHLTDDAAEGILHAYLARTAPAADLDALAPRTLTFRSGHRTRFWERNCLAVGLSSGFLEPLEASAIVTIELALDALVANFPATRASMDAHADRFNALFRYRWDRIVDFLKLHYVLSDRDQPYWRDNRDRASIPHSLAGLLAIWREQPPSGHDLGMVDEVFPAASYQYVLYGMGMAPPPPGPMRIDGVPAASAALRQAAQRARALAASLPTNRAYLDALRADRQNEIIA

SEQ ID NO: 89634 - protein, 193 aa, Streptomyces albogriseolus
  REGION 1..193: note = tr|A0A1B1V585|A0A1B1V585_STRAO Flavin reductase; OS = Streptomyces albogriseolus OX=1887 GN=thdF PE=4 SV=1
MTGAAGGVTTEQQHYRDLMSAFPTGIAVVTSLDAQGVPRGMTCSSVTSATLSPPTLLVCLRNGSATLDAVSATRGFAVNLLHDGGRHAAEVFSGPDPNRFSRVQWKQCRSGLPWLSKDAFAVAECRVSGTQEVGDHTVVFGEVARIAQTDGTPLLYGLRSFAAWPLPSESARQGSEAAPRGSEPAYGARSSRG

SEQ ID NO: 89635 - protein, 534 aa, Streptomyces sp.
  REGION 1..534: note = tr|A0A141R7F4|A0A141R7F4_9ACTN Halogenase; OS = Streptomyces sp. 551F OX=1517246 PE=4 SV=1
MSAEESRIRKVVILGGGTAGWMTASYLGKALQDTVEITVLEAPTIPRIGVGEATVPNLQRSFFDYLGIPEEEWMRECNASFKMAVRFINWRTEGRGEPNPRTLPGDGPDHFYHPFGLLPDHDQTPLSHYWFQRKHQGETTEPFDYACFREPPLMDAMKAPRHTDGTAATRYAWHFDAHLVADFLRRFATEKQGVRHVQDEMVRVEQDERGYVTALHTKGGQALDADLFVDCSGFRGLLINQALEEPFIDMSDHLLCDSAVATAVPHDDEANGVEPYTSAIAMSSGWAWKIPMLGRFGSGYVYSSKFTSPEEATREFCEMWGLDEESTTFNHIRFRVGRNRRAWVKNVVSIGLSSCFLEPLESTGIYFTSAAIYQLAKHFPDRNFHQGLVDGFNREIELMFDVTRDFLQAHFYYAPRTDTPFWKANKELELSENIKQKISAYKAGLPINTPITDESTYYGNFEAEFRNFWTNGSYYCVFAGLGLEPDAPLPSLAHRPASSAGAQPLFDEVKRTQNHLVETLPSALDYLKRLHGKD

SEQ ID NO: 89636 - protein, 510 aa, unidentified; identical to SEQ ID NO: 84044
  source 1..510: note = Unknown
  REGION 1..510: note = tr|A0A4S0FPK5|A0A4S0FPK5_9BACT Tryptophan 7-halogenase OS=bacterium M00.F.Ca.ET.199.01.1.1; OX = 2563913 GN=EN842_06945 PE=4 SV=1

SEQ ID NO: 89637 - protein, 238 aa, Streptomyces albogriseolus
  REGION 1..238: note = tr|A0A1B1V590|A0A1B1V590_STRAO Uncharacterized protein OS=Streptomyces albogriseolus OX=1887 GN=thdY PE=4; SV = 1
MTSPSFPERSTTMLESTVPLGESDPGGILENIDVVVIDTETFAPFVEDAIEQYSLGLASVKAAGSRLHRPNSFGLLGGTFEGDAMIVKQVAFATNVRAVESVPLEEFKENIVPQFGKQYDDGERGFWCDSRELLKIVREFENAGLEMLGSVHMHPDWHRIGPAHERGTENLSENPSRMDEYLFRNAGWPLNIICYLESRGGGITHTYAAWRPPALDDPSGRARKVTVRHFAHGHVGSE

SEQ ID NO: 89638 - protein, 219 aa, Streptomyces platensis
  REGION 1..219: note = tr|V9XLW8|V9XLW8_STRPT Tryptophan 5-halogenase (Fragment) OS=Streptomyces platensis OX=58346 PE=4 SV=1
GGGTAGWMSASYLKAAYGDRINVTLVESDRVATIGVGEATFSTVRHFFDYLGLDEREWMPECSGSYKLGIRFENWREPGQHFYHPFERLRTSDGYTLADWWLQEGDRSEPFDRSCFITPALCEAKRSPRLLDGSLFAGGLDGSLGRSTLEEQRAQFPYAYHFDAALLAKFLTKYGTDRGVRHVVDDVTQVGRDERGWISHVATREHGDLTGDLFIDCSG

SEQ ID NO: 89639 - protein, 516 aa, unidentified
  source 1..516: note = Pseudoalteromonas fuliginea
  REGION 1..516: note = tr|A0A5B0UGR3|A0A5B0UGR3_9GAMM Tryptophan 7-halogenase OS=Pseudoalteromonas fuliginea OX=1872678; GN = EU508_07945 PE=4 SV=1
MTKPITKIVVLGGGTAGWLSAGLLAAEHPHLNVTLVESANVPILGVGEGTWPSMRNTLQRIGIKESDFITQCDASFKQGSKFINWRNLSEGENYYHPFMNPQGYEHTNLHASWQRIAPNQKFADVVNMQSFVCQAALAPKQLQTPEYAAVTNYGYHLDAGKFAEFLKNHCVKNLNVTHITDDVTEVINDDHGYIASLKTNNNGDITGDLFIDCSGSCARLIGDHFNSEFITQDHILFNNSAVAAQIPNAHINQPIASATLSIAQSNGWIWDIALPTRRGTGYVFSSKYQSDESATNTLKSYIAKSTSEQQAEQLTYRVLKFSPGYRQQFWIKNCVAVGMSAGFLEPLEASALAMVELSISMISEQLPQNRTHMSQLETRFNERFSTRWQRVIEFLKLHYVLSERDDTPYWQDISNLNTAPERLQNLLKLWQFQPPSRFDFIENEEVFSSSSYQYVLYGMGFNTQTVSAQNTFNDPRAGDYYYQQNREKIAQCLNGLPSNRALLNHLLSNNGQPHND

SEQ ID NO: 89640 - protein, 318 aa, Streptomyces albogriseolus
  REGION 1..318: note = tr|A0A1B1V583|A0A1B1V583_STRAO Putative LysR family transcriptional regulator OS=Streptomyces albogriseolus; OX = 1887 GN=thdR PE=3 SV=1
MTPTQLRAYAAVVRLGSVKGAAADLSVSEAAVSMHVAQLRKELGDKLFARTGAGLAFTPGGLRLASRATELLGLQDRTILEVSQAGSGRRLLRVATSSLFAEHAAPGLIELFAGRADDLDVELSVHSPQRFATLLRNRTVDVAIGPRPAAVDDGMKCTPFLNYQMVGVVGPDHPLAARRPGPGELRRQTWLLGPSAADRAGLVPSVLQQLQVDEENQRIFQSHAAALEEAKHGKGVALALSFSVTRALSGGELKQLLSPALPAKGSWNALALPGRDAPPAAAELMRFVTTPRALQAMLRGEGVTAGRFRPAIHVTLWS

SEQ ID NO: 89641 - protein, 220 aa, Streptomyces albogriseolus
  REGION 1..220: note = tr|A0A1B1V557|A0A1B1V557_STRAO Putative response regulator OS=Streptomyces albogriseolus OX=1887 GN=thdL; PE = 4 SV=1
MIRVLVADDEPLIRAGIRMILTSADDIDVVAEAGDGREAVETARGTAVDVALLDIQMPVMDGLAALTELRRAAPDVRVLILTTFGERENVLRALGHGGVGFLLKDSAPDELIHAVRAAAAGNAYLSPAATRHVVDALASPGATTRADEARQRVDRLSARERDVLALLGEGLSNADAGRRLHMSEATVKTYVSRILTKLGCENRVQAALLARDAGMHPDGV

SEQ ID NO: 89642 - protein, 519 aa, Marinobacter sp.
  REGION 1..519: note = tr|A0A5B0VQN6|A0A5B0VQN6_9ALTE Tryptophan 7-halogenase OS=Marinobacter sp. ZYF650 OX=2604327; GN = FWJ25_02965 PE=4 SV=1
MKQSEKKVINIVIAGGGSAGWMAAAFLSEAFKTKDNKQYKISLVESDNIAPIGVGEATIHTMRGFLGACGIDEGEFLVATDATFKHGILFKDWLQKTAPDVPPHQYFHPFESFVHLSPEPQTSHWLNARLRGATTERYDRWAGIQGALAASGCAPKTWQNSQYEAPVNYGYHLDANKFAEFLKKTSIQKRVSHVRANITAVTLDELGNIRSLGLANGESIQGDLFIDCTGFSGLLNRAVGAQFIDYSNYLFCDQAVTLRYPRTGKDYQPRPYTTATARESGWTFEIDLQERTGLGHIYSSKHCSPEAAETALRNFFPDIDPAAEATHLKMKVGRLEKSWNKNCVALGLSSGFLEPLESTGLYFIEIALRLLVDYWDPLSQSAACREQFNSSFNATFDESMEFIVLHYVLSEREDTAFWRDIQTETGDLPALKSKLAMWEHKPPTDADFKNETIAFRAPNYSAVLYGMNWLPHEIPIGISHIPPEKSLENYTTMKKLQKMAVEGSPKHTEYLQKFTASFR

SEQ ID NO: 89643 - protein, 481 aa, unidentified
  source 1..481: note = Sphingomonas olei
  REGION 1..481: note = tr|A0A4V3WW27|A0A4V3WW27_9SPHN Tryptophan 7-halogenase OS=Sphingomonas olei OX=1886787; GN = E5988_04185 PE=4 SV=1
MAAAAIARTMGRAAQVTLVESEAIGTIGVGESTIPPIVGFNRLLGINEAEFMAATNATFKLGIVFDGWRNGTDRYVHAFGLTGKDHWAAGFQHFWLAGRAKGHQAPFGDYSVELQAALAGKFAHLPDDRLNYAYQLDSGLYAKFLRGMAERDGAVRIEGKIATVQLDGDSGDIAALVLEDGTAIAGDLFLDCTGFRALLIEGALHAGFDDWTHWLPCDSAIAVQTASVGPAVPYTRAMAHDAGWQWRIPLQHRVGNGIVWCSRYLSREDALERLLGNVEGEVLTQPNHLRFTTGVRRRQWHRNCVAVGLSGGFMEPLESTSIHLIQRAVLRLIRMMPAAGPISPRDIAEFNDQQHADMVQVRDFLILHYKATDRRDSAFWRQCAAMPIPDSLEQKIELFRDTARVFRRNEELFAEHSWLQVLLGQGIEPHAWHPITGKLTDEELARLLQTLRAQVTRTVNGLPAHADYVARYCAGARQTAA

SEQ ID NO: 89644 - protein, 497 aa, unidentified
  source 1..497: note = Pseudoalteromonas fuliginea
  REGION 1..497: note = tr|A0A5B0U8J2|A0A5B0U8J2_9GAMM Tryptophan 7-halogenase OS=Pseudoalteromonas fuliginea OX=1872678; GN = EU508_15495 PE=4 SV=1
MKSIKHVVIAGGGTAGWITAALLNKVLGKVINITLIESSSISTVGVGEATIPPIIQLNNALGINEKEFINETNATIKLGIEFENWKNHSHSYMHAFGSFGKDFPFCDFYNFWVKGNITGSEDSLWDFSLNYQAAKQHKFAPLNTIPNTQLPGLSYAYHFDATLYAEYLKKLAISRGVKHIDAKISEVTQCLATGNVETLILDDNKQINGDLFIDCTGLRALLIEKTLNTGFVDWSHYLPCDSAIAVQTKSNDELKPYTQSIAHSAGWQWQIPLQSRIGNGLVYCSRYLSDEDAKALLLNNLPADPITEPRFIKFKTGRRVKQWHKNVVAVGLSSGFLEPLESTSIHLIQSAVTRLIKLFPHHGISDALASEFNKQNVTEIEHMRDFIILHYKLTERGDSAFWRQCKQMEIPDSLAHKLSLFKHTGKVVRENDELFAEVAWQQVFIGQGLIPDDYNSIVDSLSSEQLNDLFSTLKTLITSTVEQLPTHKDFLKEIKKA

SEQ ID NO: 89645 - protein, 496 aa, Glaciecola sp.; identical to SEQ ID NO: 86563
  REGION 1..496: note = tr|F4AS48|F4AS48_GLAS4 Putative tryptophan halogenase OS=Glaciecola sp. (strain 4H-3-7+YE-5); OX = 983545 GN=Glaag_2305 PE=4 SV=1

SEQ ID NO: 89646 - protein, 513 aa, Streptomyces violaceusniger
  REGION 1..513: note = tr|A0A1L1QK36|A0A1L1QK36_STRVO Thermophilic tryptophan halogenase OS=Streptomyces violaceusniger; OX = 68280 PE=1 SV=1
LNNVVIVGGGTAGWMTASYLKAAFGDRIDITLVESGHIGAVGVGEATFSDIRHFFEFLGLKEKDWMPACNATYKLAVRFENWREKGHYFYHPFEQMRSVNGFPLTDWWLKQGPTDRFDKDCFVMASVIDAGLSPRHQDGTLIDQPFDEGADEMQGLTMSEHQGKTQFPYAYQFEAALLAKYLTKYSVERGVKHIVDDVREVSLDDRGWITGVRTGEHGDLTGDLFIDCTGFRGLLLNQALEEPFISYQDTLPNDSAVALQVPMDMERRGILPCTTATAQDAGWIWTIPLTGRVGTGYVYAKDYLSPEEAERTLREFVGPAAADVEANHIRMRIGRSRNSWVKNCVAIGLSSGFVEPLESTGIFFIHHAIEQLVKNFPAADWNSMHRDLYNSAVSHVMDGVREFLVLHYVAAKRNDTQYWRDTKTRKIPDSLAERIEKWKVQLPDSETVYPYYHGLPPYSYMCILLGMGGIELKPSPALALADGGAAQREFEQIRNKTQRLTEVLPKAYDYFTQ

SEQ ID NO: 89647 - protein, 517 aa, unidentified
  source 1..517: note = Pseudoalteromonas fuliginea
  REGION 1..517: note = tr|A0A5B0U8Q4|A0A5B0U8Q4_9GAMM Tryptophan 7-halogenase OS=Pseudoalteromonas fuliginea OX=1872678; GN = EU508_15955 PE=4 SV=1
MNDDIKSIVIVGGGTAGWLSAGIIAAYLQKHHSKKINITLLESSDIPTVGVGEGTWPTMRRTLKDMGIRETEFIKKCNVSFKQGAKFAKWVTGENDDYYYHPLELPTGMFENNLATSWLNINNAQPPFAQYVSAQQSICESGLAPKQITTPEFSAIANYAYHLDAGLFATFLKNHCIDNLNVKHIVGTVVGVNNCTNGDIKSVSLNNKIEIAGDLFIDCSGFKSLLLGENLGVGFKSCKDVLFADSALAIHMPYKDDEPICSHTLSTAQTSGWIWDIGLQTRRGIGHVYSSKHISDEDAKQQLFDYLNINKDQQSEYKVKKLSFEPGHREKFWHKNCVAVGLSAGFLEPLEASALLLVEISANFVAQQFPANRHVMNITAQHFNRTFSYRWERIIDFLKLHYMLSKRTDSPFWQAHCHQNTIPQSLKDNLSLWEFHTPSDNHFDHSQEVFPAASYQYVMYGMGFTGSSELYGNSESYFKKAIALVNNNQQYTQKLLNKLPTNKALLAQINQFGMQQI

SEQ ID NO: 89648 - protein, 468 aa, Streptomyces albogriseolus
  REGION 1..468: note = tr|A0A1B1V591|A0A1B1V591_STRAO Putative FAD-dependent oxidase OS=Streptomyces albogriseolus; OX = 1887 GN=thdO PE=4 SV=1
MDRYPRNAGTVVSPADPDYERARRIWNNRFDCRPRAIMYPRDEAEAAAALGYARDNEVPFRIRSGGHNSEGFCTVDDGIIIDLSKLGSIAVNNDRTRAVISPGVMLGEVYANLWSVGGTIPAGVCPDIRIGGHVLGGGIGMLVRSRGLLIDNLVGLTVVDARGERLQVDADHHPDLFWACKGGGGGNYGIATSYTFEMRPISDVTIFKLQWDWQGGMAVLDAWQHWLLSADSRVNARFNVFSSTVGTVMTVGLFEGSADELKSILQPLVEKFPPRDSFVRTMPYMECVGTFSEQVPSIRAKFVPALSAGPLDADALKTLERWHKDAPTGVKTGLYGLGGEVLGSVSPDSSAFAHRDASICVEYLGHWQGAEHDREHLGWLSGVREEMDAFMTGGAYVNSPDRDLENWLHAYYGESLPRLMDVKRRYDPDNVFAFEQSIPGSLTLPEARAAGLTDTVVEDLRARGLLSA

SEQ ID NO: 89649 - protein, 500 aa, Glaciecola sp.
  REGION 1..500: note = tr|F4ASY0|F4ASY0_GLAS4 Tryptophan halogenase; OS = Glaciecola sp. (strain 4H-3-7+YE-5) OX=983545; GN = Glaag_3530 PE=4 SV=1
MLPIPQNITIVGLNVHGLLTALLLRKTYKPAVTGITLVGLKEEDSPPKAYIAGKALNTLLEHFGYSEANWMRQTQATFKLSNRYVGFSEQEFSVANASEVDILHQPLMLELSKLKRQAYQLDLSLDDFFFAAALAKRNLSPKAQDFPFETDYQYQVDANCLFTLLQKIAAEHSITTLPSTLETLQLDQHGTLKHIECEDQILSGDYFFDCTQSAQLLIGNMPDFRQETLPEVRINDRVLTYTLAVECCASEVVTTALDCGFVLQYTLQDAVHFQYHYSSKFIQDPQAVQLLERHISQQGYKKVLQRHLSASQAYLVSQPWIHNCLAVGPACGLTQGSEDHELSHTFAMLEQFVSSIQSPDDAKDVIKNYNHRIKSRFVYAHSYHSTLQLLNSRRNSPYWQTPQDANALTPIGRSLFSQWLSGEDLSVEPILDINGLTAWYALFSGLGHYPTGELKPHPKARAIQDNIQDMCRKLAGCCLNFQTHDNLIAEGKHHANVTAV

SEQ ID NO: 89650 - protein, 520 aa, Glaciecola sp.
  REGION 1..520: note = tr|F4ARR1|F4ARR1_GLAS4 Tryptophan halogenase; OS = Glaciecola sp. (strain 4H-3-7+YE-5) OX=983545; GN = Glaag_1077 PE=4 SV=1
MSHRSIKNILVVGGGSAGWLTAGIIAAEHQCNKQNSEIKVTLVESPEVNIVGVGEGTWPSMRNSLQRMGLSETDFIRHCGAAFKQGSKFVGWKNGADNDFYYHPFVIPNGYGQANQYSAWKTHGQGHAFADVVCAQSQICQAGLAPKQNATPEYAGVLNYGYHLDAGKFSQMLQQHCVQKLGVTYIQDHVEGVVSHDNGDIKALQTRANGELNADLFVDCSGARSLLLGQHFNVPFIDKKSVLFNDSAMALHVPYSTLDEPIASATISTAQEAGWVWDIGLQDRRGVGYTYSSKHTDDQQALRTLKAYVAQSVGGEVADSLSARKISFEPGHRSHFWHKNCVAVGLSAGFLEPLEASALALVELSATAIAENLPVTAQHMQITRDNFNRRFLLHWENIVEFLKLHYVLSERTEPYWQQMRAPDSVSPRLNDLLTQWRYQPPNRSDFVQNEIMFPSASYQYVLYGMGFETLNDVSSREFDAPQSAIKHLQENQQRLHKLMGGLKSNRQLLKHVVQYGFQKV

SEQ ID NO: 89651 - protein, 535 aa, unidentified
  source 1..535: note = Actinomadura melliaura
  REGION 1..535: note = tr|Q0H2V9|Q0H2V9_9ACTN Putative tryptophan halogenase OS=Actinomadura melliaura OX=360723 GN=atH PE=4; SV = 1
MDSRIRNIVILGGGTAGWMAAAYLGKALQGTAKITVLEAPDIPKLGVGEATIPNLQTAFFDFLEIAEDEWMREVNASYKIAIKFINWRTGGEGSAQPRAAGGRSDHFYHIFGLLPFHQGIPLSHYWVRKKHLGQTAQEFDYACYREPLLLDANKAPRWMDGTRATNYAWHFDAHLVADYLRRFSTGKLDVEHIQDRMEDVTFDPNGYLTSLRTATGRVLTADLFVDCSGFRGLLINKAMNEPFVDMSDHLLNDSAVATAVPNDDAATGVEPFTSAIAMKSGWTWKIPMLGRFGTGYVYSSQFAGQDEAVKDFCDLWGLDPDRTNLNLIRFRVGRNRRAWVKNCVSIGTSSCFVEPLESTGIYFIYAALYQLVKHFPDKSFDPVLIDRFNREIETMFDDTRDFIQAHFHFAPRDDTPFWRANKELKLGDGMQDKMDMYRAGLPINNPPSDDASHYYANFEEEFRNFWNNGNYYCVLAGLDHLPPRPLPRLAHLPESVASAEALFARVSEEQRRLVESLPTNYGFLRSLHGHTEPGR

SEQ ID NO: 89652 - protein, 494 aa, Dactylosporangium aurantiacum
  REGION 1..494: note = tr|E9LIP1|E9LIP1_9ACTN Putative tryptophan halogenase OS=Dactylosporangium aurantiacum subsp. hamdenensis OX=703577 GN=tiaM PE=4 SV=1
MADAMPKVIVIGGGPGGSTAAGLLAKGGVEVKLLERAEFPRYHIGESITTSCRAIIDYVGALEKVNACGFTTKTGVLMRWGQEKDWVIDWTAQFGADTRSWQVDREIFDQVLLDNAADSGAEVVQQAHVKRVLFDGDRAVGVEWQPAGGELRTETADYVIDASGRAGLISAQHYNNRRPHEIFRNVAIWGYWENAELLPDSPAGGINVISSPDGWYWLIPLRDNRFSVGFVTHKTNFVERRREFDSQEAMLAAVLGESETMKQVLAQATQLPGVRIEQDFSYAADKFCGDGYFLVGDSACFLDPLLSTGVHLAMYSGMLSAASILSLQRGEVNEPEAQAFFESLYRNAYHRLFTLVISFYQQHAGKDRYFALADTLSRAAQGDTQSADLAFGEIIAGLTDLREAADRAGTAAAPITETIDAAATGGAKPVQELLGAAEQARLRAEESSPNQRVTMAPMYIDANDLYDAASGLYLVTEPRLGISRVTSEAAVAAG

SEQ ID NO: 89653 - protein, 534 aa, Saccharomonospora sp.
  REGION 1..534: note = tr|W5VG40|W5VG40_9PSEU Tryptophan halogenase; OS = Saccharomonospora sp. CNQ490 OX=1137271 PE=1 SV=1
MSVSGSERSAEGNRKKRVVIVGGGTAGWMTASYLTAAFGDRVDLTVVESAQIGTIGVGEATFSDIRHFFEFLRLEESDWMPECNATYKLAVRFENWREPGHHFYHPFEQMSSVDGFPLSDWWLRNPTTSRFDKDSFVMTSLCDAGVSPRYLDGSLIDQDFVEQERDDDSARSTIAEYQGAQFPYAYHFEAHLLAKYLTGYATRRGTRHIVDNVVDVALDERGWISHVRTEEHGDLEADLFVDCTGFRGLLLNKALGEPFVSYQDTLPNDSAVALQVPLDMEREPIRPCTTATAQEAGWIWTIPLISRVGTGYVYASDYTTPEQAERVLRDFVGPAAADVPANHIKMRIGRSRRSWVNNCVGVGLSSGFVEPLESTGIFFIHHAIEQIVKYFPSGGAGDDRLRELYNRSVGHVMDGVREFLVLHYRSAKRADNQYWKDTKTRTVPDSLAERIEFWKHKVPDAETVYPYYHGLPPYSYNCILLGMGGIDVNYSPALDWANEKAALAEFERIRVKAEKLVQELPTQNEYFAAMRAGR

SEQ ID NO: 89654 - protein, 222 aa, unidentified
  source 1..222: note = Streptomyces tosaensis
  REGION 1..222: note = tr|V9XPW3|V9XPW3_9ACTN Tryptophan 5-halogenase (Fragment) OS=Streptomyces tosaensis OX=285487 PE=4 SV=1
GGGTAGWMSAAYLQAALGANVDVTVVESKRIQTIGVGEATFSTVRHFFEYLGLSEHEWMPACNATYKLGIRFENWRHQGHAFYHPFERLRIVDGFPLTDWWLKQQPGERFDHDVFLMATLCDAQRSPRHMDGTLFEQDFVEAPAGVTERSTLSEQKTQFPYAYHFDAALLARFLTKYATDRGARQIEDDVVDVALDERGWIRHLVTKEHGEIAGDLFIDCSG

SEQ ID NO: 89655 - protein, 515 aa, unidentified
  source 1..515: note = Unknown
  REGION 1..515: note = tr|F6LWA5|F6LWA5_9BACT Tryptophan 5-halogenase; OS = uncultured bacterium AB1650 OX=1047164 GN=abeH PE=4 SV=1
MLKNVVVVGGGTAGWMTASYLTAAFGDRIGVTLVESKRVGSIGVGEATFSTVRHFFEYLGLEEKEWMPACNATYKLAIRFENWREPGHHFYHPFERQRVVDGFPLTDWWLREPRSDRFDKDCFLVGTLCDDLKSPRQLNGELFEGGLGGRSAYRTTLAEQTTQFPYAYHFDATLVANYLRDYAVARGVKHVLDDVQDVALDDRGWISHVVTGESGNLTGDLFIDCTGFRSLLLGKALAEPFQSYQDSLPNDSAVALRVPQDMENRGLRPCTTATAQEAGWIWTIPLFDRIGTGYVYAGDYISPEEAERTLRAFVGPAAEHADANHIKMRIGRSNRHWVNNCVAVGLSSGFVEPLESTGIFFIQHAIEQLVKHFPDERWDDGLRTAYNKLVNNVMDGVREFLVVHYYAAKRQDNQYWKDAKTRPLPDGLAERLERWQTRLPDNESVFPHYHGFESYSYVCMLLGLGGLDLKSSPALGLMDAAPARHEFKLVGEQAAELARTLPTQYEYFAQLHRAR

SEQ ID NO: 89656 - protein, 397 aa, Streptomyces albogriseolus
  REGION 1..397: note = tr|A0A1B1V567|A0A1B1V567_STRAO Putative cytochrome P450 OS=Streptomyces albogriseolus OX=1887 GN=thdC PE=3; SV = 1
MSAEFFPFPEEPLGAVPQSCAWRRESDPLGQVTLPSGDAVRLAVRFEDVEAVLTDPRFSRDLSKPGCPRLQSGADMSDDRDTLINMDPPRHTRVRRLLSRAFTVRNIEKLRPRIREIVQELVDDMAAAAPGPVDLMAGLAEPLPMRVIAGVLGVADSDLAQFRHWSYVAMSITPDMADERVTGREEFFAYLVDLIEQHRREPGTDLLDAMIQATEDGDRLSEAELCDTARSLLLAGHETTMTSIGRGIFTLLRHPEQYAQLVADPSLVPAAVEEVLRHDFPAEVGFLRVATQDVDLPSGQVRRGEGVMPLISSAHRDTKKFADPDRFDIHRVDNAHIAFGKGAHYCIGAYLARVQLQEAYDVIVRTFPDLRLAVPAEEIVWKPDMMTHAIAELPITW

SEQ ID NO: 89657 - protein, 606 aa, Streptomyces albogriseolus
  REGION 1..606: note = tr|A0A1B1V559|A0A1B1V559_STRAO Putative histidine kinase OS=Streptomyces albogriseolus OX=1887 GN=thdK PE=4; SV = 1
MMRALPPVAYRRSVEVEEAVTPRTARPLLTRLAAASPWGRYRIAGEAVLTVALAGIAGLFDAVGSGFGARTFVVVAGVALLSLTRRALPATALVLSAAAAGALIAAVPLLVYVSWSAGSRIVKPWRVAVAYAAALVAHTALTAHDEIGASSVASPVTAGALGAGVFLALAIVPGLAARYRAQRRALLGALRSNNAQLVREQAMVAREARLLERHRIARDMHDSLGHQLALISVHSGALQVDPELTDRQREGVRILREASVTAMGELREAVGILRDDRDDREGADGRDGRDGPNPAAGPGDGRPVRRPAASVDGLVESSRAAGAAVELHRSGVHRPLMPAVEQAAYRIAQEGLTNAHKHAPGAPISLALRYEPDSLVVEVANGPVPAGAARGPAVISGGQGLKGLRERARLVGGMVHTGPTADGGFRIAGMLPYGTGDGEPGPGPDGATSVGPGSDLVGQMRRGAAGDGGAVINRIDPPTEFTTIMTNKKNVAIGCAAVAVVLVGGVVAMGIWGTKELMKEMKKAEISPSVYESVKVGDAEADVQEKLPDGDSWTTSDLADQGPELPEGATCRHFTSDADESLDSLTVFRFCFRDGKLVAKDTFQAT

SEQ ID NO: 89658 - protein, 497 aa, Glaciecola sp.; identical to SEQ ID NO: 86468
  REGION 1..497: note = tr|F4AIE6|F4AIE6_GLAS4 Tryptophan halogenase; OS = Glaciecola sp. (strain 4H-3-7+YE-5) OX=983545; GN = Glaag_3730 PE=4 SV=1

SEQ ID NO: 89659 - protein, 494 aa, Microbispora sp.
  REGION 1..494: note = tr|A0A5J5JTM5|A0A5J5JTM5_9ACTN Tryptophan 7-halogenase OS=Microbispora sp. Gxj-6 OX=2614688; GN = F5972_31800 PE=4 SV=1
MEREEFDVVVVGGGPGGATLAALVAMQGHRVLVLEKETFPRYQIGESLLPSTIHGVCKMIGVTDALAAAGFTHKKGGTFRWGAKPEPWTFSFSVSPKIASSTSYAYQVERSKFDKILLDNAVSKGAEVRFRTQVGDVIEEDGRVVGVTYSGEDGAERRAYARFVVDASGNGSRIYKRVGGTRVYSEFFRSLALFGYFEGGRRLPAPYSGNILSVAFNSGWFWYIPLSDTLTSVGAVVRRENAEKVQGDPEASLSALIDECPLIKDYLSGATRVTEGQYGQIRARKDYSYHQTTFWRPGFVLIGDAACFVDPVFSSGVHLATYSALLASRSINSALAGLVGEEEAFTEFEARYRREYGVFYEFLMSFYDMHRDEDSYFWSAKKVTHSGHTELESFVELVAGVSSSEFALRDAESAAVRMKDKSAEFAAAIDELAADREGNMAPLFKSSAVRQAMQEGAQVQSRAFLGEDLGPDVPMFPGGLVTSNDGLFWLPAKA

SEQ ID NO: 89660 - protein, 409 aa, Streptomyces sp.
  REGION 1..409: note = tr|A0A3B8GHH3|A0A3B8GHH3_9ACTN Tryptophan halogenase; OS = Streptomyces sp. SoC090715LN-16 OX=1898658 GN=idmB26; PE = 4 SV=1
MPEHHVRTTEYDVIVIGGGPAGSATAGLLARSGHDVLLLEREKFPRYHIGESLITGCMGVLEELGIRERVAALGFVEKYGGSLVWGRDGRWRFAFAEGKPEFPHAYNVRRADFDALVLTRARELGAHVLEQATVKEAVVDNGRVVGVRYVVRGGEEGEARARMVVDASGQARVLGRTLGGVDWQDDLRNVAVWSYYQDGEPLAGDETGNIFVEHVPGGWFWYIPLHDGTHSVGFVTAAEDAAATGLELPALFEAKVEESVHLKQYMKRAKRTDAFRTARDWSYVCREFAGPGWMLVGDAAGFVDPLFSTGVTLAMLAGRAAAEAIPVILKDPERESTVQARYDKSYREFLGTILSFVRYFYDVGLDRDAYYQYAQALVDPGQLFFPRKDFVTLISGLNSLQPVFDLDVD

SEQ ID NO: 89661 - protein, 494 aa, Glaciecola sp.
  REGION 1..494: note = tr|F4ARB6|F4ARB6_GLAS4 Tryptophan halogenase; OS = Glaciecola sp. (strain 4H-3-7+YE-5) OX=983545; GN = Glaag_1076 PE=4 SV=1
MNSEKVKNVVIAGGGTAGWMAAASLSKLLGKSLNITLVESDEIGTVGVGEATIPPIRTLHKLLNIDEQAFMRATNSTFKLGIEFSHWGQKNDSYIHSFGVTGKECWAGEFHHFWLRGKELGINVPFGDYCYELQASKQGKFAFSANSPMNFAYHLDATLYAQFLRDFCADVVTRIEGKIATVNKHTNNGFIRSLTLESGQEVEGDFFIDCTGFKGLLIEGALHTGYEDWSHWLPCDSAVAVQTQSTSDPLPYTRATAHDFGWQWRIPLQNRVGNGMVFCSRYASDEQAKQALLANLEGNPITEPRVIKFKTGRRRKGWNKNCVALGLASGFVEPLESTSIHLIMTGIVRLMRLFPFDGVRQSGIDEYNEKLTSELHSIRDFIVLHYKVTQRDDSDFWRHCQSMEVPDTLAHKIHLFKETGRVFLDDGDIFRVDSWTQVMLGQGLEPKQYHRIVNEMSEEELTRFLAGLRSAIEQRVNQLPSHQQFITRYCNASA

SEQ ID NO: 89662 - protein, 495 aa, unidentified
  source 1..495: note = Pseudoalteromonas fuliginea
  REGION 1..495: note = tr|A0A5B0UEV3|A0A5B0UEV3_9GAMM Tryptophan 7-halogenase OS=Pseudoalteromonas fuliginea OX=1872678; GN = EU508_07950 PE=4 SV=1
MTKTNAVKNVVIAGGGTAGWMAAAALAKLVGNNISITLVESDDIGTVGVGEATIPPIRTFHKLLGINEQAFMKATQASFKLGISFENWGDENTHYIHSFGATGKECWAGEFHHFWLQGKALGINNPFGDYCYELQAAKAGKFAFNQQNPINYAYHMDATRYAQFLREFSEPLGVKRIEGKIQKVVKNTKTGHIESLILNNSEHINGDFFIDCTGFRGLLIEQALHTGYEDWSHLLPCNSAIAVQTKSTSDTVLPLTRSIAHKSGWQWRIPLQNRVGNGLVYCSQYMDDEQAKALLLNNIEGEPLTEPRIIKFKTGRRLKGWNKNCLALGLASGFVEPLESTSIHLIMSGIIRFMRLFPFNGITNHAIDEYNKQLKSEIENIRDFIVLHYKVTNRDDSEFWQHCNAMEVPKTLQHKIDLFKQTGRVFLDDGDIFRVDSWVQVMLGQGIEPNQHHLIASMMSDEELTRFLHGIKQQIEQRVSQLPSHHEFLKQYCPA

SEQ ID NO: 89663 - protein, 499 aa, Glaciecola sp.
  REGION 1..499: note = tr|F4ASX5|F4ASX5_GLAS4 Tryptophan halogenase; OS = Glaciecola sp. (strain 4H-3-7+YE-5) OX=983545; GN = Glaag_3525 PE=4 SV=1
MKKTAITILGGGTAGWMTAAILAKGLPKDKFHICLVESPDISSVGVGEATIPPMTSLLAYLELDESSFLKRLNGTFKYGIQFENWSELGNQYMHAFGDIGTPLGTLSFTQAWLKSAAALNFNELGSYIPSAVAAKTGKFHPAVDIPQGANPTHFYPLSLLFYAYQFDATELASLLKEYAIDRSVEHIEGMVNRVNNKRNGDISSLSLRDGRNIAGDYFVDCSGMRGRLNKSHFGCEFDDWSNELPCNSAIAVQTKRDTPAAPYTKSIAMSAGWRWEIPLRDRTGNGYVFSSRFLTDEQALQELNEALAGEQFITEPRIIHFKTGCLTTPWHRNSIAIGLASGFTEPLESTSIHLIHKYALELKDALLYGQDLAHEAKRFNHMFYQEALSIKDFLLAHYHVSKRTDSPFWQHCMNMPITQTLQNYLAEFARNGYINLPESSLFPFQSWFQVLVGQGYLADYCAFSDKQFDAQQAKPFFNNVKLAIQSEVARLAPHQSYLQ

SEQ ID NO: 89664 - protein, 498 aa, Glaciecola sp.; identical to SEQ ID NO: 86555
  REGION 1..498: note = tr|F4AS47|F4AS47_GLAS4 Tryptophan halogenase; OS = Glaciecola sp. (strain 4H-3-7+YE-5) OX=983545; GN = Glaag_2304 PE=4 SV=1

SEQ ID NO: 89665 - protein, 517 aa, Glaciecola sp.
  REGION 1..517: note = tr|F4ANR0|F4ANR0_GLAS4 Tryptophan halogenase; OS = Glaciecola sp. (strain 4H-3-7+YE-5) OX=983545; GN = Glaag_1905 PE=4 SV=1
MDQAIKSIVIVGGGTAGWITAGTLAAKLQNEHADGFKITLVESPDVKPIGVGEGTWPTMRRTLKAMGIRETDFIRECNVSFKQGAKFAQWVTGAEDDFYYHPLVLPQDFDSTNLARHWMAHPFEQSFSQAVSPQEAVCETGLAPKTIATAEFTSIINYAYHLDAGRFSAFLQRHCIEKLNVHHILDNVSKINAAENGDIASVSTKANGDIAGDLFIDCTGFKSLLLGEHFKVRFKSCKDVLFVDQALAIHVPYDTDDAPIASHTISTGQSAGWVWDIGLQNRRGVGHVYSSAHTTEQRASEELLNYIAQTGGKVNEADIRSIGLNPGHRETFWRQNCVAVGLSAGFLEPLEASSLLLVEISAAMIADQFPATRDAMDIVAKRFNHTFLYRWERIIDFLKLHYMLSKRNDSAFWIDNRDTATIPQSLQEQLTLWQFQPPWHNDFEHAVEVFPAASYQYVLYGMGFYTKPNELGMSQAYQQKASALRQKNSQQVQQMLKNLPDNRGLINKIHQFGMQRV

SEQ ID NO: 89666 - protein, 494 aa, Pseudoalteromonas sp.
  REGION 1..494: note = tr|A0A0X8XVI1|A0A0X8XVI1_9GAMM Tryptophan halogenase; OS = Pseudoalteromonas sp. An33 OX=1719994 PE=4 SV=1
MNQNAIKKIVIAGGGTAGWMCSAAMAKLLGKNIEVCLVESDLIPTVGVGESTIPTLHIFHDLLKISESEFMAATNATFKLGISFEGWKQNQQSYFHSFGYVGQGCWAAGFQHFWLKGMQQGVAADIGDYCTEHVASRLGKFAVVPNQDRNHAYQLDAGLYAKFLRNFAEQNGAKRIEGMISKVNLEPTNGFIKSLTLGDGQIIEGDLFIDCTGFKGLLIEQALHTGYEDWSHWLPCDSAVAVQTELVSPIVPYTRAMAHKCGWQWQIPLQSRRGNGLVFCSKYMSDDEAKTALLNNVEGKLINEPRVIKYRTGTRRKHWNKNCVAIGLASGFIEPLESTSIHLIQQSIIRLMQNMPTKAIESCYQDDFNNKMRFEAENIRDFIVLHYHVTQRTDSDFWRYCKNMPIPESLAKRIELFKQSGHVYKVEQELFGEASWLQVMLGQGLLPQNYHPIVDSMSDDELKRFLESIKTHAAKKANSLPSHIDFINHYCKAK

SEQ ID NO: 89667 - protein, 533 aa, Streptomyces sp.
  REGION 1..533: note = tr|A0A4S2VCZ2|A0A4S2VCZ2_9ACTN Tryptophan 7-halogenase OS=Streptomyces sp. A0592 OX=2563099; GN = E6U81_19100 PE=4 SV=1
MTSTDTRLQKVVILGGGTAGWMTAAYLGKALQGTVDITVLEAPTIPRIGVGEATVPNLQRSFFDYLGIAEDEWMRECNASFKMAVRFVNWRTDGQGESTARELPGGGPDHFYHPFGLLPDYDQTPLSHYWFKRKYEGRTTEPFDYACFREPPVMDAMKAPRWLDGRPATRYAWHFDAQLVADFLRRFATEKQGVNHVQDEMVRVEQDSRGYVTTLHTKGGLALDADLFVDCSGFRGLLINQALQEPFIDMSDHLLCDSAVATAVPHDDAAGGVEPYTSAIAMSSGWAWKIPMLGRFGTGYVYSSKFADQDTATREFADMWGLDVEETKFNHIRFRVGRNRRAWVKNVVSIGLSSCFLEPLESTGIYFITAAIYQLAKHFPDKTFNEGLVDSFNHEIEVMFDDTRDFIQAHFFYAPRNDTPFWQANKKLVLPDNIKQKISAYKAGLPINSPITDESTYYGNFEAEFRNFWTNGSYYCIFAGLGLEPDAPLPTLAHRPESVAGAEPLFDTVKRQQQNLLETLPSAYDYLRQLHGA

SEQ ID NO: 89668 - protein, 542 aa, Hapalosiphon welwitschii
  REGION 1..542: note = tr|A0A075X6F6|A0A075X6F6_9CYAN Halogenase; OS = Hapalosiphon welwitschii UH IC-52-3 OX=1524913 GN=welH; PE = 4 SV=1
MLTQNTTNVVIVGGGTAGWMTASYLSKALQRNISITLIESSNITKIGVGEATFSSIKSFFDFLGLQEHEWMPKCNATYKMAIKFVNWNTNKKHFFHPFERLDIVDGFSISEWWMKLKKHSEPFDYSCFAAPTLCDSQRSPRYLNGEVFDSRVKQLFSDEHFSEKRLITLADAEGQYPYAYHFDANLIAKFLKDYAMQRGVKQIVDDVMDVKLTTEGSIDCVHTKGNRSITGDLFVDCTGFRGLLINKALSEPFISFSESLLCDSAIAMQVPTNIKKDGINPYTKATALSSGWVWEIPLYGRNGAGYVYSSAFISKEDAEQEFRQHLGPVCQHQQASHIKMRIGRNRNSWVKNCVAIGLSSGFVEPLESTGIFFIQHGIEELVSHFPSNSLNEELIKSYNQAIAKCIDGVRDFLILHYHASDRTDTPFWKATKHDIQLPDELSQRFKLWKKRLPNKKNINPYFHGFETYSYSVMMLGLNHVPESSLPIMEYMDDHKATAQFRSIKEKTELLNSTLPSQYEYLTYVMKSQEQSEYLNENLLDAV

SEQ ID NO: 89669 - protein, 496 aa, Glaciecola sp.
  REGION 1..496: note = tr|F4AP63|F4AP63_GLAS4 Tryptophan halogenase; OS = Glaciecola sp. (strain 4H-3-7+YE-5) OX=983545; GN = Glaag_4254 PE=4 SV=1
MQKDSIKHIVIAGGGTAGWMTAAALGKLFGANIKVTLIESDAIPTVGVGEATIPTLHLFHDLLKIKESEFMAATNATFKLGIKFEDWYQRNQSYIHSFGRFDHGCWAAGFQHFWLRGRQLDIASEIGDYCPEHLACRMGKFATAPKQERNHAFHLDAGLYAKFLRDFAEQYGVRRIEGKIDNVNLNHNNGFIQSLSLESGQRVEGQLFIDCTGFRGLLIEQALHTGYEDWSHWLPCDSAVAVQTELNESNVPYTRSIAHDAGWQWQIPLQTRVGNGLVFCSKYISDDEAKTQLLDNIRGKTLNTPRVLKFKTGVRRKLWNKNCVAIGLAGGFIEPLESTSIHLIQQSIIRLMQSLPSAHMESPIIDKFNATMRNEIDNIRDFIILHYHATARKDSAFWRYCKDMPIPTSLHERMEQFAHSAHVHQGNGELFGEASWLQVMLGQGITPKAYHPIVDLMPVQELASFLDNVKQQTARRVSSLPNHLAFIRYYCKRAAV

SEQ ID NO: 89670 - protein, 502 aa, Erythrobacter sp.
  REGION 1..502: note = tr|A0A5E7ZPB6|A0A5E7ZPB6_9SPHN Tryptophan halogenase; OS = Erythrobacter sp. EC-HK427 OX=2038396 GN=ERY430_80428; PE = 4 SV=1
MNEEAPYDYVIAGGGTAGWMAAAGLARFAPPGTRIALVESDAIGTVGVGEATIPQIHLWLNALGLDEREFLIKTKASFKLGIAFDGWLREGHSYMHAFGQVGRAHGLLPFQHYWLRAKAAGFAKPLAAYSLNEVAARNLRMAKGQPGALPYAYHFDAGLYAQHLRAFAEMRGVVRIEGTIGDVVCDGESGDIAALLLDGGRRVAGKFFMDCSGFRALLIEGALGAGFDDWSHYLPCDRAMAVACDSGGEFTPYTRSIARKAGWQWRIPLQHRIGNGMVFSSAHLSEDEAAATLLANLDGAPQGDPRPIRFTTGKRKEHWKNNCLALGLAAGFMEPLESTSIHLVQSAVSRFLSVLPGTTGTQATRNWFNSQADFEWQRIRDFLVLHYHANQREGEPFWDDVRHMALPDTLVAKLDLWRATGFIHREHEELFTEVGWFQVLAGQGVAAESYNPMADSLSEAELRLMLDQTEAAIANQTRPMQGHIQFLQNYASGPSPRVEVPA

SEQ ID NO: 89671 - protein, 537 aa, Burkholderia cepacia
  REGION 1..537: note = tr|Q9RPG7|Q9RPG7_BURCE Tryptophan halogenase; OS = Burkholderia cepacia OX=292 GN=prnA PE=4 SV=1
MSHPIKNIVIVGGGTAGWMSASYLVRALQQQANITLIESEAIPRIGVGEATIPNLQKVFFDFLGIPEREWMPQVNGAFKSAIKFVNWRKSPDRSRDDHFYHLFGSVPNCDGVPLTHYWLRKREQGFQQPMEYACYPQPEALDARLAPCLLDGTRQMPHAWHFDAHLVADFLKRWAVGRGVTRVVDEVVEVHLNERGDIASLSTKEGRTLEADLFIDCSGMRGLLINQALKEPFIDMSDYLLCDSAVASAVPNDDARVGIEPYTSAIAMNSGWTWKIPMLGRFGSGYVFSSKFTSRDQATADFLNLWGLSDKQPLNQIKFRVGRNGRAWVNNCVAIGLSSCFLEPLESTGIYFIYAALYQLVKHFPDTGFDPRLRDAFNAEIVYMFDDCRDFVQAHYFTASRDDTPFWLANRHDLRLSDAIKDKVERYKAGLPLTTTSFDDATYYETFDYEFKNFWLNGNYYCIFAGLGLLPDRSLPLLRHRPASVDKAEAMFARIRREAERLRASLPTNYDYLRSLRDGEAGRARSRPGPVAAPETL

SEQ ID NO: 89672 - protein, 510 aa, unidentified
  source 1..510: note = Kitasatospora aureofaciens
  REGION 1..510: note = tr|A0A0L8NXQ2|A0A0L8NXQ2_KITAU Tryptophan halogenase; OS = Kitasatospora aureofaciens OX=1894 GN=ADK78_40550 PE=4; SV = 1
MGERAVANSANAGNPANPETYDVVIVGGGPAGSTLGALVARQGHRVLILEKEFFPRYQIGESLLPSTVHGVCRLTGVADDLAAAGFTRKRGGTFRWGATPEPWTFSFSVSEHMAGPTSYAYQVERSKFDEILLRHAGRCGAEVREGCAAADVIADEERVRGVRYTDADGAEREAYGTFVIDASGNKSRLFQRVGGQRTYSEFFRSLALFGYFEGGKRLPEPNSGNILSVAFDSGWFWYIPLSPTLTSVGAVVRREMAEKIQGDQEEALRALIAECPLISEYLADARRVTTGQYGQLRVRKDYSYHQTTFSRPGMLLVGDAACFVDPVFSSGVHLATYSGLLAARSINSVLAGLVDEAVALREFEARYRREYSVFYEFLLSFYEMHHSEQSYFWQAKKVTHHKRSEMEAFVDLVGGVSSSETALTDADAMAERLRADSAEFAGAVDQLAHSEDGSMLPLFKSSVVSQVTREGSQVQMRALLGADAEPETPLLPGGLVSSPDGMFWLPASSG

SEQ ID NO: 89673 - protein, 219 aa, unidentified
  source 1..219: note = Streptomyces erythrochromogenes
  REGION 1..219: note = tr|V9XQZ2|V9XQZ2_9ACTN Tryptophan 5-halogenase (Fragment) OS=Streptomyces erythrochromogenes OX=285574; PE = 4 SV=1
GGGTAGWMSASYLKAAYGDRINVTLVESDRVATIGVGEATFSTVRHFFDYLGLDEREWMPECSGSYELGIRFENWREPGQHFYHPFERLRTSDGYTLADWWLQEGDRSEPFDRSCFITPALCEAKRSPRLLDGSLFAGGLDGSLGRSTLEEQRAQFPYAYHFDAALLAKFLAKYGTDRGVRHVVDDVTQVGRDERGWISHVATREHGDLTSDLFIDCSG

SEQ ID NO: 89674 - protein, 472 aa, Rubrivivax sp.
  REGION 1..472: note = tr|A0A519HVU0|A0A519HVU0_9BURK Tryptophan 7-halogenase (Fragment) OS=Rubrivivax sp. OX=50259; GN = EOP39_20795 PE=4 SV=1
RAEVVLVESPDIGTIGVGEATLPPIRAFNRTLGLDGADFVKKTQGSFKLGIEFRDWGKVGNRFFHGFGDFGPAIDGRMPWQHWLRLEKSVGNLPSYEEWSTSSVMAKANRFKPPVDGPPSAANAYSFAYHFDAGLYAAYLREYAIERGAQRIEGLIVGVELRPEDGFVAAVKLADGRRIEGDLFIDCSGFRALLIGGAMQSPYEDWSALLPCNSAQAVPSARVEPLTPYTTSTAKAAGWQWRIPLQHRTGNGHVYCNHFISDDEAAATLLSGLDSAALDTPRQLRFITGRRKQSWVKNVVAIGLAGGFLEPLESTSIQLIMDAVGRLIQFFPDRSFKPHLAAEFNRRMSVQYESVRDFIVLHYKLTERQDSELWRYCAAMPIPDTLAHQIELFRSAGRVTILDPDGFAEPSWVSLFLGLGLKPEALDPFIDLIDEGALVQHFARLRQAIHQTVAGMPGHGDYINRHTKAPPA

SEQ ID NO: 89675 - protein, 505 aa, unidentified
  source 1..505: note = Kitasatospora aureofaciens
  REGION 1..505: note = tr|A0A0L8PH98|A0A0L8PH98_KITAU Tryptophan halogenase; OS = Kitasatospora aureofaciens OX=1894 GN=ADK78_14765 PE=4; SV = 1
MSASYLKAAFGDRLSVTVLESKRIKTIGVGEATFSTVRHFFDYLGLPEHVWMPKCNATYKLGIRFENWHRKGSYFYHPFERLRVVDGFPLTDWWLHRKPGNSERFDQDVFLMSAICDAERSPRYMDGTLFEQDFKEQTDPKDRKPERSTLTEQDTQFPYAYQFDASLLADYLCAYSTERGVRHIEDDVVEVARDDRGWIGHLRTREHGEVTADLFIDCTGFKGLLLNEALEEPVISFQDTLPNDRAVALRVPVDMEKRGLRPCTTATAQDAGWIWTIPLFGRIGTGYVYASDYTTPEEAERTLREFVGPDAKDVEANHIRMRIGRSRNAWVNNCVAVGLSSGFVEPLESTGIFFIQQGIEQLVKHFPGADWNPQLRDSYNRAIGNTIDGVREFLVMHYRGAGRNDNQYWKDAKTRALPDGLAERLDMWRSKLPTTETIFPNYHGFEPYSYHSMLLGLGGVDLKAPPALALMDDSAAQAEFKLLRAQSQELAKRLPSQYEYLAQMH

SEQ ID NO: 89676 - protein, 516 aa, Erythrobacter sp.
  REGION 1..516: note = tr|A0A5E7Y996|A0A5E7Y996_9SPHN Tryptophan halogenase; OS = Erythrobacter sp. EC-HK427 OX=2038396 GN=ERY430_40637; PE = 4 SV=1
MNKRSIEGHGAIGSIVIVGGGTAGWMTAAACSRYLADGARSITLVESDEIGTVGVGEATIPPIINFNRMLDIDENAFLKATKGTFKLGIEFVNWGQQGDRYFHPFGAYGEDLHGVPFHQLWLREKHLGEPGQIADYCISAAAAAARRFGRPVRDPKSPLARLFYAFHFDAGLYAAFLRQIAERQGAKRQEGRIVKVHRHSESGDVTSVELEGGRLVEGDLFVDCSGFAGLLTAKELETPWRDWSHWLPADRAIAVPTANVGTPDPFTRSTAHGAGWQWRIPLQHRTGNGHVFSSRFMDEDAARDILLANLEGAALADPRTIRFATGRREQAWSHNVVAIGLSSGFLEPLESTSIHLIQNGIQRLLALFPGKPISPVERDEYNRGMADLFDDIRDFIILHYKATQRDDTAFWRYVRDMEIPDTLARKIDLWRLHGRVFREGADLFNVTSWVAVLLGQNIAPSAYDPVVDSLDESRVSLALRQMREGYARAAQSLPVQEEFLRRAGAWAEEPQLTGAW

SEQ ID NO: 89677 - protein, 510 aa, Rubrivivax sp.
  REGION 1..510: note = tr|A0A520C2J6|A0A520C2J6_9BURK Tryptophan 7-halogenase OS=Rubrivivax sp. OX=50259 GN=EOP35_03520; PE = 4 SV=1
MKHVCVVGGGTAGWMTALMLATSAYGPRLKVTVLESPQVGIIGVGEGSTPWLRGFFEGLGIEESEWMPACNATYKSGISFENWSTNPGFERYFHPFASMLDNLTMHQFVDNVHERLGGADVHAHPDRFFVAAALARQGRGPRAHANFPFDVWYGYHFDATLLGQFLAARAVARGVRHLQRHVSEVRLDERGDIGHLQLDDGDTLAADLFVDCTGFASLLIGQALQTPFIPYAENLFNDSAIAMPTPLDGPIASQTVSTALRHGWAWKIPLTNRHGNGYVYSSAHCSADQAETELRTHLGLLDADVPARHLKMRVGCMAKVWNRNCVAIGLSQGFIEPLEATALLFVQRTAAMLVEVLEKGDLGPASQSAFNEAMHTRFENTRDYIVAHYKTNSRTDTDYWRENADNMHLSDSLQGVLMTWMSRKPLVAGLNAGRFGQGYPTVSWYALLAGMGIFPDVQDLQPPTEHQARHRLESVDDFVERSALNFPDHRELLSNIPARVSDKSLQLYLW

SEQ ID NO: 89678 - protein, 510 aa, Rubrivivax sp.
  REGION 1..510: note = tr|A0A519IMB5|A0A519IMB5_9BURK Tryptophan 7-halogenase OS=Rubrivivax sp. OX=50259 GN=EOP39_00195; PE = 4 SV=1
MNERLRHVIVLGGGSAGWLTAGLLAAEHPDLHITLIESSDVPTIGVGEGTWPSMRDTLRRIGLSEADFIRRCHVSFKQGSRFDGWVHGASGAKGDRYYHPFMLPLGYGDAELVQAWLAAQPGRPFADVASPSVQVCEAGLAPKQVQTPGFAAVANYAYHFDAGLFGQLLREHAVAKLGVHHVIDHVDAVTAHENGDIAALQTREHGALTADLFIDCSGLASRLIGQHFGVPLKSERDVLFNDAALPVQVPYAEADAPLASVTIATAWAKGWIWDIGLPTRRGVGCVYSRAHASDDEAQAAMQAYLDATGTPPERPAPRSLRFDPGYRERFWVGNCVAIGLSSGFIEPLEASALAMVELSAQRLCDELPMARSSMAAVAQRFNDDFSYRWARVIDFLKLHYALSQRDDSDYWRAHRDPDTWPQRLRELLPQWQLRAPARHDFGRIDEVFPSASYQYVLYGMGFRPDMHELSANKLQAAQACFDEAARQARRYLSALPSHRSLISHIRKTEP

SEQ ID NO: 89679 - protein, 512 aa, Rubrivivax sp.
  REGION 1..512: note = tr|A0A519IEE7|A0A519IEE7_9BURK Tryptophan 7-halogenase OS=Rubrivivax sp. OX=50259 GN=EOP39_07445; PE = 4 SV=1
MPDGGPLRRIVIVGGGTAGWMAAAPLGQLLGGGDLAGSCEIVLVESPEIGTIGVGEATLPTIRYYNNSLKLDNSEFIRKTQASFKLGIEFKDWGHLGHRFFHGFGEFGPSILNRSSVHHWLRLHGQAGGMGYEDLSTATVMALRNRFVPPEGDIASAANAYSYAFHFDAGLYAAFLRDYAMAHGVKREEGTIVDVSLRPGDGFVTAVTLSDGRRIEGDLFIDCSGFRALLIEGVCRVGYHDWTHWLPCDSAQAVPCDRVDPLTPYTTSTARSAGWQWRIPLQHRTGNGHVYCSGYTSDDEAGRVLMGSLDGAAQGDPRQLRFKTGMRKKAWERNVVAIGLSSGFLEPLESTSIQLIMDGIGRLIELFPDRRCDLHLSAEYNRRMSRQYESIRDFIVLHYKLTKRDDSEFWRYCAAMPIPDALHHQIELFRRSGRVAILDPDSFAEPSWLSLFLGLGLWPERHDPLLKQVDEQALRTHFQRLRDAISHNVNDMPDHGAFIARNVRAPAMEMSA

SEQ ID NO: 89680 - protein, 496 aa, Rubrivivax sp.
  REGION 1..496: note = tr|A0A520BF19|A0A520BF19_9BURK Tryptophan 7-halogenase OS=Rubrivivax sp. OX=50259 GN=EOP35_21800; PE = 4 SV=1
MTAAYLAKALRLPERPHLEVTLLESPDIGTVGVGEGTFPTIRNTLQFLGIDEAHFIRETSATLKQGIRFVDWTHTPTEGRHQQFFHPFEAPFYAEDVNLVPYWLLQDEATRPPFAQALTLQQRVAEAQRAPRRAGEAPYTAPLNYAYHFDAIKLARLLADRARELGVRHEQGTVTDVTLDARGAIAQLHTLQGRFEADLYIDCTGFRADLIGRALGSPLKSCRGQLFADRALACKLPDARPDGPDAPLESCTIATAHEAGWLWEIGLNGARGIGCVYSSSHMSDQRAAEVLRGYIGPGHEDVALRSIPFAPGYREQQWVKNCVAVGLSAGFLEPLEATGLVLIEAAVGMIAEMLPHSGPIEAPARRFNELMALRFDNIINFLKLHYCLSQRDEPFWRDNADPATIPERLADLLEQWKLRPPGRFDFVLDTETFAFFNYQYILYGMGFHTDLAAGRADFTQADQAAKLFAKIQRFADRALVELPSHAALIRQINAGK

SEQ ID NO: 89681 - protein, 517 aa, Rubrivivax sp.
  REGION 1..517: note = tr|A0A519ECG4|A0A519ECG4_9BURK Tryptophan 7-halogenase OS=Rubrivivax sp. OX=50259 GN=EOP37_08490; PE = 4 SV=1
MQPIQDILIVGGGTAGWLTAAFLARQLGTAHGGVRITLVESSDIGIIGVGEGTFPSIRGTLSAIGIGEAEFLDACSATYKQGIRFEHWVRPPGAAGADHYFHPFSQPSQRPGAPELLPYWLIGEAGQGRAFAEAVTLQKAVADARHGPKRASDGDFLGPLNYAYHFDAGRFAALLAEHGQALGVKRVIATVDRVDLDEQGAIAAVHTKEAGTLTAGLYVDCSGFRARLIGEALGSPFKSLNDVLFVDRALAMQVPYARPDAPIASYTIASAQDHGWIWDIGLQERRGIGHVYSSRHCDDEEAERTLRRYIGPASDTLTPRKLVLDVGYRETQWVKNCVAVGLSGGFLEPLESSGIGLIETAAYLIGQLFPFNGDTAPVAKHFNAFMKERYARIVDFIKLHYGLTQRTDTAFWRDNADPASFTDTLKEKLAMWRCRPPQRLDFVTDVEMYLPASWQYVLYGMEFKTQLGTGAAALMRSEEARKEFATIAQLGAHALRDLPPHRVLIEQLLARTGKRAA

SEQ ID NO: 89682 - protein, 511 aa, Erythrobacter sp.
  REGION 1..511: note = tr|A0A5E7Y3N5|A0A5E7Y3N5_9SPHN Tryptophan halogenase; OS = Erythrobacter sp. EC-HK427 OX=2038396 GN=ERY430_40636; PE = 4 SV=1
MAGEPISKVVIVGGGTAGWMAAAALSRVFGAMPALSVELIESEAIGTVGVGEATIPQILVFNRMLGLDEDEFVRETHATYKLGIEFVDWLRKGHSYIHPFGFYGLDMLGVEFHHFWLRAKELGEDLPLDPYSISAMAAQFSKFDRPRNDLPNSPLAKLGYAFQFDAARYARFLRRRAEAQGVVRTEGRIVRVEQDPDSGFVTAVQLDDGQRIAGELFIDCSGFRSLLLGETLGVAFNDWSKWLPCDRAVAIPCELGGKDQPLTRSTARPAGWQWRIPLQHRIGNGHVYSSAHMEEQEAIDLLLANLDGKPLAEPNRLRFRAGHREKSWDKNVVALGLAGGFLEPLESTSIHLVQQGIARLMTLFPTRDFGEAERARYNRLCAQDYLDIRDFLVLHYRATERDDSDFWNYCRTLDPPDGLLEKLEMYRSSGRVFREHNELFTETSWLSVMAGQGLVAGGYHPAVHLMDDAEVLRRLAHIREVIGNTVAQMPSQREFFQRHGSAMREEALVAS

SEQ ID NO: 89683 - protein, 496 aa, Erythrobacter sp.
  REGION 1..496: note = tr|A0A5E7ZVJ5|A0A5E7ZVJ5_9SPHN Tryptophan halogenase; OS = Erythrobacter sp. EC-HK427 OX=2038396 GN=ERY430_80422; PE = 4 SV=1
MSAPTPPHIVVLGGGSAGWITACLLHHRWGARGGRVTVVESPDIGIIGVGEGSTPQLKAMFDHLGITEAEWMAACDATYKLGIRFSGWSERAGFESYFHPFPGPVDLHTEPAFTHNVMLARRGADVPAHPDDWFLASVLAEAGKGSQAAESFPFAPSYGYHFDAYKLGAFLRDWAVARGVVHRPLTVEQVEVGEDGEVAALLCEGGERVTGDLFVDCSGFRAVIAGDALGGEFLPFADNLFNDRAVVVPTARVTDFKPQTGAVAMQAGWRWHIPLTTRTGNGYVYSSKYISDEDAAAELLGSVGLSEDDAEPRFLRMKVGRMRESWRGNCLAAGLSQGFIEPLEATALHIVIATALEFAEAYEAGGFTAQHRDTFNANIGARYDAICDYIVAHYRMNQRSDTQYWRDNAANQHLTDGLKAMLTAWFTHQDIAAANAQQYRIPAYAPMSWHVLFAGYGTFPPADRMQALPQGVQAADLDGVRELLAKSAGNFAAVDW

SEQ ID NO: 89684 - protein, 228 aa, Rubrivivax sp.
  REGION 1..228: note = tr|A0A519E1E6|A0A519E1E6_9BURK Tryptophan halogenase (Fragment) OS=Rubrivivax sp. OX=50259 GN=EOP37_21065 PE=4; SV = 1
MTFTAPESQSPRRPVKRVVIAGGGTAGWMMAACISKHLGKQLDIRLVESDEIGTVGVGEATIPTMLTFHQLLGLDEREFMAATQATIKLGIKFEGWRETDSTYIHAFGNTGIDHWTAGFQHFWLKGRERGLASDYADYCLEARAAQALKFAHLPDQGINYAFHLDATLYGQYLRRFSEGFGVKRLEGKIAEVLMHVDGDIRALKLQDGTEIEGDLFVDCTGMRSVLLG

SEQ ID NO: 89685 - protein, 536 aa, Alteromonas sp.
  REGION 1..536: note = tr|A0A5H3A7E1|A0A5H3A7E1_9ALTE Tryptophan halogenase; OS = Alteromonas sp. I4 OX=2652380 GN=AltI4_44200 PE=4 SV=1
MIQNLREGDAVVNAPIQQVVIVGGGTAGWLCAGMLAAKLGKQGERQLGVEITLIESPDVSTIGVGEGSWPSLRDTLREIGLSESAFITHCQASFKQGSTFVGWRDGSEHDRYHHPFTNPAGYTEIDVHACWQALHSNKPYDRAFSVQPELCEQHKAPKQLATPDYAYVLNYGYHFDATRLAEMVADHCVNQLGVRHVQAHIDQVVSHHNGDIKALTTQCGQNLEGDLFIDCSGQSALLAGKHYNVPWHSVKDILLNDSAMAVQVPYHEQDNTIASTTLATAHPQGWSWDIGLQHRRGVGMVYSSDFASAEDIEQSLKQYLIKRLPHDVVEQATCRQLKFSPGYRSEFWTHNCLSLGMASGFIEPLEASAVAMVELGVRMLCEQFPQNRDHMRILAARYNERFAYRWARVIDFVKLHYAINQRSNDAYWNAHRDPATWPDSLKSLLSLWQYQPPSRYDVVQNEEIFPSASYQFVLYGMGFKTQSPTLADASDMLQRAGAISQKLQATLMQFSQGLPDNRALLNAIRERHQHSSGATL

SEQ ID NO: 89686 - protein, 523 aa, Rubrivivax sp.
  REGION 1..523: note = tr|A0A519IDR1|A0A519IDR1_9BURK Tryptophan 7-halogenase OS=Rubrivivax sp. OX=50259 GN=EOP39_08050; PE = 4 SV=1
MNSELTTAVRRIVVLGGGSAGWLTAATLAVEFGGDAPDALQITLLESPDVPSIGVGEGTWPTMRSTLHRIGISEIDLIRECDAAFKQGSRFDGWVHGGADDRYYHPFTLPHQHGEADLAGAWLQGDHAQPFAESVSAQPHVCTACLAPKQTTTPDFGGVVNYGYHFDAVKLGHLLRRHATTVLGVCHVVDHFTEVRSRENGDIAALTTREHGEIEGDLFIDCSGLASLLLGKHYGVGYRSQKHVLFNDSALAIQLPHQDARAPLASATVSTAHAEGWTWDIGLPTRRGIGLVFSSSHTNDAAAERALRAYIERSGLALGDATPRTLRFNPGYREHFWHRNCVAVGLSAGFIEPLEASALAMVELSAAFIRDEMPTHRADMELVAKRFNEAFDYRWSRIIDFLKLHYVLSRRDDADYWREHRGAASQPESLRELLQLWAHRAPTRNDFYRVEEVFPAASYQYVLYGMGFKPAGRLLNGPKLMAGKSGLNDVATITRRMLGGLPRHRELIQHIDRHGMPPRPPDL

SEQ ID NO: 89687 - protein, 475 aa, Alteromonas sp.
  REGION 1..475: note = tr|A0A5H3A3A0|A0A5H3A3A0_9ALTE Tryptophan halogenase; OS = Alteromonas sp. I4 OX=2652380 GN=prnA_1 PE=4 SV=1
MSKLFQRDLFETPTNPHSRALKSIWVVGDDVHGLSTAVAFATALKPFGIKVGVVSLTTPAKQASLHTCNGHLFAFHRRYQLPERAFMQSQGVAFFTAMSLATASCPNEQVWLANDTWLPLFNGIELHQVKRWLSDFASMETSFAVAAAKAGKTVFPSGQQGTLGNSFELGAVVDTKAYCTFLSQHAAERGVTIVTSDDIAFEQCPHSGDITTLLLSNNQRIQCDWVVDATGPQARVIRQALKRPFESWHAYLPIGLLGETTEQSASNTPGIAVSVNDAGYQQTQHLGGKKRTATFTAVHSGVGECEASFRNPVSHNCLAVGPAAYHIDVPGMSTLHITHRIIDRFLNVVPCLPAPATWGRAFNRTTKQDCEHLRDFGCLLLSAMATRQQETGKPWQVLPKLSDSLDQALTLFNESARCTVPPDAMIHRQRWLDALALASSNEQAFEPLLNAVSQTSGQQFLQRIATQIQSLVSQC

SEQ ID NO: 89688 - protein, 501 aa, Rubrivivax sp.
  REGION 1..501: note = tr|A0A520C405|A0A520C405_9BURK Tryptophan 7-halogenase OS=Rubrivivax sp. OX=50259 GN=EOP35_02490; PE = 4 SV=1
MSSASAPPRRIVILGGGAAGWMSAATLTTAIRSAEVVLVESEEIGIIGVGEATFPSIRTFNQVLGIDEGEFLAATRGSYKLGIQFCDWHRRGEQFFHTFGNFGYTDGPMALWGQLRRLREHIPAQLGDFCLPAVMASKGRFLPPSSQEGLESYGYAYHFDAARYAAFLRQWSEKRGARRIEGRVAEVARREDGGVRALRLADGREIEGDLFVDCSGFASLLIGQTLSQRFIDYSHWLPVDRAWAVPSERPTGGLTPYTRAVAQEAGWTWRIPLQDRTGNGHVFSSRYIDETKAREQLLAQLDAPALAEPRLLRFQSGHRERFWVHNVVAIGLAGGFLEPLESTAIYLVQTAIGRLVEALLDTKQTPAELTTGFNIQQLRQYQRLRDFLILHYHLSERRDSEFWRAMTSMALPESLAYKLHAWQETGTLQIYDNEAFEATSWLTIHAGMDNWPRRSSPWLLEIPADVARRYLAEHHHAVNALAERMPDHDAFLRHICARAQG

SEQ ID NO: 89689 - protein, 491 aa, Alteromonas sp.
  REGION 1..491: note = tr|A0A5H3A5L3|A0A5H3A5L3_9ALTE Tryptophan halogenase; OS = Alteromonas sp. I4 OX=2652380 GN=AltI4_32020 PE=4 SV=1
MNASPLNIVIVGGGTAGWMAANLLAKRWQHKAVSVTLVESPDIGIIGVGEGSTPTLKRFFEDMNIAESDWMAACNATYKVSIQFDGWSPESGVGSYAHPFISQLDTFSERPFYVNCLTRRMGLDVNVTPGDFLFNGWLAKHKRSPQTPANFPFRIEYGYHFDSGLLGAFLQRHAHTLGVNHKSRNIERVQCQPNGDIASLRTREGEIIEGDLFIDCSGFRSLLLQQTLKVPFRSFKDNLFNDAAVVCATDALEDRPVETRSTALSTGWAWQIPLTNRTGNGYVYSSAFISPEDAEKELRAHLGVNDDDAQTRHLTMKVGQVSEHWSHNCLALGLSQGFIEPLEATALHLVQTSVEIFMDHYEKGGFSDQYRAAYNQVIGERFERVRDYIVAHYKLNTRNDSEYWRANRNNDVLSESLLQLLDVWFRRGDLQQEIQRQKLDSHFGATSWHCLLAGYGAFPRLAAQQPNQGDLYKDNNLAQFFSGCLLNFSAQ

SEQ ID NO: 89690 - protein, 287 aa, Rubrivivax sp.
  REGION 1..287: note = tr|A0A519DVN0|A0A519DVN0_9BURK Tryptophan 7-halogenase (Fragment) OS=Rubrivivax sp. OX=50259; GN = EOP37_28480 PE=4 SV=1
SVLLGGALGVGYEDWSHWLPCDSAIALQTASVREAVPYTRSIAHPWGWQWQIPLQHRVGNGVVFSSRYTDDETARAALLGNIEGEVLTPHRVIRFKPGQREVVWKRNCVGAGLSSGFLEPLESTSIHLIQRTAIRLLQMFPKDGIRQSDIDEYNAQMRHELEHIRDFIVLHYHLQQRTDSPMWRDMREMPVPASLQHRLDLFRETGRVFRVPNELFTENSWVQVLLGQGLMPEQHHPSADLMGDRELSSFLGGITTRIEKTVVQMPSHQQYVARYAPAAVVKAPVPA

SEQ ID NO: 89691 - protein, 462 aa, Rubrivivax sp.
  REGION 1..462: note = tr|A0A520BKI6|A0A520BKI6_9BURK Tryptophan 7-halogenase OS=Rubrivivax sp. OX=50259 GN=EOP35_17710; PE = 4 SV=1
MKNRALRRIVIVGGGSAGWITAAPLARMLCRPDEPDQHCEVTLIESAEIGTVGVGEATLPTIRFYNQLLGIDEADFVRNTRATFKLGIEFQDWGRIGNRFFHGFGGFGPAIHNRPLWAYWLRLQAAGDNLPSYEEWSTATVMARHMRFVPPTPGEPSAANAFDYAFHFDASLYGAYLRDYALQRGARRVEGTITRVETRPDDGFVAALHMSNGSRIEGDLFIDCSGFRALLIDGAMKSPYEDWSRWLPCDRAMSVPCERAGAMTPYTLDEPRRQRFVTGRRRQAWMKNVVAIGLSSGFLEPLESTSLHLIMDGVSRLTAMLPDLSFQPALADEFNRQMAYRYESVRDFIILHYKLGERRDSEFWRYCADMPIPDDLAHQIALFRKTGRVAVIEPEGFTEPSWASILMGLGVHPERYDPYIDLVDPQTIRRHMHHVHRSIARTVSSMPSHQDFLDRIGQTPRA

SEQ ID NO: 89692 - protein, 56 aa, Rubrivivax sp.
  REGION 1..56: note = tr|A0A519I6K3|A0A519I6K3_9BURK Tryptophan halogenase (Fragment) OS=Rubrivivax sp. OX=50259 GN=EOP39_14480 PE=4; SV = 1
MSDPSIKKIVIVGGGTAGWMTAAPMAQRFAGAGAARPEVVLVESPDIGTIGVGEAT

SEQ ID NO: 89693 - protein, 522 aa, Rubrivivax sp.
  REGION 1..522: note = tr|A0A520C4X5|A0A520C4X5_9BURK Tryptophan 7-halogenase OS=Rubrivivax sp. OX=50259 GN=EOP35_01260; PE = 4 SV=1
MNSELTTAVRRIVVLGGGSAGWLTAATLAAELGRDAPDALQITLIESPDVPSIGVGEGTWPTMRATLHGIGLSEVDLIRECDAAFKQGSCFDGWLHGGAGDRYYHPFTLPHGHGDADLPGAWLQAGGDPGFAESVGAQPHVCDARLAPKQTTTPDFGGVLNYGYHFDAVKLGHLLRRHATTVLGVRHVVDHFVSVRSHENGDIAALVTREHGDLEGDLFIDCSGMASLLLGQHYGVGLRCQKGVLFNDSALAVQVSHADANAPLASATISTAHAEGWTWDIGLPTRRGIGLVYSSSHTGDAAAERALLAYLQRSGLGEADVSPRRLSFSPGYREQFWHRNCVAVGLSAGFIEPLEASALALVELSVAMIRDEMPTNRADMSLVAKRFNEAFSYRWSRIIEFLKLHYVLSRRDDADYWLEHRSASTQPESLRELLQLWAHRSPSRNDFYRNEEVFPAASYQYVLYGMQFKPALRPLRADQRAAADAGLKDVATITRRLLGALPRHRDLIQHIREHGIPGRTAP

SEQ ID NO: 89694 - protein, 515 aa, Alteromonas sp.
  REGION 1..515: note = tr|A0A5H3A1X2|A0A5H3A1X2_9ALTE Tryptophan halogenase; OS = Alteromonas sp. I4 OX=2652380 GN=AltI4_23860 PE=4 SV=1
MNTASKKTRVVIVGGGTAGWLTAGIIAARHPLLGENSNTEMVLLESPDVKNLGVGEGTWPTMRDTLKQIGLSERAFLSCCDASFKQASKFAGWRQDPAQHYYHPFTAPAGYGVVSLADAWIEAGYPQDFESWVSAQGHACERQLSPKLPQLPEYAFTYNYGYHLNAGKFVALLQAHCTEKLGVTYRQGHVAHIVSHDSGAIKALQLEDGNTVEGDLFIDCSGFAAVLMGKHYQIPFVSQRGVLFNDTAIAAQVNHAEPQTPIASATVATAQTSGWIWDIALQHRRGIGHVFASEFCAVEDAEQTLRNYIANDPNLQQDKVSTRIIKFDPGHRKYFWHHNCVAIGVSAGFVEPLEATALVLIEKSAEWVAEQLPRSPSAMPVLAKRFNQLTNERWQEIIDFIKLHYVLSDRTDSAYWRAHQQHESWTDSLSEALQLWQSQPPGLYESSNRQELFSSASKQYVLFGMGFRAEQWQSCGRLALQQPLIERFRREVQQQVNRVNAQLLTNREYLQKLRK

SEQ ID NO: 89695 - protein, 511 aa, Rubrivivax sp.
  REGION 1..511: note = tr|A0A520C373|A0A520C373_9BURK Tryptophan 7-halogenase OS=Rubrivivax sp. OX=50259 GN=EOP35_03110; PE = 4 SV=1
MQDKHHAPLRTEPVKRVVIAGGGTAGWMVAALMSRILGKALDIRLVESDEIGTVGVGEATIPTLLTYHQLLGINEQEFMAATQATFKLGIQFEGWRNVGEDYVHSFGLTGKDHWTAGFQHFWLAAQQRGQARVPHGDYGDHCLELRAGIENRFAHLPRNGLNYAFHLDASRYAVFLRGISEGYGVKRIEGKIAQVLQHDSGDVRALKLADGSEIDGDFFIDCTGFRSLLLGQTLGVGFEDWSQWLPCDSAVAVQTESVGEPVPYTRSIAHPFGWQWRIPLQHRVGNGLVFASKYLGDDEAKATLLKHIEGAPLTQPRVLKFTPGQRDVTWQRNVVAIGLASGFLEPLESTSIHLIQRGITRLMQCFPAGGIHQTDIDEYNRQVREEIEHIRDFIILHYKVTNRRDAPLWRYCAEMEVPQSLAHRIQMFRDTARVFKAPHELFGENSWVQVMLGQGITPAAHHPTAELMGDEELGHFLGDIRKQVARQVMQLPRHGDYVRGYAVPPGQLSTA

SEQ ID NO: 89696 - protein, 521 aa, Xanthomonas campestris
  REGION 1..521: note = tr|A0A3S9RYH9|A0A3S9RYH9_XANCA Tryptophan 7-halogenase OS=Xanthomonas campestris pv. musacearum NCPPB 4379 OX=1094184 GN=KWO_017755 PE=4 SV=1
MPHTMPSDPQQRPVRRIVIAGGGTAGWMAAAAMSKLLGRHLQITLVESDEIGTVGVGEATIPSLVTFHRLLEIDEAAFMAATQATIKLGIAFEHWRDVDRHYIHSFGHAGTDHWSAGFQHFWLKGQQRGVARDFGDYCLELRAAQEGRFAHLPNGGMNYAYHLDAGLYARFLRRFSEGFGVTRIEGRIGQVETNAESGFLTALTLQDGTRVEGDLFLDCTGFAGLLIGKTLGVGSDDWSRWLFADSALAVQTESVGPPVTYTRSRADQAGWMWRIPLQHRVGNGIVYSSRHMDQDSARVVLERNLTGRALTAPRPLRFTPNQRHRVWEKNCVALGLASGFLEPLESTNIHLIQRGIIRLLQTFPQVINAVDIAEYNRQAADEITHIRDFVILHYHATDRRDTSFWRDCAAMDIPDSLRHRVELFRQSGRVFHQANELFAENSWVQVMLGQGIVPQQHHPVADLMGDAELSRFLETIRTRVEGALVRLPAHADFLQRYCPAPPPPEPAARVPAPTVMATLAG

SEQ ID NO: 89697 - protein, 494 aa, Alteromonas sp.
  REGION 1..494: note = tr|A0A5H3A618|A0A5H3A618_9ALTE Tryptophan halogenase; OS = Alteromonas sp. I4 OX=2652380 GN=prnA_3 PE=4 SV=1
MKQTHPASVIIVGGGTAGWMCAAYLAKQWGAKSRITLIESSQIGTVGVGEGSTPFLKQFFTDLGWQEQDWKPHCDATYKTGIEFANWTNNQRFSEYFHPFFTPLDQQTGELFFDSCQTLRSSRGNADVKPEHYFCAAEMVRKRVTPQSTKLPGDIDYAYHFDASKLALSLKSFSMQLGVQHKEGKVAEVYTDEGNIRGLCMEQGDVLDADLYVDCSGFVGLLMKKALNAPFKSYRETLFNDAAVALPTQHNSNEPIAPQTRSVGMDNGWMWQIPLTSRIGNGYVYSSDFCSADEAEAALRKALNVDDSVPARHLKMQVGRLDQHWQGNCVAIGLAQGFIEPLEATALMLVQYALYQLVDGVDSAKPLASAQQAYNREMNRMFDGIRDYIAAHYYLNTRSDSAYWQACRHDMCVPENLQYLLDKWDSGACFETALDHLDSELVYLRPSWYCILAGMGRFNSPEAHQKAPVHQASLAHLTKLTAHYFSQQQRPSGW

SEQ ID NO: 89698 - protein, 534 aa, Rubrivivax sp.
  REGION 1..534: note = tr|A0A519I8U1|A0A519I8U1_9BURK Tryptophan 7-halogenase OS=Rubrivivax sp. OX=50259 GN=EOP39_12460; PE = 4 SV=1
MSDTATVFNQQVTARPAGGSTGREPPVKHICVVGGGTAGWMTALMLATSAYGPRLNVTVLESPQVGIIGVGEGSTPWLRGFFDGLGIEESEWMPACNATYKSGITFEGWSTRPGFERYFHPFASMLDNMTMHQFVDNVHERLSGADVHAHPDRFFVAAALARQGKGPRAHRNFPFDIWYGYHFDATLLGQFLGRKAAALGVTHLQHHVAEVQLSEAGDIARLRLDDGETLAADFFVDCTGFSSLLIGQALKTPFIPYAENLFNDAAIAMPTPLDGPIASQTVSTALRHGWAWKIPLTNRQGNGYVYSSAHCSADQAETELRRHLGLLDSDTPARHLKMRVGRMSKQWMRNCVAVGLSQGFIEPLEATALLFVQRTAAALVEALEKGDLGPAAQDEFNEFMRTRFENTRDYIVAHYKTNSRTDTDYWRANAENMQLSDSLQGVLMTWMSRKPLAAGLKQGRFGQGYPIVSWYALLAGMGLFPDDLEPPTPHQARHKLEAVDDFVERSAMNFPDHRELLANIPPRVGDKTLQLYLW

SEQ ID NO: 89699 - protein, 500 aa, Alteromonas sp.; identical to SEQ ID NO: 86823
  REGION 1..500: note = tr|A0A5H2ZY91|A0A5H2ZY91_9ALTE Tryptophan halogenase; OS = Alteromonas sp. I4 OX=2652380 GN=AltI4_05750 PE=4 SV=1

SEQ ID NO: 89700 - protein, 256 aa, Rubrivivax sp.
  REGION 1..256: note = tr|A0A519HAK9|A0A519HAK9_9BURK Tryptophan halogenase (Fragment) OS=Rubrivivax sp. OX=50259 GN=EOP39_28125 PE=4; SV = 1
AQAVPCGKTMPLTPYTTSTARSAGWQWRIPLQHRTGNGHVYCSGYTSDEEAGRVLMQNLDGAPQGEPRQLRFKTGMRRRIWEKNVVAVGLASGFLEPLESTSLSLVIHGVSALVELFPDRHCEPHLVDEYNRRMAQQYTSIRDFIILHYKQTRREDSEFWRYCAAMPIPDTLAHQMDIFHRSGRVAILDRDSFGEDSWLSLFLGLGMQPEALDPLLAQVDERALREHFKRLHAAIERTVDDMPDHAAYLDRLVGVR

SEQ ID NO: 89701 - protein, 521 aa, Rubrivivax sp.
  REGION 1..521: note = tr|A0A520BWW5|A0A520BWW5_9BURK Tryptophan 7-halogenase OS=Rubrivivax sp. OX=50259 GN=EOP35_08415; PE = 4 SV=1
MSDIQSIVIVGGGTAGWLAACYLQRTLGAARQSPLPVTLIEPPQAAALGAELATVPTLRHTLQALGLPERLLFTGADATLTNGIRFNGWRHGGAPADDSFDHPFDIPPPFHGFATTAHWLNLLQRGLTRQPMAQACTVQTTLFDGHLSPKLMDSPDYQAPVSYGYQLDAARLAMLLQQTALERGVRHVRGEVTQVHRCSDGNVGIESVELADGRRFAASFFIDCTGAQSLLLQQALGVPWVSFADSLPCDRALSQPLAHALPKDALRSHTTATAQDAGWTWQMDLQSRRGTGYVYASRFCSDDEALHRLQAANLGHTALAEPRLRHLRAGHAARVWEGNCLALGAAGGDIEPLESTGLYIVEWMLQLFADHVAPAGDSAACRARVNRLSGDFFAEMRDFIVAHYALSQRRDTPFWRACTDAAALPPRLAGLLALWDSKVPTPTDLDQRLSLFGVANWSYLLAGLQRLPSRGIGLSGHISPEISQKALAHVRDIRRAASEQSPTMLDYLLSLRDVAAPQAAH

SEQ ID NO: 89702 - protein, 415 aa, Rubrivivax sp.
  REGION 1..415: note = tr|A0A519FT94|A0A519FT94_9BURK Tryptophan 7-halogenase (Fragment) OS=Rubrivivax sp. OX=50259; GN = EOP38_26805 PE=4 SV=1
WGQRGERYLHTFGSVGRDLGLASFHHFWVRMHHEGKALPLDAYALNSLMAEANRFAREARPLQGEGLGVPVSYAYHFDAGLYAATLRQISEARGVRRTEGKVVRALQRPSDGFVTALQMENGEQIEGDLFIDCSGFRGMLIEDTLHTGYEDWTHWLPCDRAVAVPCESVATLTPFTRATARTAGWQWRIPLQHRIGNGHVFSSAHVSEDEATAQLLANLDGPALAEPRTLRFKTGKRKKMWHKNVVAMGLASGFLEPLESTSLYLVQSSLSRLIKFFPDADFHQADIDEHNAQADEEFERIRDFIILHYHLTRRDDSPFWRQVRTMSIPEPLHRKMAAFARAGHLHPAHLDLFSDPSWLQVMVGQGLVPQRHHPLADHLSGAECEFFLQHVSKQLQSVAMKLPGHADYVRNYCTA

SEQ ID NO: 89703 - protein, 498 aa, Alteromonas sp.
  REGION 1..498: note = tr|A0A5H3A6J8|A0A5H3A6J8_9ALTE Tryptophan halogenase; OS = Alteromonas sp. I4 OX=2652380 GN=prnA_4 PE=4 SV=1
MSGIKHIVIAGDGLAANMTALALQQQLPPDINLTLISSAKYADLDCLYGSTSAPDMYAFNLMLNLSEPDLLFNTNSTFCWGNYFDHWAMTSCSWLQGFHLPFPAMRGVGLHHFVTRHGETELAPYLINAQADQTGKFAHPPEDNRHPLSRAEYGYQIDASALSALYASKLSSKVTVINTSIADVVTDPAADSTGNINITGLQLDNGQRIEADLYIDCTGPDAMLYSALEQNSLVKNARPLFAIHSTLQRGEALPTHRHVRAHEFGWQADTYLRDSIQRLTVCAPEQKSQAIDAHGAKASIAMAFSAGHRQQAWTGNCVAMGQAANVLEPLTPAPMMMLIRDIQRLLELIPVTSRMSAEATEYNRRFIADVEHSGLFQGALFVLKHLPDSLPAHTYWQHATQCVQGEKLTRKLTQYHHRGILVNYDLEPFNEQDWLILHSGMQRRPQTYDIVADQVPPAEMANQLNGMGNVIQQVVSQMPPHAIYLEKLMAYLSQKRNQ

SEQ ID NO: 89704 - protein, 511 aa, Rubrivivax sp.
  REGION 1..511: note = tr|A0A520BL41|A0A520BL41_9BURK Tryptophan 7-halogenase OS=Rubrivivax sp. OX=50259 GN=EOP35_17280; PE = 4 SV=1
MSARSDLPIRKIVIVGGGTAGWMTAAPLARLLARVGAASRAEVVVVESPDIGTIGVGEATLPPIRAYNTTLGLDGADFVRKTQGSYKLGIEFRDWGRVGNRFFHGFGDFGPAIEGRSPWQHWLRLQRIEPGLPSYEDWSMATAMAQRNRFAPPRDGPPSAANAYSFAYHFDAGLYAAYLRDYALQRGAERIQGLIVDVELRPEDGFVAAVKLEDGRRIDGDLFVDCSGFRALLIGGAMQSPYEDWSALLPCNSAQAVPSERVTPLTPYTTSTAKAAGWQWRIPLQHRTGNGHVYCNGFISDDEAAGTLLAGLDSKPLDTPRQLRFTTGRRRQGWVKNVVAIGLAGGFLEPLESTSIQLIMDGVGRLIQFLPDRSFKPHLAAEFNRLMAQQYESTRDFIVLHYKLTERRDTELWRYCAAMPIPDPLAHQIELFRTTGRVAILDPGGFAEPSWVSLFMGLGLRPESYDPFVEHVDEAALVQHFARLRQVIAQTAADMPDHGDYIRRHVMAPAA

SEQ ID NO: 89705 - protein, 495 aa, Alteromonas sp.
  REGION 1..495: note = tr|A0A5H3A419|A0A5H3A419_9ALTE Tryptophan halogenase; OS = Alteromonas sp. I4 OX=2652380 GN=prnA_2 PE=4 SV=1
MPQTIQNVVIAGGGTAGWMTAALLRRVLSPTIRIELVESEQIGIVGVGEATIPPIQTFNQFLGIDEKAFLRETHATIKLAIKFENWKAQGDSYYHTFGAPGTTMGFCSFHHYWLKAKQAGLAQSLWDFDLNYLSCLQGKFNKINTPNPLYEMQYAYHFDSALYGQFLRKTAEQAGVVRTEGIIEHVQQDPDSGFITALQLTNGQQIQGDLFIDCTGLRGLLIQQALGVSYEDWSHWLPADSAQAVPSERFDKTLPYTRSIAHRVGWQWRIPLTHRNGNGIVYSSQYLSDDEAGQTLLNNLDTKALDTPRTIRFKTGRTDQQWCKNVVAIGLSSGFLEPLESTSIHLIQSGIVRLMKMFPNQGISQAMVDLYNAESKDEFETIRDFIILHYHVNQRDDSDFWRDMRNMAIPDRLAQKIAAFEDTAAIFNEQSDIFRDASWVQVMMGQGLDPKDYHPAADAMDNAQLMDAMQQIYKAKQQPLDKLMNHDEFIKRYTA

SEQ ID NO: 89706 - protein, 512 aa, Rubrivivax sp.
  REGION 1..512: note = tr|A0A519IJB6|A0A519IJB6_9BURK Tryptophan 7-halogenase OS=Rubrivivax sp. OX=50259 GN=EOP39_02975; PE = 4 SV=1
MSNKRRILIVGGGTAGWLTAAYLAKALRLSERPHLEVTVLESPDISSVGVGEGTFPTIRNTLQFLGIDEARFIRETSATMKQGIRFVDWARTPTAGQHQQFFHPFEAPFYAEGINLVPYWLLQNETERPPFAQAMTLQYRVTEAQRAPKRAGEAPYAAPLNYAYHFDAIKLARLLADHARQLGVAHVEGTVTDVGLDSRGAISHVDTDRQGRFDADLYVDCTGFRAELIGRALGSPFKSCRGLLFSDRALACKIPLPSDAPMESCTIATAHEAGWLWEIGLNGSRGVGCVYSSTHMTDERAAEVLRAYCGNGKDGEDVAMRSIPFAPGYREKQWVKNCVAVGLSAGFLEPLESTGLVLIEAAVGMIAEMLPHSGPIEAPARRFNELMVTRFDNIVGFLKLHYCLSQRSEPFWRDNANPETIPERLADLLEQWQLRPPGRFDFVLDTETFAFFNYQYILYGMGYRTDLNAGRADFTQGEEAKKLFAKIQRFADRALVDLPSHRSLIQQINAVR

SEQ ID NO: 89707 - protein, 497 aa, Alteromonas sp.
  REGION 1..497: note = tr|A0A5H2ZWF0|A0A5H2ZWF0_9ALTE Tryptophan halogenase; OS = Alteromonas sp. I4 OX=2652380 GN=AltI4_01320 PE=4 SV=1
MHTSAIHHYVIAGGGTAGWMTAALLGKLLNGTGARITLVESPDQPGVGVGEATVPSFVDFIKLLGIDEQTFVKATQATFKLGIQFTHWQTPGHSYWHPFGHVGARIDGKPFFQQWLHARRSGLTQTYTDFSASARMAQETKFYIPNPQQPNNLSQMGYAYHFDAQQVAVFLRDFAVSKGVVHKQAHIEHVQMSPDNSAIQRLTTRTGEHIDGDFFIDCTGTQARLMGQALNTGFTDWQRYLPVDRAWVVQTQNTEEPVPYTKAIAEPMGWRWQIPLQHRTGNGLVFCSQYTSPDEAKRYLQTHLTTPLLNEPRLLTFKTGHLKQFWRSNCVAIGLSAGFLEPLESTGIYLIMRGILNLAKLLPSSPPCKATIHEYNQLMLAEYQHIRDFIVLHYCVSQRNDTSFWQSWQQREIPTTLAHKLALYRTRGVVSHGQSDLFADHSWHAVATGMNVLPRNVDPVVATTDVKALQDLLARIDHALAHSVGQLMPHGEYLKAW

SEQ ID NO: 89708 - protein, 506 aa, Xanthomonas campestris
  REGION 1..506: note = tr|A0A3Q9H8D5|A0A3Q9H8D5_XANCA Tryptophan 7-halogenase OS=Xanthomonas campestris pv. musacearum NCPPB 4379 OX=1094184 GN=KWO_017000 PE=4 SV=1
MIPAPLRNIVVVGGGTAGWMAAAAFARVLGPTFNVQLIESEQLGTVGVGEATVPHIKAFNNLLGIDEAEFVRQTQGSFKLGIEFVDWQRRGSAYMHGFGTQIGHPLGLLPFHQYWIKQHARGKAQPLGAYTLNTVAAARGKFMTSAGDVPANSPLANIAYAYHFDATQYAHFLRRYSEQRGVTRIEGLVEQVQLHPESGHVQSLQLASGQTVHGDLFIDCSGFRGLLIEEALHTGYHDFTHWLPCDRAFAVACEKVGPPTPYTRSTARAAGWQWRIPLQHRTGNGYVYCSAHISDDEAAATLLANLDGKPLADPRPLHFTTGRRKQFWNRNVVALGLASGFLEPLESTSIHLIQSGISKLLELFPREGISPVLVQRYNDRSAFEFDRIRDFLLLHYHATERDDSAFWRHCRSMPITPELQTTLDLFRDSGRFYRNAEEMFAEISWVQVMVGQGILPQGYHPLVDQVPDRDAEGFLASVAQTIAHCVDVMPTHQQFIERYCKAAVPA

SEQ ID NO: 89709 - protein, 514 aa, Rubrivivax sp.
  REGION 1..514: note = tr|A0A519IM94|A0A519IM94_9BURK Tryptophan 7-halogenase OS=Rubrivivax sp. OX=50259 GN=EOP39_00180; PE = 4 SV=1
MNTTNKPVRRVVIAGGGTAGWMTAALMSKLLGKRLDIRLVESEEIGTVGVGEATIPALHTFHNLLGINEAEFMAATNATFKLGINFEGWKDIGDNYFHSFGATGNDHWSAGFQHFWLKGRAEGLARTYTDYNPETVAAHANRFAHLPRNGLNYAYHLDAGRYAKFLRAMSEGFGVNRVEGKIAAVLQDGPEGKDGDITALLMQDGSRVEGDLFIDCTGFRSLLLGETLGVGYEDWSHWLPCDRAVAVQTAAVREAWPYTRSICHPFGWQWRIPLQHRVGNGLVYSSKELSDADAPDVLKANVEGELLIQPRVIKFQPGQRQKVWHRNCIAIGLSSGFIEPLESTSIHLIQRSAIRLMQLFPSNGINAADVSEFNLQCERELMHIRDFIILHYTVTDRSDTALWNHVRTMELPATLRHRIELFQESARVFRSSDELFAENSWVQVMMGQGLMPQSYHPVADLMGRTELGQFLDDIQVRVSRTVAGLPQHQAYVEQLCAPYRQAIAERLAAAPQRA

SEQ ID NO: 89710 - protein, 498 aa, Alteromonas sp.
  REGION 1..498: note = tr|A0A5H3A893|A0A5H3A893_9ALTE Tryptophan halogenase; OS = Alteromonas sp. I4 OX=2652380 GN=AltI4_44190 PE=4 SV=1
MNKPDNSSNKVNNVIIAGGGTAGWMAAAALSRLIGKSVNVTLVESKDIGIVGVGEATIPPIRTFHKLLGIDEKAFMRATNATFKLGIEFANWREPEHAYIHSFGVTGRECWAGEFHHFWMRAQQEGLGSAFGDYCFELKAAQQYKFGMSERMPINFAYHFDAVAYGKFLRQFAEKLGVTHVEGDIEKVNVNVTSGDIESLTLKDGRTLAGDLFIDCTGFKGLLIEQALHTGYENWSHWLPCDRAVAMQTESVEAPAPFTRSVAHKAGWRWQIPLQNRVGNGLVYCSRYMSDEQAKQTLMDQVTGNPINEPRVIQFTPGKRRLGWNKNCVALGLASGFIEPLESTSIHLIMTGIIRLLRLFPFDGITQSAIDEYNNKYNSEMAAILDFIVMHYKVTNRDDSLFWQHCQRMAIPDSLIHKINLFKETGRVFLDDGDIFRVDSWTQVMLGQGLVPEQYHRVADEMSIEELTRFMNGLHQHVSQQVQALPAHGDFLKQYLGM

SEQ ID NO: 89711 - protein, 518 aa, Alteromonas sp.
  REGION 1..518: note = tr|A0A5H3A5N0|A0A5H3A5N0_9ALTE Tryptophan halogenase; OS = Alteromonas sp. I4 OX=2652380 GN=AltI4_34040 PE=4 SV=1
MTSASKPVRKVVIVGGGTAGWLTAGRIAAEHATKAHQPVEVVLVESPNIPTIGVGEGTWPTMRNTLIKLGIRETDFIRECDASFKQGAKFAGWVTGDADDFYYHPLMLPQGFSQGNMGPYWQQHQDTIEQSFSNAVCFQEALCEHNRAPKSIRHAEFGAVANYAYHLDAGKFTAFLTRHCTEKLNVRHVLADVTGVIAHDNGDIRAIQTQQAGEIDGDLFVDCTGFQSLLLGKHYKVPFVPCDDVLFIDRALAVHVPYDSPDAPVATHTISTAQQAGWIWDIGLQSRRGVGHVYASRYQSEQQALDQLAQYVGPQFNDLSVKQIHIQSGHRAHFWHNNCVAVGLSAGFLEPLEASALVLVELSATMLAEQLPVNRATMPIIAKRFNQTFQYRWQRIIDFLKLHYMLTKRTDTAFWRDNCDPATIPDSLQELLDLWRYHPPYDHDFSSNNEVFPAASYQYVMYGMGFESDLSFGQQQVAQAFAQQQLQMNQQARQKVLSALPTHRDLLNKINQYGLQPV

SEQ ID NO: 89712 - protein, 511 aa, Rubrivivax sp.
  REGION 1..511: note = tr|A0A520C3N3|A0A520C3N3_9BURK Tryptophan 7-halogenase OS=Rubrivivax sp. OX=50259 GN=EOP35_02495; PE = 4 SV=1
MENIAKPLRRVVIVGGGAAGWMSAAALSAVLKPPYEIRLVESEEIGIIGVGEATIPLIRMFNGLAQIDEAAFLKATQGTFKLGIEFVNWGREGERYFHGFGRVGKDPLWPVDFTQYWLRLRALGRAQPIDAYVISSMAAKANRFMLPRPEMQNSPMADLAYAYHFDANLYARHLRALSERRGVRRTEGKVVRVLLNEDAGPAHGHVRAVQLESGELVEGDLFLDCSGFTGLLTDKTLGVAFEDWSHWLPCDSAWAVPSESTQPLLPYTRATAQSAGWQWRIPLQHRVGNGHVFSSRHMSDDEAAAVLLRNLDAPPLADPRLIRFKTGMRKEAWTRNVVAIGMSAGFVEPLESTALHLVQMGVAKLIEAFPHSGFDPAEIAEYNRQSRERYESVRDFIVLHYHLNQRKDGGFWESCANMAVPEGLRWRMDLYAGSGRLVYVDTDLFREPSWFEVMEGQNLRPRGWLTLAELQGVEDTANYLKGVSDTIANCVAVMPEHAEFIRSYCASAPLK

SEQ ID NO: 89713 - protein, 498 aa, Alteromonas sp.
  REGION 1..498: note = tr|A0A5H2ZWH7|A0A5H2ZWH7_9ALTE Tryptophan halogenase; OS = Alteromonas sp. I4 OX=2652380 GN=AltI4_05710 PE=4 SV=1
MNSTQPATKPHVVIAGGGTAGWMTAAALARKLGPLVRITLVESSDIPTIGVGEATIPPLRVFHQLLGINEAAFMRATSATFKLGIEFADFGQLNQRYIHSFGQTGQSSWLAEFIHFWREGLDRGIATDYGSYCLELEAAKANKFYTSAQNAPLNYAYHLDAGAYATFLKHISVQAGVNHVVDTIEQVTLNDAGHIDALQLRQTGNLHGDLFVDCTGFRARLLGESLDVGYEDWSHWLFCDRALAVQTELTPPLKPYTIASAHSAGWRWEIPLQHRMGNGFVYSSQYLDETTAHDTFTALLRNTPLQDVRSLQFTTGRRLKAWHKNCVAIGLSSGFVEPMESTSIHLIVMGITRLMQLFPYSGDYQHLQDEYNAQTQIELERIRDFIVLHYHVTQRDDSAFWRACKDMVIPDSLSERIELFKEHGHAFQKANELFRVDSWSQVMLGQGLLPKNWHPAAKMMSDEQLAGALKKGQMEISQRVAQLPDHEAFVAQYCGQNR

SEQ ID NO: 89714 - protein, 515 aa, Streptomyces kanamyceticus
  REGION 1..515: note = tr|A0A5J6GRP3|A0A5J6GRP3_STRKN Tryptophan 7-halogenase OS=Streptomyces kanamyceticus OX=1967; GN = CP970_02920 PE=4 SV=1
MRDVVIVGGGTAGWMTAAYLTAAFGNRVKITLVESADVGTIGVGEATFSDIRHFFEFLGLAERDWMPACNATYKLAVRFENWREPGHHFYHPFEQLKSVKGFPLTDWWLRYPTSKRFDTDCFVMASLIDANRNPRYLDNRLLEQEFVESDDLPNTIAEYQGAQFPYAYHFEAHLLAKYLTKYATDRGVRHVVDNVVDVGRDERGWLSHVDTAEHGRLAGDLFVDCTGFRGLLLNKALEEPFVSYQDTLPNDSAVALQVPMDMDKDPLRPCTTATAQDAGWIWTIPLISRIGTGYVYSGDYIDPEEAERTLREFVGPAAADVPANHIKMRIGRSRRSWVNNCVAIGLSSGFVEPLESTGIFFIHYAIEQLVKYYPAADWERSLREQYNSALMNVMDGVREFLVLHYRGAKRADNQYWRDTKIRTVPDSLAERLEQWESKVPDAGTVYPRYHGLPPYSYNCVLLGTGGIDVRPSPALDLIDEKDALAEFQAVRDKARHLVRTLPTQNEYFRRMREGV

SEQ ID NO: 89715 - protein, 556 aa, Rubrivivax sp.
  REGION 1..556: note = tr|A0A519I278|A0A519I278_9BURK Tryptophan 7-halogenase OS=Rubrivivax sp. OX=50259 GN=EOP39_18490; PE = 4 SV=1
MQDARSPASLQVTAGRSGRNVAPPRRCCLPAGLIRSPVVSDIQSIVIVGGGTTGWLAACYLQRTLGAARQSPLPITLIEASQMARLGADEATVPTLRHTLQALGIRESAVFSAADATLTNGIRFNGWRQGGPAADDSFDHPFDLPPPFHGFAATAHWLNLMQRGLTKQPMAHACTVQTSLFDARLCPKLMDSPDYQAPVSYGYQLDASRLAMLLQQTALERGVRHVQGEVVKVHRGADGIESVELANGQRHSASFFIDCTGSQSLLLQQALGVPWVSYQEWLPCDRAVSLPVAHAKVHEPLRSYTTVTAQDAGWTWEMDLQSRRGTGYVYSSRFLGDDEAVQQLRNLHAGHLELAAPRVRHLRSGHAARAWEANCLALGPAGGYVEPLESTGLYVVEWMLQLFADHVAPAGNSVACRTRVNRVFADFYEEMRDFIVAHYALSRRRDTPFWRACTEEATLPPRLAELLALWDSKVPTPTDLDRRLSLFGAANWSYLLAGQHRLPSGGIGLSAHISPEISQKAMAHVRDIRRKASEASPTMRDYLLSLRTSAAPQAAH

SEQ ID NO: 89716 - protein, 519 aa, Alteromonas sp.
  REGION 1..519: note = tr|A0A5H3A677|A0A5H3A677_9ALTE Tryptophan halogenase; OS = Alteromonas sp. I4 OX=2652380 GN=AltI4_40000 PE=4 SV=1
MNRNDIKRVVIVGGGTAGWMTAAALANKLQGLAIDIELIESDSIGTVGVGEATLPHIRFFNSALGIDEAAFMRETEATIKLGIEFCDWGNLGESYIHPFGDFGLPINNVDFYQHWLKHFQSGAISTPLHEYAAGVMSARHNKFRIPEQSSSNIEQHYGYAYQFDSSLYAKFLQRYAQAKGVIRTEGKIVEVKQHNDSGEVVSLVLDNQAVIEGDFFVDCSGFRGLLIEQTLHAGYDDWSEWLPCNRAVAIPCESTDPLMPYTRATAKAAGWQWRIPLQHRTGNGFVYWSEHISDDEASSQLLSALDGKPLAEPNQLYFKAGRRNVCWEKNVVAIGLSSGFLEPLESTSIHLIQEGITTLIELFPQQRVQQQDADEYNRRMALNFERVRDFLLLHYVATKRDDSDMWRYFRNLTLPDSLQTKIELWLSRGYIQRYEFGVFLPPSWIAVLLGQNLMPTGFDPRVNNTSDAEFIHTSERMRKAILNSVNNTPLHREFLTGYGAASNSKPLMSAMASTTSRGN

SEQ ID NO: 89717 - protein, 505 aa, Alteromonas sp.
  REGION 1..505: note = tr|A0A5H3A6H5|A0A5H3A6H5_9ALTE Tryptophan halogenase; OS = Alteromonas sp. I4 OX=2652380 GN=AltI4_40030 PE=4 SV=1
MSAHSIKKIVIVGGGTAGWMAASAMSKLLHDDSITIELIESEEIGTVGVGEATIPHILYFNRLLGINENDFVKFTNGTFKLGIEFVDWGQTGESYIHPFGPYGMDMEGIHFHHLWLRQQKMGQAKPIDEFNLQILAAQANKFQRAQVELKGSPLSTIAYAFQFDAMLYARHLRGIAEANGVVRTEGKITRVNQHPENGHIASVDTDNGHHVEGDLFIDCSGFKGLLIEQTLNSGYEDWSHYLPCDRAIAVASNKLDELTPFTRATAKSAGWQWRIPLQSRTGNGHVYCSKFMDDDTALQSLYADLNSEPISEPNYLRFKAGIRKKPWNKNVVSLGLASGFLEPLESTSIHLIQTAIARLMTNFPDKLFNQHDIDYYNERTRLEYEQVRDFLILHYKATRRNDSPFWHYCRTMDIPESLHKRIEIYKQNARLYRHDNELFNHVSWFAVMHGQGIQPERYHPIADILSGDELHRRMEEIHSVTGKCLQVMPGHADFIAKHCKANLPG

SEQ ID NO: 89718 - protein, 183 aa, Nitrospira sp.
  REGION 1..183: note = tr|A0A532E5J6|A0A532E5J6_9BACT Tryptophan 7-halogenase OS=Nitrospira sp. OX=70125 GN=E8D44_08435; PE = 4 SV=1
MEKAKPLTQTYAAANFSYRRDTMSGDGYLMVGDAFAFIDPVFSSGVHLALNSGTRGAKVVDAYLRKSPEYTAHLQEFERMVRRGIKTFSWFIHRFNQPAFQSMFVSTRRPPKIERAVLSLLAGDVFAQSQARIPLFCFKVVYYIVFVLNWKENWAVARRRKQGTKTTVTEVKDYAVNQANAPS

SEQ ID NO: 89719 - protein, 537 aa, Pseudomonas fluorescens
  REGION 1..537: note = tr|A0A4Y4JKF7|A0A4Y4JKF7_PSEFL Tryptophan halogenase; OS = Pseudomonas fluorescens OX=294 GN=PFL02_59380 PE=4 SV=1
MNKPIKNIVIVGGGTAGWMAASYLARALQQQVNITLIESAAIPRIGVGEATIPSLQKVFFDFLGIPEREWMPQVNGAFKAAIKFVNWRKSPDPSREDYFYHLFGSVPNCDGVPLTHYWLRKREQGFQQPMAYACYPQPGALDGKLAPCLADGTRQMSHAWHFDAHLVADFLKRWAVERGVNRVVDEVVEVQLNDRGYISTLLTKEGRTLEADLFIDCSGMRGLLINQALKEPFIDMSDYLLCDSAVASAVPNDDAREGVEPYTSAIAMNSGWTWKIPMLGRFGSGYVFSSKFTSRDQATADFLKLWGLSDNQQLNQIKFRVGRNKRAWVNNCVSIGLSSCFLEPLESTGIYFIYAALYQLVKHFPDTSFDPRLRDAFNAEIVYMFDDCRDFVQAHYFTTSREDTPFWLANRHELRLSDAIQEKVERYKAGLPLTTTSFDDSTYYETFDYEFKNFWLNGNYYCIFAGLGMLPDRSLPLLQHRPESIEKAEAMFASIRREAERLRTSLPTNYDYLRSLRDGAQLSRNQRGPTLAAQERQ

SEQ ID NO: 89720 - protein, 517 aa, Pseudoalteromonas sp.
  REGION 1..517: note = tr|A0A5H2Y1Q9|A0A5H2Y1Q9_9GAMM Tryptophan halogenase; OS = Pseudoalteromonas sp. A25 OX=116092 GN=PA25_11710 PE=4; SV = 1
MEVNETIDSVVIVGGGTAGWITAAKLAKRFNCKAEGAVSVTLIESPDIPTIGVGEGTWPTMRKTLASIGIDESEFIRTCNASFKQGSKFVNWKAAPTTTNNHYYHLFSSIADPAEFNLSPYWRLGHAGTKSYAEAVSTQGYLSDLYKAPKTIASKAYDGIQSYAYHLDAGKFAELLKKHAIDNLGVKFLSCNVTDVMTDTDGISSVMTDQCGQVKGDFFVDCSGFSCLLLGQALGVPFKPVSDVLFTDYAVAIQVPYSDPECDINSCTISTAQEAGWIWDIGLQNRRGVGHVYCSEFMSHEQAEKLLREYIGETSQDLPAKLVKMNVGYREKFWHKNCIAIGMSAAFVEPLEASAIFLIEAASNMLADQLPKKKSLLNIVENKFNESFLFRWNRTIDFIKLHYVLSERDEPFWLKNKETNSIPQSLLDALEQWATEPISPYDFSHVYDPFPMESYQYVLNGMNFKQDLSASGSKYSDVDNAKRAFGQIEKYRDMLIRDLPSNRALLNKLSSFSFSKV

SEQ ID NO: 89721 - protein, 511 aa, Pseudoalteromonas sp.
  REGION 1..511: note = tr|A0A5H2Y013|A0A5H2Y013_9GAMM Tryptophan halogenase; OS = Pseudoalteromonas sp. A25 OX=116092 GN=PA25_16680 PE=4; SV = 1
MVHSKQIKRVLIVGGGSAGWLTAGILAAAHKNKLEISLIESANIGTIGVGEGTWPTMRETLRKIGITEGEFIQQCDASFKQGSEFINWASSVDHAYYHPFSLPVGFEQGIDMVTPWLAVHDKVDFAHAVCAQAYWCDESKAPRLPSDIQFGGKGNYGYHLNADKFAKLLKRHCINELGVKLVLDDVHEVISLSDGDIRAVKTLQNVELEADLFIDCTGSRSLLLGKHYGISWLSQKHVLQNDRAIAVQVPHADERAPVASCTKSTGQPHGWIWDIALPTRRGIGYTFASNHCDFDIAKQQLSNYISEQGLEVSKENTFKEIHFNPGYREKFWHNNCLAIGMSAGFLEPLEASALVMIELSASYLSDNFPSTRSLMNVVASRFNAKFNYRWQRIIDFLKLHYVLSTRDDTPYWQQMRSEHIPQSLQELLLLWQYQAPKSTDLDRIDEVFSAASYQYVLYGMGFLPSNYEPTLNQDSASLFKQVTQNAQRGLGVLPTNRDLLTNVAKFGIPTI

SEQ ID NO: 89722 - protein, 507 aa, Alteromonas sp.
  REGION 1..507: note = tr|A0A5H3A337|A0A5H3A337_9ALTE Tryptophan halogenase; OS = Alteromonas sp. I4 OX=2652380 GN=AltI4_28570 PE=4 SV=1
MVTTPQHICIAGGGTAGWMTAAALANRLPHSHYRITLVESSQIGTVGVGESTIPHIRQFNSALGITEDEFIAATSATCKLGIEFTDWGKVGDSYVHPFGELGKPLAGIEFHHLWQAASLQGLDVPIESFSVAAVAARQRKFSPPHASREHLLSTYTYAYHLDASAYARFLRDYAEQRQVIRVEAQIREVKHDHQGGPITALSLNNGQQISADWFIDCTGFRSLLINDFPQAGFIDWSAWLKTNRALVLPCEKDGASRPYTKAMARDAGWQWQIPLQHRIGNGYVYCSDYISDEEAEHTLRSTLPGEALADARFLDFKAGCRKQLWVENCVAIGLSAGFLEPLESTSIFLIQMGIAKFLEHLPGTHNDEGRNQYNRELTEQYQVIRDFIILHYYLTQRHDTPFWRDCQAMTLPDSLTELILAFRDSGLVDKKQYGLWPAVCIGQHLHPKQVDSRVAAIPPQQLIGILNQLKSDIAAQVATLPNMDDYLSSLVAQTPLQKNGMRAGGQV

SEQ ID NO: 89723 - protein, 506 aa, Rubrivivax sp.
  REGION 1..506: note = tr|A0A520C5B2|A0A520C5B2_9BURK Tryptophan 7-halogenase OS=Rubrivivax sp. OX=50259 GN=EOP35_00745; PE = 4 SV=1
MNSALIQDIVIVGGGTAGWMTAAALSTVLRGRYRIRVVESDEIGTVGVGEATIPMIQRFNRIIGLDENEFLRATGGTFKLGIEFVNWGRIGDRYMHGFGRLGQDLWTVQFEQYWHRMRKLGRAQPLEQYCLARMAALANKFMPPRSDLGNSPLGEIAYAYHFDASLYARYLRGLSEQRGVVRTEGKVTHATRRGEGAHAGHVDAVVLEGGERIAGDLFIDCSGFRGLLIEQTLQTGFEDWTHWLPCDRALAVPCESAVPLTPYTRSTAHRAGWQWRIPLQHRTGNGHVYCSRYVSDDEAAATLLANLDGKPLADPRPIRFQTGMRKLAWKENVVAVGLAGGFMEPLESTSIHLIQSAIQQLIDFFPDRGFNADDIAEFNRSSRFHYERIRDFVILHYHLNQRDDSAFWQDCAHMSVPDSLQEKLDLYRSHGRVVRRDNELFAEVGWIQVMEGQNLLPERFHPLAELPDEQATADYLEGVRQVIAKCVDFMPDHAAYIAEHCAAKAL

SEQ ID NO: 89724 - protein, 497 aa, Alteromonas sp.
  REGION 1..497: note = tr|A0A5H3A1X6|A0A5H3A1X6_9ALTE Tryptophan halogenase; OS = Alteromonas sp. I4 OX=2652380 GN=AltI4_23870 PE=4 SV=1
MTQSKTRVVIAGGGTAGWLSAFSLVTRLGALLDITLVESDQIGTVGVGEATIPTMCNFHRLMGLDEREFMAATQATFKLGIQFDNWGNQGDSYVHSFGEIGQRSWMAEFHEFWMEAVANGQQDTLEDYCLELKAAKQNKFALKVGNRPLNFAYHLDATAYAAYLRNKAEQAGVTRIEGKITTVNKHPDSGNLRELVLDNDARIEGDVFIDCTGFRALLIGEALGVGYDDWSHLLAADRAIAVQTTAVEPPRPYTIATAHNAGWQWRIPLQSRVGNGIVYSSRFSDDETALATLMSNVTGEAVTEPRYLKFKTGMRQQAWAKNCVAIGLSSGFLEPLESTSIHLVTTALIRLMKLFPFEGECGLLAERYNRETQKEMETIRDFIVLHYHLTQRDDSAFWDFYRNMEIPESLRHRMAMFVEHGYVWPDDVALFRVDSWVQVMMGQGLMPKRHHGASRMLPTASLTQQLTAFKQSVNNALAQLPEHDAFIKQYCPADKSA

SEQ ID NO: 89725 - protein, 505 aa, Xanthomonas campestris
  REGION 1..505: note = tr|A0A3S9RTH4|A0A3S9RTH4_XANCA Tryptophan 7-halogenase OS=Xanthomonas campestris pv. musacearum NCPPB 4379 OX=1094184 GN=KWO_007010 PE=4 SV=1
MTQAQIRKVVIAGGGTAGWIAACALSHQFRDLLDITLVESEQIGTVGVGESTVPPIRTFHRFLQIDEQEFLRAVAGTFKLSISFENWLRQGDRYIHPFGITGQSTLVCAFHHLWLESQRRAMPGSFGDYCLETVASRVDRFALHGEPAVNYAYHLDAALYAKFLRARSEACGVKRIEGKIQQVTVQPHSGDVASLVLEDGQVIEGDLFIDCSGFRGLLIEQTLHTGYEDWSHWLPCDRAVAVQTEAVGPPVPYTRAIAHEAGWRWHIPLQHRVGNGLVFSSKHLSDDEAHTKLLHDVAAPAVKDPWMVPFRTGRRLKAWNKNVVSLGLASGFIEPLESTSIHLTISAVVRLLALFPAEGIAPSQVQLFNDVSRAEMEHVRDFVTLHYHATQRDEPLWQQCREMELPESLALRLRAWRERAHAWQGADELFRVDSWTHVLMGQGIAPEQHHPLTRAFADHDLRRLLDGIAQPIQHAVQQMPSQQAFIERYCKAGAQVWGMRSPMPA

SEQ ID NO: 89726 - protein, 514 aa, Alteromonas sp.
  REGION 1..514: note = tr|A0A5H3A7V5|A0A5H3A7V5_9ALTE Tryptophan halogenase; OS = Alteromonas sp. I4 OX=2652380 GN=AltI4_40020 PE=4 SV=1
MKDSTPNILKQITIVGGGSAGWMTAAALSRMLPSGDVKITLVESEQIGTIGVGEATIPDMINFNKLLGISESEFIKATNGTFKLGIEFNDWGKLGDSYFHPFGGHGVDMNGVDFHQYWLHTLAAGNTCDLEDYSICAVAAKQNKFVLPEQNPNSVLSHLRYAYHFDATAYAAYLRKYAEQRGVKRIEGKIASVQQHTDTGNIAGLTLEDGTTVGGELFFDCSGFRSLLLGDTLGVKFRDWSHWLPCNTAQTVATEQTDKVLPFTRSTAKTAGWQWRIPTQQRVGNGHIYCDRFMGHDQARQILLDGLDSKPISEVRTIKFKTGCQEAFWEKNCIGIGLSAGFLEPLESTSLFLIQQGISRFISLYPDAGLHPVIRNEYNRLMTREFEQVRDFIILHYKATTRDDSPFWRYVRDMDIPDSLTHKMTLFQQGGRVFRDDHELFTRSSWVAVMVGQGIFPNTFDPILANIPVADIQRSLNSMKLAMEQSVSRLPDHAAFIDKYIAMQPNPTFSMGRQ

SEQ ID NO: 89727 - protein, 525 aa, Mesorhizobium sp.
  REGION 1..525: note = tr|A0A527DJ85|A0A527DJ85_9RHIZ Tryptophan 7-halogenase OS=Mesorhizobium sp. OX=1871066; GN = E5Y19_32500 PE=4 SV=1
MTKSVLIVGGGTAGWMTASYLAKVFPKLRITVLESDIIPTIGVGEATFSTIKVFFDFLGLPESEWMPHCNATYKLAIKFANWGPEPGHFYHPFQRYATIDGFNAGEWWLRLKPGQQFDRSCFVTPALCEAKLSPCFLDGRVFDEKVQDLFADPRRKASVLSEHKEQYPYGYHFDAALFAKYLRDYATKLGVKQILDDVINVELADDGSIDHVIGKISERVSADLFVDCTGFRGLLLNEALQEPFISFKDSLLNDRAVALRVPSTPDTDEIEPFTTATTMSAGWTWNIPLYNRIGTGYVYSSQFITPEMAESELRNHVGSRAENCSANHIKMRIGRSRNSWVKNCIGIGLTSGFVEPLESTGIFFIQHNIEELVAHFPGENIDPDVVASFNRIVGSCIDGVRDFLVLHFKGSGRNDTPFWKAVKQTPLPDHLEERFQLWRKRLPNAKSIDSRYHGFEYYSYSVMMLGLGSAPTEYLPTLAQRDPTNAILSFNQVNEQSQKLVSTLPSHREYIMQLYSTAPHSERHK

SEQ ID NO: 89728 - protein, 538 aa, Pseudomonas fluorescens
  REGION 1..538: note = tr|I1V4X0|I1V4X0_PSEFL Tryptophan halogenase PrnA; OS = Pseudomonas fluorescens OX=294 GN=prnA PE=4 SV=1
MNKPIKNIVIVGGGTAGWMAASYLVRALQQQVNITLIESAAIPRIGVGEATIPSLQKVFFDFLGIPEREWMPQVNGAFKAAIKFVNWRKPPDHSRDDYFYHLFGSVPNCDGVPLTHYWLRKREQGFQQPMEYACYPQPGALDGKLAPCLLDGTRQMSHAWHFDAHLVADFLKRWAVERGVNRVVDEVVEVRLNDRGYISTLLTKEGRTLEGDLFIDCSGMRGLLINQALKEPFIDMSDYLLCDSAVASAVPNDDVREGVEPYTSAIAMNSGWTWKIPMLGRFGSGYVFSSKFTSRDQATADFLNLWGLSDNQSLNQIKFRVGRNKRAWVNNCVSIGLSSCFLEPLESTGIYFIYAALYQLVKHFPDTSFDPRLSDAFNAEIVYMFDDCRDFVQAHYFTTSREDTPFWLANRHELRLSDAIKEKVQRYKAGLPLTTTSFDDSTYYETFDYEFKNFWLNGNYYCIFAGLGMLPDRSLPLLQHRPESIEKAEAMFASIRREAERLRTSLPTNYDYLRSLRNGDAGQSRNQRGPTLAAKEGL

SEQ ID NO: 89729 - protein, 518 aa, Pseudoalteromonas sp.
  REGION 1..518: note = tr|A0A5H2YE62|A0A5H2YE62_9GAMM Tryptophan halogenase; OS = Pseudoalteromonas sp. A25 OX=116092 GN=PA25_11720 PE=4; SV = 1
MSQINNVVIVGGGTAGWISAALLAKKLNASSLGGVSITLVESPDIPIMGVGEGTWPTIRKTLQEIGIAEDEFIKECDASFKQGAEFVNWCQDPTKVGKHSYFHPLNATFHAAYDFNLAPYWLLDETKSKQPYDLASATQSYISSQGLAPKSITTPQYDAILNYSYHLNANKFAKLLTKHAVKLGVHHIQANIHHVHLDTAGFVRSVDTDTHGTIEGDFFIDCSGSKAIVLGEALGIKWKSISDIIFNDTALAVQVPYEKADSPIASNTIATAQTHGWTWDIGLQNRRGVGYVYSSSHTSEEHAYSTLVDYLGMPESDLSIRKLPLNLGYRKKFWNKNCVAVGMSAAFIEPLEASAIFLIEAAVNMIAEKFPRHLSELDYVEKQFNDTFTLRWEKSVDFIKLHYCISQRRDTQYWIDNAEDSTIPQTLQQKLQHWRYNVPSKYDFDYAFEPFVLDSYLFVLYGLKYKTDLQLKRSFYPQTQMANKKFSDVVKLNEHLSANLPTNRDLLEKILQNGLSKI

SEQ ID NO: 89730 - protein, 497 aa, Pseudoalteromonas sp.
  REGION 1..497: note = tr|A0A5H2XVC9|A0A5H2XVC9_9GAMM Tryptophan halogenase; OS = Pseudoalteromonas sp. A25 OX=116092 GN=PA25_12430 PE=4; SV = 1
MSAKQIKNVVIVGGGTAGWLSASFLAKVMGRLLNITVLESKDIGTVGVGEATIPPLQPFNSAMGIDETAFIKATKATIKLGIQFEGWGTQTSCYMHAFGAIGKDFPFCEFHNHWLHAKQQGNDSDFWDFSLNYQAAKNHKFAKLNAIPGTKLPGISYAYHFDAGLYAQFLTEHAKSMGVNHILGTVKEVIKDHKSGNIAALELDCGQQVQGDLFIDCTGMHGLLIDKALSTGFEDWSHWLPCDSALAVPCEHSDNKRAPYTRSIAHGCGWQWQIPLQHRIGNGLVYASKHLSDAQAKQMLLDNLPGKPLAEPKLIRFRTGRRRKQWHKNVVAIGLSSGFLEPLESTSIHLIQTAIVRLVKLFPHHGIEPTQVALFNEQSKVEFERIRDFIILHYKLNEREDSDFWRQCQDMEIPQSLSKKISLFAQIGKLIREDDELFAEVAWQQVFIGQGLKPEQLHPLIHAIDEQQRTELLSNLNTLIQQTVAAMPSHEQFLAKL

SEQ ID NO: 89731 - protein, 494 aa, unidentified; identical to SEQ ID NO: 87703
  source 1..494: note = Unknown
  REGION 1..494: note = tr|X2LAY5|X2LAY5_9BACT Tryptophan halogenase; OS = uncultured bacterium lac16 OX=1447240 PE=4 SV=1

SEQ ID NO: 89732 - protein, 578 aa, unidentified
  source 1..578: note = Deltaproteobacteria bacterium
  REGION 1..578: note = tr|A0A534Q075|A0A534Q075_9DELT Tryptophan 7-halogenase (Fragment) OS=Deltaproteobacteria bacterium; OX = 2026735 GN=E6J79_20185 PE=4 SV=1
MDGSSVLLSALCGKGTPSMTDRTDSNVLEQRLSSIVDALEAENVAADENELWFEPKLGGGLQIRLGREPHARCYDRSANFAISYGGHPATEPMSPAFRDALQRIKAIDDSPIDGAASAFPSAARAVADRFAPAPPVATAAVPLARPKVTGLRSVVVVGGGTAGYFAALALKREFRDLDVTLIESSKIPIIGVGEATTTLMPPFLHLQLGLDIVELYREVRPTWKMGIKFDWGQPGDYYFNYPFGNGNPVEARAHDGHINNQSLCSLMMSADRAPIVIGDDGAPISLLEYMPYAYHLENKSFVAHLEKCAQAAGIRHIDAEIKTVVPTADRESVDRLILDDGRELRADLYVDASGFRALMIEKALGSSFISYASSLFCDTAVVAEVPQRGPIQPYTTAQTMDAGWCWRIPVEGEDHRGYVFSSAHLSVDQARDEMRSKNPGMGDAWTVRFRSGRHEEFWKGNTVAVGNAYGFVEPLESTALHMVIMEMRVLLRCLHTAADGQWDRSFANRSVGLHWDYLRWFLAMHYRFNRKSDSEFWRTCRETVDVSGIEPMLERFRREGPVKEGGISPHAIPDPVFN

SEQ ID NO: 89733 - protein, 194 aa, unidentified
  source 1..194: note = Unknown
  REGION 1..194: note = tr|A0A059WI49|A0A059WI49_9BACT Tryptophan halogenase (Fragment) OS=uncultured bacterium OX=77133 PE=4 SV=1
AVVDGSRQLQIEAPHVRVLVLEKRRHPVREAAFKVGESSVEIGAHYFRSVLGLEPVLRSQHLEKLGLRYFFPHDGNQDITRRTELGPAFFPVVPSFQLDRGRLENWLLASLRESGVEVLDDCAVKRIDLQRGNHTVEFTGPGGSGTVRAKWLVDASGRAGLIRRQLGLTRTVNHGAKRTVNTAPMRPGSASRRA

SEQ ID NO: 89734 - protein, 348 aa, unidentified
  source 1..348: note = Deltaproteobacteria bacterium
  REGION 1..348: note = tr|A0A538Q5T6|A0A538Q5T6_9DELT Tryptophan halogenase (Fragment) OS=Deltaproteobacteria bacterium OX=2026735; GN = E6J90_34905 PE=4 SV=1
MSEYQDKVYDVAIMGGGPAGATLAARLARETELSVAIFEAEFFPRDHIGETLVHTIVPSLYESGALGKVLSSDCYVKKAGGFYSWDPKQPWASYFEHELHEHDGYFRWSIHCNRPEFDHILLTHARDSGAEVYEGTPVNGVSRQDDITTLDLGVHGTARCKLFVNCSGRTSSTTITGERQFLSNYRNIAIWNHIVGGRPAQSLPGDWNIFRERNLSPIASLAFEHGWFWYIPVPKLVQGKRVVTHSLGVVTDPSALSDPKKRFTDPRIFMDTARRVPLLGELIKDAQLVSDKFMTAPNYSRISGRMCDWDKREIRVGDAAYFVDPLFSSGVHFALQHAGMAMVMIKAA

SEQ ID NO: 89735 - protein, 513 aa, Devosia sp.
  REGION 1..513: note = tr|A0A0K0TRA9|A0A0K0TRA9_9RHIZ Tryptophan halogenase; OS = Devosia sp. H5989 OX=1643450 GN=XM25_00370 PE=4 SV=1
MAKPSRFVIVGGGTAGWLAAFIIQDSARRMKLDATISVVESSKIRTVGVGEATTAAFRVFLQHFGIDEFEVFRETEATFKLGIRHQDWRRKGFTYYGPIDDPHQVVQPPQGAPSDYLNVYAVSVGKKVQDMHLFGPLLERRKAPYARKADGSLVRLGPFHHAYHFDQSLVGKYLKRKSNGVEIVDAVVEGVERDSERGDITALKLDSGERLEGDFFIDATGFRKRLIVQELQAPWISYARELPVNRALPFWLDIKEGDEIANYTLAWAQENGWMWQIPTQTRYGCGYVYSDEFTTPEQAKLEVERALGHEIEVRDDIRFSIGRLEKAWMGNCVAVGLSSSFLEPLESTSIHGTIVQMMLFAEHYLKEPGRMTPAERDDYNRRVGRQVDDFRTFVNTHYATERDDTPFWRNVRAERLHPETQERLARWRTEMPRAEHFPNYLGGLPHIETQLHYPVLDGLGLLDPAVAKAEMARDPKLRAFAKKTHDELVKEYKQAATRAMGHAEFLQAVRDMA

SEQ ID NO: 89736 - protein, 508 aa, Massilia sp.
  REGION 1..508: note = tr|A0A344JJN3|A0A344JJN3_9BURK Tryptophan 7-halogenase OS=Massilia sp. YMA4 OX=1593482; GN = DPH57_20335 PE=4 SV=1
MAHPIRHIVIVGGGSAGWLTAGVIAADHRAHAPDGLRVTLIESPDVAPIGVGEGTWPTMRDTLARIGVSETAFFRECDAAFKQGSRFDGWRGSEHADYYFHPFVLPRGYGETDLVQPWQREFSHVPFADLVSFQPHLCVQGRAPKQATTPEFAAVANYGYHLDAGKFGVFLRKHCLERLGVHYVPDHVTGIASHENGDIAALQTRAHGALAGDLFIDCTGMQSLLLGQHYGIGLVDQRHVLFNDSALAVQVPYLNEDSPIASQTTSTAQRAGWIWDIGLPTRRGIGHVYSSAHTSDDGAAADLCAYLGTDATPRKLTFQPGYRRTFWHRNCVAIGLSAGFIEPLEASALALVELSAALVSDDLPATRATMDAVARRFNDAFTYRWERVIEFLKLHYVLSRRPGAYWDDHRDERSIPVRLQELLALWRHRPPSRLDFHRIEEVFPSASWQYVLYGMGFTPEPGGTRRTDPTVAAQYYREAADLTRRMLGALPSNRALIDHIRRHGLQKI

SEQ ID NO: 89737 - protein, 477 aa, Massilia sp.
  REGION 1..477: note = tr|A0A344JP03|A0A344JP03_9BURK Tryptophan halogenase; OS = Massilia sp. YMA4 OX=1593482 GN=DPH57_20350 PE=4 SV=1
MVAAGLSKSLGKLLDIKLIESDEIGTVGVGEATIPTLMNFHHLLEIDEREFMAETMATFKLGISFENWRNVGEDYIHSFGTTGTDHWTAGFQHFWHKGRERGLAGDYGDYCLELKASLHNRFAHLPKNGMNYAYHMDAGRYAKFLRRFSERYGVQRVEGKIAEVRKDLICGDIRALRLDSGVELEGDLFIDCTGFRALLIGETMGVGYEDWSHWLFNDSAAALQTKSVGDAIPLTRSIARESGWQWRIPLQHRVGNGIVYSSRYTDDDTAIRTLQANVEGEPLMTPRIIRFKPGQRQQTWKGNCVAIGLASGFLEPIESTSIHLIQRGIIRLMQMFPTDGISQADIDEYNKQAETEIHHIRDFIILHYHVTNRRDTPYWRDAASMPVPASLRHRIDLFRETGRVFRIPNELFAENSWIQVMLGQGIHPRQHHQTADLMGDDELAHFLGSMATSIERTVAQLPSHQQYVQQYCAGTGW

SEQ ID NO: 89738 - protein, 219 aa, Streptomyces hebeiensis
  REGION 1..219: note = tr|V9XSP3|V9XSP3_9ACTN Tryptophan 5-halogenase (Fragment) OS=Streptomyces hebeiensis OX=229486 PE=4 SV=1
GGGTAGWMTASYLKEAFADRIDVTLVESAAVSRIGVGEATFSTIRHFFDYLGLDEADWLPKCAGGYKLGIRFENWDGDGGHFYHPLERLRMVDGFSLADWWLELGDRGRPMDRSVFLTTALSEAKRSPRMLDGTLFAAGLDGSLGRSTLDEQRAQFPYAYHFDADKVARYLADHATGRGVRHVIDSVEQVVQDQRGWISEVRTAGHGSLHGDLFIDCSG

SEQ ID NO: 89739 - protein, 219 aa, unidentified; identical to SEQ ID NO: 86383
  source 1..219: note = Streptomyces fungicidicus
  REGION 1..219: note = tr|V9XPW9|V9XPW9_9ACTN Tryptophan 6-halogenase (Fragment) OS=Streptomyces fungicidicus OX=68203 PE=4 SV=1

SEQ ID NO: 89740 - protein, 589 aa, Microcystis aeruginosa
  REGION 1..589: note = tr|A0A5J5LSX9|A0A5J5LSX9_MICAE Tryptophan halogenase; OS = Microcystis aeruginosa EAWAG127a OX=2529855; GN = EZJ55_08480 PE=4 SV=1
MQMTQDKEYDVVIMGAGFAGLCQARHLMLKIPNIKVALVDPRPEQRTDKDLKIGESTIEIAALFLAKELGLHDYLIENHAPKQGLNFHWPKNPAKTETIDDYYHAGSNRQVPIPSFQINRSKFEQDLLKMDKAMGINFYNGQVVDVDLTPGDAIKTVKIKVGDERMELQAKHVIDAAGRKFIIGRKTDNLLFGPENLMGLNTGSAWVRVKNVDRTIFHSGYDPLNASTSHYYSTNHYFGEGHWLWMIPIDTQTMELSIGVIHHHDVINSTQVNSREKFHDFLRNNHQILANIIDSGEAVDFHYWPRISHTSKTLFSPDNWYVLGDAAYIFDAFYSYGTTTIALAIEGITEIVRAKLAGEADAEQKRAAYNEFNLAYSRSVNCLYRGHAKQLGQASVMSWRIYFEYMWWFGVQVPMYVGKWHLDLTYIPIFLKTLNSNIDGLFADLNEQFTELADKDVNIGLMDCYRGDQLFKGYHTLKHFDDFLENTKFEPRRCNVFAGLKATCFYAALWYALFQWKGFGIQGCLNPRHIYHFLRLLGLSGQATIGELIYKFKTKGLPANSEIEAMRQEFKTYQYQPKLQPWLAEATNS

SEQ ID NO: 89741 - protein, 447 aa, unidentified
  source 1..447: note = Deltaproteobacteria bacterium
  REGION 1..447: note = tr|A0A534XBD3|A0A534XBD3_9DELT Tryptophan 7-halogenase OS=Deltaproteobacteria bacterium OX=2026735; GN = E6J59_05560 PE=4 SV=1
MRDAPDVVVIGGGPAGAVAATLLADAGHRVLVLERERFPRYHIGESLLSATLPILDAVGATPAIERHGFLKKPGGTFLWGRQREPWSFWFREDPGGRPHAYQVVRAEFDQLLLENARAHGADVREEHAVTAVEPDDGRPIVRARSARGAALRLAPRFVVDASGQAAVVGRARAFRQFDDFFKNLAVFGYFRGAERLPGELANHILSAAFADGWFWYIPLHDGTMSVGAVVDARRWRTLADGDPEGTYRGLIARCPAIAERLARAALVSPIRVIRDYSYTSTRFTGPGFLLAGDAACFIDPVFSTGVHLACLAGFLGARAVDSILSGAAPEAEALARYEAAYRGAFERYLRFLYFFYDHNEDPDSYFWTARRILTHAPAELSTREAFVRLISGNGDWDAAATLVASEHARWAEGIHSGRPSAVPGSDLLRVRTTSVLTGLPARPRDDS

SEQ ID NO: 89742 - protein, 508 aa, Pseudoalteromonas distincta
  REGION 1..508: note = tr|A0A5B0UP76|A0A5B0UP76_9GAMM Tryptophan 7-halogenase OS=Pseudoalteromonas distincta OX=77608; GN = EU511_00945 PE=4 SV=1
MNKTIKTIAVIGGGTAGWLSAAIIASYHQGKNGDGLKVMLVESSDIPTIGVGEGTWPTMKNTLQQIGLREVDVFKACNATFKQGGKFVNWTHGNNDFYYHPFTVPLGYGRIDLAPYLDNVEDFAQQTNFQHDICEASLAPRGIAQGEYQGNCNYAYHLDAGAFAEMLKQHCKSKLGVEHIIGTVDQVKLDDDGAINELTLKDQTRIISADLFIDCTGFSSLLLGQALNVPFKKMDHVLFNDSALAMQVPYDENDDSLASHTIATAQNAGWIWDIGLTHRRGVGHVYSSKFLSDDEAEQNLRNYLGDAANGLTARKISFESGYREKFWHKNCVAVGMSAGFVEPLEATAIMLVEISARFVAEHMPADTQVMPIVAKRFNEQMDYRWQRIIDFLKLHYMLTKRPEPYWQAHVHPDTIPQTLQEDLLLWGSRGPLIQDFHGALELFPAASYQYVLYGMGFKPDFTKQAYLYSQDAQAKQIIERNSQLTQQMLQTLPPHRAYIEQWLAANPV

SEQ ID NO: 89743 - protein, 290 aa, unidentified
  source 1..290: note = Unknown
  REGION 1..290: note = tr|A0A2I6QNI1|A0A2I6QNI1_9BACT Tryptophan halogenase; OS = uncultured bacterium OX=77133 PE=4 SV=1
MLIGGTLGVEFDDWTHWLPCDRAVVAPCEKVGPPTPYTRSTAHKSGWQFRIPLQHRTGNGHVYSSQYISDDEAADTLLSNLDGRALGDPKLLRFKTGKRRKLWDRNVIALGLAGGFLEPLESTAIYLIQAGINRLMNLFPTADCDPALQDVYNEQAEFEYERIRDFLILHYHATERDDSDFWNYVRTMSIPDALKSHIDLFAANGQFFRNGEELFGLTSWVQVMLGQGITPRTYHPAVDWVEDKDMLALVSHVEKVLESNVRLMPHHEEFIQRCCAATDVRFQVEAVHKF

SEQ ID NO: 89744 - protein, 175 aa, unidentified
  source 1..175: note = Unknown
  REGION 1..175: note = tr|A0A0U3ACG4|A0A0U3ACG4_9BACT Tryptophan halogenase (Fragment) OS=uncultured bacterium OX=77133 PE=4 SV=1
MNQPLDTIVIVGGGTAGWMTAGGLAHFLRNSRTQITLIESDDIGTVGVGEATLPSIIGFNRLLGIDERDFVRATQGTFKLGIQFVDWKQKGETYFHPFGSYGHKLDICDFHHYWLKARRSGLKAPLDDYCLNAILARDHLFSPPVNDPSTPLSTLTHAYHFDAGLYARYLRTYAE

SEQ ID NO: 89745 - protein, 530 aa, unidentified
  source 1..530: note = Unknown
  REGION 1..530: note = tr|V9Y1J3|V9Y1J3_9BACT RebH-like halogenase; OS = uncultured bacterium OX=77133 GN=asmbl_17 PE=4 SV=1
MADKIEKILIVGGGTAGWMAASYLGKALQGTVDITVLQAADIPTLGVGEATIPNLQTAFFDFLEIEEDDWMRECNASYKMAIKFVNWRSAGEGVADPREAAGRSDHFYHSFGLLKYHERIPLSHYWFDRKYRGETTEPFDYACYKEPVILDAKKSPRWLDGTKATNYAWHFDAHLVADYLRRFATEKLGVHHVEDRVEHVTRDANGLIESVRTATGRVVGADLFIDCSGFRGLLINQAMAEPFVDMSDHLLNDRAVATAVPHDDATHGVEPFTSAIAMRSGWTWKIPMLGRFGTGYVYSSQYATEDEAVREFCDLWRLDPETQPLNKIRFRVGRNRRAWVKNCVSIGTSSCFVEPLESTGIYFIYAALYQLVKHFPDKGLNPVLADRFNREIEIMFDDTRDFIQAHFYFSPRTDTPFWKANKQLRLGDSMREKIDMYRAGMAINAPASDDAQLYYGNFEEEFRNFWNNSNYYCVLAGLGLEPDAPSPRLAHMPMATESVAEVFRVIEAEQRHLLEKLPSCYDFLKLQHGR

SEQ ID NO: 89746 - protein, 602 aa, Microcystis aeruginosa
  REGION 1..602: note = tr|A0A5J5LTJ4|A0A5J5LTJ4_MICAE Tryptophan halogenase; OS = Microcystis aeruginosa EAWAG127a OX=2529855; GN = EZJ55_08475 PE=4 SV=1
MNYTITQSREYDVVIMGAGFAGLCQARHLMLNIPNIRVALIDPRPVERTDKDLKIGESLIEVAALFLCKELGLHDYLIENHPPKSGLNFHWPKEPAKTETLDDYYHVWANRQTPVGSFHLQRAKFEQDLLVMNCQMGADFYEGRVKDVALTSGDELKTVYAKVGEENITLQAKHVIDAAGKNFIIGRKTDNVLSGPENLLGLNNGSAWLRVKNIDRTIFHSGYHPEGASTSHYYATNHYFGQGHWLWMIPIDKHSMELSIGIIHHHDVIPAQSINNLEKFSNFLKSNHTILSRLIESGEVVDFHYWPKIAHKSKVLFSPDNWYVIGDAAHIFDAFYSYGTTMIAFEVESVTEIIRAKLTEEAAAEQKRSAYNDFNLAYARTVNCLYRDHAYQLGHASVMSWRIYFEYMWWFGVHVPTYIGKWHLDLNFIPRYVTIADGNVNGIFADLCREFHQLVSQGANIGLMDAYRADQLLGGYGTLKHFDDFLENTKFEPRRCNVFASMKAAYFYIAIWYALFQWKAFGIAGWLNPKHWYYFGRMLKLSIQATIAEVIYKRKTRGIADNSQIEKMREEFKNYHYQPQKKSPSVVQNVVGERVTIESFPA

SEQ ID NO: 89747 - protein, 196 aa, unidentified
  source 1..196: note = Unknown
  REGION 1..196: note = tr|M9QXS1|M9QXS1_9BACT Flavin reductase; OS = uncultured bacterium OX=77133 GN=borF PE=1 SV=1
MEGSVNGSQRGNGSQRERVPEPGAGPTTDLLRDSRSLRGIFSSFATGVTVVTVGGDSPHAMTANSFTSVSLDPPLILVCVECDAAMHGSLLEVGSFGVSVLAADQQHVALLYANRWRPRDPTQFDRPGWARGARTGAPLARGALAWFECALWRAYDAGDHSIFVGRLLTAERHDRRDALVYHSGQFRGLPDRAPVE

SEQ ID NO: 89748 - protein, 238 aa, Streptomyces albogriseolus
  REGION 1..238: note = tr|A0A1B1V576|A0A1B1V576_STRAO Uncharacterized protein OS=Streptomyces albogriseolus OX=1887 GN=thdM PE=4; SV = 1
MSTEEKSSAEKSSVPDGSPVLYRPEDLARITEDLPFIRTIADWCTEFLSKPHPDLGRGGSVCPFIPRALAMNRVSFVVLHTANRTEAEIDGIIASYRQTILDMEPRSGQEAIDKAIMVILPDVSGEDAAEVVDETHRRLKAEFVASGLMIGKFHPRSEQGGLHNPGFRPLRSPIPLLAIRHMVDSDLPFLNRVDDPVPDRIKFLESYGQRFEDAEESRWSEKGRAAIGELRVRAESDK

SEQ ID NO: 89749 - protein, 153 aa, Streptomyces albogriseolus
  REGION 1..153: note = tr|A0A1B1V578|A0A1B1V578_STRAO Putative Protein/1 binding protein OS=Streptomyces albogriseolus OX=1887; GN = thdB PE=4 SV=1
MRSSELTIGRSFGLNFDHKEDFFQTLADFCKENDVRQGYIPMFLAAFAETEIAGTCDRVEDPEAPVRLPVYLEKVEAVGSGTFSYDPDRDIVVPHVHVTVGLKQQSALAYSSHLISATVQYLTEMLIVEVASPHMRRPVKTELYDVPLLTFES

SEQ ID NO: 89750 - protein, 523 aa, Streptomyces toxytricini
  REGION 1..523: note = tr|E9P162|E9P162_9ACTN Tryptophan 6-halogenase; OS = Streptomyces toxytricini OX=67369 GN=stth PE=1 SV=1
MNTRNPDKVVIVGGGTAGWMTASYLKKAFGERVSVTLVESGTIGTVGVGEATFSDIRHFFEFLDLREEEWMPACNATYKLAVRFQDWQRPGHHFYHPFEQMRSVDGFPLTDWWLQNGPTDRFDRDCFVMASLCDAGRSPRYLNGSLLQQEFDERAEEPAGLTMSEHQGKTQFPYAYHFEAALLAEFLSGYSKDRGVKHVVDEVLEVKLDDRGWISHVVTKEHGDIGGDLFVDCTGFRGVLLNQALGVPFVSYQDTLPNDSAVALQVPLDMEARGIPPYTRATAKEAGWIWTIPLIGRIGTGYVYAKDYCSPEEAERTLREFVGPEAADVEANHIRMRIGRSEQSWKNNCVAIGLSSGFVEPLESTGIFFIHHAIEQLVKHFPAGDWHPQLRAGYNSAVANVMDGVREFLVLHYLGAARNDTRYWKDTKTRAVPDALAERIERWKVQLPDSENVFPYYHGLPPYSYMAILLGTGAIGLRPSPALALADPAAAEKEFTAIRDRARFLVDTLPSQYEYFAAMGQRV

SEQ ID NO: 89751 - protein, 505 aa, unidentified
  source 1..505: note = Betaproteobacteria bacterium
  REGION 1..505: note = tr|A0A537ATW7|A0A537ATW7_9PROT Tryptophan 7-halogenase OS=Betaproteobacteria bacterium OX=1891241; GN = E6H52_06195 PE=4 SV=1
MNENRVRRIGILGGGTAGWMTASALSKAIGPRVQTFLIESDEIGTIGVGEATIPTIHWFNQLTGLNHNEFMRETKATYKLGIEFENWARPGHVYLHPFGRYGDTNDSLPFHHRWIRARQEGLDDGIEQYSLTTLVARAGKFAFPASDPNSPLATLGYAFHFDASLYARYLRKHSEARGVRRFEGKVIKIDQHPETGFVTSLRTDKGDQLDADLFIDCSGLRGVLIGGVLGSAFEDWSHWLPCDRALAVPTERTGPPVPYTRSEALAAGWQWRIPLQHRNGNGYVYSSKFISDDEAASVLLNNLDGKPLADPRPIRFTAGRRKRSWDKNVVAIGLSGGFLEPLESTSIHLIQSAIAKLLSLFPTRQCDPYTAEQFNRVLSQEFEAVRDFLVLHYHSTTGKNEPMWEYCRSMPLPEALVYKEEHFKRSGRIVLAPEELFKDGSWLAVLTGQGHIPGDYNPLLDSVSSKDNFVYLRRTKDLLRATCQRLPSHESHIRAITEAPPVGVA

SEQ ID NO: 89752 - protein, 439 aa, unidentified
  source 1..439: note = Betaproteobacteria bacterium
  REGION 1..439: note = tr|A0A536TFI8|A0A536TFI8_9PROT Tryptophan 7-halogenase (Fragment) OS=Betaproteobacteria bacterium; OX = 1891241 GN=E6H76_12415 PE=4 SV=1
ATYKCGITFDGWSTKPGFESYFHPFASMLDNLTMTQFVHNSQARVNGADVCAHPNRFFIASYLAHNNLAPKPERTFPFDVWYGYHFDSVLLGQYLHKKALQRGVKYTKCHVTGVQLNERGEIASVSIQDGEPVTADIFVDCTGFAGILIQKALGTPFVSFSNNLFNDAAIAMPTPIGDDIPSQTISTALKHGWRWKIPLTSRYGNGYVYSSAFCSADDAERELREGLGMLDSDTPARHLKMKIGRVTKHWNKNCLAVGLAQGFIEPLEATALLFIQRTVTAFVEFLEAGDLSEAAHERFNQRVNDHFEGTRDYIVTHYKTNTRRDTEYWRANAANTNLSDSLRQLYGLWMSGKSIAADVGRQAIGKGYPVFSWYCIMSGMGIFPDPKDLRPAAPPDNRYSMEEIDNLLQRSTLNFRSQRDVLMNIPQKVQERSLQIYFW

SEQ ID NO: 89753 - protein, 542 aa, unidentified
  source 1..542: note = Betaproteobacteria bacterium
  REGION 1..542: note = tr|A0A536W2X6|A0A536W2X6_9PROT Tryptophan 7-halogenase OS=Betaproteobacteria bacterium OX=1891241; GN = E6H64_13555 PE=4 SV=1
MTAPPDRAPTATLFNYSYSVKQSDKPTSIPPAIRKIVIVGGGSAGWMTAMILANALIRHGIEISVLESPMVGIIGVGEGSTPWLRGFFDSLGIEESEWMPECNATYKCGITFDGWSTKPGFESYFHPFASMLDNLTMTQFVHNSQARVNGADVCAHPNRFFIASYLAHNNLAPKPERTFPFDVWYGYHFDSVLLGQYLHKKALQRGVKYTKCHVTGVQLNERGEIASVSIQDGAPVTADIFVDCTGFAGILIQKALGTPFVSFSNNLFNDAAIAMPTPIGDDIPSQTISTALKHGWRWKIPLTSRYGNGYVYSSAFCSADDAERELREGLGMLDSDTPARHLKMKIGRVTKHWNKNCLAVGLAQGFIEPLEATALLFIQRTVTAFVEFLEAGDLSEAAHERFNQRVNDHFEGTRDYIVTHYKTNTRRDTEYWRANAANTNLSDSLRQLYGLWMSGKSIAADVGRQAIGKGYPVFSWYCIMSGMGIFPDPKDLRPAAPPDNRYSMEEIDNLLQRSTLNFRSQRDVLMNIPQKVQERSLQIYFW

SEQ ID NO: 89754 - protein, 542 aa, unidentified
  source 1..542: note = Betaproteobacteria bacterium
  REGION 1..542: note = tr|A0A536Z740|A0A536Z740_9PROT Tryptophan 7-halogenase OS=Betaproteobacteria bacterium OX=1891241; GN = E6H53_14120 PE=4 SV=1
MTAPNDRAPTATLFNYSYSSKESDKPTSIPPGIKKIVIVGGGSAGWMTAMILANALISQGIEISVLESPAVGIIGVGEGSTPWLRGFFDSLGIQESEWMPECNATYKCGITFDGWSTKSGFESYFHPFASMLDNLTMTQFVHNSQARVNGADVYAHPNRFFISSYLAHNNLAPKPQRTFPFDVWYGYHFDSVLLGQYLHKKAMQRGVKYTKCHVTGVQLNERGDIASVSIKDGEPVTADIFVDCTGFAGVLIQQALGTPFVSFSNNLLNDAAIAMPTPIGDEIPSQTISTALKHGWRWKIPLSSRYGNGYVYSSAFCSADDAEHELREGLGMLDSETPARHLKMKIGRVTKHWNKNCLAVGLAQGFIEPLEATALLFIQRTATTFVEFLEAGDLSEAAHDRFNQRVNDHFEGTRDYIVTHYKTNTRRDTEYWRANAENTNLSDSLRQLYGLWMAGKSIAPDVGRQAIGKGYPVFSWYCIMSGMGIFPDRKALRPATAAEERYSMEEIDNLLQRSALNFGRQREVLTNIPKKVDERSLQIYFW

SEQ ID NO: 89755 - protein, 512 aa, Mycobacterium sp.
  REGION 1..512: note = tr|A0A145U243|A0A145U243_9MYCO Tryptophan halogenase PrnA OS=Mycobacterium sp. QIA-37 OX=1561223; GN = Chelonae_p3235 PE=4 SV=1
MLEEVVIVGGGTAGWMTASYLKVAFGDRIAVTVVESARIGAIGVGEATFSTIRHFFEYLGLEEHEWMPSCCATYKLGIRFQDWRKPGHHFYHPFERQRVVDGFGLTDWWLDNPRSDSFDRDCFLIGTLCDNDKSPRRLDGSLFMGTDGENTAYRTTLSEQDTQFPYAYHFDASLLADFLRDFAVRRGTRHVVDDVVDVLQDDRGWISQVRTRAHGSIGGDLFIDCTGFSGLLLGRAMGEPFESYQGSLLNDRAVALRVPTDQDRGHLPPYTTATAQDAGWIWSIPLFDRIGTGYVYAEDYCSPEDAERALRDFVGPEAEGLEANHIRMRIGRSRRSWVGNCVAIGLASGFVEPLESTGIFFIQHGIEQLVKHFPDANWEESLRDSYNRVINRCMDGVREFLVLHYYLAARVDTQYWRDTKSVQLPAALAERIEHWRSKLPDTGSVYPHYHGFEPYSYVCMFVGLGGIPARPSTVVRYLDATRAQREFDLLAQQASRLRHSLPTHREYLAQMY

SEQ ID NO: 89756 - protein, 542 aa, unidentified
  source 1..542: note = Betaproteobacteria bacterium
  REGION 1..542: note = tr|A0A536ZRH9|A0A536ZRH9_9PROT Tryptophan 7-halogenase OS=Betaproteobacteria bacterium OX=1891241; GN = E6H55_05435 PE=4 SV=1
MTAPNDRAPTATLFNYSYSVKQPDKPTSIPPAIRKIVIVGGGSAGWMTAMILANALIRHGIEISVLESPMVGIIGVGEGSTPWLRGFFDSLGIEESEWMPECNATYKCGITFDDWSTKPGFESYFHPFASMLDNLTMTQFVHNAQARVNGADVCAHPNRFFIASYLAHNNLAPKPERTFPFDVWYGYHFDSVLLGQYLHKKALQRGVKYTKCHVTGVQLNERGEIASVSIQDGEPVTADIFVDCTGFAGILIQKALATPFVSFSNNLFNDAAIAMPTPIDNDIPSQTISTALKHGWRWKIPLTSRYGNGYVYSSAFCSADDAEHELRDGLGMLDSDTPARHLKMKIGRVTKHWNKNCLAVGLAQGFIEPLEATALLFIQRTATTFVEFLEAGDLGEAAHERFNQRINDHFEGTRDYIVTHYKTNTRRDTEYWRANAANTNLSDSLRQLYGLWMSGKSIASDVGSQAIGKGYPVFSWYCIMSGMGIFPDLKDLRPASPTDNRYSMEEIDNLLQRSVLNFRSQRDVLMNIPKKVEERSLQIYFW

SEQ ID NO: 89757 - protein, 291 aa, unidentified
  source 1..291: note = Betaproteobacteria bacterium
  REGION 1..291: note = tr|A0A536VQQ1|A0A536VQQ1_9PROT Tryptophan 7-halogenase (Fragment) OS=Betaproteobacteria bacterium; OX = 1891241 GN=E6H65_00340 PE=4 SV=1
IQQALKTPFVSFSSNLFNDAAVAMPTPIGDDIPSQTVSTAMKNGWAWKIPLTARYGNGYVYSSSFCSADEAERELREHLGLLDSPTPARHLKMKIGRVTKHWNRNCLAVGLAQGFIEPLEATALLFIQQTASAFVEALEAGDVSEAAHERFNERVNQHFEGTRDYIVTHYKTNSRSDTEYWRANASNENLSEPLKQLFGFWMAGKPIAGDVGRQTIGKGYPVFSWYCIMSGMGIFPDAHTLRAPTPSEARYKMSEIDNLLQRSALNFVKQRDLLADIPPKRREDALQIYFW

SEQ ID NO: 89758 - protein, 541 aa, unidentified
  source 1..541: note = Betaproteobacteria bacterium
  REGION 1..541: note = tr|A0A536ZTP9|A0A536ZTP9_9PROT Tryptophan 7-halogenase OS=Betaproteobacteria bacterium OX=1891241; GN = E6H48_17805 PE=4 SV=1
MTIRTQGPTATVFNYSYTFTQPAKPTSIPPAIKKIVIVGGGSAGWMTAMILADALIKKGIEIEVLESPTVGIIGVGEGSTPWLRGFFDGLGIEESEWMPACNATYKCGITFDGWSTKPGFESYFHPFASMLDNLTMTQFVHNAEARANGTDVCAHPNRFFVAAYLADRHLAPRPKRTFPFDVWYGYHFDAVLLGEYLHRKAVERGVRYRKCHVNGAQLNESGDIASVSIQDGEPVAADIFVDCTGFGGLLIQKALGTPFISFSNNLFNDAAVALPTPLGDDIPSQTISTALKHGWRWKIPLTSRFGNGYVYSSAFCSADEAERELRESLGMLDSETAARHLKMRIGRVTRHWNKNCLAVGLAQGFIEPLEATALLFIQRTATHFLEFLEAGDLSESAHDRFNQRINDHFEGTRDYIVTHFKTNTRHDTEYWRANAENRNLSDSLRHLYGLWMSGKSIAPDVGRQTIGKGYPVFSWYCIMSGMGIFPDQKDLRPPTAAENRYSMDEIDNLLGRSAQNFSGQRETLNNIPAKIRERSLQIYFW

SEQ ID NO: 89759 - protein, 516 aa, Nocardiopsis sp.
  REGION 1..516: note = tr|A0A141R7F5|A0A141R7F5_9ACTN Halogenase; OS = Nocardiopsis sp. 531F OX=1517244 PE=4 SV=1
MLSEPSMTDAHPNPPLKTITIVGGGTAGWMAAALLSRLTLGAYTIRLIESEEIGTIGVGEATIPAIRTFNGPAGIDEFEMVRATQATFKLGIELRNWGAPGDSYIHGFGKIGQDLYWLHCHQFWLKERAAGRAKHLDHYALNTLAARMNRFAMPDPSNPQSPIADIDYAYHFDASLFARFLRGRAEAAGVERIEGRIVAANRRGSDGFLDHVVLADGRTVDGDLFIDCSGMRGLLIGEAMGVGYEDWSQWLLCDRALAVPSARGRGPLTPYTRSIAHGAGWQWRIPLQHRTGNGHVYSSRFMSDDEAATTLLANLDTPALGDPRPVRFRPGKRTRAWEKNVVALGLAGGFLEPLESTSIHLIQTGLLRLLALFPGRGFHAADMAEYNRQTDFEYRDVRDFIIAHYKVTLREDTPFWQYCRHMEVPDSLAERIELFRSSARFFMHGKAELFREESWVQVLLGQGLDAQYDPMVDMIPEAQTAAFLSDVEEVIAEVASGLPTHEAFIARHCQAPPLQG

SEQ ID NO: 89760 - protein, 154 aa, unidentified
  source 1..154: note = Betaproteobacteria bacterium
  REGION 1..154: note = tr|A0A536STP5|A0A536STP5_9PROT Tryptophan 7-halogenase (Fragment) OS=Betaproteobacteria bacterium; OX = 1891241 GN=E6H78_21570 PE=4 SV=1
LAHNKLAPKPQRTFPFDVWYGYHFDSVLLGQYLHKKALERGVKYTKCHVTGVQLNERGDIASVSIKDSEPVKADIFVDCTGFAGILIQQALGTPFVSFSNNLFNDAAIAMPTPIGDEIPSQTISTALKHGWRWKIPLTSRYGNGYVYSSAFCSA

SEQ ID NO: 89761 - protein, 506 aa, unidentified; identical to SEQ ID NO: 86432
  source 1..506: note = Kordiimonadales bacterium
  REGION 1..506: note = tr|A0A5A7MLP5|A0A5A7MLP5_9PROT Tryptophan halogenase; OS = Kordiimonadales bacterium JCM 17844 OX=1236966; GN = JCM17844_02510 PE=4 SV=1

SEQ ID NO: 89762 - protein, 211 aa, unidentified
  source 1..211: note = Betaproteobacteria bacterium
  REGION 1..211: note = tr|A0A536SSU0|A0A536SSU0_9PROT Tryptophan 7-halogenase OS=Betaproteobacteria bacterium OX=1891241; GN = E6H78_21575 PE=4 SV=1
MLDSETPARHVKMKIGRVTKHWNKNGLAVGLAQGFIEPLEATALLFIQRTATSFVEFLEAGDLSEAAHDRFNQRINDHFEGTRDYIVTHYKTNTRRDTEYWRANAENTNLSDSLRQLYALWMSGKSIAADVGRQAIGKGYPVFSWYCIMSGMGVFPDQKDLRPATAAENRYSMEEIDNLLQRSAQNFGSQREVLTNIPKKVEERSLQIYFW

SEQ ID NO: 89763 - protein, 460 aa, unidentified
  source 1..460: note = Betaproteobacteria bacterium
  REGION 1..460: note = tr|A0A536U897|A0A536U897_9PROT Tryptophan 7-halogenase (Fragment) OS=Betaproteobacteria bacterium; OX = 1891241 GN=E6H71_11765 PE=4 SV=1
MTIRTQGPTATVFNYSYTFTQPAKPTSIPPAIKKIVIVGGGSAGWMTAMILADALIKKGIEIEVLESPTVGIIGVGEGSTPWLRGFFDGLGIEESEWMPACNATYKCGITFDGWSTKPGFESYFHPFASMLDNLTMTQFVHNAEARANGTDVCAHPNRFFVAAYLADRHLAPRPKRTFPFDVWYGYHFDAVLLGEYLHRKAVERGVRYRKCHVNGAQLNESGDIASVSIQDGEPVGADIFVDCTGFGGLLIQKALGTPFISFSNNLFNDAAVALPTPLGDDIPSQTISTALKHGWRWKIPLTSRFGNGYVYSSAFCSADEAERELRESLGMLDSETAARHLKMRIGRVTRHWNKNCLAVGLAQGFIEPLEATALLFIQRTATHFVEFLEAGDLSESAHDRFNQRINDHFEGTRDYIVTHFKTNTRHDTEYWRANAENRNLSDSLRHLYGLWMSGKSIAPD

SEQ ID NO: 89764 - protein, 513 aa, Erythrobacter sp.
  REGION 1..513: note = tr|A0A5E7ZIV9|A0A5E7ZIV9_9SPHN Tryptophan halogenase; OS = Erythrobacter sp. EC-HK427 OX=2038396 GN=ERY430_80196; PE = 4 SV=1
MSGARPIREVVIAGGGTAGWMAAAALASYFEDQLSITLVESESIGTVGVGEATIPQIHLFNRLLGLEENDFVRATAATFKLGIEFVDWDVPGESYFHGFGGVGQKIGKLPFHQYWLRYRAEGGKRPLDDFSGNAIAAREGRFGKVALGGTKRGQPAIRRSLPHAFHFDASLYAAFLRRFCEARGVRRIEGKILAVKQDSASGHIRELHLDGARKLAGELFIDCTGFRGLLIGEAMESRYDDWSHLLPCNRAWAVPTRRDTPPEPLTRSTAREAGWQWHIPLQHRSGNGLVFCADYWAEEDARTALLANLGGEPLAEPKLLRFTTGKRERGWVGNCVAMGLAGGFMEPLESTSIHMVQSAVSRLIDCFPRSNFSHATIAEYNAQTDFEYESIRDFLVLHYRLNRREGPFWAYLREMELPDSLQQKMALFVETGAINRFNNELFDVPSWLQVMLGQGLYPAAHHPMVNAVPEDSLARYIATNARDAAAEAEGLPLHQDYIAQHCAIADAAAPVTA

SEQ ID NO: 89765 - protein, 515 aa, Erythrobacter sp.
  REGION 1..515: note = tr|A0A5E7Y6D9|A0A5E7Y6D9_9SPHN Tryptophan halogenase; OS = Erythrobacter sp. EC-HK427 OX=2038396 GN=ERY430_40633; PE = 4 SV=1
MGEANSKAVRIVVLGGGTAGWMSAAALARLLGPKARVELVESEDIGIVGVGEATLPHIRGFVERLGIDEARFMAATHATYKLGIDFRDFGRIGESYIHPFGSFGEELAGVPFHHYWLELHRQGLADDIGAYSLGVMAAKANRFQPPATDQSLAGTYGYAYQFDATLFGPFMRDFARGLGVKRTEGRVTHVERDATSGNVTELVLESGERIGGDLFVDCSGFRSLLLGDALGEGWEDWSHWLPCDRAAALPCEHVTEEIQPYTTATAMPAGWRWRIPLQHRVGNGYVFASDFVSEDEACAAILGAVEGKPLADPRVLRFTAGRRKRSWQNNVIAVGLASGFLEPLESTSIYLAQMAITYLIELFPDAAHGGAIDPRDRDEFNRLVDMEYDRVRDFLILHYHATTRDDSEFWNHVRTYQVPDTLADKLELWKRAGRIAKYADGLFYDASWIAVYIGQGLLPETHDARTQLPDPAQTSRAMDAFHAAVAQEVAAMPGHREYLLREAARLAPVPEGLAA

SEQ ID NO: 89766 - protein, 513 aa, unidentified
  source 1..513: note = Streptomyces uncialis
  REGION 1..513: note = tr|G3K6J6|G3K6J6_9ACTN Halogenase OS=Streptomyces uncialis OX=1048205 GN=claH PE=4 SV=1
MLESIVVVGGGTSGWMTASYLSAAFGERISVTVVESARVGTIGVGEATFSTVRHFFEYLGLSEETWMPACNATYKLGIRFENWRAPGHHFYHPFERQRVVDGFTLPDWWLADGGATERFDKECFLVGTLCDTMRSPRHMDGALFEGDLTDRPAGRSTLAEQGTQFPYAYHFDAALLADFLRDYAVARGVLHVVDDVVHVARDERGWISHVATRGSGDLAGDLFVDCTGFRGLLINDALDEPFESYQDTLPNDSAVALRVPVDMEREGLRPCTTSTAQAAGWIWTIPLFGRVGTGYVYARDYCTPEEAERTLRRFVGPAADDLEANHIRMRIGRSRRSWVNNCVAVGLSSGFVEPLESTGIFFIQHAIEQLVKHFPDADWDPALRSAYNTLVNRCMDGVREFLVLHYYGAARADNEYWRDTKTRKIPDSLAERVEQWRTKLPHPESVYPHYHGFEAYSYVCMVLGLGGIPLKPSPALRMLDPSAAQREFRLLATQAEDLRRTLPSQYAYFAQFR

SEQ ID NO: 89767 - protein, 516 aa, Colwellia sp.
  REGION 1..516: note = tr|A0A2G2DTY2|A0A2G2DTY2_COLSX Tryptophan halogenase; OS = Colwellia sp. OX=56799 GN=COA35_13755 PE=4 SV=1
MTKPIKKIVILGGGTAGWLSAGLLAAEHPHLSVTLIESANVPILGVGEGTWPSMRNTLQRIGIKEIDFITQCDATFKQGSKFINWRNLNKGENYYHPFMDPQGYELTNLHANWQRIAPNQKFADVVNMQSFVCQAALAPKQLQTPEYAAVTNYGYHLDAGKFAEFLKSHCVKNLNVTHITDDVTHVINDEHGYIASLKTNKNGDITGDLFLDCSGSRARLIGEHFNSEFIAQDHILFNNSAVAAQVPNAHINQPIASATLSTAQSNGWIWDIALPTRRGTGYVFSSQYQSDESATDTLKSYIAKSTSEQQAAQLNYRVLKFSPGYRQKFWIKNCVAVGMSAGFLEPLEASALAMVELSISMISEQLPQNRTHMSQLETRFNDRFSTRWQRVVEFLKLHYVLSERDDTPYWQNIRDLTTAPERLQNLLKLWQFQPPSRFDFIENEEVFSSSSYQYVLYGMGFNTQTPQAHNAFTSAQAGDYFYQQNREKIAQYLKGLPSNRALLNHLLSNNRQPHND

SEQ ID NO: 89768 - protein, 499 aa, unidentified; identical to SEQ ID NO: 85275
  source 1..499: note = Hyphomonadaceae bacterium
  REGION 1..499: note = tr|A0A2D8ZUI1|A0A2D8ZUI1_9RHOB Tryptophan halogenase; OS = Hyphomonadaceae bacterium OX=2026748 GN=CME92_00155; PE = 4 SV=1

SEQ ID NO: 89769 - protein, 499 aa, unidentified
  source 1..499: note = Hyphomonas atlantica
  REGION 1..499: note = tr|A0A353L2A6|A0A353L2A6_9RHOB Tryptophan 7-halogenase OS=Hyphomonas atlantica OX=1280948; GN = DCG65_06940 PE=4 SV=1
MSTQQVKRVVIAGGGTAGWIAAAALSRMLGPLLDITLVESDAIGTVGVGEATIPTHRTFHHLLGIDEREFMRATKATFKLGIAFENWGGVGDRYIHSFGQVGKPSWMGEFYNIWMYAQERGIGDALDAYCFELQAAEEDRFYTSEKANINFAYHLDASLYAKFLRTFSEAKGVKRVEGLIDTVEQDGESGFITALKLQSGERIEGDLFIDCTGFRGLLIEQTLKTGYEDWTHWLPTDSALAVQTRSVGPAIPYTRAIAHHAGWQWRIPLQHRVGNGLVFCSENMQPDEAQEFLLNNVDGEPLTEPRLIRYKTGRRRKVWNKNCVALGLSSGFVEPLESTSIHLIQIGATRLVQQFPFSGISEAIANHYNEQAERELEKIRDFIVLHYKLTERDDSDFWRARRDMPVPDTLSQRIALFRENGLVYQASDDLFRVDSWLQVMMGQRLKPKGYHHMGHMMTDDQLTRALGGLKASIAQAVSKLPKHQDFIDTYCAAPETETA

SEQ ID NO: 89770 - protein, 507 aa, unidentified
  source 1..507: note = Dehalococcoidia bacterium
  REGION 1..507: note = tr|A0A2E5LWH1|A0A2E5LWH1_9CHLR Uncharacterized protein OS=Dehalococcoidia bacterium OX=2026734; GN = CL897_01185 PE=4 SV=1
MTQGTSEFKTVGIVGGGTAGYLTALALRKKLPHLQVTLIESPTIPIIGVGEGTTPIMVKFLHAYLERDVQELYRKVQPTWKFGVKFEWGQPGDYYFNYAFHPGPILDSVYYGGNFNEYSLGSMLISEERAPILTGEGGQLTSLIDRIPFAYHLDNNRFVAYLREEAARDGVERLELSVNTFVPAEDGESLDHIITDDGEERRFDLYVDCTGFHSKMIGEALGSPFQSYEDSLFCDRAIVANVPHGGHIKPFTTAETMDAGWCWNTPSIEDDHRGYVFSSRFLSDDAAAAEMRSKNPGMGDHRVIRFKTGRREHFWKGNVVAIGNSYGFVEPLESTGLHMIILEINQLVLNFPRSKKDTAIRGIVNRTLNAHWDDVRWFLAVHYRFNEKLQTPFWKACQNTVDIRGAQERVELFRERAPLTYRQSQFFKTEEVFGDFAYDVLLLGQRVPGRYLEASQSRVEWQKRVDGLRQLTGNALTQERAFEALNGAPPEILGSLVASPNTWVVWP

SEQ ID NO: 89771 - protein, 505 aa, Xanthomonas sacchari
  REGION 1..505: note = tr|A0A5D1AJN8|A0A5D1AJN8_9XANT Tryptophan halogenase; OS = Xanthomonas sacchari OX=56458 GN=CEK63_11610 PE=4 SV=1
MIAAPLRNLVIVGGGTAGWMAAAALARVLGPDYRITLIESEQIGIVGVGEATVPHIKAFNNLLGINEAEFVRHTQGSFKLGIEFADWQRPGTSYVHGFGTEIGHPLGLLPFQQYWFKQALAGKARPLGAYTLNTVAAKRDRFMTSATDVPPNSPLANIAYAYHFDAALYAGFLRRYAEQRGVNRREGIVEEVQLHPESGDVLSVRLASGEAIAGDLFIDCSGFRGLLIEQALHTGYHDFSHWLPCDRALAVPCAKVGPPTPYTRATARAAGWQWRIPLQHRTGNGYVYCSAHISDDEAAATLLANLDGPALADPRPLRFVTGRRKQVWNRNVIALGLASGFMEPLESTSIHLVQSGISKLLELFPREGISPVLVRRYNERIAFEFDRIRDFLLLHYHATERDDSAFWRHCRSMPITPELEETLALFRDSGRFYRNGDEMFAEISWVQVMVGQGILPRAYHPLVDQVPQADLERFMASVEQTIGHCADAMPPHQAFIDRYCAARPV

SEQ ID NO: 89772 - protein, 509 aa, Xanthomonas sacchari
  REGION 1..509: note = tr|A0A5D1A6D9|A0A5D1A6D9_9XANT Tryptophan halogenase; OS = Xanthomonas sacchari OX=56458 GN=CEK63_13790 PE=4 SV=1
MNLANTTDGRIRKVVIAGGGTAGWLAGCALAHQFRDRLDITLVESEQIGTVGVGESTVPPIRAFHRFLQIDEQEFLRAVAGTFKLSISFEHWRRPGDRFIHPFGTIGQGTWATPFHHFWLDSLRRGMPSDLGDFCLESVASRADRFSLETQPQVNYAYHFDAALYAKFLRKKAEGYGLCRVEGQIREVRQHAHDGSVAALLLEDGQLIEGDLFIDCTGFRGLLTEQTLHTGYEDWREWLPSDRAVAVQTEAVAPPVPYTRAIAHEAGWRWHIALQHRVGCGLVFSSRHMSDDEAHAKLLRDVDGPPLRDPWLVPFRSGRRLQAWNRNVVALGLASGFIEPLESTSIHLTISAVVRLIQLFPHEGISPALVELYNTVSRQEMEHVRDFIILHYHATQRDEPMWKACREMALPESLAIRLRAWRERAHAWQGPGELFRVDSWTSVLLGQGIQPGPPHPLAAAIGDADLRTLLTRIRQPLQQASAAMPSQAEFIERYCKASPEVWQRSSSLA

SEQ ID NO: 89773 - protein, 379 aa, unidentified
  source 1..379: note = Bradyrhizobium rifense
  REGION 1..379: note = tr|A0A5D3KKU0|A0A5D3KKU0_9BRAD Tryptophan halogenase; OS = Bradyrhizobium rifense OX=515499 GN=FXB40_05640 PE=4; SV = 1
MSSYDVAILGGGPAGTALALELRRNEPDLKILIAEADIATDWRIGETLAPGAAQLLNGLGCWDDVMRDGLIEGVRSEAAWGSDRLHAHDFIFSTRGSAWHLDRVRFDETLRAAAEAGGVEIWRGARFLSAVAESETWQLSLDRQGRRVDVEARFVADATGRSARFATSQGSRRCFADRLVGVAAAVHLREDAAADHATLVEACEHGWWYSTVLPGNRLVLAWMSDSDIVHHNSSARLGPWLAQLRAAPLTAARADMAETAERVFTWPARSHCLDQPCGRSWVAVGDAVSSWDPLSSAGIMKALRTGKLGAFVLLDAIRGVEGAGAKYRRLIEAEYRRYRRDRRAVYRMERRWSGSAFWQRRHAAEPFDREPAMHSAGEP

SEQ ID NO: 89774 - protein, 521 aa, Xanthomonas campestris; identical to SEQ ID NO: 89044
  REGION 1..521: note = tr|A0A556RXV4|A0A556RXV4_XANCG Tryptophan 7-halogenase OS=Xanthomonas campestris pv. glycines; OX = 473421 GN=C2859_22360 PE=4 SV=1

SEQ ID NO: 89775 - protein, 495 aa, Pseudoalteromonas sp.
  REGION 1..495: note = tr|A0A5B0TYD0|A0A5B0TYD0_9GAMM Tryptophan 7-halogenase OS=Pseudoalteromonas sp. FUC4 OX=2511201; GN = EU510_02360 PE=4 SV=1
MTRTNAVKNVVIAGGGTAGWMAAAALAKLVGNNINITLVESDDIGTVGVGEATIPPIRTFHKLLGINEQAFMKATQASFKLGISFENWGDENTHYIHSFGATGKECWAGEFHHFWLQGKALGINNPFGDYCYELQAAKGGKFAFNQQNPINYAYHMDATRYAQFLREFSEPLGVKRIEGKIQKVVKNTKAGHIESLILNNGEHINGDFFIDCTGFRGLLIEQALHTGYEDWSHLLPCNSAIAVQTKSTSETVLPLTRSIAHKSGWQWRIPLQNRVGNGLVYCSQYMDDEQAKALLLNNMEGEPLTEPRIIKFKTGRRLKGWNKNCLALGLASGFVEPLESTSIHLIMSGIIRFMRLFPFNGITNHAIDEYNKQLKSEIENIRDFIVLHYKVTNRDDSEFWQHCSAMEVPKTLQHKTDLFKQTGRVFLDDGDIFRVDSWVQVMLGQGIEPNQHHLIASMMSDEELTRFLHGIKQQIEQRVRQLPPHHEFLKQYCPA

SEQ ID NO: 89776 - protein, 521 aa, unidentified
  source 1..521: note = Unknown
  REGION 1..521: note = tr|S5UBW7|S5UBW7_9BACT Tryptophan halogenase; OS = uncultured bacterium esnapd4 OX=1366610 PE=4 SV=1
MDNRKVVIVGGGTAGWMTASYLRTAFGAGVDITLIESDKVNTVGVGEATFSDIRHFFQFLGLEEHDWMPACNATYKLAVRFENWRRPGHHFYHPFEQMRSVNGFPLADWWLQNGPTDRFDRDCFVMAAMCDEERNPRHLDGRLIGQGFSEDAEEFAGLTMSEHQGKTQFPYAYHFEAALLAKFLTKFSVDRGVKHLVGNVEDVVLNQQGDIDHVVTVEHGALHGDLFIDCTGFRGLLINKALQEPFISYSDVLPNDSAVALQVPQDMEKRGIRPCTTATAQDAGWIWTIPLYGRIGTGYVYARDYLEPEQAERVLREFVGPAAAEVEANHIRMRIGRTRNSWTRNCVAIGLSSGFVEPLESTGIFFIHHAIEQLVKYFPGPGWQPTMRTMYNDAIRHVMDGVREFLCLHYLAAARDDTQYWKDTKTRELPDGLAERLERWQVQLPDSENVFPYYHGLPPYSYMCILLGMGGIDLKPSAALALADDTAALKEFQYIRDRASELVEALPTQFDYFTHMRLGAR

SEQ ID NO: 89777 - protein, 236 aa, Xanthomonas oryzae
  REGION 1..236: note = tr|A0A5C2EMT8|A0A5C2EMT8_9XANT Tryptophan halogenase; OS = Xanthomonas oryzae pv. oryzicola OX=129394; GN = XOCgx_0626 PE=4 SV=1
MSDTLPSDPQQRAVRRVVIAGGGTAGWMAAAAISKLLGRHLQITLVESDEIGTVGVGKATIPSLVTFHRLLEIDEAVFMATTQATIKLGIAFEHWRDVDRHYIHSFGHAGTHHGSAGFQHFWLKGQQRGVARDFGDYCLELRAAQEGRFAHLPNGGMNDAYHLDAGLYARFLRRFSEGFGVTRIEGRIGQVETDAESGFFTALTLQDGTRVAGDLFLRLYRLGRPADRQDAGRGQR

SEQ ID NO: 89778 - protein, 520 aa, unidentified
  source 1..520: note = Rhodanobacteraceae bacterium
  REGION 1..520: note = tr|A0A522RMN2|A0A522RMN2_9GAMM Tryptophan 7-halogenase OS=Rhodanobacteraceae bacterium OX=2052182; GN = EPN36_16095 PE=4 SV=1
MNEFAIRRVVIVGGGTAGWMAAALLARGLGRACEIRLIESAEIGTVGVGEATIPQIQHINAFLGIDENDLMRFTHGTYKLGVQLNDWGRVGDSYIHAFGDVGLPLGLLPFHHYWLRSRAQGDAHSLWSYSLNAAAAAANRFAKLDKVSDTPLGGIRYAYQFDAARYARYLRERIPEGAVTRIEGKVVEVKLRGEDGFIESLRLESGEIVAGDLFIDCSGFRGLLIEGALKTGYENWQHWLPCDRAIAVASERTTPMRPYTQAFARTAGWQWRIALQHRTGNGHVYCSRFISDDEAAAQLLANLGSEPLEDPRPLRFVTGMRKLSWNRNCLALGLAAGFMEPLESTSIHLVQSGVARFLGMFPDRHCDPLLVDTYNRQTRFEYERVRDFLILHYKATERDDTPFWRQCAAMDVPDALEQRIELFRRTGLIFREADELFTETGWLQVMLGQRIEPERHHPLADELDESRLQGFLSDIRTLVNRTAARLPSHDEFVARVGRLPQASATGLPPMPRHVHERGVS

SEQ ID NO: 89779 - protein, 505 aa, Xanthomonas oryzae; identical to SEQ ID NO: 84193
  REGION 1..505: note = tr|A0A5C2EVQ3|A0A5C2EVQ3_9XANT Tryptophan halogenase; OS = Xanthomonas oryzae pv. oryzicola OX=129394; GN = XOCgx_3523 PE=4 SV=1

SEQ ID NO: 89780 - protein, 219 aa, Streptomyces spectabilis
  REGION 1..219: note = tr|V9XQZ7|V9XQZ7_STRST Tryptophan 6-halogenase (Fragment) OS=Streptomyces spectabilis OX=68270 PE=4 SV=1
GGGTAGWMSACYLGKALGPQVNITLLEAPAIPRIGVGEATIPNLHKVFFDFLGLAEEEWMRECNASFKAGIRFINWRTPGAGESAARPAADGRGDHFDHLFGLLPDHENLPLSHYWTHRRASGATDESFDRACYVQPPVLDHNLAPRHLDGTRWTNYAWHFDANLVADYLRRFATGKLGVTHVKDRYTHAEMDHRGFVTAINTETGNRLEADLFVDCSG

SEQ ID NO: 89781 - protein, 204 aa, Xanthomonas oryzae
  REGION 1..204: note = tr|A0A5C2ERQ3|A0A5C2ERQ3_9XANT Tryptophan halogenase; OS = Xanthomonas oryzae pv. oryzicola OX=129394; GN = XOCgx_0627 PE=4 SV=1
MFAASALAVQSEAVGPPVTSTRSRADQAGWMWRIPLQHRVGSGIVYSSRYMDQDSARAVLERNLTGRALTEPRPLRVTPNQRHRVWKKNCVALGLASGFLEPLESTNIHLIQRGIIGLLQTFPQVINAVDIAEYNRQAAQEITHIRDFVILITTPPIAATRRSGATARQWTSPIRCAIGWSGSARAGGSSIRPTGRLPRTRGCR

SEQ ID NO: 89782 - protein, 516 aa, Pseudoalteromonas sp.
  REGION 1..516: note = tr|A0A5B0TXM6|A0A5B0TXM6_9GAMM Tryptophan 7-halogenase OS=Pseudoalteromonas sp. FUC4 OX=2511201; GN = EU510_02365 PE=4 SV=1
MTKPITKIVVLGGGTAGWLSAGLLAAEHPHLSVTLVESANVPILGVGEGTWPSMRNTLQRIGIKEIDFITQCDASFKQGSKFINWRNLNEGENYYHPFMNPQGYEHTNLHASWQRIAPDQKFADVVNMQSFVCQAALAPKQLQTPEYAAVTNYGYHLDAGKFAEFLKNHCVKSLNVIHITDDVTEVINDEHGYIAALKTNNNGDITGDLFIDCSGSRARLIGDHLNSEFITQDHILFNNSAVAAQIPNAHINQPIASATLSTAQSNGWIWDIALPTRRGTGYVFSSKYQSDESATNTLKSYIAKSTSEQQAEQLTYRVLKFSPGYRQKFWIKNCVAVGMSAGFLEPLEASALAMVELSISMISEQLPQNRTHMSQLETRFNDRFSTRWQRVIEFLKLHYVLSERDDTPYWQDISNLNTAPERLQNLLKLWQFQPPSRFDFIENEEMFSSSSYQYVLYGMGFNTQTISAQNTFNDPLAGDYYYQQNREKIAQCLNGLPSNRALLNHLLSNNGQPHND

SEQ ID NO: 89783 - protein, 508 aa, Pseudoalteromonas sp.
  REGION 1..508: note = tr|A0A5B0TKW0|A0A5B0TKW0_9GAMM Tryptophan 7-halogenase OS=Pseudoalteromonas sp. FUC4 OX=2511201; GN = EU510_16955 PE=4 SV=1
MNKAIKTVAVVGGGTAGWLSAAIIASYHQGKNGDGLKVMLVESSDIPTIGVGEGTWPTMKNTLQQIGLREVDVFKGCNATFKQGGKFVNWTHGHNDFYYHPFTVPLGYGRIDLAPYLDNVEDFAQQTNFQHDICEASLAPRGIAQGEYQGNCNYAYHLDAGAFAEMLKQHCKSKLGVEHIIGTVDQVKLDDDGAINELTLKDQTRTINADLFIDCTGFSSLLLGQALNVPFKKMDHVLFNDSALAMQVPYDENDDSLASHTIATAQNAGWIWDIGLTHRRGVGHVYSSKFLSDKEAEQNLRNYLGDAANGLTARKISFESGYREKFWHKNCVAIGMSAGFVEPLEATAIMLVEISARFVAEHMPADTQVMPIVAKRFNEQMDYRWQRIIDFLKLHYMLTKRPEPYWQAHVQPDTIPQTLQEDLLLWGSRGPLIQDFHGALELFPAASYQYVLYGMGFKPDFTKQAYLYSQDAQAKQIIERNSQLTQQMLQTLPPHRAYIEQWLAANPV

SEQ ID NO: 89784 - protein, 497 aa, Pseudoalteromonas sp.
  REGION 1..497: note = tr|A0A5B0TZR9|A0A5B0TZR9_9GAMM Tryptophan 7-halogenase OS=Pseudoalteromonas sp. FUC4 OX=2511201; GN = EU510_04980 PE=4 SV=1
MKPIKHVIIAGGGTAGWIAAALLNKVLGKVIKITLIESSTIGTIGVGEATIPPIIQLNNALGINEQDFINATNASIKLGIEFENWKTPSHSYMHAFGSFGKDFPFCDFYNFWVKGKITGCEDSLWDFSLNYQAAKRHKFAPLNTIPNTQLPGLSYAYHFDATLYAEFLKKLATSSGVEHIDAKIEQVEQCPLSGNIKSLNLDNTQQINGDLFIDATGQRALLIEQTLNTGFVDWSHYLPCDSAVAVQSQGTDSLKPYTRSIAHSAGWQWQIPLQNRVGNGLVYCSRYLSDDAATQLLLNNLPADPITASRVIKFKTGRRLKQWHKNVVSVGLASGFLEPLESTSIHLIQSAVTRLIKLFPHNGISDALVAEFNKQSVIEIEHIRDFIILHYKLTEREDSVFWRQCKQMEIPDSLAHKLNLFKHTGKVVRENDELFAEVAWQQVFIGQGLIPDDYNSIVDSLSSEQLNDLFFTLKTLITSTVEQLPTHKDFLAKIKKA

SEQ ID NO: 89785 - protein, 498 aa, Duganella sp.
  REGION 1..498: note = tr|A0A0Q7VSZ3|A0A0Q7VSZ3_9BURK Tryptophan halogenase; OS = Duganella sp. Root1480D1 OX=1736471 GN=ASD58_12310 PE=4; SV = 1
MSGKPIRKIVIVGGGTAGWMTAAPLALKLGKSCEIALVESPEIGTVGVGEATLPTIRYYNQALGIDNADFVRKTQATFKLGIEFKDWGHIGNRFFHGFGDFGPAIENRSPVMYWLRLASVYKDMPSYEEWSTATVMARANRFMEPYGDQPAATNAFSYAYHFDASLYAAFLRGYAMERGVQRAEGMINEVEQHPETGFITALKLKDGRRIEGDLFIDCSGFRGLLIEGVYQTGYDDWSAMLPCNSAQAVPCEKVEPLTPYTTSTARSAGWTWRIPLQHRTGNGHVYCNGFTTDEEAGRVLLDGLDGRALDEPRQLRFTTGRRRKSWVKNCVAIGLSSGFLEPLESTSINIIENSVGWLLEFFPDCDFSPELANEFNRLVSQRYEYVRDFIILHYKATRRDDSEFWRYCASMAIPDTLRHQIELFQATGRVAIYDADGFGVASHLSIMMGLGIMPQAYDPLVDLFDLARMKDHFARVHDTIRQAVDAMPQHGDYIAKMR

SEQ ID NO: 89786 - protein, 506 aa, unidentified
  source 1..506: note = Sphingomonadales bacterium
  REGION 1..506: note = tr|A0A1B6Z9I4|A0A1B6Z9I4_9SPHN Tryptophan halogenase; OS = Sphingomonadales bacterium EhC05 OX=1849171; GN = A8B75_12435 PE=4 SV=1
MTVSSIQHVVIVGGGTAGWLSACLLAAKLPSLSITLVEAPDIPTIGVGEGSWPTLRETLSDIGISEAEFLLECDASFKQGSRFDGWVDGSEEDSYLHPFTAPPPEDMRGFLSAWQEKDGDNCFAAAMTPQAQVCKNHLAPRQKSMPDYAGALNYGYHLDAGKFVTLLTKHGMEHLDVVRVADQVTDVTIGSNGDIEALQLRDNPALTGDFFLDCTGHAAALIGRLCENNWIDRSDVSFNDRALAVQLPVSSNSAIASQTIGTAHEAGWLWDIALPTRRGIGCVYSSRFMDDERAEQVLKGYLGQQFPDANLAEVSPRKLSFSTGHREKFWVRNCVSIGLSAGFIEPLEASAIVLIELSLKALADNFPASCATMDIHAARFNDLFRYKWDRIVDFLKLHYVLSNRMEPYWQAHRAPETIPARLSEQLSLWREQPPSTWDFPQIDEIFSAPSQQYVLYGMGFPLPMATHEDTDEASVSLLEINKRARTLAAALPSNRDYLAAIAAKEA

SEQ ID NO: 89787 - protein, 506 aa, Sphingobium lactosutens
  REGION 1..506: note = tr|T0HIG7|T0HIG7_9SPHN Tryptophan halogenase; OS = Sphingobium lactosutens DS20 OX=1331060 GN=RLDS_18685; PE = 4 SV=1
MVVGGGTAGWLTAGVIAARHRTRIGQDFSVTLVESPNTPIIGVGEGTWPTLRATLSRMGISETDLFRQCDAAFKQGAWFARWTDGSASDGYYHPLMLPQNFGQVNLAPHWLAQDGDESFCDAVCAQGRICDDGLAPKTIATAEYDALANYAYHLDAGKFAPFLQRHCCEKLGVRHVLADVEQVVLHDDGDIAAVRTTQAGLVEGDLFVDCTGFKALLIEGAMGVPFRDCNDVLFCDTALAMQVPYAAPDSPIASHTISTAQSAGWIWDIGIQTRRGVGHVFSSSHITDEQAERELRAYVGPASDGLTARKIKIRSGHRETFWKRNCVAVGLAAGFLEPLEASAIVLIELSAKIIAEQMPACREVMDIIASRFNATTHYRWGRIIDFLKLHYVLTQRTDSDFWRDNVRPETMPDRLRELLHLWRYQSPWFHDEFDRAEEVFPAASYQYVLYGMGFRTQIPPAALGRDAHLASRAMRENAAATARLRAGLPRHRDLIDRIVSHGLQPV

SEQ ID NO: 89788 - protein, 519 aa, unidentified
  source 1..519: note = Citromicrobium sp.
  REGION 1..519: note = tr|A0A2E2NFF4|A0A2E2NFF4_9SPHN Tryptophan halogenase; OS = Citromicrobium sp. OX=2024827 GN=CL802_05625 PE=4 SV=1
  VARIANT 10: note = Xaa can be any naturally occurring amino acid
  VARIANT 46: note = Xaa can be any naturally occurring amino acid
  VARIANT 50: note = Xaa can be any naturally occurring amino acid
  VARIANT 66: note = Xaa can be any naturally occurring amino acid
  VARIANT 72: note = Xaa can be any naturally occurring amino acid
  VARIANT 74..75: note = Xaa can be any naturally occurring amino acid
  VARIANT 78: note = Xaa can be any naturally occurring amino acid
  VARIANT 84: note = Xaa can be any naturally occurring amino acid
  VARIANT 123: note = Xaa can be any naturally occurring amino acid
  VARIANT 129: note = Xaa can be any naturally occurring amino acid
  VARIANT 153: note = Xaa can be any naturally occurring amino acid
  VARIANT 159: note = Xaa can be any naturally occurring amino acid
  VARIANT 178: note = Xaa can be any naturally occurring amino acid
  VARIANT 185: note = Xaa can be any naturally occurring amino acid
  VARIANT 200: note = Xaa can be any naturally occurring amino acid
  VARIANT 202..203: note = Xaa can be any naturally occurring amino acid
  VARIANT 209: note = Xaa can be any naturally occurring amino acid
  VARIANT 237: note = Xaa can be any naturally occurring amino acid
  VARIANT 244: note = Xaa can be any naturally occurring amino acid
  VARIANT 256: note = Xaa can be any naturally occurring amino acid
  VARIANT 258: note = Xaa can be any naturally occurring amino acid
  VARIANT 363: note = Xaa can be any naturally occurring amino acid
  VARIANT 366: note = Xaa can be any naturally occurring amino acid
  VARIANT 369..370: note = Xaa can be any naturally occurring amino acid
  VARIANT 394..395: note = Xaa can be any naturally occurring amino acid
  VARIANT 404: note = Xaa can be any naturally occurring amino acid
  VARIANT 424: note = Xaa can be any naturally occurring amino acid
  VARIANT 433: note = Xaa can be any naturally occurring amino acid
  VARIANT 460: note = Xaa can be any naturally occurring amino acid
  VARIANT 465: note = Xaa can be any naturally occurring amino acid
  VARIANT 486..487: note = Xaa can be any naturally occurring amino acid
  VARIANT 495: note = Xaa can be any naturally occurring amino acid
  VARIANT 508..509: note = Xaa can be any naturally occurring amino acid
MSVNRTSSSXTEPPAIVIVGGGTAGWMAAAALARLTPCAVTLVESXAIGXVGVGEATIPQIRLFNXALGIDXAXXLRXTKATFXLGIEFAGWSRAGASYMHAFGEIGAGAGLLPFHQLWLRGXELGMAXDLATYSLNERAARALKMQMWRGDXGHSVPXMPWAYHFDASLYAAYLRRXAEARGAXRIEGKVASVERDGAXGXXAAVALXDGRRIAGDFFIDCSGFRSLLLGQELATXFEDWSHXLPCDRAVAVPCXTXGEFTPYTRSTAHSAGWQWRIPLQHRVGNGLVYCSDYLSDDEAEAQLLANLDGAPQATPNRLRFTTGMRAQQWSHNCLALGLAAGFMEPLESTSIHLIQSSIARFXNMXPGXXPAPAMRAEFNRQAEFEWTRIRDFXXLHYWANGRXGEAFWDRCREMALPDTLTAXIEQFKASGXIHREHEELFTIPGWAQVLIGQEVMPQXLHPLXASTDPAALERMLGEIEAGIGXXVDAMPSHXEFLRAYCMPRATXXSPTPVSETAR

SEQ ID NO: 89789 - protein, 531 aa, Streptomyces sp.
  REGION 1..531: note = tr|A0A3A9W5H7|A0A3A9W5H7_9ACTN Tryptophan 7-halogenase OS=Streptomyces sp. AZ1-7 OX=2419806; GN = D7319_16000 PE=4 SV=1
MDQRIKKIVILGGGTAGWMSAAYMARALGDTVRITVLEAPSIPRIGVGEATIPNLQRVFFDHLGLSEEEWMPECNAAYKVAVKFVNWRTPGEGQAAARTIDGWPDHFYHPFGLLPEHDGVPLSHYWVHNRHSGVTDEPFDYACFPGVALMDALKAPRDREGRPVTWYAWHFDAHLVADFLRRHATSKLGVVHVEDEMTEPRLDARGFVTALATKSGALLDADLFIDCSGFRGLLINKALREPFIDMNDHLLCNSAVAYALPHDDEAHGVEPYTSAIAMRAGWTWKIPMLGRFGTGYVYSDAFSTRDRATEDFCRLWGLDPDAYADKLNHVRFRVGRNRRAWVNNVVGIGLASCFLEPLESSGIYFIYAALYNLVKHFPDKNFDQVFTDRFNAEIEWMFDDTRDFIQAHFALAPRDDTPFWRANKELRLPDQIREKIAMYRAGLPINRPFSTEGEYYGNFDVEFRNFWTNGSYYSIFAGLGLVPDHPLPTLTHRQDSVEGAQYLFERVKEEQRELVASLPSNHAHLRRLHGK

SEQ ID NO: 89790 - protein, 505 aa, Xanthomonas campestris
  REGION 1..505: note = tr|A0A221LYM6|A0A221LYM6_XANCM Tryptophan halogenase; OS = Xanthomonas campestris pv. malvacearum OX=86040; GN = APY30_15130 PE=4 SV=1
MTQAQIRRVVIAGGGTAGWIAACALSHQFRNLLDITLVESEQIGTVGVGESTVPPIRTFHRFLQIDEQEFLRAVAGTFKLSISFEHWRRHGERYIHPFGITGQSTLVCAFHHLWLESQRRGMPGSFGDYCLETVASRVDRFALHGEPAVNYAYHLDAALYAKFLRARSEACGVKRVEGRIQQVTVQPHSGDVASLVLEDGQTIEGDLFIDCSGFRGLLIEQTLHTGYEDWSHWLPCDRVVAVQTEALGPPVPYTRAIAHEAGWRWHIPLQHRVGNGLVFSSKHLSDDQAHAKLLRDVAAPAVKEPWMVPFRTGRRLKAWNKNVVSLGLASGFIEPLESTSIHLTISAVVRLLALFPAEGIAPSQVQLFNDVSRAEMEHVRDFVTLHYHATQRDEPLWQQCRQMELPESLALRLRAWRERAHAWQGADELFRVDSWTHVLMGQGIAPEQHHPLTRAFSDHDLRRLLDGIAQLIQHAVQQMPSQQDFIERYCKAGEQVWGMRSPVPA

SEQ ID NO: 89791 - protein, 504 aa, Sphingomonas sp.
  REGION 1..504: note = tr|A0A4Q7SZP1|A0A4Q7SZP1_9SPHN Tryptophan halogenase; OS = Sphingomonas sp. BK036 OX=2512122 GN=EV283_2462 PE=4; SV = 1
MRKTRVVVVGGGTAGWMTAAALVRLLPVACSVHLVESADIGIVGVGEATLPHIRAFVDRLGLDEADFMRATHATFKLGIDFRDFGAIGDSYIHPFGSFGRPLDDVGFHHYWLRLAAAGRAGPIGDYSVAVAAAKRHRFAIPDGAPDDLAASFGYAYQFDATLFGPYLRHFAEAHGARRTEARIVSVDRDPLNGDVRALRLDSGEAVEGDLFVDCSGFRSLLLGDAMAEPWEDWSRWLPCDRAVAMPCTSPDGPIEPYTRATAKPAGWQWRIPLQHRVGNGYVYSSAHIADQAAADALVASVEGTPLADPRVLKFRAGRRRNSWVGNVVAIGLASGFLEPLESTSIYLAQMAITQLIELFPQNLRADGIAAADRTEFNRMVDMEYDRIRDFLILHYHATTRDDSDFWNHVRTMDVPVTLADKIELFRRAGRVTQYSEGLFLEPSWIAVYLGQGIMPQAWDQRADRPGLDGLDRAIASLRDHVAATATAMPDHGTFIARRNATIAA

SEQ ID NO: 89792 - protein, 521 aa, unidentified
  source 1..521: note = Xanthomonas nasturtii
  REGION 1..521: note = tr|A0A3E1KSJ4|A0A3E1KSJ4_9XANT Tryptophan 7-halogenase OS=Xanthomonas nasturtii OX=1843581; GN = DZD52_01620 PE=4 SV=1
MPDTTPLDPQQRPVRRVVIAGGGTAGWMAAAAMSKLLGRHLQITLVESDEIGTVGVGEATIPSLVTFHRLLEIDEAAFMAATQATIKLGIAFEHWRDVDRHYIHSFGHAGTDHWSAGFQHFWLKGQQRGVARDFGDYCLELRAAQEGRFAHLPNGGMNYAYHLDAGLYARFLRRFSEGFGVQRIEGRIGQVETDAESGFLTALTLQDGTRVEGDLFLDCTGFAGLLIGKTLSVGSDDWSRWLFADSALAVQTESVGPPVTYTRSRADQAGWMWRIPLQHRVGNGIVYSSRYMDQDSARAVLERNLTGRALTEPRPLRFTPNQRHRVWEKNCVALGLASGFLEPLESTNIHLIQRGIIRLLQTFPQVINAVDIAEYNRQAAEEITHIRDFVILHYHATDRRDTPFWRDCAAMDIPESLGHRVELFRQSGRVFHQANELFAENSWVQVMLGQGIVPQQHHPVADLMGDAELRHFLDNIRTRVETALGRLPAHADFLRHYCPAPPPPEPAARVPAAAAVATPAG

SEQ ID NO: 89793 - protein, 496 aa, Colwellia demingiae
  REGION 1..496: note = tr|A0A5C6QCR6|A0A5C6QCR6_9GAMM Tryptophan 7-halogenase OS=Colwellia demingiae OX=89401; GN = ESZ36_14755 PE=4 SV=1
MNSPIKKVVVLGGGTSGWISAALLKKILGSAIQLELVESDDIGTIGVGEATIPPIKHLNNVLGINEAEFLRETKATIKLGINFENWKSQGHSYLHSFGAAGKSLAFCHFHHLLKRANQLEDDSHLWQYDLNYLCAKAGKFAQIKSKDPIIELPYAYHFDAGLYAKFLRKFSEKLGVIRTEGLVEHVEQCPNSGHIKSLKLKNGQTVTGDLFIDCSGFRGLLIQEKLRTGYEDWSHLLQCDRAIAVPSERLEKTLPYTRSIAHAAGWQWRIPLQHRNGNGIVYSSSHCSEQQAMDTLMGNLDSKAIADPKVIKFQTGRRYKQWNKNVIAIGLSSGFLEPLESTSIHLVQSAVVRLAHLFPHQGIDSSLVDEFNKQSATEFEQIRDFLVLHYHATERTDSDFWQDMRHMKIPDSLAHKIEIFKQSGRLFREQNDLFTDSSWLQVMLGQGIVPQDYHPIANTMSDEKLAEMLRKVKEIKQAPIDKLPSHDEFLKIFCRQ

SEQ ID NO: 89794 - protein, 508 aa, Sphingomonas sp.
  REGION 1..508: note = tr|A0A4Q7T0G1|A0A4Q7T0G1_9SPHN Tryptophan halogenase; OS = Sphingomonas sp. BK036 OX=2512122 GN=EV283_2464 PE=4; SV = 1
MTDPNPGPIRKVVIVGGGTAGWMTAAAAARYLDDGQRQIILIESDAIGTVGVGEATIPPILGFNALIGVDEREFLRATGATYKLGIEFVGWDTGDDRYMHAFGGHGRDIQGLAFHQLWLKLRDRPGIGGIDAYAPSAVAAYLNRFGLPTGPQTAPLAYAYHFDAGLYAAFLRRRAEAGGVTRIEGRITRADRDPDTGHVRAVRLDDGRSVDGDLFIDCSGFRSLLLGDTMGVPFEDWSHWLPCDRAVAVPTEPTAPLLPYTRATARTAGWQWRIPLQHRTGNGHVYSSAYISDDEATAVLLANLDSRPTAEPRQIRFKAGRRTSMWKGNVIALGLAGGFLEPLESTSIHLIQTGISKLFALFPDRGFSDVERDEYNRLMGDAYTSVRDFIILHYHATRRDDSAFWRHVRTMPIPDSLTRKIALFRQKGRVFRYDDELFGISSWVQVLLGQNVIPAGYDPIVDALDADRVADAIRQIRAATIRSAQTLPNHADFVAHHGPFDRKNEFAK

SEQ ID NO: 89795 - protein, 546 aa, Duganella sp.
  REGION 1..546: note = tr|A0A0Q7WXH3|A0A0Q7WXH3_9BURK Tryptophan halogenase; OS = Duganella sp. Root1480D1 OX=1736471 GN=ASD58_27745 PE=4; SV = 1
MENLIKKVVILGGGTAGWMTASYLSKTFGANVAITLMEADTIPKIGVGEATVPNLQRAFFDFLGIPENEWMKECNASFKGAVKFVNWRKHPDAHGRNHFYHHFGLIPNCDNVPLSQYWTLRRHADPTYHEAMDYACYMQSSILDDKLSPRMLDGTRTMAYAWHFDANLVAAYLRKLAIGWGVQHVVDELENVEHHADGRIAALLSKRGERLEGDLFIDCSGFRGLLINKAMGEPFIDMKNHLFCDSAVAAQVPHDDAANGIEPYTSSIGMKHGWTWKIPMLGRFGSGYVYAGDFVSQDEATDEFLKLWNLNPNDVKLNHIRFRTGRNRRAWVKNCVSIGLASCFLEPLESTGIYFIYAAIYQLTKHFPDKSFNQTLIDRFNQEIETMFDDCRDFVQAHYFTTTRDDTPFWRANKNDIYLSDNIKHKLATYKAGLPVNMPITDEGNYYANFEAEFRNFWTNSSYYCIFAGMGVIPDAPMPQIRYKPQAIARADEMFSALRQHAAELKAKLPTCHDYLRHLHSKPDAMRNISEAPAPTLAMAADGTQG

SEQ ID NO: 89796 - protein, 494 aa, Duganella sp.
  REGION 1..494: note = tr|A0A0Q7VT97|A0A0Q7VT97_9BURK Uncharacterized protein OS=Duganella sp. Root1480D1 OX=1736471; GN = ASD58_12330 PE=4 SV=1
MKTAYKRIVVVGGGSAGWMASAAFATAFPASSVELVESEEIGIVGVGEATFPSIRHFHRLLGIDEAQFLRATNGTFKLGIEFRDWRELGERYFHTFGDIGALSGPRSLWGQHRRVGDAGLGPLDAQCLPSVMAREGRFMCAASEEEQQFNYAYHFDAVLYAAFLRKLAEGRGVRRTEGRIVHAPRRADGGISQLSLADGRVVEGDLFVDCSGFASLLLGRALEERFVDFGRWLPVDRAWACPSERSGPELAPATRCTALEAGWAWRIPLSNRSGHGHVFASRYIDEEKAREQLMQQLDGAPIAEPRLLRFEAGHRERFWVHNVVALGLSSGFLEPLESTSIFLVQSGLGRLIELLLPGERPAQEAVDAYNTGMRRQFERIRDFIILHYCLTARRDGQLWRDMASMELPETLAFKLHAWREAGALHQYDEEGFDATSWLAIHAGMGHWPQRSDPSLWDVPHEDVMRALCFRRDSIAASVAAMPTHEAYLNSVLSR

SEQ ID NO: 89797 - protein, 505 aa, Sphingomonas sp.
  REGION 1..505: note = tr|A0A1Y2QN84|A0A1Y2QN84_9SPHN Tryptophan halogenase; OS = Sphingomonas sp. IBVSS2 OX=1985172 GN=CAP40_00285 PE=4; SV = 1
MTAPAPIRRIVIVGGGTAGWMAAAALARLIPAGVSVTLVESEEIGTIGVGEATIPPIRNFNALLGLDEHDFLSRTQGTIKLGIEFVDWTREGHRYVHPFGEFGFDVEGVKFHQIWRKLHAEGRAREIDAYNVCALAMAAGRYQPPVADPGSILSRMAYAYQFDASLYARYLRDHAEARGVVRVEGKVARIPLRAEDGFIEAVVLEGDRRVEGELFVDCTGFRALLIERALGAGWESWAHWLQCDRAVAVPSASPGPEITPFTRSTAHRAGWQWRIPLQHRVGNGHVYCSADISDDAARETLLANLDGVPLRDPFILRFEAGRRKRAWHRNCVALGLSSGFLEPLESTSIHLIQSGIHRLMALLPDTGFSPVERDEYNRLTDVQMEQVRDFVILHYHANARREGDLWRRVREMAIPETLARKLALFRNRGRFFRTEDELFAESSWIAVLLGQGVIPVGWDPLADGLDEGKLALSFERFHEMFARAARAMPRHEDWLARNAPAGIPA

SEQ ID NO: 89798 - protein, 495 aa, Sphingomonas sp.
  REGION 1..495: note = tr|A0A4P7QX91|A0A4P7QX91_9SPHN Tryptophan 7-halogenase OS=Sphingomonas sp. PAMC26645 OX=2565555; GN = E5673_07435 PE=4 SV=1
MTDALRSVTIVGGGTAGWMAAVAFGRLLGPAGTRVTLIESDDIPTVGVGEATIPPIRTFHAMLGIDEDAFLRATGGSYKLGIRFEGWTRPGESYVHPFGQIGTDIAGVPFAAQWLRVRQAGAAEPLGAYSLEACAAEAGRFSRPIANGNSPLSRIGYAYHFDAGRYAAFLRVQAEAYGVVRHEGLVKRVERGPAGIAAVHLADGSRIAGDLFLDCSGFRALLIEGAMEAGWTDWSEWLPCDRAVAVASVADAAPLPLTRAIAERAGWRWRIPLQHRTGNGHVFSSRNMSEDEATATLLAGVEGETLAEPRVIRFATGHRNCFWVGNCIALGLAAGFMEPLESTSIHLVQSGLQHLLRMLPTGAPPAPAVVERYNRIMTAEYTRIRDFLVAHYHLNARAEPFWRDRAAAAIPEGLAEKLALFRAGGRIFREADELFNETSWLAVLTGQNAPVSGYDPICDGIPIETAANRLAQVERVVATSLTHMPSHAHALARLA

SEQ ID NO: 89799 - protein, 513 aa, Pseudoalteromonas rubra
  REGION 1..513: note = tr|U1KY18|U1KY18_9GAMM Tryptophan halogenase; OS = Pseudoalteromonas rubra DSM 6842 OX=1117318; GN = PRUB_01864 PE=4 SV=1
MQNAETKIKRIVIVGGGTAGWLAANHLAADASEDVSITLVESPDIPTIGVGEGTVPVIVDSLKKFGIRESDMFRLCDATFKNGIHFVGWNKPVNGQPHCYFHPFDDPNVNGVNLLPYWLHQLPEARARFDQSVSIQAHIALENKAPKLITNAEYERMINYAFHLDAGKFSALLSEHAIKNRQVNHVLDEVESVKLALDGSISGLQLKQGGLLEGDLFVDCSGFQSLLLGKALNTPFIDKSDVLFANHAVVTQVPYANEHEVPPYTISTAQQAGWIWDIGLQTRKGVGHVYSDQFTSHEQAHRDLSAYLGKPEDTVESRLIKMQVGYRAQAWVKNCIGIGLSQGFVEPLEATGLLVFDLAARMLSKRLPGERQEIPAIAQQFNQHMTHVWQSIVDFIKLHYCISNRDDSEFWRMNRLPETIPESLQHKLVLWRNDIPNEYDFVSSLDVFRLENHLYVLYGMNYPSQCNFPSPHKLSQQEAMLKLVAQQQQKAGAMLETHSNLVAKAARYGFQRI

SEQ ID NO: 89800 - protein, 501 aa, Mycobacterium europaeum
  REGION 1..501: note = tr|A0A1X1ULH7|A0A1X1ULH7_9MYCO Uncharacterized protein OS=Mycobacterium europaeum OX=761804; GN = AWC03_16005 PE=4 SV=1
MIESVLVVGGGSAGLLTALALKQHAPQLQVRVVRSKNIGVIGVGESTTPQLISLLFDYLKLPQKEFYSIVRPTWKMGIHFLWGPRESFDYGFQFQLDAFYTDLTRYNGFYCGDEFDSVNMNSALMAQGKAFEKHPSGQGPMITADTALHLFNPALVEALEKASVERGIELIDARITGVPVDEQGVQSVILEDGRTFSADLYVDASGFRSELLGRALGTPFVPYDSSLFCDRAIVGSWDRTDEFIYPYTVAETMEAGWCWQIDHENSINRGYVYSSQFLSDDQARDELLKKNPKATAWDHVIKFRSGRYEKGWVKNVFAIGNACGFVEPLEATSLMVSSSQIKAMVEMLVESHLEPTPSLQELYNTLFVDWWDGIKDFLSVHYRFNTRLDNEFWTACRNEVDVTAVQPLLDFYRENGPTGFLRHFVTSTIGQDNQFGLEGYLVMLVGQKVPYRDPHPPGQAEMATFQRHCAQNRARAMSGLTVAEALQYVHLPDWRWNSDSQ

SEQ ID NO: 89801 - protein, 513 aa, Sphingomonas sp.
  REGION 1..513: note = tr|A0A1Y2QHM5|A0A1Y2QHM5_9SPHN Tryptophan halogenase; OS = Sphingomonas sp. IBVSS2 OX=1985172 GN=CAP40_13655 PE=4; SV = 1
MNNPDALRKVCIVGGGTAGWIAAAVMAHHMKGRLFEIELVESDDIGTIGVGESTIPPFMELIAKLDIDEQDFVRQVQASFKLGIEFKDWFRKGESYFHPFGDVGQRVELSDFYQCWRKATLAGHDFPLQDFAPATVMAHAGRFMLPFKARNTPIAGASYALHVDAKRVAQFLRGHAEARGVKRTEGIVTDVALDARGFVSTLTLKDGRTIDADFFIDCSGFRALLIEKALGSGFTDWSNYLFCDRAIAAQTENVGPPRPYTLAEAQDAGWRWRIPLQHRTGNGHVYSSEFMSDEEATRILLDKVEGDVVAGPMVVPFRTGVREKIWHKNVLAIGLSSGFIEPLESTAIHLIYRGMDFFFRFLPDRHCDPALADEYNRRMVADYTEIRDFIVLHYCTTARDDTPFWRKCRDMEWPDSLKERVELFRSNGSLREGLDELFRSVSWFSVLEGMGIRPRTYHPLVDRIDEAMLYAGLEKAREQLGGFVRQLPTQQQFIDAHCRAEKVDLGRPVMAGA

SEQ ID NO: 89802 - protein, 500 aa, unidentified
  source 1..500: note = Citromicrobium sp.
  REGION 1..500: note = tr|A0A326GG48|A0A326GG48_9SPHN Tryptophan halogenase; OS = Citromicrobium sp. OX=2024827 GN=DI637_03535 PE=4 SV=1
MSRSYIPRKIVVAGGGTAGWMAACALARTMGSTIDLTLVESDMIGTIGVGESTIPPIVKFNEIVGIDEAEFMRETQATFKLGIEFENWRAEGEKYFHSFGATGRDHWSAGFQHFWLHAREQGYEHSYDEYCLELKAAYASKFAHLPDSRMNYAYQLDATRYAAFLRRKAEASGAKRVEGKIAHVHLHAASGDIASLELESGERLDGDLFIDCTGFRALLIEGALHVGYDDWTHFLPCDRAIAVQTESVRSAIPYTRAIAHDAGWQWRIPLQHRQGNGIVYCSRYLSDDEARERLLSSVEGETVSNPNALRFTTGARRKQWHRNCIAVGLSSGFMEPLESTSIHLIQRAVLRIIRMLPFGKISERDVDEFNDQQFVDMEQIRDFLILHYKATDRRDSAFWRHCAAMDIPDSLTRKMELFRETGRVFRRNEELFAENSWIQVMMGQGIMPQSYHPVATKLGPDELDRFLANQREFVARTVAGLPDHHAYIARYCGARDAEAA

SEQ ID NO: 89803 - protein, 498 aa, Sphingomonas sp.
  REGION 1..498: note = tr|A0A1Y2QRX7|A0A1Y2QRX7_9SPHN Tryptophan halogenase; OS = Sphingomonas sp. IBVSS2 OX=1985172 GN=CAP40_05615 PE=4; SV = 1
MQQIKRILIVGGGTAGWMTAALLGKLFQGLYEITLIESEEIGTVGVGEATIPAIKKYNELLELDENDFVRRTQGSFKLGIEFVDWAHKGDAYFHSFGVIGQDLGWLRCHQYWLKMRAMGRAADFSAYSINSAAARANKFMRADPKMAESPIGHIAHAFQFDAGLYAKFLRAYAEARGVRRREGKVADVTLGGEDGFVQSVTMEDGETIAADLFIDCSGFRGLIIEQAMKTGYEDWTHWLPCDRAIAVPCARTEPFTPYTRATARTAGWQWRIPLQHRTGNGHVYSSAHISDEEAEAQLLANLDGAQLAEPNKLRFTTGKRRQIWNRNCVALGLASGFLEPLESTSIHLIQAMVIRLVRLLPDRGFDPATIAEFNRQADFEYARIRDFIILHYKATSRDDTAFWRQCRDMEVPDTLQRKIDLFAANGRVFREDDELFTEESWIQVFLGQGVIPRGYDPLVDIKPEAQVEEYLGNIQRVIARCVGLMPDHAEFVAKTCAA

SEQ ID NO: 89804 - protein, 515 aa, Colwellia demingiae
  REGION 1..515: note = tr|A0A5C6QE42|A0A5C6QE42_9GAMM Tryptophan 7-halogenase OS=Colwellia demingiae OX=89401; GN = ESZ36_13175 PE=4 SV=1
MDKAIKKIVIVGGGSAGWITAGSLAAEHCVNAASSIEVVLIESPEVNSIGVGEGTWPSMRNTLEKIGIDEKEFLQQCDASFKQGSKFVGWTTGDDRDSYYHPFMTPDGYGHVDLHAAWQANHSEQAFADAVNIQSHVCQAGLAPKQLATPNYAAVTNYGYHLDAKKFASLLRKHCTSKLNVQHIVAHMDGIISADNGDISAISTKEHGHIDGDLFIDCTGSASLLLGKHFNIGFINKQHILFNDSALAVQVPYPDQATPINSATLSTAQSAGWIWDIGLQTRRGVGYTYSSKYMSDVEAEKSLRQYLVDSVGEEKANLLKPKKLIFEPGHREKFWHKNCVAIGMSAGFLEPLEASALAMVELSSTMISEELPVTRVHMDIIAKRFNDRFNYRWQRIIDFLKLHYILSKRTDSQYWRDNQQPESISKELQELIKLWQYQPPSRYDFVQNEEVFPSASYQYVLYGMGFKTEQRANPRKFEANPLAKKTIAETQNKIDRYLTGLPSNRELLDKLKVKQ

SEQ ID NO: 89805 - protein, 490 aa, Sphingomonas sp.
  REGION 1..490: note = tr|A0A4Q7T4I8|A0A4Q7T4I8_9SPHN Tryptophan halogenase; OS = Sphingomonas sp. BK036 OX=2512122 GN=EV283_2463 PE=4; SV = 1
MTARPPIRSIAVLGAGIVGLSAAIAFTRALPGLAVTVIETPDDPAALTDRLAGTLPSIADFHDRIGLRERDLLAAGATHRLGTRLSDWRADGVPFVLAHGERGGAIAPGTFHQHWLNARRSGKTAAFDAFSVPATLAAADRFVHPSDDPRSPISGFGYAWRLDPPRYRDLLRALARHIGIIPVPGVYAGVERGSDGHIATLLLADGRRVAADLYLDCSGPAAPLRSALDTQWDDWRRWLPVDRLLLGAASAQIATPTDDRIAVPAGWRFVQPLRDRTLVGLGYAADQTSDSSARRILPAGDTVVPLALGVRAEPWRHNVLALGDAAAVLDPLADANLHLVHSTILRAIDLLPGRDCAPTELAEFNQRSHRQAARVRDFQAAHYLPTGRTRGPFWKRVARLPRPDSLAHTLEQFAHRGRLPFYEDESFDKDDWHGLLLGIGMIPRIADPIASASPSEAIAATLQQLADATAALPARLPPYPAYLARLERGR

SEQ ID NO: 89806 - protein, 521 aa, Xanthomonas gardneri; identical to SEQ ID NO: 85591
  REGION 1..521: note = tr|A0A1L5XY61|A0A1L5XY61_9XANT Tryptophan halogenase; OS = Xanthomonas gardneri OX=90270 GN=BI317_02405 PE=4 SV=1

SEQ ID NO: 89807 - protein, 506 aa, Sphingomonas sp.
  REGION 1..506: note = tr|A0A4Q7SH15|A0A4Q7SH15_9SPHN Tryptophan halogenase; OS = Sphingomonas sp. BK036 OX=2512122 GN=EV283_3281 PE=4; SV = 1
MIVGGGTAGWMAATLLARRLDRQSVTITVVESSDIRTVGVGEATVPGIRDFFREIGVTEQDVMAAAQGTVKLGIEFVDWKREGERFFHPFGLYGMRSRGVAFHHYWRKLNAAGRPTPLSEFCLATALAERNLFMRPTDSPVHDLLFFDWAVHFDAGLFAKFLAKKAGEWGVKHIDATITDVLVDQSTGFISSVDTECGKTIAGDFFIDCSGFRSLLLGDALGVPYEDWTNLLPCDRAVAMPCERAEPLTPYTRSTALTAGWQWRIPLQHRVGNGYVYASRHISDDEAVATLKGRLEGEALAEPNMIRFRTGRRTAFWQGNCVALGLAAGFMEPLESTSITLIQTGLEKLLALLPDRSFDPALANEYNRTTGLEYARIRDFLVLHYFANGRQGEPMWDRCRGTALPEQLERKLKLFKARGHLVRYEWESFQDPSWLSMYAGFGIDAAAHDPLADHFSLSDLEAAFERMKGSIRDAVALAEPHETFLKSFAPASAPPASRSMNFAANG

SEQ ID NO: 89808 - protein, 510 aa, Sphingomonas sp.
  REGION 1..510: note = tr|A0A4P7R109|A0A4P7R109_9SPHN Tryptophan 7-halogenase OS=Sphingomonas sp. PAMC26645 OX=2565555; GN = E5673_11135 PE=4 SV=1
MIDGLGQHIVILGGGTAGWMTACLIAHRWRDRGVRVTLVESPEIGIVGVGEGSTPQLKHFFDTLGIAEAEWMPACDATYKLGIGFEGWSDREGYERYFHPFPTALDGHTAPQFFYNTRARRTGRDVDAHPDQFLLPARLAAANSAPQPAANFPFEVSYGYHFDAYKVGAFLAAHATETLGVVHLQRRIVSVETASTGDITALIDTDGERIAGDFFVDASGFRSTIFSALEMPFVSYANALFNDRAVVMPTAHAPGAPIPSQTRATALSAGWAWHIPLTSRIGNGYVYSSRHLTETQAEAELRAHIGAEAGEARHLRMRVGRVRDSWSHNALAVGLAQGFLEPLEATALHLVIATVEAFLDMVDQDGAADAVRTAFNTRIAARYDGVRDYIVAHYRLNQRHDDPTGYWAEARGVDALSGDLKMLMSTWFTGADMVAAIDRAGLGRYYSAISWHCLFAGYGTFPDAARLIPPGADIDPIDLPKIDDFLTRCASNFGSHASRLRAAADHKDHV

SEQ ID NO: 89809 - protein, 503 aa, Sphingomonas sp.
  REGION 1..503: note = tr|A0A4Q7T389|A0A4Q7T389_9SPHN Tryptophan halogenase; OS = Sphingomonas sp. BK036 OX=2512122 GN=EV283_1433 PE=4; SV = 1
MTEHPIRRVVIAGGGTAGWMAAAAIARTMGSTIDLTLVESDAIGTVGVGESTIPPMITFNRLLGINEAEFMRETQATFKLGILFDDWKDRGESYFHSFGITGKDHWSAGFQHFWLHGLTKGHEQPYDDYCLELRAALQGKFAHLPDDRMNYAYQLDSTRYARFLRKMAEADGTRRIEGKIAQVELNGESGDIAALVLESGARIEGDLFLDCTGFRALLIEGALHAGFDDWTHYLPCDSAIAIQTESVRPALPYTRAMAHDAGWQWRIPLQHRTGNGLVYCSRYLDRDAALDRLLGNIEGKTLTEPNMIRFVTGARRQQWHRNCIAIGLSGGFMEPLESTSIHLIQRAVLRLLRLFPAGAVSPRDVAEFNDQQHTDMLQIRDFLILHYKATNRRDSAFWRQCATMPIPESLEQKIELFRETGRVFRKNEELFAENSWVQVMLGQGIVPQSYHPIATKLRDEELARLLAGLRDGTNTTVAGLPEHAAYVARYCGAAPARPSTVAA

SEQ ID NO: 89810 - protein, 532 aa, Sphingomonas sp.
  REGION 1..532: note = tr|A0A4Q7T8G4|A0A4Q7T8G4_9SPHN Tryptophan halogenase; OS = Sphingomonas sp. BK036 OX=2512122 GN=EV283_0305 PE=4; SV = 1
MPIAGRLMPPRACSAVAAPDGFEAGTQTMANHPLRIVIAGGGTAGWMAAATFARFLETGYEIDLIESDAIGTVGVGEATIPQIHLFNDALGLDEDAFLRATGGTFKLGIEFVDWFKPGHRYMHAFGDVGRDVGLLPFHQYWLRARSLGLAGDLGAYSLNTHAAMAGRMQRGPARTSRALASMPYAYHFDAALYARYLRRYAETRGVNRIEGKIVRVTRDGESGDVSGLVLENGTTVAADLYIDCTGFRGLLIEEALRTGYEDWTHWLPCDRAIAVPSARSEAVTPYTRSTAHAAGWQWRIPLQHRTGNGVVFSSAHMSEDEATATLLSGLDTPAMADPRTITFRTGRRKRMWNHNVVALGLAAGFMEPLESTSIHLIQSAIARLLKLLPGRVIAEADRTEFNRQSDFEYERIRDFIILHYKATTRDDTPFWRQCRDMAVPDTLAAKIALWRGNGHIVREHEELFTEVGWLQVLAGQGIVPDGHHPLADAISTADLGEFMDTIDKLNAREANQMQDHAAFVAQHCAAAPSLAA

SEQ ID NO: 89811 - protein, 502 aa, unidentified
  source 1..502: note = Thalassotalea sp.
  REGION 1..502: note = tr|A0A1Q6CI15|A0A1Q6CI15_9GAMM Tryptophan halogenase; OS = Thalassotalea sp. PP2-459 OX=1742724 GN=BI291_14310; PE = 4 SV=1
MSEPIKKVVIVGGGTAGWMSAASLGRFLEGKNVDVTIIESSALETVGVGEATIPNIVSYNKNLGINELDLIKATQATFKLGIQFENWHQQGENFFHPFSDYGMPINNIEFHQYINQANHQGAALNIEDYCFPAVLAKKGKFAQPHPNPPSPLADYQYAFHFDAGLYANFLKDFAMNLGVKHIDALINSVELNQNNGFISAVTLDNGEIVEGDLFIDCSGFKGLLIEEALQTGYEDWSQWLICDRAMAVQTELVGEPTPYTRSIAKSSGWQWRIPLQHRMGNGYIYASQFQTDDDAERTLLDSVQGATINQVRKFRFTPGRRKQVWNKNCVAIGLSSGFLEPLESTSISLIQSVIDKLLTFFPDQSFNQHDIDEVNRLHNDEVEHIRDFLILHYKATKRDDSAFWRHCQKMDIPETLAHKIAVFESRGHIIMRESESFEAASWLTMYNAFDIKQKRFDERIANMPFDVMSKNLAQMKQSIENAAQQAMQHQDFINTHCRANPE

SEQ ID NO: 89812 - protein, 500 aa, Sphingobium xenophagum
  REGION 1..500: note = tr|A0A401IWT2|A0A401IWT2_SPHXE Tryptophan halogenase; OS = Sphingobium xenophagum OX=121428 GN=MBESOW_P0103 PE=4; SV = 1
MFMNSGHLRDIVILGGGAAGWIAAALLAKKINCQQTRITLVESEQIGTIGVGEATVPILAQYNAMVGIDEFDFVRSTQGTFKLGIEFCDWGTAGNRHFHAFSDFGHPVEGISTHHYWLRLRQSGEDYPIEDYSFAYAVGKNNNFAPHNERYHYAYHFDAGLYARYLRDVATELGVQRIEGKMTHFDLDPESGNISAIHLADGQTIPGDFFLDCTGFASELLGKALDTPFVDWSHWLLCNSAIAVPSPRIDTPMPFTRSTAHAGGWRWTIPLQHRNGNGMVYSSDYWSDDAARDDLLGSISGEPLAEPRLFRFTSGHRKQFWNRNCVGIGFASSFLEPLESTGIQLIVMGVLKLLRYFPQRVIDPVLRNEYNRLSTIEIERIRDFIIAHYYLSRRPEPLWAACRNIEIPDSLRHKIEIWKASGQIPLGDLESYMEPSWVAILLGNNLVPSRYSVSADKHPLDQIRNGMKLRREEIVRSARAVTSHRDFIDGHCKAAQLEFD

SEQ ID NO: 89813 - protein, 516 aa, Streptomyces olivochromogenes
  REGION 1..516: note = tr|A0A250VCG6|A0A250VCG6_STROL Tryptophan halogenase; OS = Streptomyces olivochromogenes OX=1963 GN=SO3561_03296; PE = 4 SV=1
MLNRIVIVGGGTAGWMTASYFKAAFGDRIDITLVESGNVGTVGVGEATFSDIRHFFDFLGLKEEDWMPACNATYKLAVRFENWREKGHHFYHPFEQMRSVNGFPLTDWWLRGGPTDRFDKDCFVMPSVIDAGLSPRYMDGSLIDQPFVEGADEMQGLTMSEHQGKTQFPYAYQFEAALLAKYLTAYSVERGVKHITDDVQRVNLDERGWISGVTTAEHGDITGDLFVDCTGFRGLLLNKALEVPFLSYQDTLPNDSAVALQVPLDMERRGVLPCTTATAQDAGWIWTIPLMSRIGTGYVYAKDYLSPEEAERTLREFVGPAAADVPANHIRMRIGRSENSWVNNCVAIGLSSGFVEPLESTGIFFIHHAIEQLAKNFPGEDWNPVHRDLYNDAISHVMDGVREFLVLHYVAAKRDDTQYWRDTKTRRIPDGLAERIEKWRTQLPDSETVFPYYHGLPPYSYMCILLGMGGIELKPSPALALADPDAAEREFLDIQEKTRRLTESLPKAYDYFARLH

SEQ ID NO: 89814 - protein, 497 aa, unidentified
  source 1..497: note = Thalassotalea sp.
  REGION 1..497: note = tr|A0A1Q6CHY9|A0A1Q6CHY9_9GAMM Tryptophan halogenase; OS = Thalassotalea sp. PP2-459 OX=1742724 GN=BI291_14030; PE = 4 SV=1
MKNKVNKVVILGGGTAGWMSAALLVKTFGNKLDITLIESDQIGTIGVGEATIPPIMHFNEELGINPKAFIKATKATIKLGIEFENWGTVGNRYMHAFGDIGKSFPLCDFNHFFTKAHYAGLNYDFWDFSLNYQVAKRNAFALLDKIPGLNLNGLAHAYHFDAGLYAKFLAQYCQAKGVKRIEGKVSQVEQCEKTGNILSLTLENSTQVAGDLFIDCSGMKGLLIEQRLNTGFEDWSHWLPADSAIAVPSESVSPIKPFTQSIAHEAGWQWRIPLQHRTGNGFVYSSKYLTDEQAQQCLLANLDGKALAEPKVIKFKTGRRLKQWHKNVVAIGLSSGFLEPLESTSIHMIQSAIVRLVKLFPHQGIDEVMIEEFNRQSTLEYERIRDFIILHYKLNQRDDSQFWRDCQRAEVPQSLKHKMALFKSSGLVFRENDELFTKIAWQQVFLGQGLIPDDYHRSADQLNTDELNEMLYSIKQIMTKTAEKVPPHHQFIDACIR

SEQ ID NO: 89815 - protein, 496 aa, Sphingobium lactosutens
  REGION 1..496: note = tr|T0HL17|T0HL17_9SPHN Uncharacterized protein; OS = Sphingobium lactosutens DS20 OX=1331060 GN=RLDS_18815; PE = 4 SV=1
MGHNQVRDIVIVGGGTAAWMAAAVLATGLPQGRGTITLVESSAIGTVGVGEATIPPILQLNRLLQLDEGELIRRTQATYKLGIEFRDWRELGASYFHPFGAYGADLGGVHFHHYWLKTQQGALSDYSLPAAAAYAGRFAAPVEDPRNVLSRLSYALHFDATLYAAYLRDVATGRGVTALDGRIVDVALDGESGWVRSILLEDGREIAGDLFIDCSGFRGLLIEEALNTGYENWSHWLPMDRALAVPSQCSGPPVPFTRSTAQDAGWIWRIPLQHRTGNGHVYCSSFVDDQQAADRLLDQLDAPAIADPRPLRFQTGRRPKAWNRNVVALGLACGFVEPLESTSIHLIQQGVTTLLSLFPRDGINKAEVAEYNRLMQRDFERVRDFVILHYKQTLRRDTDFWREMAAMPVPDSLSHRMELFAANGRVMIEPGELFTETSWVAVMLGQGLTPNGYDLQADLLPEAEVREKLDRMRTTIARGVQALPTHKSYIDRLCAG

SEQ ID NO: 89816 - protein, 506 aa, Xanthomonas gardneri; identical to SEQ ID NO: 84875
  REGION 1..506: note = tr|A0A1L5XXR3|A0A1L5XXR3_9XANT Tryptophan halogenase; OS = Xanthomonas gardneri OX=90270 GN=BI317_01410 PE=4 SV=1

SEQ ID NO: 89817 - protein, 505 aa, Pseudoalteromonas rubra
  REGION 1..505: note = tr|U1LNM7|U1LNM7_9GAMM Tryptophan halogenase; OS = Pseudoalteromonas rubra DSM 6842 OX=1117318; GN = PRUB_18262 PE=4 SV=1
MQKKGVRELIILGGGTAGWMTAAMLSRIFRDKLSITLVESDEIATIGVGEASIPPLVDFNRGLGLDEREFITRTQATIKLGIEFTGWGDSNSQYMHAFGNIGKRFPFCDFHHVWQHAQQLAQQHGTAKSALWDYSLNYRAAKAGRFAHLPVIPNTRLPGLEYAYHFDAGLYAKLLKEVAQKQGVIRKEGKVTEVKLSQQTGEVSELVLHDGARLSADMFIDCSGLNALLIDKTLNVGFDDWSHWLACDSAFAIPTEHGDGPLLPYTQSIAHGAGWQWRIPLQHRVGNGLVFSSRFWDEAQARKALLSNLEGAPLDEPRLIRFKTGMRRKQWHKNVFAIGLSSGFLEPLESTSIHLIQSAILRLIRHFPASNQADTQRAACNSEFSHEMRQVRDFIILHYKAIKRNDTAFWRWCKDMEVPESLEQTLALFKDSGAVLRDEGNLFSDLAWQQVMMGQGIEPDAPHPLAAQFSHEQAKGLLESLNTLLQHTVDQLPTHQAFLKNMTQA

SEQ ID NO: 89818 - protein, 521 aa, Xanthomonas campestris; identical to SEQ ID NO: 83608
  REGION 1..521: note = tr|A0A221MJH4|A0A221MJH4_XANCM Tryptophan halogenase; OS = Xanthomonas campestris pv. malvacearum OX=86040; GN = APY30_01615 PE=4 SV=1

SEQ ID NO: 89819 - protein, 505 aa, Xanthomonas translucens
  REGION 1..505: note = tr|A0A0G3LSY9|A0A0G3LSY9_XANCT Tryptophan halogenase; OS = Xanthomonas translucens pv. undulosa OX=487909; GN = NZ30_19470 PE=4 SV=1
MIAAPLRNLVVVGGGTAGWMAAAALARVLGPDYRITLIESEQIGIVGVGEATVPHIKAFNNLLGINEAEFVRQTQGSFKLGIEFVDWQRPGTTYIHGFGTEIGHSLGLLPFQQYWFKQALAGKAKPLGAYTLNTVAARRGKFMTSASDAPPNSPLGNIAYAYHFDASLYAAFLRRFSEQRGVTRREGIVEQVQLHPESGHVLSVRLASGDTIAGDLFIDCSGFRGLLIEQALHTGYHDFTHWLPCDRALAVPCAKVGPPTPYTRATARAAGWQWRIPLQHRTGNGYVYSSAHISDDEAAATLLANLDGAALADPRPLRFVTGRRKQVWNRNVVALGLASGFMEPLESTSIHLIQSGISKLLELFPREGISPVLVQRYNDRIAFEFDRIRDFLVLHYTATERDDSDFWRQCRAMAITPELQATLDLFGDSGRFYRNGDEMFAEISWVQVMVGQGILPRAYHPLVDQVPAADIERFVASIEQTIGHCVDAMPPHQAFIDRYCAAAPR

SEQ ID NO: 89820 - protein, 531 aa, Shewanella sp.
  REGION 1..531: note = tr|A0A2M7LYF8|A0A2M7LYF8_9GAMM Tryptophan halogenase; OS = Shewanella sp. CG_4_10_14_3_um_filter_42_91 OX=1975535; GN = COZ42_03440 PE=4 SV=1
MHKPITQIVIVGGGTAGWITAGLLAAEHNVDKGVLAHSPKLNITLIESPDVATIGVGEGTWPSMRSTLSKIGIDENQFIRCCDASFKQGSRFIDWRNDPSKDADSKTPTQSNSYLHPFSLPHGNQELDLCPFWLPHADQVSFAEAVSSQAVLTQLGLAPKTIASAQYHFQNNYGYHLNAGKFSQMLSEHCTQKLGVTHIRDHVSHIINHDNGDIAKVITAAHGEIHGQLFIDCTGTKSLLLGEHLQVPFLSQKSVLFNDSALAVQVPYEQADSPIASCTHSTAKQNGWIWDIGLPTRKGVGYVYSSSHTNDADAEQSLLTYLGLDSATADKLTPRKLSFNPGYRAKCWQNNCIAIGMAAGFIEPLEASALALIEWTAATLAQQLPSNRQVMDTIAARVNQRYQLHWQQIIDFLKLHYVISQREVDRYWRDHRDKQSIPDSLQAQLELWRYQVPNQHDISYKEALFPAASFQYVLYGMGFNTQLPSHVKPSMQQQAQQLFNDNQQRTQVLSKSLLSNRDLLAKVVQYGFAKL

SEQ ID NO: 89821 - protein, 506 aa, Xanthomonas campestris
  REGION 1..506: note = tr|A0A221MVC4|A0A221MVC4_XANCM Tryptophan halogenase; OS = Xanthomonas campestris pv. malvacearum OX=86040; GN = APY30_21820 PE=4 SV=1
MIPAPLRNIVIVGGGTAGWMAAAAFARVLGPTFKVQLIESEQLGTVGVGEATVPHIKAFNNLLGIDEAEFVRQTQGSFKLGIEFVDWQRPGSTYMHGFGTQIGHPLGLLPFHQYWIKQHARGKAQPLGAYTLNTVAAARGKFMTSAGDVPANSPLANIAYAYHFDATQYAHFLRRYSQQRGVTRIEGLVEQVQLHPESGHVQSLQLASGQVVHGDLFIDCSGFGGLLIEQALHTGYHDFTHWLPCDRALAVPCEQVGPPAPYTRSTARAAGWQWRIPLQHRTGNGYVYCSAHISDDEAAATLLANLDGKPLADPRPLRFTTGRRKQCWNRNVVALGLASGFLEPLESTSIHLIQSGISKLLELFPREGISPVLVQRYNDRLAFEFDRIRDFLLLHYHATERDDSAFWRHCRHMPITPELQATLDLFRDSGRFYRNAEEMFAEISWVQVLVGQGILPQGYHPLVDQVPDRDAEGFLASVAQTISHCVDVMPSHQQFIDRYCKAATLP

SEQ ID NO: 89822 - protein, 503 aa, Sphingomonas sp.
  REGION 1..503: note = tr|A0A0Q4HVE8|A0A0Q4HVE8_9SPHN Tryptophan halogenase; OS = Sphingomonas sp. Leaf226 OX=1735691 GN=ASE77_16735 PE=4; SV = 1
MTQAPLGSIVIVGGGSAGWMTAAALSSLVESKDVSITVIESDAIGTVGVGEATIPDMLVFNQMLGISEAEFMRATEATFKLGIEFVDWGHKGDRYIHPFGQHGVDMEGIDFHQYWLRLNRDGGTAPIEDYSLSAVAAGAGRFALPDPNPRSVFSHLRYAYHFDATLYARFLRGYAEKRGVKRIEGVVNAVHRTAQGDGIAAVTMDSGAQIKGDFFFDCTGFRALLIGQTLDIDFVDWSAWLPCDSALAVPSAHVGPPPPYTRSTARPAGWQWRIPTQRRVGNGHIYSRSFMDDDEAERVLRKGVEGALLAVPRSIRFKAGHRRQFWRGNCIAIGLAAGFLEPLESTSLYLIQEGISRFISLFPNGDMPDILRVEYNRYMQKKFEQVRDFIVLHYVATNRDDTPFWRYCRSMSVPDSLQHKMELFRETGRIFRYDDELFARPSWVAVMLGQGIMPKRCDPIVAALPARDVANSLQSMASAMKDAASRMPTHASFIASYCAATEG

SEQ ID NO: 89823 - protein, 500 aa, Sphingomonas sp.
  REGION 1..500: note = tr|A0A0Q4I341|A0A0Q4I341_9SPHN Tryptophan halogenase; OS = Sphingomonas sp. Leaf226 OX=1735691 GN=ASE77_11425 PE=4; SV = 1
MDTPPKTRVIIAGGGTAGWLAAALLTRQLGALIDVTLIESDEIGTVGVGEATIPTVQAFHALLGLDERAFMAATGATFKLGIAFEGWARPDDRYVHSFGDVGRSTWMGDFQHFWLEARANGLAGDFGDYCLELQAAEARRFTIGQQGPQLNYAYHFDAGRYARFLRERCETAGLTRIEGRIAGIDRSAETGHIDAVVLADGSRVAGDLFLDCSGFRGLLIGDALGVGYEDWSHWLPANRALAVQTTSVEPARPYTRAIAHDAGWQWRIPLQHRVGNGIVYSSEYLSDDAAQDRLLASVQGRPLTDPRLLRFTTGRRLCAWEGNCIALSLAGGFVEPLESTSIHLVMTALTRLLRAFPFDGISPAVVAQFNAQTRREIEGVRDFVILHYHLNQRSEPFWKACAAMPIPDTLAERIALFADAAQAYQSPDDLFRVSSWTQVMLGQRLEPRDWHRLARMMPPERLGSSLAELKAGIAQQVERLPAHQAFVDRYCAQAATTVAA

SEQ ID NO: 89824 - protein, 509 aa, unidentified
  source 1..509: note = Citromicrobium sp.
  REGION 1..509: note = tr|A0A326GCN3|A0A326GCN3_9SPHN Tryptophan halogenase; OS = Citromicrobium sp. OX=2024827 GN=DI637_09855 PE=4 SV=1
MSDRRIRDVVIVGGGTAGWMAAAALSATMGEQLQIRLVESDAIGTVGVGEATIPAIRLFNGLVGIDENEFVRATQGSFKLGIEFIDWGRKGDSYLHAFGQIGQSLDLIEFWQYWLRARAEGVAEPVGHYSLNECAARDHRFARMPRIPNSELDGISYAFHFDAALYAQFLRRIAERNGVMRTEGRIVSVSRHSNNGYIRSVILQSGEEIGGELFIDCSGFGGVLIEQELESGFDDWSHWLPCDRAVALPTENNGQPRPYTQSIAHRAGWQWRIPLQHRSGNGHVFCSEFISEDEAVATLLGNLEGKPIAEPRIIPFKTGMRRAAWSANVVALGLSSGFLEPLESTSIHLIQAGIAKLISHFPDRTFRPANTAAYNRRMAYEYERIRDFIILHYHANQRDEPFWKRCRDMEIPESLREKIELFRATGRIFREQEELFVEIGWFQVLTGQNIVPETWHPLADVLTKDELEQFLSDIRTIVSSNAARLPLHSEFIAKTCASPAPPVSIGAST

SEQ ID NO: 89825 - protein, 507 aa, Sphingomonas sp.
  REGION 1..507: note = tr|A0A1Y2QF06|A0A1Y2QF06_9SPHN Tryptophan halogenase; OS = Sphingomonas sp. IBVSS2 OX=1985172 GN=CAP40_13650 PE=4; SV = 1
MASGAIERVVIVGGGTAGWMAAAALGAYLAGTGTRITLIESSEIGTIGVGEATIPTIRRFYAALGMTDAEVMRACEATAKLGIRFVDWKPGTSFVHPFGRFGQDLRGIDFHHYWQKARQAGQAAPLEEYSLGAMLAREGHASVPLPNPPSQLSVFDWALHFDAARFAAHMRAYAEHAGVTRIDARITDVALHGETGFIEAVTLDSGERVAGDLFVDCSGFRGLLIGEALGIPYRDWSHWLLCDGAFAVQSERVGEPPSCTTVTARTAGWQWRIPLRSREGNGIVFASDFQGDDDARAELLANIPGAPTMEPRRLRFTPGRRDVAWAKNCVSLGLSSGFLEPLESTSIALIETGIERLKQLFPDKGFDPAVIAEYNSQSAEEMERVRDFILLHYRLSTREGAFWQACRQMTLPDSLAAKLELWRARGAFLRYRWEMFSPASWLAIYGGFEHLPERIDPGVAAVDAGELAQGLEQMRAAIARTVADTPTHSEFLATVDGAAAEPMRTPA

SEQ ID NO: 89826 - protein, 505 aa, unidentified
  source 1..505: note = Citromicrobium sp.
  REGION 1..505: note = tr|A0A2D9IBB9|A0A2D9IBB9_9SPHN Tryptophan halogenase; OS = Citromicrobium sp. OX=2024827 GN=CL805_07445 PE=4 SV=1
MDRPAPLKVVVLGGGTAGWMTAASLAKLLPDRASVDLIESEDIGIIGVGEATLPHIRGFVERLGIREAEFMKATHATYKLGIDFRDFGRIGESYIHPFGSFGEELAGVGFHHYWLELQRRGQAAPLGEYSLCVAAALANRFQPPSRDLSLSSTYGYAYQFDATLFGPFMREFGQSVGVTRHEGLVTNVERNGDTGDVTALVLKDGRRIEGDLFVDCSGFRSLLLGQELGEEWEDWSHWLPCDRAAAMPCTHATEDIRPYTTATAMPAGWRWQIPLQHRMGNGYVFSSAFLDEETACEAIRDAAEGEPLADPRVLRFRPGRRRRSWSHNVVGVGLASGFLEPLESTSIYLAQMAITYLIELFPEAGGIEPADRDAFNRLVDMEYDRVRDFLILHYHATTRDDSEFWNHVRTMRVPDSLSDKLQLWRETGRIEKYSDGLFFDASWIAVYVGQGWLPQRHDSRTGMVDPERLKAAADRLRREIASEVSRMPGHREYLERETSRLAEAS

SEQ ID NO: 89827 - protein, 494 aa, Colwellia demingiae
  REGION 1..494: note = tr|A0A5C6QDY4|A0A5C6QDY4_9GAMM Tryptophan 7-halogenase OS=Colwellia demingiae OX=89401; GN = ESZ36_13180 PE=4 SV=1
MKDKIQNIVIAGGGTAGWMAAAAFSKLLGKNLNITLVESDEIASIGVGEATIPPIKTFHKLLGINEQEVMRATHATFKLGIGFENWGQQGDHYIHSFGVTGKECWAGEFHHFWLHGLRKGIKDDFGDYCYELQAAKANKFALSKNTPINYAYHLDATRYAQYLQEFSKKLGVTRVEGKIQQVNKDNKSGEISSLTLASGQIVEGDFFIDCTGFQGLLIEQALHTGFDDWSHWLPCDRAVAVQTKAVAAPLPYTRSIARESGWQWRIPLQNRVGNGLVFCSKYCSDEEAINTLTANIEGDLLTEPRIIKFNTGRRRKGWNKNCVALGLSSGFIEPLESTSIHLIMSGIIRLLRLFPFDGIHQSAIDEYNNKLNSELNAVRDFIILHYKATQREDSNFWLHCKNMEIPPSLVHKMQLFKDTGRVFLDDGDIFRVDSWTQVMLGQGIKPTQYHKIAEIMNDKELENFMSSLKASITNAVEQLPSHAEFIQSYCKSDY

SEQ ID NO: 89828 - protein, 479 aa, Sphingomonas sp.
  REGION 1..479: note = tr|A0A0Q4HXS5|A0A0Q4HXS5_9SPHN Tryptophan halogenase; OS = Sphingomonas sp. Leaf226 OX=1735691 GN=ASE77_16035 PE=4; SV = 1
MTAAALAAVAGRSVAEVQLVESEEIGIVGVGEATLPHIRAFNTRLGIDEAEFMRATAATFKLGIEFSDWARIGDSYIHPFGAFGHDVDGVGFHHYLSRAGHIATLPDYSLPVVAARHAKFAPPLDDPRSLLSTYGYAYQFDATRYAPFLRARAERHGVTRTEGRVVDVERSGTGDVVAVVLDDGRRMTGDLFVDCSGFRSLLLGQAMGEPFEDWSHWLPCDRAVAVPCADAGTLKPYTTATAMPAGWRWRIPLQHRVGNGYVYASAHIDDGAAQDALLRSIESTPLADPRMLRFKAGRRARSWVGNVVGVGLAGGFLEPLESTSIYLIQLAITQLLELFPATPISPVDRDTFNRVVDLEYDRIRDFLILHYHATTRDDSPFWDHVRTMAVPDTLAEKLALFRKRGRVMTYREGVFLEPSWIAVYLGQGVVPEGYDQRADRPSDAALAQALARLRTETRDAVMTMPDHAAYIAQSGAASA

SEQ ID NO: 89829 - protein, 500 aa, Sphingobium lactosutens
  REGION 1..500: note = tr|T0ISU1|T0ISU1_9SPHN Tryptophan halogenase; OS = Sphingobium lactosutens DS20 OX=1331060 GN=RLDS_18370; PE = 4 SV=1
MTQPSLPRRIIVAGGGTAGWMTAAALARTLGPVAQVTLIESEQIGTIGVGESTIPPLVAYNRILGIDEADFMRATQATFKLGIQFENWRVPGESYFHSFGGTGKDHWSAGFQHFWMHGAAHGHDAPYDEYCLELKAAMAGRFAHLPDDRMNYAYHLDSGLYARFLRSMAEGDGATRIEGRIVAVDLDGASGDIAALRLDGDRRIEGDLFIDCTGFRALLIEGALHAGYDDWTHWLPCDGAVAVQTASVRAPVPYTRAIAHDAGWQWRIPLQHRQGNGIVYCSAFMEPQAAQDQLLATVEGDRLVQPNPIRFRTGARRRQWHRNCVAVGLSGGFMEPLESTSIHLIQRAVLRILRMLPAGAISPRDIAEFNDQQMADMEQIRDFLILHYKATDRRDTPFWRHCASMAVPDSLTHKMELFRETGRVFRKNEELFAENSWVQVMMGQGIRPQSYHPVAAKLRPQELEHLLTTLRDQVSRTVAALPDHGAYVARYCGAQDVAAA

SEQ ID NO: 89830 - protein, 502 aa, Sphingomonas sp.
  REGION 1..502: note = tr|A0A0Q4HGX5|A0A0Q4HGX5_9SPHN Tryptophan halogenase; OS = Sphingomonas sp. Leaf226 OX=1735691 GN=ASE77_16730 PE=4; SV = 1
MDELAIRRIVVVGGGTAGWMAAAALSRVLGHAVEIELIESEAIGTVGVGEATIPHLQYFNRLLGIDEDDFVRRTAATFKLGIEFVDWGRIGDRYFHPFGTYGQEMEGLHFHHFWLRQAQLGGTLELDRFSIGADAARAQRFQRPDHSRAGSPLGTISYAFQFDASLYARYLRERAEAGGVRRTEGRIVDVALDSGNGHVQAVTLEDGSRVAGDLFIDCSGFRGLLISKALGAGFEDWSHWLPCDRAVARACRRTTDPLPYTRATAKAAGWQWRIPLQSRTGNGYVYCSDHLSDDEALAGLNAALDGDPLSEPNFLKFKAGVRHKAWDRNVVALGLANGFLEPLESTSIHLIQSAIARLLTNFPDRRFNQHDIDYYNRRTRVEYEQVRDFIILHYATTTRDDSPLWRYCRSMALPTSLEERIAIFRENGRLYRHDNELFSETSWLAVMHGQGLVPRRYHPLADLLPEGDLDKRMAHIANAMRLAVDRMPSHQQFLDQIGRPAV

SEQ ID NO: 89831 - protein, 517 aa, Sphingomonas sp.
  REGION 1..517: note = tr|A0A0Q4HNG1|A0A0Q4HNG1_9SPHN Tryptophan halogenase; OS = Sphingomonas sp. Leaf226 OX=1735691 GN=ASE77_11340 PE=4; SV = 1
MDRAITSIVIVGGGTAGWLAACLIAARADRDAEHPLQVTLIESPDVATIGVGEGTWPTMRRTLERIGISETEFLLACDAAFKQGSRFDGWRTGAPDDRYLHPFTTPAEAAPRDLASAWSDSGLAFAEALCTQHAVCSQDLAPRQRAMPDYAGTLNYAYHLDAGKFAALLARHATERLGVRHLRDHVVGVDGAADRDITAVRTRASGRIEGDLFLDCTGHAALLIGEHYGVGTIDRGRELFNDRALAVQLPVAADSVIASQTNATAHAAGWIWDIGLPARRGIGCVYSSAHLDDDAAADTLTRYLRATAPDAPLPDFRPLRFQSRHRDRFWHRNCLAIGLSAGFLEPLEASAIVLVELSVDALLDNFPATRRTMDLHAARFNTLFRYRWDRIVEFLKLHYVLSQRDEPYWRHHRDPGSIPPRLADLLQLWADQPPSHADFPMVDEIFPAASYQYVLYGMGFSAPRRTPVRTGARGAADMLVQQVDRHGRMLAAALPTNRAYLDALRHAMTSATMETRA

SEQ ID NO: 89832 - protein, 487 aa, Sphingomonas sp.
  REGION 1..487: note = tr|A0A0Q4HS34|A0A0Q4HS34_9SPHN Tryptophan halogenase; OS = Sphingomonas sp. Leaf226 OX=1735691 GN=ASE77_09865 PE=4; SV = 1
MTAATLGLTTGTPSAARLADITLVESEEIGTVGVGEATVPHIRFFNQRLGIDEADFVRRTKATFKLGIEFCDWGRIGDSYIHPFGDFGHDIDGLPFHQHWLHATRGKPDETPALAACSLPIVAARAERFTPPLDDPRSVGSTYSYAYQFDAGLYAAYLRDYAEARGVTRIEGRVEHVERGPSGIAALRLADGQRIEGDLFVDCSGFRALLIEGALRAGHEDWAHWLPCDAAWAVPTANAGPLVPYTRATARDAGWQWRIPLQHRTGNGHVFSTRFTDPERARAVLLDTLEGEVLAEPRMLRFRTGRRHRQWIDNCVAIGLSAGFLEPLESTSIHLIQLAIGKLIELFPNDAVLDPADAAEFNRAMALEYDRVRDFLVLHYCATERDDTPFWRHMRTMDLPPSLAGKIAAFRDRGIVEQYREGMFLPASWLAVYYGQRIMPERIHPLVAALPVADSRARVAAVADACRRTAEGMPTHVDYLARIGAAA

SEQ ID NO: 89833 - protein, 507 aa, unidentified
  source 1..507: note = Xanthomonadales bacterium
  REGION 1..507: note = tr|A0A1G4AL05|A0A1G4AL05_9GAMM Tryptophan halogenase; OS = Xanthomonadales bacterium RIFOXYA1_FULL_68_6 OX=1802655; GN = A2213_11840 PE=4 SV=1
MTATGNPIGSIVVVGGGSAGWMAATALATYLGRQASIRLVESEEIGIVGVGEASVPYMKQFNAGLLGIDEFDFVARTQGTFKLGIQFDDWGRIGDSYVHGFGRIGQGIGPLPFHQFWLKLFHAGRARPIGEYSLPTLAAPLGKFMSSPGNVPPDSPLADIAYAYHFDAGLYAGYLRELAERRGVQRIEGKITHALQRSEDGFIEAVVLESGEQVAGDLFIDCSGFRGLLIEQTLQTGYIDWTHWLPCNRAMAVPCATAGPPTPYTRSTARAAGWQWRIPLQSRIGNGYVYSSQHISDDEAAATLLANLDGRALADPRPLRFTTGMRRKLWNRNVVALGLASGFMEPLESTSIYLVQSGIQRLLGLFPDRGFDPLLERQFNEESAFEYESTRDFLILHYCATRRNDSAFWDYCRTMSIPDTLQRKIDMFRSGGRYFRTGDEFFALPSWVQVMLGQGIVPAGYHPIVDDMPEQALVEHVARVHRSIADSVAAMPRHQDFIDRHCRAPAG

SEQ ID NO: 89834 - protein, 506 aa, Duganella sp.
  REGION 1..506: note = tr|A0A0Q7WSH1|A0A0Q7WSH1_9BURK Tryptophan halogenase; OS = Duganella sp. Root1480D1 OX=1736471 GN=ASD58_05215 PE=4; SV = 1
MNQHNRISKITIVGGGSAGWMAAAALATYLGKGASVRLIESEEIGIVGVGEASVPHIRLFNGQMLGIDEAEFIKRTQGTIKLGIEFKDWSRLGDSYIHGFGTIGRSVGPLPFHQFWLKLYQSGRAAPIGEYSPQTVMAPQGKFAPCDRNASPGSPLADIAYAYHFDASLYARFLRELGEQRGVQRIEGKIVGVNQRADDGFIESVTLESGQVVDGELFIDCSGFRGLLIEQTLKTGYVDWSHWLPCDRAMAVPCEGVTPIAPYTRSTARTAGWQWRIPLQHRTGNGYVYSSRHISDDEAAATLLANLDGKALAEPRALRFTTGMRKKFWNKNVVALGLASGFLEPLESTSIYLAQSGITRLLGLFPKRDFNPLLAERFNRESVFEYERVRDFLILHYNATERNDSPFWDYCRTMPIPESLHEAIELFRYDGRYFRNGEDFFALPSWVQVMLGQRIVPQSYHPIVDDMPEEKLVDVVESMRAMLASAVAAMPTHQEWIERHWKASAP

SEQ ID NO: 89835 - protein, 355 aa, unidentified
  source 1..355: note = Xanthomonadales bacterium
  REGION 1..355: note = tr|A0A1G4AJ44|A0A1G4AJ44_9GAMM Tryptophan halogenase (Fragment) OS=Xanthomonadales bacterium RIFOXYA1_FULL_68_6; OX = 1802655 GN=A2213_03955 PE=4 SV=1
MDPADKPEGHIRKVVIAGGGTAGWLAGCALSHQFRDRLDITLVESEQIGTVGVGESTVPPIRTFHRFLQIDEQEFLRAVAGTFKLSISFENWRRPGERYIHPFGITGQGTWAAAFHHFWLDSLRRGMSSELGDFCLETLASRGDQFSLQTQPQVNYAYHFDAGLYAKFLRRIAEGHGLRRVEGKIREVRQHPTDGAVQALVLEDGQVIEGDLFIDCTGFRGLLIEQTLHTGYEDWNQWLPSDRAVAVQTESVGPPVPYTRAIAHEAGWRWHIPLQHRVGCGLVFSSRHMSDDEARAKLLRDVGAPPIRDPWLVPFRTGRRLKAWNRNVVALGLASGFIEPLESTSIHLAISAVVR

SEQ ID NO: 89836 - protein, 495 aa, Acinetobacter venetianus
  REGION 1..495: note = tr|A0A150HW70|A0A150HW70_9GAMM Flavin-dependent tryptophan halogenase RebH OS=Acinetobacter venetianus; OX = 52133 GN=rebH PE=4 SV=1
MINLRGMNRVVVVGGGTAGWFAALQLRQLFSPSVEVMVISAPEIPIVGVGEGGVLNLLTVLHDLNIDLKTFIDKTGSTLKLGFRYERWRTGKEDDYYYHLFPLPTPDFAWNEFGFNPYLSGLFNHGIDISRYMASYQFSEDRKSFHEVLQILLDGKNNFGASLHFDTFRVGQYLKEIALSRGIIHVEQRIHDFELNPQTEYISAIQLLDQKIQCDFVVDASGFSRLLIGKKYKSCWHSFADTLPMNRALPFHLQHQDKIELVTRATAMSSGWVWQIPLQERIGAGYVYHDQFITDEQAQQEVEQWLGVKISPAQPIAFEAGFYEKVWMKNVVAIGLASGFIEPLEATSIGQMLSQLQLMISFIQENHGVISQQNIDFYNRQNSQYWQGICDFIRMHYDTGRKDTPFWQYMLTVPQSQSYQELKKCWEHRTPRDIDFVEHSMGGMSMFSAASWFAVGAGVGVIKPEATSAELYALSTEKKQKLAKYLQQIKQQLFL

SEQ ID NO: 89837 - protein, 483 aa, Sphingomonas sp.
  REGION 1..483: note = tr|A0A1Y2QLT0|A0A1Y2QLT0_9SPHN Tryptophan halogenase; OS = Sphingomonas sp. IBVSS2 OX=1985172 GN=CAP40_00275 PE=4; SV = 1
MLAGRILVVGGGTAGWMTAAALAHKLAGMPARITLVESAEIGTVGVGEATIPHIRHFNATLGIDEADFLAATKGTYKLGIEFVDWGRKGDSYIHPFAEFGAPIGGVPFHQQWCSARDAGAFEAYSLPIQAARRGRFRRPDGDPYNYAYQFDAGLYAKFLRGYSEARGVTRREGKVIDVARDGESGFVRSVALEGGETLEADLFIDCSGFRGLLIEQALHAGYEEWTHWLPCDRAIALPCANIGPIPPLTRATAQDAGWTWRIPLQHRTGNGHVYASGFTSDEEALRVLLGAIAAEPMADPNRLRFVAGRRRRQWVGNVVAIGLSSGFLEPLESTSIHLIQLAIGRLLDLFPTRDWDPLDAAEFNRLMALEYERVRDFLILHYHCTERDDSEFWRHCRAMRLPDSLEYKLALFRERGVVVQYREGTFLEPSWLAVYLGQHVTPRHCDPRAGGAAAVAAMAAMRAGIAATAEAMPAHEAALGISA

SEQ ID NO: 89838 - protein, 482 aa, Sphingomonas sp.
  REGION 1..482: note = tr|A0A0Q4HSM8|A0A0Q4HSM8_9SPHN Tryptophan halogenase; OS = Sphingomonas sp. Leaf226 OX=1735691 GN=ASE77_09850 PE=4; SV = 1
MAAVAFGRLLGPAGTRVTLVESDDIATIGVGEATIPPIRTFHAMLGIDEDAFLRATGGSYKLGIRFEGWTRPGESYVHPFGQIGTDIAGVPFAAQWLRARQAGAADALGAYSLEARAAEAGRFSRPIANGDSPLSRIGYAYHFDAGRYAAFLRAQAEAHGVIRREGRVDRVERGPAGIAAIHLADGSRIEGDLFLDCTGFRALLIEGALQAGWTDWSQWLPCDRAVAVPSAADAAPLALTRAIAEPAGWRWRIPLQHRTGNGHVFSSRHTSEDEATATLLAGLDGEALADPRVIRFATGHRTRFWSGNCIALGLAAGFMEPLESTSIHLVQSGLQHLLRMLPAGGPPAPAIVDRYNRTMTSEFVRIRDFLVAHYHLNSRPEPFWRERAAAPIPDGLAEKLALFRAGGRIFREADELFNEVSWLALLTGQDAPVTGHDPICDALPIAIAAKRLAQIERVVATSLTHMPPHADALARLGQDRTI

SEQ ID NO: 89839 - protein, 497 aa, Duganella sp.
  REGION 1..497: note = tr|A0A0Q7WMN2|A0A0Q7WMN2_9BURK Tryptophan halogenase; OS = Duganella sp. Root1480D1 OX=1736471 GN=ASD58_29590 PE=4; SV = 1
MRRIVIAGGGTAGWMVAAAISRSLGKVLDIKLVESDEIGTVGVGEATIPSLLNFHRLLEINEQEFMAATKATFKLGISFENWRNVNEDYIHSFGMTGTDHWTAGFNHFWHKGRERKLASDYGDYCLELKAAQLNRFGHLPHDGINYAYHLDASAYARYLRKYSERYGVQRIEGKIAKVLTDASSGHITALQLDSGAKLEGDLFVDCTGFRALLIGETLGEGFEDWSQWLHNDSAIAVQTSSTGPAVPYTRAIAHEWGWQWRIPLQHRVGNGIVFSSKFVDDDTARARLMSNITGEQLVQPRVIRFKPGQRRKVWSKNCIAIGLASGFLEPIESTSIHLIQRGIIRLMQMFPSAGIFQSEIDEYNRQAWTEIEHIRDFIILHYKATNRRDAAFWRHCAEMEVPASLSRRLDLFRETGRVFRLSNELFAENSWVQVMLGQGITPLQHHPSADLMGDAELSCFLDSIRNNVARTVAQLPPHQQYVENYCAAYMEEYLAPK

SEQ ID NO: 89840 - protein, 495 aa, Acinetobacter venetianus
  REGION 1..495: note = tr|A0A137XM75|A0A137XM75_9GAMM Uncharacterized protein OS=Acinetobacter venetianus OX=52133; GN = AYL20_11270 PE=4 SV=1
MLNLRGMNRVVIVGGGTAGWFSALQLRSIFSNSVEIMVVSSPEVPIVGVGEGGILNLLSTLHHLKIDLKTFISETGSILKLGFRYEGWRTGHSDDYYYHLFSAKTEEFMWVEDGFHPYLSGLFNHGIDINRYLTSYQFCEDRKPSDEVLALLARRNNNFGASLHFDTFRVGQYLKKIALARGIIHVEGRVQDVILHPETGDVTAIQLADRDILCDFVIDASGFSRLLVGQKYKSQWCSFADMLPMNRALPFHLMHEDKIELVTRATAMGSGWIWQIPLQHRIGAGYVYSDQFITDQQAQQEIEQWLGRRISPVQPISFEAGYYKQVWKNNVVAIGLAGGFVEPLEATSIGQMLEQLSLLSSLIKGCHGVIPQHSLNYYNQQNEQGWLGIRDFIRMHYDTGRSDTPFWKYMQTVPISENYRELKECWQHRTPRYMDFTQYQMNNFQMFGISSWFSVGAGIGLIKPESTAAELYSLSPEKKQKLAKYLQDTKQRLFL

SEQ ID NO: 89841 - protein, 521 aa, Sphingomonas sp.
  REGION 1..521: note = tr|A0A1Y2QM14|A0A1Y2QM14_9SPHN Tryptophan halogenase; OS = Sphingomonas sp. IBVSS2 OX=1985172 GN=CAP40_07445 PE=4; SV = 1
MQPRSNPSPAPLRVVIVGGGTAGWMCAAGLARLLPQTDYALTLIESDEIGTVGVGEATLPHIREFNTMLGLDEAEFMRATQGSFKLGIEFVGWDRPGGRYVHPFGSFGERWGGIDFQHHWLRARAAGHDVGDWFDHSFAVAMCREGVFDLPNEDPRSIRSTFSYAYHFDAGLYAEYLRGWATRRGVRRIEGRIVDVARNAESGLVESVALQSGARIEGDLFIDCSGFRSLLLGQAMGVAWHDWSAWLPCDRAMAVPCASVAGITPFTRSTAQTGGWTWRIPLQHRIGNGYVFSSSFCSEEQARETVLGAIDGAPLADPRLLRFQAGRRARGWEGNVVAIGLSSGFLEPLESTSIFLIQAAVTDLANLMPAPGGGPPDPRLAAEFNRLFAIHYDRTRDFLVLHYTANARHGEPLWDHVRNMALPDSLAHKIALFRSSGRAPDYKLGLFSRDSWLAVLMGQGILPQAHDRLADRAPLDEVVERLADLRERIATNAAALPAHAEFIAGYCSAARGTADDRAVVA

SEQ ID NO: 89842 - protein, 501 aa, Mycobacterium europaeum
  REGION 1..501: note = tr|A0A0U1DQ82|A0A0U1DQ82_9MYCO Tryptophan halogenase; OS = Mycobacterium europaeum OX=761804 GN=BN000_04998 PE=4; SV = 1
MIESVLVVGGGSAGLLTALALKQHAPQLQVRVVRSKNIGVIGVGESTTPQLISLLFDYLKLPQKEFYSIVRPTWKMGIHFLWGPRESFDYGFQFQLDAFYTDLTRYNGFYCGDEFDSVNMNSALMAQGKAFEKHPSGQGPMITADTALHLFNPALVEALEKASVERGIELIDARITGVPVDEQGVQSVILEDGRTFSADLYVDASGFRSELLGRALGTPFVPYDSSLFCDRAIVGSWDRTDEFIYPYTVAETMEAGWCWQIDHENSINRGYVYSSQFLSDDQARDELLKKNPKATAWDHVIKFRSGRYEKGWVKNVFAIGNACGFVEPLEATSLMVSSSQIKAMVEMLVESHLEPTPSLQELYNTLFVDWWDGIKDFLSIHYRFNTRLDNEFWTACRNEVDVTPVQPLLDFYHENGPTGFLRHFVTSTIGQDNQFGLEGYLVMLVGQKVPYRDPHPPSQAEMATFQRHCAQNRARAMSGLTVAEALEYVHLPDWRWNSDSQ

SEQ ID NO: 89843 - protein, 499 aa, Marinicella litoralis
  REGION 1..499: note = tr|A0A4R6XE24|A0A4R6XE24_9GAMM Tryptophan halogenase; OS = Marinicella litoralis OX=644220 GN=C8D91_2635 PE=4 SV=1
MSVPIQKVVIVGANLTGFCAAAYVTSQLKGSGLQVEIIDDGSGEYSPIVSTQASVNSVFQSMGLDLRQLMAATDAAFNLGQAYEGWLGAGSWAFNSFTAPPNMAGFFEFQHFWLKSMQSGNVGDYHQYSLAAMAARQGKFAFPSPANPNPLTQLSFGLNFNSAKLMAFMRSLSINAGVKVADGTLQAVESDENGTVSAVLMSTGLKVQGDFFIDCSLLAKSVLDSHFNLSFHSRYETSPVNRTACIVLNNQDEPLLPQTSVRALPNGWLKQCSDQNRTATTFVYNSNQLTDQEVAIGLLQHMVNQDSDEQPPADVVFSELTPGNKVASWVDNCLFIGAGTFQSCQLDYCDFSYVFKALESFVKLFPHNKNSYNSHEYNRWTQADYNQLLDYECLAMSLAANNETEFWISLKKLELSEAMQHQLALFKSHGRLIDQRQALIAKHQWAAMLISRGVIPVRNHPLMSVLDQADGLPELQSQIGSLVAGMPSHRQFLLRFCQQ

SEQ ID NO: 89844 - protein, 502 aa, Sphingomonas sp.
  REGION 1..502: note = tr|A0A4Q7SHF7|A0A4Q7SHF7_9SPHN Tryptophan halogenase; OS = Sphingomonas sp. BK036 OX=2512122 GN=EV283_3415 PE=4; SV = 1
MKRVQRLVILGGGTAGWMTAAAMSATFGDLVEISILESDAIGTIGVGEATIPTIHWFNQLIGLDEAAFVAATKASFKLGIEFVDWARPGTRYFHPFGRYGVDLGPVPFHQHWLRAKGDGLDRPLSTYSLAAQLAAAGRFAKPVDDPRSILSTLGYAYHFDASLYARHLRQLAEKRGVVRHEGLLRDIKRDPDTGFVTALTSDRDERLEGDLFIDCSGFRALLIGETMGAQFEDWSHWLPCDRAVAVPCARIAATTPFTRSTLRPAGWQWRIPLQHRTGNGYVYASSFVSDDEAVATLLSNLDGEALADPRMLRFTAGFRREAWRGNVVAIGLASGFLEPLESTSIHLIQSGIAKLITLFPDADCDPVLARQFNTLFARDMDGIRDFLILHYHATQGHDAPLWQHTRHMTPPPTLVDKMAQYTRAGRLMLSADELFREASWLAVLEGQGVGALGHAPLADTLDAATNRRQLDQIEAVIARAAPTLPLHDAAIAALVAPQVAAR

SEQ ID NO: 89845 - protein, 500 aa, Sphingomonas sp.
  REGION 1..500: note = tr|A0A4P7QX94|A0A4P7QX94_9SPHN Tryptophan 7-halogenase OS=Sphingomonas sp. PAMC26645 OX=2565555; GN = E5673_07450 PE=4 SV=1
MGAGMQVVVVGGGTAGWMTAATLAMSFAGRLADVTLIESEEIGTVGVGEATVPHIRFFNQRLGIDEADFIRRTNATFKLGIEFRDWGRVGDSYIHPFGDFGHDVDGLPFHQHWAHATRGGTDGLPALEDCSLPIVAARENRFTPPLEDPRSIGSTYSYAYQFDATLYAAYLRDYAEARGVVRIEGRVDAVEQSAGGIDAVRLADGRRIAGDLFIDCSGFRALLIDGALKIKSEDWSHWLPCDAAWAVPTANAGALTPYTRATAREAGWQWRIPLQHRTGNGHVFSTRFTDPETARAVLMNNLEGEALAEPRMLRFRTGRRDRQWVGNCVAIGLSAGFLEPLESTSIHLIQLAIGKLIELFPSGGVFDPADAAEFNRAMALEYDRVRDFLVLHYCATERDDTPFWRYMRTMTLPSSLTEKIAEFRERGIVASYREGMFLPASWLAVYYGQRIMPDRVNPLIADIPSATSRAHVTRVAAACASAAKTMPLHEDYIARIKAAA

SEQ ID NO: 89846 - protein, 501 aa, unidentified; identical to SEQ ID NO: 87671
  source 1..501: note = Citromicrobium sp.
  REGION 1..501: note = tr|A0A2D8AXU8|A0A2D8AXU8_9SPHN Tryptophan halogenase; OS = Citromicrobium sp. OX=2024827 GN=CL805_06465 PE=4 SV=1

SEQ ID NO: 89847 - protein, 513 aa, unidentified; identical to SEQ ID NO: 87676
  source 1..513: note = Citromicrobium sp.
  REGION 1..513: note = tr|A0A2D8AXU6|A0A2D8AXU6_9SPHN Tryptophan halogenase; OS = Citromicrobium sp. OX=2024827 GN=CL805_06455 PE=4 SV=1

SEQ ID NO: 89848 - protein, 513 aa, Sphingomonas sp.
  REGION 1..513: note = tr|A0A4P7QWK9|A0A4P7QWK9_9SPHN Tryptophan 7-halogenase OS=Sphingomonas sp. PAMC26645 OX=2565555; GN = E5673_05955 PE=4 SV=1
MHEIQNIVIVGGGTAGWLTAGVIAAKHQARRQHGFTVTLVESPNVPTIGVGEGTWPTLRSTLKKMGVSETELFRQCDASFKQGARFNRWTTGAPDDGYYHPLMLPQHFGQLNLAPHWLADEGSATFCDTVTPQGRICDEGLGPKTIATPEYDGHANYAYHLDAGKFSHFLQRHCCDTLGVRHVKADVTEVHLDESGDIASLDTEQGISIAGDLFIDCTGFAALLIGGAMNVPFRSCTDILFCDTALAMQVPYDVPDAPIASHTISTAQSAGWIWDIGLPTRRGVGHVFSSGHISADAAEQELRDYIGPAARDLTARRLAIRAGHREQFWVRNCVAVGLAAGFLEPLEASAIVLIELSAKMIAEQMPACREVMDVVAHRFNDTAHYRWGRIIDFLKLHYALTKRTDTAFWRDNVRPESIPDRLAGLMELWRFQSPWVHDEFDRAEEVFPSASYQYVLYGMGARTAVMPGSIDDDVRLARRARHDNQVQTQRLVSSLPGHRDLIDRIKRHGLQPI

SEQ ID NO: 89849 - protein, 507 aa, unidentified
  source 1..507: note = Thalassotalea sp.
  REGION 1..507: note = tr|A0A1Q6CI28|A0A1Q6CI28_9GAMM Tryptophan halogenase; OS = Thalassotalea sp. PP2-459 OX=1742724 GN=BI291_14315; PE = 4 SV=1
MKKTENPLNKIVIVGGGTSGWIAAATLAHGFRNANINIELVESEQIGTIGVGEATIPSLMVVLNSLGISLDEFVKETQGSFKLGIQFEDWHSQGENYFHPFGGLGKTIAGFDFFQCWLKCKAEGDLTPLMAHSPEAVLAERDKFFLPFNVQNTPLERAFYALHLDSTLAGKYFRNFAEKLGVKRTEGLIESVTQYQNGNIQSVTLESGNEVKGDFFIDCSGFRGLLIEQTLHSGYEDWSEYLPCNRAVTVQTKNIGSTKPYTVSKARDAGWTWRIPLQHRTGNGYVFCDKYISDDEAIKTLLSAVEGEPLSEPRVIPFTTGIRKKAWQKNCLALGLAQGFIEPLESTAIHLVTRTLAYFIRMFPDTSCQQELQDEFNRRVRVDYEEIRDFLVLHYCTTSREDTEFWRWCKQMPIPESLQQKIDFFKASGGLIPGVESLFQPSSWYAIFNGMKVMPTRYNPALDTLAPEKLKTILAKGANGLIEIAEKQPSHDQFLEQYCQAPLPGNK

SEQ ID NO: 89850 - protein, 532 aa, Chitinophaga skermanii
  REGION 1..532: note = tr|A0A327QY37|A0A327QY37_9BACT Tryptophan halogenase; OS = Chitinophaga skermanii OX=331697 GN=LX64_00971 PE=4 SV=1
MQNDYLQLVEQFKATKEVLMNPQPYYMDLALPQDDFYNSVCIVGGGLAGYLSAIAFRKFFNIPVTVIEPSHIPPIGVGEATTPLMADYLFGVLELDKQEFFRMVEPTWKLGIKFFWGKPGDYYFNYPFDTKDILSAYLHSGDVNECSLNSLLMRQDASFIARYEEDGTEKYHSLSKNLKYAYHLDNRKFIDYLKFAAARAGVIFLDEEIKDAVLNEEGEVAALINVNGDKFVYDLYVDCSGFKSMLLEKKMNVPYVSFQDSLFNDRAVTGILPNNGHIKCYTTAETMDNGWCWNIPLRHEDHRGYVYSSAHCTEEQAIEEMLRKNPGMSASSIKHVRFRSGRHERFVEGNVVAIGNAYSFVEPLESTGVHMIIDQIILLMNHFVLLKKNPALRNLLNDTMKEHWEYIRWFLSIHFKYNKKFDTPYWKDCRANGNTSGFEKFLSLYKEIGLLSRQDTTTRNMIQPWLKDTIFDVYGIDHILFCQGVLPGNIQQLSPENKADWNAMLHVWKNIAAKTIPLREDLDIMLKHPQLL

SEQ ID NO: 89851 - protein, 479 aa, Sphingomonas sp.
  REGION 1..479: note = tr|A0A4P7R4C5|A0A4P7R4C5_9SPHN Tryptophan 7-halogenase OS=Sphingomonas sp. PAMC26645 OX=2565555; GN = E5673_04045 PE=4 SV=1
MTAAALAAVAGRSVAEVHLVESEEIGIVGVGEATLPHIRAFNTRLGIDEAEFMRATGATFKLGIEFCDWARIGDSYIHPFGAFGHDVDGVGFHHYLSRAGQIATLPDYSLPVVAARHAKFAPPLEDPRSLLSTFGYAYQFDATRYAPFLRARAERQGVTRTEGRVVDVERSATGDVVAVVLDDGQRITGDLFIDCSGFRSLLLGQAMGEPFEDWSHWLPCDRAVAVPCADAGTLKPYTTATAMPAGWRWRIPLQHRVGNGYVYSSAHIDDGVAQDALLRSIESTPLADPRMLRFKAGRRARSWVGNVIGVGLAGGFLEPLESTSIYLIQLAITQLLELFPATPISPIDRDAFNRVVDLEYDRIRDFLILHYHATTRDDSPFWDHVRTMDVPDTLAEKMTLFRQRGRVMTYREGVFLEPSWIAVYLGQGVVPKGYDQRADRPSDAALVQALARLRTKTRDAVMTMPDHAAYIAQSGAAAA

SEQ ID NO: 89852 - protein, 664 aa, unidentified
  source 1..664: note = Thalassotalea sp.
  REGION 1..664: note = tr|A0A1Q6CJ43|A0A1Q6CJ43_9GAMM Tryptophan halogenase; OS = Thalassotalea sp. PP2-459 OX=1742724 GN=BI291_11500; PE = 4 SV=1
MIKSIVVLGGGSAGWLTACLIAAKHVNKNSPFSVTLIESPNIPTIGVGEGTWPTMVNTLQQIGISELTFMQRCDASFKQASKFVNWVNNKQGDEYYHPFTPPQSFDQISLASTWQQQYADKPFAETVCLQTLLCQQKRAPKQLKLGDFKTIENYGYHLNAGKFSQLLTEHGTEKLGVKHILDDVIAVKSKSNGDIASLTTKEHGDINGDLFIDCSGQAAALIGKHFQVPFISKKDVLFIDKAIAVQVPYSCENSPVESATLSTAQTAGWIWDIGLPTRRGVGHVFSTKYTSIETATKQLKSYLGQSVDNIEQLTFRTLDINPGHRETFWHKNCVAVGMSSGFLEPLEASALVMVELAAKTIALQMPASREAMDVIARQYNKNMTFRWQRIIDFLKLHYVLSKRDDSRFWRDNRDPATIPDSLKELLTLWQYQPPENNGFLSPYDLFPAASYQYILYGMGFNTQANCLGNETELTKQSNEAINKVKSRQHKMPSLLPTNREILTEIRQQNREIHIDINQDNRQNNQPWQFLSSDNLSKVSQQYPIFFKKIASGYTPIYLTHLTDQGSIHQTNQHNKKFPYEENSAHTLFPFNDDALLEPVKLDITLNDDTEVKMSGLYVVQQNKWQQIKSSSQYSSTLTKQLDLMMSSLQHVPALIAVENKKRGV

SEQ ID NO: 89853 - protein, 413 aa, unidentified
  source 1..413: note = Caballeronia choica
  REGION 1..413: note = tr|A0A158KBA2|A0A158KBA2_9BURK Tryptophan halogenase; OS = Caballeronia choica OX=326476 GN=AWB68_05406 PE=4 SV=1
MSDHRAVDVDVAIIGAGPSGAVAAALLRKAGHSVRVLERQQFPRFSIGESLLPQSMAYLDEAGMLQAVVEAGFQYKNGARFVRRGESSSYDFRDKHTPGWGTTYQVERATFDDLLIRCAAEQGADVRFGHTVNAIETGERPALDVTDEAGTQYRVQARFVLDASGFGRVLPRLLQLETPTRMPTRAALFTHVRDDMPLRAIDREKICVAVHPEHGNVWYWMIPLAGGRASVGCVAESDFLQCTESERESRLRSLIRQEPTLGAWFGDAPFLMPVRTIGGYAANVARLHGPGFALLGNAGEFLDPVFSSGVTIALRSAHLAACVLVRQLSGAAVDWQIEYDDELRRGIDVFRAFVERWYSGELQDILFHAEQAPQIRRMISAVLAGYAWDETNPFVKDAGRRLDTLHEICKATR

SEQ ID NO: 89854 - protein, 511 aa, unidentified
  source 1..511: note = Citromicrobium sp.
  REGION 1..511: note = tr|A0A2D9IBB3|A0A2D9IBB3_9SPHN Tryptophan halogenase; OS = Citromicrobium sp. OX=2024827 GN=CL805_07460 PE=4 SV=1
MTAKPISKIVIVGGGTAGWMAAAALSRVLAGPRGPSITLVESEAIGTVGVGEATIPQIIGFNKLLGLDENEFVRETHAAYKLGIEFVDWLRPGHSYIHPFGTYGLDMLGIEFHHFWLRGRELGDPTQLDAYSTAAAAGAAGKFFWPQSGNPKSPLSKLAYAFQFDASRYARFLRKRAEQQGVVRQEGKVIEVVQDADSGFVTGVRLEDKRVIEGELFLDCSGFRSLLLGQALEVPFEDWSKWLPCDRAVAVPCTLAGEHQPLTRSTARPAGWQWRIPLQHRIGNGHVFSSAHMDQDAATDLLLANLDGDPLAEPNHLRFTAGHRERFWDKNVIGIGLAGGFLEPLESTAIHLVQSSVARLLAYFPTAAFGGAEIDRFNSETAREYRDIRDFLVLHYKATERDDSEFWRYCRDLEPPEGLAEKIELFRSSGRVIREHEELFTEASWLAVMAGQGIEPQSYHPVAALLDDAETLQRLEHIRQVVAHAVSKMPTQDQFLAQQGSAIDASERLTR

SEQ ID NO: 89855 - protein, 499 aa, Sphingomonas sp.
  REGION 1..499: note = tr|A0A4Q7SHB6|A0A4Q7SHB6_9SPHN Tryptophan halogenase; OS = Sphingomonas sp. BK036 OX=2512122 GN=EV283_3239 PE=4; SV = 1
MNDTSEPPRTRVVVAGGGTAGWIAAAAIVRQLGSLVDVTLVESDEIGTVGVGESTIPTARGFHAFLGIDEAAFMRATQATFKLGIAFENWRQVGDRYFHPFGSVGRSVAIADFQHFWLEARARGFGGAYGDYSLEQQAAGADLFGHDEQHSLAYAYHLDATAYARFLRTLAEPWGVRRVEGCIERVERDGEGGDIAALVLASGERIAGDLFVDCTGFRALLTEGTLDTGFEDWSEWLATDRALAVQTETVGPPVPYTRAIAHGAGWRWQIPLQTRTGNGLVYSSAHMSDDQAHETLISALDGRPLFEPRPLRFRSGMRRQAWNRNCIALGLAAGFIEPLESTSIHLNMNAVIRLIQLFPFRGDDHGALASRFNAQSRHEWEHVRDFIILHYHVTQRDDSAFWRDCARMTIPDSLAERIALFAKTAGAWQGQDDLFRIDSWVSVMLGQGVVPRAHHRIASIIKGQELRTSFEDLSRGIASTVRLLPRHCDFLARYCPADG

SEQ ID NO: 89856 - protein, 500 aa, unidentified
  source 1..500: note = Duganella phyllosphaerae
  REGION 1..500: note = tr|A0A1E7X035|A0A1E7X035_9BURK Flavin-dependent tryptophan halogenase RebH OS=Duganella phyllosphaerae; OX = 762836 GN=rebH PE=4 SV=1
MPHQQQSRPVRRLIIAGGGTAGWMAAAALSRTLGKVLDIKLVESDDIGTVGVGEATIPSLAQFHRLIDIDERDFMAATQATFKLGISFENWRARGHDYIHAFGSTGTDHWTAGFHHFWQKGREAGIAADYGDYCLEHKAARALRFGHLPDDGLVYAYHLDASRYARYLRRYAEHFGIERIEGKIADVQRDPANGNVAALVLDSGRRLEGDLFLDCTGFRSLLLGQTMGVPYDDWSQWLFNDSAIAVQTESVGPAVPYTRAIAHDWGWQWRIPLQHRTGNGMVFSSRFVDDDTARAALLANLEGKPLTEPRVIRFTPGQRQQVWAGNVIGLGLASGFLEPIESTSIHLIQRSIVRLLQLFPTEGIEPADVAEFNTQAADDIRTIRDFIILHYKVTERDDTPYWRAARDMAVPPSLQHRLDLFGGSGRVFRSQNELFSENSWVQVMLGQGLIPRTQHHTAHVMPERELAAFLDGIRTGIDRTVAQMPGHQAYVERYCPGGKP

SEQ ID NO: 89857 - protein, 490 aa, unidentified
  source 1..490: note = Citromicrobium sp.
  REGION 1..490: note = tr|A0A2D8AYR3|A0A2D8AYR3_9SPHN Tryptophan halogenase; OS = Citromicrobium sp. OX=2024827 GN=CL805_08100 PE=4 SV=1
MAAAALARLTSARVTLVESDAIGTVGVGEATIPQIRLFNRGLGIDEAEFLRETKATFKLGIEFDGWLREGEAYMHAFGTIGHGAGLLPFHQYWLRARAEGKAAPLGRYSLNERAARALKMQMWPAKPGQPVPDMPWAYHFDASLYAAYLRRHAEHHGATRIEGKVGAVERDNQTGDIASITLESGETIAGDFFIDCTGFRALLIEQELGAGFEDWSQWLPCNRAVAVPCATKGDFTPYTRATARRAGWQWRIPLQHRIGNGLVYCSDYLSDEDAEAMLLANLDGDPLAEPNRVRFTTGMRQRQWVGNCLALGLAAGFMEPLESTSIHLIQSSIARFLQMLPSGRPAPALVDEFNRQAQFEWRSIRDFLILHYRANGREGEPFWDRCREMALPDTLAAKIEQFRASAYMHREREELFTEPGWLQVFVGQGVLPEGHHPLADAMPDVDLERMLGDIEGGIGGIVDSMPGHAQFLRAYCMPRSEPAAEMRKTA

SEQ ID NO: 89858 - protein, 500 aa, Xanthomonas gardneri; identical to SEQ ID NO: 85589
  REGION 1..500: note = tr|A0A1L5Y280|A0A1L5Y280_9XANT Tryptophan halogenase; OS = Xanthomonas gardneri OX=90270 GN=BI317_11020 PE=4 SV=1

SEQ ID NO: 89859 - protein, 378 aa, Corallococcus sp.
  REGION 1..378: note = tr|A0A3A8TKD3|A0A3A8TKD3_9DELT Tryptophan halogenase; OS = Corallococcus sp. AB038B OX=2316718 GN=D7Y04_08020 PE=4; SV = 1
MDTIRYDVAVLGGGPAGAALALALCRHSGLRVVLFERSTYAQPHLGETLPPDSRRLLARLGVWEAFARQGHLRSMGSCSRWGDSALGDNDHLRSPWGTGWHLDRSRFDRMLADEALRFGVDVRIGSAVTDWTPLETGGHRLFVPTEGDAPRDFVDARFVVDATGRSAVFATSQGARRHTVDRAFGLCGTFALQPGRTVDALTLVESCEDGWWYSARMPGDQVVFGLMGDKDSLQGLMPEDAEAWRARMERAPETRRRLEACVFTGEPLRVVSANVACLDRLHGEDWLAVGDAACMLDPLSSQGTSQALRTANQAADVVSRYLRGDSAALRLHEVRTRHEFQEHLRIREGYYRLERRWPGAPYWRNRQQSCAPVLSSLP

SEQ ID NO: 89860 - protein, 504 aa, Caulobacter sp.
  REGION 1..504: note = tr|A0A0Q7T9X7|A0A0Q7T9X7_9CAUL Tryptophan halogenase; OS = Caulobacter sp. Root1455 OX=1736465 GN=ASD21_16165 PE=4; SV = 1
MAHLNKIVIVGGGSAGWICAAMLSHYFQNGPTQVELVESEEIGTIGVGESTIPPFLQLIRTLGINEQEFIQETQAAFKLGIRFEDWLEKGDVYYHPFGQIGGPLEVNEFYQCWLRAKQNGHPSDLQDFAPATVMAKAGKFMLPAKAQRTMIANANYALHVDAKLVALYLRKFAEARGVKRTEGIVTDVATRPDGGVAKVIMKDGREVAGDFFIDCSGFRALLIGKTLGEPFRDWGDVLLCDRAIAAQTENVGAPHPYTLVQAQDFGWRWRIPLQHRSGNGYVYASKYLSDDEATATLLGQIKGEVVLGPTVIPFKTGVRERPWVKNVVSIGLSCGFIEPLESTALHLIYKGMDYLLRFMPDMDADQTLAAEYNRRMVADYEEIRDFIVLHYVTTRRDDTPFWRDYQKVDPPESLRERIALFKAAGVLRDGVDDMFRAPSWQSVMEGMGVRPDRYQQLVDRIPLSVIMNLMDKSAPMLADFVATLPSHEEFLRTHCPATPFKRSA

SEQ ID NO: 89861 - protein, 505 aa, Xanthomonas translucens
  REGION 1..505: note = tr|A0A2S0NW10|A0A2S0NW10_XANCT Tryptophan halogenase; OS = Xanthomonas translucens pv. undulosa OX=487909; GN = NZ30_00425 PE=4 SV=1
MAQIRKVVIAGGGTAGWIAACALAHQFRDLLDITLIESEQIGTVGVGESTVPPIRSFHRFLQIDEQEFLRAVAGTFKLSISFENWRRPGERYIHPFGLTGQSTLVCAFHHFWLEAQRRGMLSELGDYCLETVASRLDRFALQQSPPVNYAYHLDAGLYARLLRRHAERYGLKRVEGRIQQVRQHAESGCVEALLLENGTLVEGDLFIDCTGFRGLLIEQTLHTGYEDWKQWLPCDRAVAVQTEAVAAPVPYTRAIAHAAGWRWHIPLQHRVGCGLVFSSAHLSDDEARAKLLHDAAAPPIKEPWLVPFRTGRRRKAWNKNVVALGLASGFIEPLESTSIHLTIAAVMRLLTLFPSEGIAPAMVDLYNAVSRAEMEHVRDFIILHYHANQRDEPMWQACREMALPDSLQQRLRAWHERAHAWQGADELFRVDSWIHVLLGQGIVPAQHHTLARALPDQQLQQFLDAIRQPIDRAVAQMPSQQDFIARYCKAGPEVWAGRAPVAAPA

SEQ ID NO: 89862 - protein, 534 aa, Sphingomonas sp.
  REGION 1..534: note = tr|A0A4Q7SJM9|A0A4Q7SJM9_9SPHN Glycine/D-amino acid oxidase-like deaminating enzyme OS=Sphingomonas sp. BK036; OX = 2512122 GN=EV283_3464 PE=4 SV=1
MSHADVNEEAIRTVIVVGGGSAGWLTACRLAARSVSSGSKVKVLLVESATVPSVGVGEGTWPTMRNTLRKIGIDETDFIRSCDAALKQGAQFVGWTDGSAGDAYYHPLNPPAGAGDIDLSPYWLHASATETGMGTDAPAQVGASRASFADWVDYQSALCDAGLAPKTITAPEYGGQANYAYHLDAGKFATLLCNHATTSLGVEHVVGDVVRANLKGNGDIRNVELADGRILAGDLFVDCSGFAALLIGGVYDVPFRSCRDILFADRALAMQVPYQGEDDPIACHTISTAQDAGWIWNIGLWTRRGVGHVYSSAHTSDDEAEAALRRYVGPASDALPVRRISFEAGHRERFWQNNCVAIGLSAGFLEPLEASALMLIETSLDSLVDRLPQTRSTMDAIARQFNATFSHHWQRIIEFLKLHYAITHRRDTAFWRDNAAPTSMPEGLRERLALWKHHAPAAQDFAHAREVFSWPSYQYVLHGMRFASSYRGEPATADGKLVDSLVARNARVRAELVRKMPRHRDLLRAVREHGLQRV

SEQ ID NO: 89863 - protein, 506 aa, Pseudoalteromonas denitrificans
  REGION 1..506: note = tr|A0A1I1KVT2|A0A1I1KVT2_9GAMM Tryptophan halogenase; OS = Pseudoalteromonas denitrificans DSM 6059 OX=1123010; GN = SAMN02745724_02186 PE=4 SV=1
MKIKRIAIIGGGTAGWLAANHLGVELNADPEIEITVLESKDVPSIGVGEGTVPYLMKGLKRFGISEAQLLLSCDATFKQGIKFVNWLDPESHGENYYYHPFDTPYPGGFDISPFWVSQGEGRPFDDVGIQARICELGLSPKRKNSGEYLGDLAYAYHFNATKFATLLAENAQKRFNVVHEFATIVGVKKDDKANISHLLTDTGSELPFDFYVDCSGFSSILIDKELKVPFVSKAKELLTDTVLVQQMPLVDDENINPYTTATAHKAGWIWDIPLINRRGTGFVYSSQHMSDTEALSLYAEYLNVPKDSISPRKISMDIGYRKEFWSKNCVALGLAQGFLEPLEATSILISDFSAELLARNFPRYASDIDISIPYYNKVVTYVWEKVVDFIKLHYCISDRRDSQFWLDNQKPDTISEELKARLQKFKLQPPQQSDFFSRFDLFDDKNFLYVLYGMKFDTKSTKLTQMEIEQSYSLIKSNDVLVNKADKYLMPHKDWLMGLKAAVAKN

SEQ ID NO: 89864 - protein, 537 aa, Burkholderia sp.; identical to SEQ ID NO: 89671
  REGION 1..537: note = tr|A0A4R4C5I0|A0A4R4C5I0_9BURK Tryptophan 7-halogenase OS=Burkholderia sp. SRS-25 OX=2094190; GN = C5O79_14150 PE=4 SV=1

SEQ ID NO: 89865 - protein, 506 aa, unidentified
  source 1..506: note = Xanthomonas nasturtii
  REGION 1..506: note = tr|A0A3E1KFS2|A0A3E1KFS2_9XANT Tryptophan 7-halogenase OS=Xanthomonas nasturtii OX=1843581; GN = DZD52_16910 PE=4 SV=1
MSPAPLRNIVIVGGGTAGWMAAAAFARVLGPSFNVHLIESEQLGTVGVGEATVPHIKAFNNLLGIDEAEFVRQTQGSFKLGIAFVDWQRPGTSYIHGFGTQIGHPLGLLPFHQYWIKQHARGKAQPLGAYTLNTVAAARGKFMTSAGDVPATSPLANIAYAYHFDATQYARFLRKYSEQRGVTRIEGLVEQVQLHPETGHVQSLQLASGQLVHGDLFIDCSGFRGLLIEAALHTGYHDFTHWLPCDRAFAVPCENVGPPTPYTRSTARAAGWQWRIPLQHRTGNGYVYCSAHISDDEAAATLLANLDGKPLADPRPLRFTTGRRKQVWNRNVVALGLASGFLEPLESTSIHLIQSGISKLLELFPREGISPVLVQRYNDRLAFEFDRIRDFLLLHYHATERDDSAFWRHCRSMPITPELQTALDLFRDSGRFYRNAEEMFAEISWVQVLVGQGILPQGYHPLVDQVPDRDAEGFLASVAQTISHCVDVMPTHQQFIDRYCKAPAVP

SEQ ID NO: 89866 - protein, 501 aa, Caulobacter sp.
  REGION 1..501: note = tr|A0A0Q7T878|A0A0Q7T878_9CAUL Tryptophan halogenase; OS = Caulobacter sp. Root1455 OX=1736465 GN=ASD21_17385 PE=4; SV = 1
MTDQRLRKIVIVGGGTAGWMTAAALGRFLKDGHTQVTLVESEEIGTIGVGESTIPQINIFNRMLGLDENEFVRRTKATFKLAIDFVDWKQIGHRYYHPFGPYGVDMEGVSFHAYWLRLKAMGEAADLTDYSLQALAADQGKFMRANGQTNSPLGTIAHAYHIDAGLYAQYLRGYAEDRGVRRQEGKIVQVHQRAEDGFVEAVTLEGGQRVEGDLFIDCSGFRGLLIEQTLKTGFEDWSHWLLNDRAVAVPCELAGSRQPVTRATARPAGWQWRIPLQHRLGNGYAYSSEHIGEDEATTYLLANLDGAPLRDPFTLRFKAGRRLKSWNKNVVAIGLSAGFMEPLESQSIHLIQVGISRLLAMFPDKRFETPDIDRYNRVMRFEYEKIRDFIILHFHATQRSDTPYWDYLREMPIPDYLADKMAVFKSYGRVFRENEELFNDTSWFAVMIGQGIEPRGHDPMADVMSEEDLRAKMGNIRAVIAKSAEVMPDHLKFIADNCAAI

SEQ ID NO: 89867 - protein, 504 aa, Sphingomonas sp.
  REGION 1..504: note = tr|A0A4P7R4Q3|A0A4P7R4Q3_9SPHN Tryptophan 7-halogenase OS=Sphingomonas sp. PAMC26645 OX=2565555; GN = E5673_11150 PE=4 SV=1
MANHPLRIVIAGGGTAGWMAAATFARFLETGYEIDLIESDEIGTVGVGEATIPQIHLFNDALGLDEDAFLRATGGTFKLGIEFVDWFKPGHRYMHAFGDVGRDVGLLPFHQYWLRARSLGLAGELGAYSLNTHAALAERMQRGPARTARTLPSMPYAYHFDAGLYARYLRRYSETRGVNRIEGKIVRVTRDGESGDVSGLVLENGTTVDADLYIDCTGFRGLLIEEALGTGYEDWTRWLPCDRAIAVPSARSNKFTPYTRSTAHPAGWQWRIPLQHRTGNGVVFSSAHMSEDEATATLLAGLDTPAMADPRTIAFRTGRRKRMWNRNVVGLGLAAGFMEPLESTSIHLIQSAISRLLKLLPGRVIADADRTEFNRQSDFEYERIRDFIILHYKATARDDTPFWRECRDMAVPDTLAAKIDLWRGNGHIVREHEELFTEVGWLQVLAGQGIMPAGHHPLADAISTSDLGEFMDTIDKLNAREAGQMQDHAAFVAQHCASPAGLGA

SEQ ID NO: 89868 - protein, 501 aa, unidentified
  source 1..501: note = Thalassotalea sp.
  REGION 1..501: note = tr|A0A1Q6CII5|A0A1Q6CII5_9GAMM Tryptophan halogenase; OS = Thalassotalea sp. PP2-459 OX=1742724 GN=BI291_12965; PE = 4 SV=1
MQKGINSICIVGGGTAGWMAASLLSNLLKGCQIKTTVVESPDISTIGVGESTVPSIIDFLNASQIDLKEFIKATSATFKLGIRFDDWYAVNEHYFHPFGHIGRSLNGFDFYQVWLKSLSEGNKASLMDYSVNAEMAKHNRFVLKPKQTKDWVIANSSSALHLDASQVTRFLRELCLQRGVERIEATVSDVVLNEQGFIDQLHTDCKKQITSDFFIDCTGFKALLIEKALGIPVEEWSKYLPCDRAVTIQTQTDQPPVPYTIAKAQAAGWSWTIPLQHRTGNGYVFSSKYCTDEQAIKTLTNNVQGKILTEPNVIPFTTGKREKVWHKNCLALGLAGGFLEPLESTAIHLVYKTLVNFSQHFPDTDFDEQNEQMFNQKMDLDYLEIRDFIILHYATAQRADTDFWQMCQQMPIPESLNETLSIFKKRGELKSVYGDFFTKNSWCAVLEGMHIRPNKYYPLIDGFDPQKLANMLMKNAQLIKDTVSTMPLHSDFIHQHCRANK

SEQ ID NO: 89869 - protein, 484 aa, Streptomyces scabiei
  REGION 1..484: note = tr|A0A086GI43|A0A086GI43_STRSC Tryptophan halogenase; OS = Streptomyces scabiei OX=1930 GN=IQ62_44000 PE=4 SV=1
MIVVGGGPAGSTAATAVALRGHRVLLLEQQTFPRYQIGESLLPSTVHGVCRILGVEEEVARAGFKTKRGGTFRWGRNPDPWQFSFALSPRLADPTSFAYQVERSRFDAILLDNARRVGVDVREGCRVKGVLGDEERVRGVGWTGPAGETREARARYVVDASGNGSKIHGEVGGRRTYSDFFRNLAVFGYFAGGKRLPKPNDGNIFCAAFDEGWLWYIPLRDDLTSVGAVVGRGNAAAIQRDPVTAWRGLIDSCPEVRGLLGGVAQATEAPYDQVRVRKDWSYWKSQLWRPGMVLVGDAACFVDPVLSSGVHLATYGALLAARSINSGLAGTLDEDRLFDEFEARYRHEYGLFHEFLVSFYDMHQDERSYFWKARKVTHVDATEMEAFVELVGGLASGDTSLAGPGQAGTRLTATASELDHAVGRLPDSDGLRNPLFESASIRQVFQEGTILQERGVFGGPLEKETPLHPGGLMASEDGLTWVTE

SEQ ID NO: 89870 - protein, 500 aa, unidentified
  source 1..500: note = Marisediminitalea aggregata
  REGION 1..500: note = tr|A0A1M5E756|A0A1M5E756_9ALTE Glycine/D-amino acid oxidase OS=Marisediminitalea aggregata OX=634436; GN = SAMN05216361_0280 PE=4 SV=1
MKQTHPASVIIVGGGTAGWMCAAYLAKQWGAKSHITLIESSQIGTVGVGEGSTPFLKQFFTDLGWQEQDWMPHCDATYKTGIEFANWTNSQRFSQYFHPFFTPLDQQTGELFFDSCQTLRSSRGNADVKPEHYFCAAEMVRKRVTPQSTKLPGDIDYAYHFDASKLALSLKSFSTQLGVQHKEGKVAEVYTEEGNIRGLRMEQGETLSADLYVDCSGFVGLLMKKALNAPFRSYRETLFNDAAVALPTQHNSNEPIAPQTRSVGMDNGWMWQIPLTSRIGNGYVYSSDFCSADEAEGALRKALNVDDLVPARHLKMQVGRLDEHWQGNCVAIGLAQGFIEPLEATALMLVQYALYQLVDGVDSAKPLASAQQAYNREMNRMFDGIRDYIAAHYYLNTRTDSAYWQACRHEMCVPENLQYLLDKWDSGACFETALDHLDSELVYLRPSWYCILAGMGRFNSPEAHQKAPVHQASLAHLAKLTAHYFSQQQRPRSGELTCGM

SEQ ID NO: 89871 - protein, 477 aa, Sphingomonas sp.
  REGION 1..477: note = tr|A0A4P7QXN5|A0A4P7QXN5_9SPHN Tryptophan 7-halogenase OS=Sphingomonas sp. PAMC26645 OX=2565555; GN = E5673_04050 PE=4 SV=1
MSDTRIRTIAVVGDGVAGWSAAAALKARVPGISVALIPVAELRPGFVDLFGGASPSIGEFHTDIGLDERDVLTRTGASIRLGTRFVRWSGADYTHAYGPAGMPVDGVPFATLWEGLGGTEPFDSFAPAAALAAAGRFVPPRAGLLGGYANGLQLDPPVYRRFIEAYARHLGVVVTASGLRQAETDGDRVTALHLDDGGRLEADLYIDATNADAHLITQFGDDWQDWSPWLPGDSFVQRRGTSDAEPGDRFLSPLEQVEAIDGGWRLTSCLPGRTDTAIVYASGVRAEPGDVRRFRSGRRSRAWIGNVVAIGEADCVVEPLEAAPLHVLHTQIDRLVASLPDRDFDEVELAYYNRETGQEADRLRDFLILHYATSDRPEPFWQAARDATLPPELAETLTLFRERGRLPIRDGESFDRDSWHAVLLGQGILPRRGDVLAAAIDPKRARAAMADFRTRLSKAVAAAPTHRAYLASLRTNA

SEQ ID NO: 89872 - protein, 532 aa, Caulobacter sp.
  REGION 1..532: note = tr|A0A0Q7TLJ1|A0A0Q7TLJ1_9CAUL Tryptophan halogenase; OS = Caulobacter sp. Root1455 OX=1736465 GN=ASD21_05230 PE=4; SV = 1
MSDAPSIDHILIVGGGTAGWMTAAYLARRLGAMRPDGVRITLIESSEIGIIGVGEGTFPTIQNTMRTIGVDEARFMREAGAAFKQGIKFVDWKTAPQDGVHSHYYHPFAQPRLLNGGLDLAPYWLMGEAGNIPFSDAVTLQDKVCDAMRGPKRLDDPQYGGPMTYAYHFDAGKLAGLLRDVGKATGVKHVLGNVLSVNKTDDGSIASVTTREHGDLVADLYIDCTGFAGALIGEAMGSAWIDKGDTLFVDRALALQVPYDRPDAPVAATTISTAHEAGWTWDIGLPERRGTGYVYSSRHTTDDRAEQILRGYVGKAGEGLNPRLLKLKVGHRDRHWIKNCVAVGLSGGFLEPLESTGIVLIEAAAYMLARNLPRRGGMEAAARQFNTAMTDRYLRAIDFIKLHYCLSQRTDNGFWTDNADPASIPESLQDHLAMWKHRPPNVFDFPNLHESFKYFNYQYILYGMGFETTVDPAAHVHGDLARADFGRVREAGLRAAASLPDHRALLTDVYTKGFSTKAPDLAAAEAGEAPRR

SEQ ID NO: 89873 - protein, 497 aa, unidentified
  source 1..497: note = Marisediminitalea aggregata
  REGION 1..497: note = tr|A0A1M5Q7R3|A0A1M5Q7R3_9ALTE Tryptophan halogenase; OS = Marisediminitalea aggregata OX=634436; GN = SAMN05216361_3766 PE=4 SV=1
MTQNKTRVVIAGGGTAGWLSAFSLVTRLGALLDITLVESDQIGTVGVGEATIPTMCNFHRLMGLDEREFMAATQATFKLGIQFDNWGNQGDSYVHSFGEIGQRSWMAEFHEFWMEAVANGQQDTLEDYCLELKAAKQNKFALKVGNRPLNFAYHLDATAYAAYLRNKAEQAGVTRIEGKITTVNKHPDSGNLRELVLDNDARIEGDVFIDCTGFRALLIGEALGVGYDDWSHLLAADRAIAVQTTAVEPPRPYTIATAHNAGWQWRIPLQSRVGNGIVYSSRFSDDETALATLMSNVTGEAVTEPRYLKFKTGMRQQAWAKNCVAIGLSSGFLEPLESTSIHLVTTALIRLMKLFPFEGECGLLAERYNRETQKEMETIRDFIVLHYHLTQRDDSAFWDFYRNMEIPESLQHRMAMFAEHGYVWPDDVALFRVDSWVQVMMGQGLMPKRHHGASRMLPTASLTQQLTAFKQSVNNALAQLPEHDAFIKQYCPADKSA

SEQ ID NO: 89874 - protein, 503 aa, Massilia sp.
  REGION 1..503: note = tr|A0A0Q6SHN6|A0A0Q6SHN6_9BURK Tryptophan halogenase; OS = Massilia sp. Root335 OX=1736517 GN=ASC93_19425 PE=4 SV=1
MDNNNQQGRGRPIRRVVIAGGGTAGWMAAAALSRTLGKVIDIKLVESDEIGTVGVGEATIPSLVHFHRLLDIGEQEFMAATQATFKLGISFEGWRARGEDYIHSFGMTGTDHWTAGFQHFWLKGRERGLAGDYGDYCLELVAAQEKRFGHLPNQGINYAYHLDATRYARYLRRFSEHFGAERIEAKITGVDTDPATGHITALVLDSGTRVEGDLFIDCTGFRALLLGQTMGEAYEDWSQWLFNDSAIAVQTESTGPAVPLTRSMAHDWGWQWRIPLQHRTGNGIVFSSRYIDEDTARATLLGNIEGKALTEPRVIRFKPGQRKRVWIGNCIGLGLAAGFLEPIESTSIHLIQRGIVRLLQTFPSHGIQQSDIDEFNAQSEDDIRTIRDFIILHYKVTNRHDSPYWHDAATMAVPDSLQHRIDLFRDGGRVFRYANELFAENSWVQVMLGQGLSPQRWHPSADLMGDDELRGFLDGIRSNVRRTASQLPPHQHYVERYCPAGKP

SEQ ID NO: 89875 - protein, 520 aa, Streptomyces rimosus; identical to SEQ ID NO: 83908
  REGION 1..520: note = tr|L8ERE6|L8ERE6_STRR1 Tryptophan halogenase PrnA; OS = Streptomyces rimosus subsp. rimosus (strain ATCC 10970 / DSM 40260 / JCM 4667 / NRRL 2234) OX=1265868 GN=SRIM_24 346 PE=4 SV=1

SEQ ID NO: 89876 - protein, 500 aa, Massilia sp.
  REGION 1..500: note = tr|A0A0Q6S2A0|A0A0Q6S2A0_9BURK Tryptophan halogenase; OS = Massilia sp. Root335 OX=1736517 GN=ASC93_23205 PE=4 SV=1
MQQHPIRKVVIVGGGTAGWMTAAPLAQRLGKRCEIVLVESPDIGTIGVGEATLPTIRFYNAALQLDHADFIKKTQATFKLGIEFKDWGHVGNRFFHGFGDFGPPLNGVAPHHHWLRLARTFDHMPAMENWSMASVMARENKFAMPADTQPGVTDAFSFGFQFDASLYANYLRDYATARGATRVEGTITGVDQHPETGFVTAVRLADGRAIDGDLFIDCSGFRGLLIEGTLKAGYEDWSEHLPCNSALAVPCARVEPLTPYTRSTAKGAGWIWRIPLQHRTGNGHVYSNAFTTDEKARQDLLDGLDGAALDEPRQLRFTTGKRKKSWVKNVVAIGLSAGFVEPLESTSISLIETAVGTLIELWPDRDFRPELAAEFNRLIGSRYESIRDFIIMHYKLTRRDDTEFWRYCANMTIPDSLAHQIELFRETGRVTILDRDSFGAPSFVSMLMGLGVVPARYDPFVDDVDMRQLHGHFAGMRDLIAQTVAKMPGHGAYLEKNAKA

SEQ ID NO: 89877 - protein, 498 aa, unidentified
  source 1..498: note = Marisediminitalea aggregata
  REGION 1..498: note = tr|A0A1M5FKN4|A0A1M5FKN4_9ALTE Tryptophan halogenase; OS = Marisediminitalea aggregata OX=634436; GN = SAMN05216361_0886 PE=4 SV=1
MNKPGNSSNNVNNVIIAGGGTAGWMAAAALSRLIGKSVNVTLVESKDIGIVGVGEATIPPIRTFHKLLGIDEKAFMRATNATFKLGIEFANWREPDYAYIHSFGVTGRECWAGEFHHFWMRAQQEGLGSAFGDYCFELKAAQQYKFGMSERMPINFAYHFDAVAYGKFLRQFAEKLGVTHVEGDIDKVNVNVTSGDIESLTLKDGRNLAGDLFIDCTGFKGLLIEQALHTGYENWSHWLPCDRAVAMQTESVEAPAPFTRSVAHEAGWRWQIPLQNRVGNGLVYCSRYMSDEQAKQTLMDQVTGNPINDPRVIQFTPGKRRLGWNKNCVALGLASGFIEPLESTSIHLIMTGIIRLLRLFPFDGVTQSAIDEYNNKYNSEMAAILDFIVMHYKVTNRDDSLFWQHCQRMAIPDSLTHKINLFKETGRVFLDDGDIFRVDSWTQVMLGQGLMPEQYHRVADEMSIEELTRFINGLHQHVSQQVQALPAHGDFLKQYLGM

SEQ ID NO: 89878 - protein, 525 aa, unidentified
  source 1..525: note = Marisediminitalea aggregata
  REGION 1..525: note = tr|A0A1M5FKH6|A0A1M5FKH6_9ALTE Tryptophan halogenase; OS = Marisediminitalea aggregata OX=634436; GN = SAMN05216361_0887 PE=4 SV=1
MNAPIQQVVIVGGGTAGWLCAGMLAAKLGKQGERHRGVEITLIESPDVSTIGVGEGSWPSLRDTLREIGLSESAFITHCQASFKQGSTFVGWRDGSEHDRYHHPFTNPAGYTEIDVHACWQALHSNKPYDRAFSVQPELCEQHKAPKQLATPDYAYVLNYGYHFDATRLAEMVSDHCVNQLGVRHVQAHIDQVVSHHNGDIKALTTQCGQILEGDLFIDCSGQSALLAGKHYNVPWHSVKDILLNDSAMAVQVPYHEQDNTIASTTLATAHPQGWSWDIGLQHRRGVGMVYSSDFASAEDIEQSLKQYLTKRLPHDVVEQATCRQLKFSPGYRSEFWTHNCLSLGMASGFIEPLEASAVAMVELGVRMLCEQFPQNRDHMRILAARYNERFAYRWARVIDFVKLHYAINQRTNDAYWNAHRDPATWPDSLKSLLSLWQYQPPSRYDVVQNEEIFPSASYQFVLYGMGFKTESPALADSSDMLKRAGAISQKLQATLMQFGQGLPDNRALLNAIRERHKHSSGATL

SEQ ID NO: 89879 - protein, 505 aa, Sphingomonas sp.
  REGION 1..505: note = tr|A0A4P7QYY9|A0A4P7QYY9_9SPHN Tryptophan 7-halogenase OS=Sphingomonas sp. PAMC26645 OX=2565555; GN = E5673_07440 PE=4 SV=1
MTLGSPVRRIVIVGGGTAGWMAAAALARLIPTGASVTLIESDTIGTVGVGEATIPPIRAFNAMLGIDEAAFLAATAGSFKLGIEFVDWGAIGERYLHPFGGFGFDIEGVRFHQHWRRRRAAGVVEDIDAYSLCAVAARAGRFAPPSPDPASILSQMAHAYHFDAGLYARFLRGRAERDGVTRIGGEIGDVALDGDTGHVRYVTLAGDRRIEGDLFLDCSGFRGLLIEQALGAGYEDWTRWLPCDRAVAMPTANIGTAIAPYTRSTAQASGWQWRIPLQHRTGNGYVYSSAHCSDDEAAATLLDGVDGPPLADPRVLRFTAGRRRKQWIGNVVALGLASGFTEPLESTSIHMVQTGISKLLALFPDQGFSPVEIDTYNRLAETQFDQVRDFLVLHYHATRRTDSPFWREAGARAIPDSIAEKIALWRRRGRLFRWEDDLFAEASWVAVLLGQGIVPEGWDRLADAVDARDVDARFDRLRAMFADAAARMPRHEDYLARTSPTRVRA

SEQ ID NO: 89880 - protein, 537 aa, Burkholderia contaminans
  REGION 1..537: note = tr|A0A2S9P776|A0A2S9P776_9BURK Tryptophan halogenase; OS = Burkholderia contaminans OX=488447 GN=C6Q17_05530 PE=4; SV = 1
MSHPIKNIVIVGGGTAGWMSASYLVRALQQQANITLIESEAIPRIGVGEATIPNLQKVFFDFLGIPEREWMPQVNGAFKSAIKFVNWRKSPDRSRDDHFYHLFGSVPNCDGVPLTHYWLRKREQGFQQPMEYACYAQPEALDARLAPCLLDGTRQMPHAWHFDAHLVADFLKRWAVARGVTRVVDEVVEVHLNERGDIASLSTKEGRTLEADLFIDCSGMRGLLINQALKEPFIDMSDYLLCDSAVASAVPNDDARVGIEPYTSAIAMNAGWTWKIPMLGRFGSGYVFSSKFTSRDQATADFLNLWGLSDKQPLNQIKFRVGRNGRAWVNNCVAIGLSSCFLEPLESTGIYFIYAALYQLVKHFPDTGFDPRLRDAFNAEIVYMFDDCRDFVQAHYFTASRDDTPFWRANRHDLRLSDAIKDKVERYKAGLPLTTTSFDDATYYETFDYEFKNFWLNGNYYCIFAGLGLLPDRSLPLLQHRPASVDKAEAMFARIRREAERLRASLPTNYDYLRSLRDGEAGRARSQPGPVAAPETL

SEQ ID NO: 89881 - protein, 505 aa, unidentified
  source 1..505: note = Poribacteria bacterium
  REGION 1..505: note = tr|A0A3D2S321|A0A3D2S321_9BACT Tryptophan halogenase (Fragment) OS=Candidatus Poribacteria bacterium OX=2026781; GN = DHW51_20575 PE=4 SV=1
MNDKVIKDIVIIGGGSAGWLAAGIIAAEHNNPKHDVHFINVTLIESPNISSIGVGEGTWPSMRTTLKKIGISETAFIKDCDVSLKQGTLFAGWKNESDVYTHPFTVPHGYAEHNLVNEWQKSSSHIPFAEAVCSQNTLMLRNQAPKNITTPEYSFNLNYGYHLDAGKFAEKLNTHCTEILGVIHKRAEVININAHENGDLKSLQLDSGEIIQGDLFIDCSGSRSLLLGKHFGIPFSSKQKYLFNDSAIASQVPYSSDDDPIASSTLSTAQSSGWIWDIGLPSRRGIGHVFSSSYTDANVAETELRNHIKNLVGDEVAEQVSTRKIEFSPGHREKFWHKNCVAIGMAAGFIEPLEASALVLVELSANMIAEQLPQNRKIMDIVSKRFNEKFLYRWNTIIDFLKLHYILTERDNSEYWRDNVSRESIPASLQEKIDLWKWQSPYHKDTLHIDEMFPSASYQYILYGMGFKTNPGNFRRSNQETSAVALDLFDENAMRTKQLVSSMPT

SEQ ID NO: 89882 - protein, 494 aa, Sphingomonas aquatilis
  REGION 1..494: note = tr|A0A511Q4M9|A0A511Q4M9_9SPHN Tryptophan halogenase; OS = Sphingomonas aquatilis NBRC 16722 OX=1219039; GN = SAQ01S_20150 PE=4 SV=1
MPDGGGGVTQDRAIRSILVAGGGIVGWLAAAALKRRAPFLAVTLLDSAPSPNALADRIACTLPSLAGFHADLGIGDEDAVVRTGAGYRLGTRFIGWGREDADYVHAYDHYGQAFGATAFHLHWLRAEWEGAVPRFDAFAPAAALGRAGRYAPPTPGTIFARHQAGLTLDLPRYTRMIRAFAAHVGVDVVAGGIGDIARDDRGGIAAVALADGRRLTADLYVDASGPEARLRDAIDTARDDWSAWLPCDRVMLADGPPAEPPLLTLVTAHAAGWSWDGGTQRGIVYAADRLADDDAAALLGAAGAARVTIRPGTRREPWRANCVAIGDAATAIDPLEWCNLHLALSAIDRLITMLPDRDMAPVEATDFNRQTLAEAERVRDMLALHYRATARPEPMSRAVASAAAPDSLAHTLRQFEERGRLPFYEEETFTRDGWAAVMIGQGIRPRRIDPLADAVPLADAHAAMHGITDAIAAALPHAPTHAAWLAAQARPLAR

SEQ ID NO: 89883 - protein, 497 aa, Sphingomonas aquatilis
  REGION 1..497: note = tr|A0A511Q0M0|A0A511Q0M0_9SPHN Tryptophan halogenase; OS = Sphingomonas aquatilis NBRC 16722 OX=1219039 GN=prnA; PE = 4 SV=1
MNAVISRRIVIAGGGTAGWMAAAALTRTLGRTATVTLVESDAIGTVGVGESTIPPLITFNRLLGINEAEFMAATQATFKLGIQFDGWKGPDDSYFHAFGLTGKDHWAAGFQHFWLDGQARGHTESYDDYCLELMAARAGKFAHLPDDRMSYAYQLDSTLYGRFLRRMAEGDGATRIEGKIARVDLDGESGDIAALVLDDGTRVEGDLFLDCTGFRALLIEQALHVGYDDWTHWLPCDAAIAVQTESVRPPVPFTRAMAHDAGWQWRIPLQHRVGNGIVYCSRYLPQDAALDRLLGNVEGAVLTEPNRLRFVTGARRKQWHRNCIAIGLAGGFMEPLESTSIHLIQRAILRLIRLLPPAGAISAHDIAEFNDQQLTDMDQIRDFLILHYKVTERRDSPFWRQCAAMDIPDSLAQKIGLFRETGRVFRRNDELFAENSWIQVMLGQGIVPQTHHPIAAKLPDDELARFLGGLRQGVATTVRGLPAHADYVARYCGAAPA

SEQ ID NO: 89884 - protein, 520 aa, Caulobacter sp.
  REGION 1..520: note = tr|A0A0Q7U0P0|A0A0Q7U0P0_9CAUL Tryptophan halogenase; OS = Caulobacter sp. Root1455 OX=1736465 GN=ASD21_00135 PE=4; SV = 1
MQTDKAQALKVVIVGGGTAGWMCAAGLARLLDLKAYDVTLIESDEIGAVGVGEATLPHIKTFNDMLGINEARFLAETQGTLKLGIEFRDWNRPGDRYIHPFGTFGEPWNGVDFQHHWVRAKLAGREVAPLQAYSYAAAACRANAFEFPNQDDKSIRSTYAYAYHFDASLYAGFLRRWATARGVKRIEGLVADIARDGANGHVASLTLKSGAIIQGDLFIDCTGFRSLLLGGQMDVAWQDWAPWLPCDRALAVPCKTGGDGLTPYTRASADLGGWRWRIPLQHRTGNGYVFSSAFLDENQARETLLAKLDGEALDEPRLLRFKAGRRVRGWSGNVVAMGLASGFLEPLESTSIFLIQAAVIDLVNLMPTPGEGDRMDPRLVAEFNRLFEIQYDRVRDFLILHYRANSRFGEPLWDHVRTMAIPDSLAAKMELFEARAALPDYKYGLFSRDSWLSVFEGQGLTPRAHDRLAESLTLDDLEARLADLKTRIDSNVATMTSHADFLARYAPGDVAAAALTPAVA

SEQ ID NO: 89885 - protein, 511 aa, Marinicella litoralis
  REGION 1..511: note = tr|A0A4R6XU19|A0A4R6XU19_9GAMM Tryptophan halogenase; OS = Marinicella litoralis OX=644220 GN=C8D91_0333 PE=4 SV=1
MIKNIVIVGGGTAGWMTAAALSRHLPEQCNVRLIESDQIATVGVGEATIPVIRTFNAGLGIDEQEFMRETNASFKLAIRFQNWGEIGEDYYHAFGYYGFPINDVSFHHYWMKMQQDPDIGGIHEYNMPYMACVDDKFEHKQFDNESIGSRYFYAYQFDATLYARYLRKWSEAKGVTRIEGKVTEVTQNNETGFVESVTLESGECIEGELFIDCSGFRALLLEKTHKIGYKDWSHWLPVNRAWAVSTAYENEDTPIPPYTRARALTAGWQWRIPLQNRTGDGNVFCDQYLSEDKALDQLLENIEGEPINEPRLLKFTTGKREKLWHKNCVGVGLSGGFLEPLESTSIALIQAAILLLIRNFPSKDFAPATENEFNRRMDIKYEESRNFIMLHYHMTRRNDSEFWNYCRTMKIPDELQHRIDVFRHSGHTAHKNSDLFIEHNWLQVMLGQGIKPDSYDPRVDVVDPQEVKRLMAQMRTDVAKAAKAMPTHNETLARYCAGELISNPLSKSSKQ

SEQ ID NO: 89886 - protein, 537 aa, Burkholderia contaminans
  REGION 1..537: note = tr|A0A3N8NYH3|A0A3N8NYH3_9BURK Tryptophan 7-halogenase OS=Burkholderia contaminans OX=488447; GN = DF037_01195 PE=4 SV=1
MSHPIKNIVIVGGGTAGWMSASYLVRALQQQANITLIESEAIPRIGVGEATIPNLQKVFFDFLGIPEREWMPQVNGAFKSAIKFVNWRKSPDRSRDDHFYHLFGSVPNCDGVPLTHYWLRKREQGFQQPMEYACYPQPEALDARLAPCLLDGTRQMPHAWHFDAHLVADFLKRWAVGRGVTRVVDEVVEVHLNERGDIASLSTKEGRTLEADLFIDCSGMRGLLINQALKEPFIDMSDYLLCDSAVASAVPNDDARVGIEPYTSAIAMNSGWTWKIPMLGRFGSGYVFSSKFTSRDQATADFLNLWGLSDKQPLNQIKFRVGRNGRAWVNNCVAIGLSSCFLEPLESTGIYFIYAALYQLVKHFPDTGFDPRLRDAFNAEIVYMFDDCRDFVQAHYFTASRDDTPFWLANRHDLRLSDAIKDKVERYKAGLPLTTTSFDDATYYETFDYEFKNFWLNGNYYCIFAGLGLLPDRSLPLLRHRPASADKAEAMFARIRREAERLRASLPTNYDYLRSLRDGEAGRARSRPGPVAAPETL

SEQ ID NO: 89887 - protein, 493 aa, unidentified
  source 1..493: note = Paraglaciecola sp.
  REGION 1..493: note = tr|A0A2N1D903|A0A2N1D903_9ALTE Tryptophan halogenase; OS = Paraglaciecola sp. MB-3u-78 OX=2058332 GN=CXF95_16805; PE = 4 SV=1
MNAKTKVVVAGGGTSGWLTAYSLNARLGALLDITLIESDQIGTVGVGEATIPTMRTFHRLVGIDEQEFMAATQATFKLGIMFDNWGQQGDSYIHSFGEIGQRSWMAEFHEFWLEAKAQGFGGSLEDYCLELKAAKANKFATHVGKKPLNFAYHMNATAYAAYLRKKSEAAGVKRIEGRITEVQNDQSGNISSLILEGGEHLSGDVFIDCTGFRALLIGDNLDVEYEDWTHLLAADSAIAVQTQAVEAPRPYTRAIAHPAAWQWRIPLQNRVGNGIVYSSQFLSDDEARSTLLANLSGETITEPRQLRFKTGRRKKAWHLNCIAIGLSSGFLEPLESTSIHLVTTSILRLMKLFPFGGNSALLAEQFNRETQLELETARDFVILHYHLTQRHDSPFWDHYRTMQIPDSLVHRMAMFRENGYAWPDDVSLFRVDSWVQVMMGQGLIPEQHHGAGRVLPVEGLKAQMLALSKMIDNSVAQLPEHGDFIQTYCPAQE

SEQ ID NO: 89888 - protein, 505 aa, Xanthomonas bromi
  REGION 1..505: note = tr|A0A1C3NR68|A0A1C3NR68_9XANT Tryptophan halogenase; OS = Xanthomonas bromi OX=56449 GN=XBLMG947_3708 PE=4 SV=1
MTQAQIRKVVIAGGGTAGWIAACALSHQFRALLDITLIESEQIGTVGVGESTVPPIRAFHRFLQIDEQEFLRAVAGTFKLSISFEHWRRKGERYIHPFGITGQSTLVCAFHHLWLESQRRGMPGSFGDYCLETVASRVDRFALHGEPAVNYAYHLDAALYARFLRARSEAYGVKRVEGKIQQVTLQPHSGDVASLVLEDGQVIEGDLFIDCSGFRGLLIEQTLRTGYEDWSHWLPCDRAVAVQTEAVGPPVPYTRAIAHEAGWRWHIPLQHRVGNGLVFSSKHLSDDEAHAKLLRDVAAPAIKDPWMVPFRTGRRRKAWNKNVVSLGLSSGFIEPLESTSIHLTISAVVRLLALFPAAGIAPSQVQLFNDISRAEMEHVRDFVTLHYHATQRDEPLWQQCREMELPESLALRLRAWRERAHAWQGADELFRVDSWTHVLMGQGIAPEQHHPLTRAFSDQDLRRLLDAIAQPIQHAVQQMPSQQAFIERYCKAGAQVWGVRNPVPA

SEQ ID NO: 89889 - protein, 490 aa, unidentified; identical to SEQ ID NO: 87690
  source 1..490: note = Citromicrobium sp.
  REGION 1..490: note = tr|A0A2E4E4C3|A0A2E4E4C3_9SPHN Tryptophan halogenase; OS = Citromicrobium sp. OX=2024827 GN=CL805_08120 PE=4 SV=1

SEQ ID NO: 89890 - protein, 505 aa, unidentified
  source 1..505: note = Xanthomonas nasturtii
  REGION 1..505: note = tr|A0A3E1KLK7|A0A3E1KLK7_9XANT Tryptophan 7-halogenase OS=Xanthomonas nasturtii OX=1843581; GN = DZD52_10290 PE=4 SV=1
MTQAQIRKVVIAGGGTAGWIAACALSHQFRDLLDITLVESEQIGTVGVGESTVPPIRTFHRFLQIDEQEFLRAVAGTFKLSISFEHWRRQGERYIHPFGITGQGTLVCAFHHLWLESQRRGMPGSFGDYCLETVASRVDRFALQGEPAVNYAYHLDAALYARFLRARSEACGVKRIEGKIQQVTVQPHSGDVASLVLEDGQVIEGDLFIDCSGFRGLLIEQTLHTGYEDWSHWLPCDRAVAVQTEAVGPPVPYTRAIAHAAGWRWHIPLQHRVGNGLVFSSKHLSDDEAHAKLLHDAAAPAVKDPWMVPFRTGRRLKAWNKNVVSLGLASGFIEPLESTSIHLTISAVVRLLALFPAEGIAPSQVQLFNDVSRAEMEHVRDFVTLHYHATQREEPLWQQCREMELPESLALRLRAWRECAHAWQGADELFRVDSWTHVLMGQGLMPEQHHPLTRAFSDHDLRRLLDGIAQPIQHAVQQMPSQQAFIERYCKTGEQVWGGRNPLPA

SEQ ID NO: 89891 - protein, 545 aa, Marinicella litoralis
  REGION 1..545: note = tr|A0A4R6XYK9|A0A4R6XYK9_9GAMM Tryptophan halogenase; OS = Marinicella litoralis OX=644220 GN=C8D91_0474 PE=4 SV=1
MKNQIRKVLIVGGGSAGWMTAAYLHQALNREGMPPRVEVTLVESPDIPRISVGEATIPSMRHLLAVIGIDELDFMKATDATFKQSIKYVNWEHNNNTFYHHPFGRNRRQPIDYAGLEWLASDRKIPFMETCSPQPIICEMGKSPLMMGKWDMGAPINYAYHMNAQKFADYLRDFIVPKGVNHIYANVTDIDMRDNGWIKTVHTDQAHQLEADLFVDCTGFRAKLIEEKMGVGFEDCSQWLLCDRAIAMHVPYDEHYPGMVRPYTTATALSNGWVWDIPMQSRRSLGYVHSSQYISEEDALKELLAYQGPGSEALEARTVHFKVGRREANWKGNCIAIGLSGGFIEPLESTGLYLSDLGAVMLAEHFPQTDEYMDAMAFRYNRILSNRFYEVLDFINLHYCLTKRTDTAFWREVQKPERITERLKAKFEYWKMKPPSQTDFEDQLYPGQNQQNSNPSVHMGDKRVPIDTAGLWNHESYECIMYGMHFDCQAYQDRFGEDRPKLNVHPQILHRLQQAHAKLPPHHVWLQQFVGMKNYPGNKTPKGWV

SEQ ID NO: 89892 - protein, 521 aa, Xanthomonas bromi
  REGION 1..521: note = tr|A0A1C3NIW4|A0A1C3NIW4_9XANT Tryptophan halogenase; OS = Xanthomonas bromi OX=56449 GN=XBLMG947_1117 PE=4 SV=1
MPDTTPSDPQPRPVRRVVIAGGGTAGWMAAAAMSKLLGRHLQITLVESDEIGTVGVGEATIPSLVTFHRLLEIDEAAFMATTQATIKLGIAFEHWRDVDRHYIHSFGHAGTDHWSAGFQHFWLKGQQRGVARDFGDYCLELRAAQEGRFAHLPNGGMNYAYHLDAGLYARFLRRFSEGFGVQRIEGRIGQVETDAESGFLTALTLQDGTRVEGDLFLDCTGFAGLLIGKTLGVGSEDWSQWLFADSALAVQTESVGPPATYTRSRADQAGWMWRIPLQHRVGNGIVYSSRYMDQDGARAVLERNLTGRALSEPRPLRFTPNQRHRVWEKNCVALGLASGFLEPLESTNIHLIQRGIIRLLQTFPQVINAADIAEYNRQAAQEITHIRDFVILHYHATDRRDTPFWRDCTAMDIPDSLRHRVELFRQSGRVFHQANELFAENSWVQVMLGQGVVPQQHHPVADLMGDAELRRFLDTIRTRVEAALVRLPAHADFLRHYCPAPPPPEPAARVPAPTVVATPAG

SEQ ID NO: 89893 - protein, 496 aa, Sphingomonas sp.
  REGION 1..496: note = tr|A0A1H7MAD6|A0A1H7MAD6_9SPHN Tryptophan halogenase; OS = Sphingomonas sp. JS21-1 OX=1855283 GN=SAMN05216382_1420; PE = 4 SV=1
MTDTDKPKPTRVVIAGGGTAGWIAAAALTRQLGKLIELTLVESDEIGTVGVGESTIPTARGFHAFIGVDEAAFMRETQATFKLGISFENWRRQGDAYFHPFGQVGRSVAIADFQHFWLQARAHGIAGGYGDYSLEQQAAAAGRFGLDAQGSLAYAYHLNATDYARFLRGVAEGAGATRVEGRIERVELGENGDIDALVLASGTRIEGDLFIDCTGFRALLIEGALKTGYDDWSEWLATDRALAVQTETVRAPVPYTRAVAHGAGWRWQIPLQSRVGNGIVYSSAHMSDDEARATLLAGLDGAPLFEPRPLRFTAGMRRRSWNRNCVALGLAGGFIEPLESTSIHLIMNAATRLIQLFPFRGDDRSALAARFNAQSRHEWEHVRDFIILHYVVTERDDTPFWRERRAMNIPDTLAERIALFTESAGAWQGQDDLFRIDSWIAVMLGQGITPTAHHRVASLLGAEALKGSLSDLTRLIAATVQMLPTHARFLQHYCPA

SEQ ID NO: 89894 - protein, 410 aa, Erythrobacter sp.
  REGION 1..410: note = tr|A0A357H7V4|A0A357H7V4_9SPHN Tryptophan halogenase (Fragment) OS=Erythrobacter sp. OX=1042 GN=DD861_08410; PE = 4 SV=1
MSSEFNRLVIVGGGTAGWLSACLLAARRPELDVTLVEAPDIPTIGVGEGSWPTLRETLAAIGIDEARFLSACDASFKQGSRFDGWVDGSADDSYYHPFTPPASGQMADILSAWSAQPRKTASFAGAVTPQIAVCDRDLAPRQRAMSAFTGALNYGYHLDAAKLGALLAEHGTAHLGVKHVRAHVTGVERGEDGLLAKLMLRGSDTVEGDFFIDCTGMAARLIGDELGVGWRDRSDVSFNDRALAMQVPVAPGSAIASQTVGTAHKAGWLWDIGLPTRRGIGCVYSSRFLSDEDAETILADYITAKVPGADPGALASRKLQFATGHREQFWRGNCLAVGLSAGFIEPLEASAIVLIELSIKALADAYPHSRSALPRLADRFNALFRYRWDRIVDFLKLHYVLSKRGEPYWR

SEQ ID NO: 89895 - protein, 517 aa, Erythrobacter sp.
  REGION 1..517: note = tr|A0A3D4LXY2|A0A3D4LXY2_9SPHN Tryptophan halogenase; OS = Erythrobacter sp. OX=1042 GN=DIW45_06995 PE=4 SV=1
MADHTQPNRARRPRPGRRIVIVGGGTAGWMTAAALSRFCGRDWGITLVESDAIGTVGVGEATIPMIRNFNAALGIDEAEFIAATNGTYKLGIEFVGWGAPDSRYLHAFGLVGRGLGLLPFQHYWLRARAEGFGGPIGDYVFNAIACREERFAHVERQPGSALPPLPFAYHFDAGLYAAFLRRYAETRGVLREEGRIDHVETRAEGGDITSVRIDGGRVVEGDLFIDCSGFRGLLIEDTLQTGWTDWSHWLPCDRAIAVPCEPSEPWLPYTRSTAREAGWQWRIPLQNRIGNGHVFSSAHMSEDTAQEALLANLDGEPTAEPRLLRFTTGMRKQAWNRNVVAIGLSSGFLEPLESTSIHLIQTGINRLLDYLPVSGFGPRDRENFNRRTAYEMERIRDFIILHYHANGREGQPFWDMLRTMAVPDTLAEKIEMFRAGGKIVRVQDELFDVPGWVQVMLGQGVEPQGWHPLADELPRDQLEQFLATVKSAYERDVARMPSHQDYVRRLARQGRSKLETA

SEQ ID NO: 89896 - protein, 497 aa, unidentified
  source 1..497: note = Alteromonadaceae bacterium
  REGION 1..497: note = tr|A0A2E6SP01|A0A2E6SP01_9ALTE Tryptophan halogenase; OS = Alteromonadaceae bacterium OX=1916082 GN=CL590_08780; PE = 4 SV=1
MHTSAIHHYVIAGGGTAGWMTAALLGKLLNGTGARITLVESPEQPGVGVGEATVPSFVDFIKLLGIDEQTFVKATQATFKLGIQFTHWQTPGHSYWHPFGHVGARIDGKPFFQQWLHAHRSGLAHTYTDFSASARMAQENKFYIPNPQQPNNLSQMGYAYHFDAQRVAVFLRDFAVSKGVVHKQAHIEHVQMCPDNSAIQRFITRTGEHIDGDFFIDCTGTQARLMGQALNTGFTDWQRYLPVDRAWVVQTENTEEPVPYTKAIAEPMGWRWQIPLQHRTGNGLVFCSQYTSPFEAKRYLQTQLTTPLLNEPRLLTFKTGHLEQFWRSNCVAIGLSAGFLEPLESTGIYLIMRGILNLTKLLPSSPPCQATIHEYNQLMLAEYQHIRDFIVLHYCVSQRNDTRFWQSWQQREIPTTLAHKLALYRTRGVVSHGQSDLFADHSWHAVATGMNVLPRDVDPVVATTDVKALQDLLARIDHALAHSVGQLMPHGEYLKAW

SEQ ID NO: 89897 - protein, 521 aa, Erythrobacter sp.
  REGION 1..521: note = tr|A0A354VVE8|A0A354VVE8_9SPHN Tryptophan halogenase; OS = Erythrobacter sp. OX=1042 GN=DDZ54_12735 PE=4 SV=1
MRPDDGQAQAIGSICIVGGGTAGWSAAALLSQVLRGSGCRITLIESSAIPTVGVGEATIPPIFDFLRNIGADEVEFIRRCRATFKLGIQFRDWLHHNHAYWHPFGNLGVTINQRPFHHYYCMNRAAGYGETLADLCPSVALAEDGKFAFPSPDGQWPGGAVAYALHFDAGLVAAFLRDHAVAAGVERLDRRIVGATRGEGERIARVQFDDGESLEADFYIDCSGFRGLLIEETLGAGFEDWKHWLPCDSAVAAPTAAQEQRAPYTVATARSAGWQWRIPLQHRTGNGLVYASDFISDADAQAQLLAGLDGEAQADPRVLRFTAGLRKRAWVGNCLAIGLSAGFLEPLESTSIHLIHTGLNRLLDLFPDRRFDPALIAAYNRDVHREYAHIRDFLLLHYVPNRREGEPFWDHMRGLDLPDTLAEKIELFTRTGRIMSRQRELFSDISWFYVMHGMGLTPAALDPLAEAAPFGEVRKVIDQLRGAMQAFRSAAPTHDAILDRLLDPAETRRPQFGTGGGWTTR

SEQ ID NO: 89898 - protein, 506 aa, Erythrobacter sp.
  REGION 1..506: note = tr|A0A2D9U794|A0A2D9U794_9SPHN Tryptophan halogenase; OS = Erythrobacter sp. OX=1042 GN=CL950_02335 PE=4 SV=1
MTERAQAIRNVVIVGGGTAGWMTAAALARLLGGTGLAITLVESAAIGTVGVGEATLPQIRRFNSLLGIDEREMMARTAATIKLGIEFRDWGRVGDSYIHPFGRFGQEIGPASFVDYWARAHARGMVAPIGQYCLPIMAALQGRFEPPDASGTRQPYDYAFQFDAGLYAAWLSELAQSAGVVRREGRIVDVARDSEGGAISAVSLEDGAAIRGDLFIDCSGFRALLIGETLETSFEDWSNWLPCNRAFAVPCANGGDYGPYTRATARAAGWQWRIPLQHRVGNGLVYCDAFWDDADAAEALMADLEGEPGAEPRPLRFTTGRRSALWRSNCVAIGLAGGFLEPLESTSIDLIQSGILNLVELFPHTAIEETDRREYNRLMDLEFERIRDFLVLHYVANQREEEFWQAMRAMPLPDSLSARIEDFRERAILPDYADGLFQPVSWISVFLGQNVVPRRWDPRADAMNADELGKRLAAIHGKIADDAAAMPLHLDFLERSGARYIGEAGQ

SEQ ID NO: 89899 - protein, 428 aa, unidentified
  source 1..428: note = Sphingomonadales bacterium
  REGION 1..428: note = tr|A0A4Q5SVS8|A0A4Q5SVS8_9SPHN Tryptophan 7-halogenase (Fragment) OS=Sphingomonadales bacterium; OX = 1978525 GN=EOP59_11810 PE=4 SV=1
RATKASFKLGIEFVGWGREDQRYFHPFGGYGIGFDVVAPWQYWLRDHLAGDATPLDDYSMAWGAARLGRFARPNDDPRMVQSTFDYAYHFDASLFARFLRSYAEERGVIRTEGKVADVVRNGETGFIEKVVLSDGRRIAGDFFIDCSGFTSLLLGQALEVPYEDWRRWLPCDRAMAVACKSGAERPPFTRSTAREAGWQWRIPLQHRTGNGYVYCSEHITDDAAADALLGALEGEAIGEPRPLRFVTGRRRSFWTGNCLALGLAAGFMEPLESTSLHLVHSGITRFLALFPDRDCSPLAAAEYDRVTAEEYARIRDFLVLHYHANAREQGTLWRACRAMKIPDTLAWRLDHFRSHGRVVSQGPELFQNPSWIAVLIGQGIVPRDYDPLIDQRQLTEARARLATLRTAIAAAAEQMPRHEAWLDALTAR

SEQ ID NO: 89900 - protein, 496 aa, unidentified
  source 1..496: note = Sphingomonadales bacterium
  REGION 1..496: note = tr|A0A4Q3AAF4|A0A4Q3AAF4_9SPHN Tryptophan 7-halogenase (Fragment) OS=Sphingomonadales bacterium; OX = 1978525 GN=EOP58_13475 PE=4 SV=1
KIRSIVIVGGGTAGWMSAATLARILTTDYASITLIESDEIGIVGVGEATIPQMATFNRMLGIDEDQFLRETQGSFKLGIQFRNWGRQGHQYYHPFGKYGLDMQGVSFHAFFLRLHQRGEAPNIDEWSLQAMASRANKFMRPIDAGNSPLSEIPYAFHFDAGLYAKFLRRFAEGKGVVRREGKIVDVKLRGEDGFVESVVMENGDAIEADLFVDCSGFRGLIIEQALQAGFTDWSHWLPCDRAVAVPCESVEEWTPYTRSTAHGAGWQWRIPLQHRIGNGHVFSSKFMSEDEATGILLANLDGKPLADPRIVRFTTGHRNQLWIKNCVSMGLAGGFIEPLESTAIWLIQSGLSRFLTMFPDRDFNQADIDRYNRIMTTDYEEIRDFIILHYHATERDDTPFWNTCRTMDVPERLAEKMRVFRSHGRCFRENEELFNDTSWFAVMHGQLMQAQSYDPVADIMSLDETRARLAHIRDTIANSADYMPKHRDFIREHCAA

SEQ ID NO: 89901 - protein, 521 aa, Erythrobacter sp.
  REGION 1..521: note = tr|A0A352H7G8|A0A352H7G8_9SPHN Tryptophan halogenase; OS = Erythrobacter sp. OX=1042 GN=DC026_05570 PE=4 SV=1
MRPDDGQAQAIGSICIVGGGTAGWSAAALLSQVLRGSGCRITLVESSAIPTVGVGEATIPPIFDFLRNIGADEIEFIRRCQATFKLGIQFRDWLHHGHAYWHPFGNLGVTINQRPFHHYYCMNRAAGHGETLADLCPSVALAEDGKFAFPSPDGQWPGGAVAYALHFDAGLVAAFLRDHAVAAGVERLDRRIVGATRGEGERIAAVQFDDGESLEADFYIDCSGFRGLLIEETLGAGFEDWKHWLPCDSAVAAPTAAQEQRAPYTVATARSAGWQWRIPLQHRTGNGLVYASDFISDADAQAQLLAGLDGEPQADPRVLRFTAGLRKRAWVGNCLAIGLSAGFLEPLESTSIHLIHTGLNRLLDLFPDRRFDPALIAAYNRDVHREYAHIRDFLLLHYVPNRREGEPFWDHMRGLDLPDTLAEKIELFTRTGRIMSRQRELFSDISWFYVMHGMGLTPAALDPLAEAAPFGEVRKVIDQLRGAMQAFRSAAPTHDAILDRLLDPAETRRPQFGTGGGWTTR

SEQ ID NO: 89902 - protein, 500 aa, Sphingomonas sp.; identical to SEQ ID NO: 82655
  REGION 1..500: note = tr|A0A430E6J0|A0A430E6J0_9SPHN Tryptophan 7-halogenase OS=Sphingomonas sp. ABOLH OX=1985881; GN = CA237_09955 PE=4 SV=1

SEQ ID NO: 89903 - protein, 506 aa, Rheinheimera sp.
  REGION 1..506: note = tr|A0A1B7UML6|A0A1B7UML6_9GAMM Tryptophan halogenase; OS = Rheinheimera sp. SA_1 OX=1827365 GN=A5320_10455 PE=4; SV = 1
MQQVNFSAAASDTQRPIKKVVIAGGGTAGWMTGAAISKLLGKNLEVVLVESDEIGTVGVGEATIPTLHIFHRLLGINEQEFMAATNATFKLGIMFENWLQRDQKYLHSFGFLGKDCWACGFQHFWSKAQQRGIAREIGDYCVEHLAARQGRFAVLPNQDLNHAYHMDATIYAKYLRKLAEQHGLKRVEGKISEVQQHADGHISALKLMSGELIEGDLFIDCTGFRALLIEQTLNTGFEDWSHFLPCDSAIAVQTKTTESPVAYTRAIAHPSGWQWKIPLQSRVGNGMVFCSKFMSDDEAKALLLANIEGERLIEPRVIKFRTGTRHQHWNKNCIAIGLSSGFLEPLESTSIHLIQRSIVRLLQMFPSNGIQTAEVDEFNKQTQIEMHNIRDFIILHYKATQRDDSKFWRYCRDMAVPESLTHRMDLFAQSGKVYKFAQELFGESSWIQVMMGQGILPAQYHPIVDAMSDGELTDFLGTIAANVQKTVQNFPTHQEFLQYYCKSAIV

SEQ ID NO: 89904 - protein, 462 aa, unidentified
  source 1..462: note = Sphingomonadales bacterium
  REGION 1..462: note = tr|A0A4Q5T271|A0A4Q5T271_9SPHN Tryptophan halogenase (Fragment) OS=Sphingomonadales bacterium OX=1978525; GN = EOP59_08150 PE=4 SV=1
MSVPSHVIVVGEDAPLWLAASALHAALRRSGVTVEVVELPSRIAAAHVYVTQPSLEALHNRLGIQEGKVLRATRGSFALGQKFVDALGEQPPFFHAYGACGVPIEGQQFLAFWLKAHRHGLPAGFEDFSLTAAAALQGRMLLPDADTEIFGRTDYGYHLPAAAYARSLKALVRQDGVPVHEADAVQVERDGDGAILALALGDGRRVTGDLFVDASASALLAADAGWEDWTFAADRVLHARGPRMQALPAYGQVAAVDWGWASLHPCQDATHVIAAFAAADEARVLQSLPVLCGFAPTEVTIATSRPGRQANAWVRNCVAIGGAAARFDPLHGVDLLAVQLGLVHLLSRFPVDADFAAERHDYNQAMAGLFGRLRDFQSAHYRLARYAGGFWDAARAREISPELAHKIQTFAARGELAMLEEESFLLDSWQALFLGHGLIPDSWAPAIDRTSPDTMRAEFRRV

SEQ ID NO: 89905 - protein, 501 aa, unidentified
  source 1..501: note = Alteromonadaceae bacterium
  REGION 1..501: note = tr|A0A2A5HEE2|A0A2A5HEE2_9ALTE Tryptophan halogenase; OS = Alteromonadaceae bacterium OX=1916082 GN=COA42_21750; PE = 4 SV=1
MNEKIKKIVIVGGGTAGWMTAARLSKAFTKELCEIHLIESPDIPTVGVGEATIPHVRHFNTALEIDDDEFVKHTQGTFKLGIEFVGWGKPGERYMHAFGDLGRDMLNLHFHHFWQKMHAQGKAEPFGAYSYNTAAAYQNRFMRSIEAGNSPLSNITYAYQFDANLYADFLRDYALKRGVTRTEATVAQVNLNANDGFISGVSLNSGEQITGDFFVDCSGFKALLIDKALGVDFVDWSEYLPCDRAWAVACENKGELKPYTQSIAQPAGWQWRIPLQHRTGNGHVFSSKFMAEDEAREILLNNLDGKALAEPRLLKFKAGKREKFWHKNCVAIGLSSGFLEPLESTSIHLIQTAIDRLLAHFPDRNCDPTVTAHYNENTHREYDSVRDFLILHYHVNQRDDSDFWRYCRNMKIPDTLKARIDLFRASGQIYCSKDDLFSAVSWVEVLLGQNITPQSYHPLVDSMAESDIALRLERIKGVVDASVEHTSKHAEYIQRTCAAKN

SEQ ID NO: 89906 - protein, 496 aa, Pragia sp.
  REGION 1..496: note = tr|A0A411WNV9|A0A411WNV9_9GAMM Tryptophan 7-halogenase OS=Pragia sp. CF-458 OX=2498113; GN = EKN56_16625 PE=4 SV=1
MLNLRTPKRIVILGGGTAGWFAALTLRRIFSANVEVRVIESSQIGIVGVGEGGLLNIYDALQRNQIDIKEFMAETDATFKWGFSYEGWRTGKADDKFYHLFTSARGEGAQWVEGGFLPYYSALINQGVPLESWIRGFQLIKNNASMEEAIKAVDEDRTDLVTSFHFDSYKIAKYMKKVALSRGVVHEDVLVKDFVRNEEGLVTKLITEKGEVELDFLIDSSGLTRQVMAKMPGARWQTFKDYLLMDSAIPFYMPHPNKNPMLITRAITMDAGWMWQIPLSTRVGAGYVFSSKHKSEADAIDEIQKYLGFEIEPHKTIRFDPGCYEQVWIKNVMSLGLSSGFVEPLEATSIGQMIEQLRNFERVLVSSQGIISENSIREYNEANLASWHGIRDFLRMHYDCTRNDTPLWQEVNKSPMTERYAEFRKCIKERTPHMIDVENYAINGWGGIFHPVNWMSVAVPLGLVPVSAAGMDLLWLSKDKQQKALDFVKKVKEKGW

SEQ ID NO: 89907 - protein, 501 aa, Sphingomonas sp.
  REGION 1..501: note = tr|A0A0Q4R1J3|A0A0Q4R1J3_9SPHN Tryptophan halogenase; OS = Sphingomonas sp. Leaf242 OX=1736304 GN=ASF09_04905 PE=4; SV = 1
MVEQRIRKVVIAGGGTAGWLAAAALTRQLGQLLDITLIESEEIGTIGVGEATIPTMRAFHTILGLDEREFMRATQATFKLGISFENWARDGDRYIHSFGDIGKSTWMGDFHHFWLAAKAAGDSSEIGDYCLELQAAKAERFALPSEGQINYAYHLDAGLYARFLRARSEANGLKRIEGRIASVDRDGETGFIRALVLDSGERVEGDLFLDCTGFRGLLIEGTYGAGYEDWSHWLPTNSALAVQSAATGPAHPYTRAIAHDAGWRWRIPLQHRVGNGLVYASDHLSDDEAHARLLGTIGGAPLTEPRLIRFRTGRRRQVWMGNCVALSLAGGFVEPLESTSIHLVMTGLMRLMQTFPFGGIAPSLVTRFNDQAQAELERVRDFIILHYHLNERPEPFWAARRDMPIPDTLVERIALFTEGAQAYQGGEDLFRVASWVQVMLGQRLTPRDYHRLGSIMSGSQLASVLTNIRSTIADAVAGMPTHQQFLDRYLATPTAAASGIR

SEQ ID NO: 89908 - protein, 494 aa, Erythrobacter sp.
  REGION 1..494: note = tr|A0A2D8MC87|A0A2D8MC87_9SPHN Tryptophan halogenase; OS = Erythrobacter sp. OX=1042 GN=CL949_08510 PE=4 SV=1
MSGGQPVKVVIAGGGTAGWISACALARQLGRLVQVTLVESDAIPTIGVGEATIPTARSFHEYLRIDERAFMAATGATFKLGIRFDDWGALGDSYMHSFGTFEMRNWVAEFQHFWLEGRASGLADGIGAFCLEHEAALAGKFTTEGAPPLNYAYHLDAGRYASFLRAIAERDGVRRVEGRISKVEQHVETGEITALTLDSGERIEGDLFIDCTGFRALLLGQTLEVGYENWSNWLPTNGAWAVQTEETNAPPPYTLAAAHEAGWRWRIPLQHRTGNGLVFASDYLDAEDAREKLLGAIEGRAVSDPRLIRFETGRRRKMWAKNCVALGLSSGFIEPLESTSIHLIMSGVTRLIQLFPFNGEMDALRDRWNALADRELEHVRDFIILHYHLTQRDDSEFWRSRAEMDIPDSLKARIENFSAQGQAWQDALELFRTESWIYVMLGQGLMPQQWHRLASLVDSERLMGTLARQKEAIAARVAGMPGHGEFITSYAADR

SEQ ID NO: 89909 - protein, 499 aa, unidentified
  source 1..499: note = Sphingomonadales bacterium
  REGION 1..499: note = tr|A0A4Q5TD69|A0A4Q5TD69_9SPHN Tryptophan 7-halogenase OS=Sphingomonadales bacterium OX=1978525; GN = EOP59_00315 PE=4 SV=1
MNEKHVRRVVIAGGGTAGWMAAAAIARTMGRAVDLTLVESEAIGTIGVGESTIPPIVAYNRLLGINEADFMAATQATFKLGILFDNWKEPGHRYFHSFGLTGKDHWSAGFQHFWLQARARGLAQSYDDYCLELVAALQSKFAHLPDESMNYAYQFDSALYAKFLRTMAEGDGTRRIEGKIARVELDGESGDIAALTLESGERVEGDLFLDCTGFRAVLIEQALHAGFDDWTHWLPCDSAIAIQTESVGPAVPYTRAMAHDAGWQWRIPLQHRVGNGIVYCSRYLGKDAALERLLGNIEGKAVVQPNFLRFTSGVRRKQWHRNCVAVGLSGGFMEPLESTSIHLIQRAVLRILRMMPQGKVSARDVAEFNDQQQQDMEQIRDFLILHYKATDRRDSGFWRQCASMTVPDTLTQKIELFRETGRVFRRNEELFAENSWVQVMMGQGIIPQSWHPIAEKLRDDELAKLMTMLRDNVARTVASLPSHEAYVAQFCGAQRPAAN

SEQ ID NO: 89910 - protein, 450 aa, Erythrobacter sp.
  REGION 1..450: note = tr|A0A3D2E7S9|A0A3D2E7S9_9SPHN Tryptophan halogenase (Fragment) OS=Erythrobacter sp. OX=1042 GN=DFK13_08255; PE = 4 SV=1
DEIEFIRRCQATFKLGIQFRDWLHHGHAYWHPFGNLGVTINQRPFHHYYCMNRAAGHGETLADLCPSVALAEAGKFAFPSPDGQWPGGAVAYALHFDAGLVAAFLRDHAVAAGVERLDRRIVGATRGEGERIAGVQFDDGESLEADFYIDCSGFRGLLIEETLGAGFEDWKHWLPCDSAVAAPTAAQEQRAPYTVATARSAGWQWRIPLQHRTGNGLVYASDFISDADAQAQLLAGLDGEAQADPRVLRFTAGLRKRAWVGNCLAIGLSAGFLEPLESTSIHLIHTGLNRLLDLFPDRRFDPALIAAYNHDVHREYAHIRDFLLLHYVPNRREGEPFWDHMRGLDLPDTLAEKIELFTRTGRIMSRQRELFSDISWFYVMHGMGLTPAALDPLAEAAPFGEVRKVIDQLRGAMQAFRSAAPTHDAILDRLLDPAETRRPQFGTGGGWTTR

SEQ ID NO: 89911 - protein, 441 aa, Hydrogenophaga intermedia
  REGION 1..441: note = tr|A0A1L1PSX9|A0A1L1PSX9_HYDIT Tryptophan halogenase; OS = Hydrogenophaga intermedia OX=65786 GN=BN948_03593 PE=4; SV = 1
MQPEENCDVLVVGGGPAGSTIAALLAREGRQVVLLEKEHHPRFHIGESLLPGNVALFDQLGVRDEVEKIGMPKYGIEFVPPDLDYCSYVDFAEGWDPSKSSAWQVRRSELDELLFRHAARSGAQALEGAKVTQVAFDKEGANVEARLDSGEARRWRARFVVDATGRDTLLANQFKCKQKNKAHNSTALFGHFRGARRLQGKREGNISICWFEHGWFWFIPLADGTTSVGAVCWAYYLKARDKPLKDYFFDTIALCPELHDRLKHATLVDDQVHATGNFSYSSTHATGERYLMVGDAFTFIDPMFSSGVFLAMQSAFDGAQLVATALDEPKRLPAARAAFEKRVRVGPRDYSWFIYRVTNPTIRDMFMHPQNVFKVKQGLMSLLAADIHHGPAYRASLTMFKFLYYVVSVTNWRRTYAGWKRHRFNIRDMGPLKGETVMKAE

SEQ ID NO: 89912 - protein, 503 aa, Sphingomonas sp.
  REGION 1..503: note = tr|A0A0Q4R242|A0A0Q4R242_9SPHN Tryptophan halogenase; OS = Sphingomonas sp. Leaf242 OX=1736304 GN=ASF09_15480 PE=4; SV = 1
MAKPKTRVVVVGGGTAGWMTAAALSRLLPGQCSVHLIESEAIGVVGVGEATLPHIRAFNERLGIDEADFMARTRATFKLGIEFRDWNRLGDSYIHPFGTFGRGTGGVDFQHYWARLLREGAPLPSLDTVSYACALARAGKFDRPETDPNRLAGTFGYAYQFDALLFAPYLREIAEGMGARRTEGVVVRVERDGDNGDIAAIVLDTGERIEGDLFVDCSGFRALLLGEAMAEPFVDWSHWLPTDRAVAMPCRTRTAVTPYTSAIAMPAGWRWRIPLQHRTGNGYVYASGFVADDDARRALEDAVEGEALAAPRVLRFKAGRRRRSWVGNCVAIGLASGFLEPLESTSIYLVQQAITTLIELFPEPRIAATDRDEFNRVIDLEYDRIRDFLILHYHATTRSDSPFWDYVRTMPIPDTLSEKLDLWRTRARIVKYREGVFLDPSWVAVYLGQGIVPDGWDPRADPVASDALARSLDALRSEIASDVARRPDHRSFIERYCAMAQAA

SEQ ID NO: 89913 - protein, 516 aa, unidentified
  source 1..516: note = Streptomyces zhaozhouensis
  REGION 1..516: note = tr|A0A286DPJ9|A0A286DPJ9_9ACTN Tryptophan halogenase; OS = Streptomyces zhaozhouensis OX=1300267; GN = SAMN06297387_102139 PE=4 SV=1
MVNKVVIVGGGTAGWMTASYLKAAFADRIDITLVESDRVSTIGVGEATFSDIRHFFAFLGLKESDWMPACNATYKLAVRFENWREPGHHFYHPFEQMRSVNGFPLTDWWLKEKPSARFDTDCFVMPSIIDAGLSPRHTDGRLIDQPFDEEAEEMQGLTMSEHQGKTQFPYAYQFEAALLAKFLTRYSTDRGVRHIVDDVNHVELDERGWISGVRTAEHGELTGDLYIDCTGFRAMLLNKALDVPFISFQDTLPNDSAVALQVPMDMERRGILPCTTSTAQDAGWIWTIPLTGRVGTGYVYARDYLSPEEAERTLREFVGPAAADAEANHIRMRIGRSERSWERNCVAIGLSSGFVEPLESTGIFFIHHAIEQLVKNFPGDEWSDVHRDLYNRSVEHVMEGVREFLVLHYVAAKRNDTPYWKDTNTRVIPDALAERIENWKRVLPDSENVFPYYHGLPPYSYMCILLGMGGIDLHHSPGLDLSDTAAARREFAAIQEKASGLTKVLPKAYDYFTRLD

SEQ ID NO: 89914 - protein, 434 aa, unidentified
  source 1..434: note = Sphingomonadales bacterium
  REGION 1..434: note = tr|A0A4Q2ZD56|A0A4Q2ZD56_9SPHN Tryptophan halogenase (Fragment) OS=Sphingomonadales bacterium OX=1978525; GN = EOP60_15025 PE=4 SV=1
FDGWRTGAADDSYYHPFVPPVDGDPRALVSAWRDLPDDKAFAEAMGPQPRICALELAPRQRGMPDYAGALNYAYHLDAAKLANLLSEHAVRRLDVKHVRDHVTSVDLAVNGDVAAVHTRDSGAIAGDLFLDCTGHAALLIGEQFGVPFIDRSDVLFNDRALAVQVPVAPGSPIGSQTTATAHSAGWIWDIALPGRRGVGCVYSSKFASDEEAAATLATYLRATTPGGEAEDLSFRRLTFRSGHRERFWERNCLAVGLSAGFLEPLEASAIVLIELSLEALLENFPATRGSMEAHARRFNERFRYRWDRIVEFLKLHYVPSQRDEPYWRAHRDTASIPPRLAELLEVWRDQPPSLADLPMADEVFPAASYQYVLYGMGFPPPAAGAIQTGAVDAVLGQMRQAEQRGRSLAASLPTNRFYLDALRAERSSDKRMAE

SEQ ID NO: 89915 - protein, 502 aa, Sphingomonas sp.; identical to SEQ ID NO: 82622
  REGION 1..502: note = tr|A0A430E3V4|A0A430E3V4_9SPHN Tryptophan 7-halogenase OS=Sphingomonas sp. ABOLH OX=1985881; GN = CA237_14275 PE=4 SV=1

SEQ ID NO: 89916 - protein, 365 aa, Erythrobacter sp.
  REGION 1..365: note = tr|A0A3B9AUX2|A0A3B9AUX2_9SPHN Tryptophan halogenase (Fragment) OS=Erythrobacter sp. OX=1042 GN=DCF81_01195; PE = 4 SV=1
MTERKPPHVVVLGGGSAGWITACLLHHRWHSRGGQVTVVESPEIGIIGVGEGSTPQLKAFFDHLGIDEADWMAACDATYKLGIRFTGWSERPGFESYFHSFPGPVDLHTEPGFVHNCALRRRGFDVPAHPDDWFLAEVLAREHRGPHPRDNFPFMPSYGYHFDAHKLGKFLRDWATERGVLHRPLRVTDVEQGAQTEIAALLCEDGTRIEGDIFVDCSGFRSVLAQQTLGAQFIPFGNNLFSDRAVVLPSAHSTRFKPQTDSIAMRAGWRWSIPLTTRVGNGYVYSSKYVSDEDAEAELREAIGMQDEGEARILEMRVGRIAETWTGNCLAVGLSQGFIEPLEATALHIVIATALDFADAYEKGG

SEQ ID NO: 89917 - protein, 283 aa, Pseudomonas sp.
  REGION 1..283: note = tr|A0A1I3EHG9|A0A1I3EHG9_9PSED Tryptophan halogenase; OS = Pseudomonas sp. NFPP04 OX=1566215 GN=SAMN03159342_01350; PE = 4 SV=1
MNQVQAGKFIRPFGNWVTWDKERNFTPFGNDADGAWSGFQIPRSILDGFLLAKAIALGVHALQPCHAKKVLLENGRVMGVQTLTGTLSCRQLVDASGAHGWLTRQLGLGSRCYSPPLTALYGYTSGTIDESALGIFADRLGWYWTAQVGRKLYHWTRLYFEHDQICKASAVPSSFEHLTRVGKMQGADVTWRICDQSAGSGYFIVGDASAVIDPGASHGVLKALMSGMMAAQAVVEGCANPTNQQVISLQYQRWIRDWFESDVKRMRELYRAHPFPPPWLEKP

SEQ ID NO: 89918 - protein, 519 aa, unidentified
  source 1..519: note = Alteromonadaceae bacterium
  REGION 1..519: note = tr|A0A2D9S2N8|A0A2D9S2N8_9ALTE Tryptophan halogenase; OS = Alteromonadaceae bacterium OX=1916082 GN=CL586_11550; PE = 4 SV=1
MRKSVLIVGGGTAGWITAAYMARMLAADTPGGVSITLVESEEIGILGVGEGTFPIIRKTMGRIGLDESDLIKHADATFKQGIRFNNWKKNPADDPDDSYFHPFQVASQHTDMDLLPYWLLGVAGDVPWSECCTVQERAVEAKLAPKLISHPNYEAPLNYAYHFDATKLAALVRSRAMEMGVKRLIDTIDDVKLGEDGAIAAVTARQHGDLTADLFIDCTGFRARLIGETMGSEFTSYKNELFCDRAVALQVPYEQAGGPIPSCTYTTAKDYGWIWDIGLHERRGLGYVYSSKYCDEETAVATLKAHIGPAADTLQHRLLKFEPGYRKTQWHKNCVGIGLSVGFIEPLEATGISFAEVAALMLCNLFPWSGDYERSATQFNNAMSKRFEHVKDFIKLHYYLTERDDTAFWRDNQDPASASEYLKGKLEQWRHRPPSFLDIDASHDIFDENSWQYILYGMGFKTDISAREGALRFFDDARNEFTSIRQQSENAKRAVPTHRDLVTEVCQSGFKPQPRRARR

SEQ ID NO: 89919 - protein, 513 aa, Pseudoxanthomonas sp.
  REGION 1..513: note = tr|A0A3R8NWE0|A0A3R8NWE0_9GAMM Tryptophan 7-halogenase OS=Pseudoxanthomonas sp. SGD-10 OX=2493089; GN = EIM50_12115 PE=4 SV=1
MDDARLPSTPIRRVVIAGGGTAGWMAAAALARTLGRVLDITLVESEQIGTVGVGEATIPPLRTFHRLLGIGEQDYLAATQGTIKLGISFENWRAQGHRYIHSFGSSGRDHWSAGFQHFWLRGRQEGLAGDYADYCIELQAAHQDRFSHLPDYHVNYAYHMDAALYARFLRALAQRHGCRRVEGKIAEVETDPGSGCIGALKLESGDVLEGDFFIDCTGFRALLIGQALGVGFSDWSQWLLNDRALAAQTTAVRDAVPYTRAIAGTAGWQWRIPLQHRVGNGIVYSSRFMDDDQAREAFLSSLEGEVIRAPWPVRFRPGQRQRCWEKNCVALGLAGSFIEPLESTTIHLIQRGIVRLLQSFPGVLSQAAIDDYNAQLDAELQHVRDFVVLHYHATERRDSPYWEEVASMRLPPSLQHRIDLFRETGLVFHQPGELFAENSWVQVMLGQGIVPRHYHPSADVMSREDLQRFLGDVRGNVLGTVARMPGHMDYLRGYAPAPVPPDLRQEQPSPAGA

SEQ ID NO: 89920 - protein, 495 aa, unidentified
  source 1..495: note = Sphingomonadales bacterium
  REGION 1..495: note = tr|A0A4Q3DDH5|A0A4Q3DDH5_9SPHN Tryptophan 7-halogenase OS=Sphingomonadales bacterium OX=1978525; GN = EOP61_03630 PE=4 SV=1
MLVKRVLVVGGGTAGWMTAAALSNKFHGSPLEIRLIESAEIGTVGVGEATVPHIRHYNATLGFDEAEFLAATRGTFKLGIEFRNWGRLGDSYIHPFGAFGRDFAGVPFHQHWLRMRDKPGVAAFEAFSLPIQAARRGRFHHPNDDPSSLLNTFNYAYQFDAGLYAKFLRQYSEARGVVRQEGKVVHVSQHGETGFIEAVTLDSGERIEADLFVDCSGFRGLLIEQTLGAGYEEWTHWLPCDRAIAIPCPNDGPPMPLTRSTAQKSGWVWKIPLQHRCGNGHVYSSNFISDDEALETLLGAIAAPPLADPNKLRFVTGKRKKQWVGNTVAIGLSSGFLEPLESTSIHLIQLAIGRLLDFFPTGEWDPLDAQEFNRVMVLEYERVRDFLILHYNATQRDDSDFWNYCRTMELPDSLRYKMELFRERGVVVNYRDGMFLEPSWLAVYLGQNVLPGAHDPLSERLSDDDLMSAMADLRTRYATAAEAMPEHLAALAAAA

SEQ ID NO: 89921 - protein, 509 aa, unidentified
  source 1..509: note = Sphingomonadales bacterium
  REGION 1..509: note = tr|A0A4Q5RPY7|A0A4Q5RPY7_9SPHN Tryptophan 7-halogenase OS=Sphingomonadales bacterium OX=1978525; GN = EOP62_20130 PE=4 SV=1
MRKRSILIVGGGTAGWLAAAYLARALELSDHGRLEITLLESPDIGIIGVGEGTFPTIRETLKFLGIDESRFIRETSATFKQGIRFTDWVHTPERGQHSHFFHPFEAPFYADGANLVPYWLLQDEKTRPPFAEAVTIQNRVADARRAPKRPHEGDFDGPLNYAYHFDAASLALVLAQRARELGVRHLQGVLTDVKLDDSGAIAEVGTAEHGTLSADLYIDCTGFRAELIGKALQVPFKSVRNHLFANAAVTCKLPYDRPDAPLESFTIATAHEAGWTWDIGLAGARGIGCVYSSDHISADRAEEILRAHVGPRDAEYRTRQIPFEAGYRDKQWVRNCVAVGLSGGFLEPLESTGVLLIEAAIGMIAELFPHNGPIDAPARRFNQLIAARYDNIVNFLKLHYCLSQRSEPFWRENADPASMPERLQELLEEWRYRPPSRYDFTLDVESFAFFNYQYILYGMEFRTDLSAGREDFPNVAGAEKLFQRIRNFGERATQDLPAHRALIAQINAG

SEQ ID NO: 89922 - protein, 506 aa, unidentified
  source 1..506: note = Alteromonas mediterranea
  REGION 1..506: note = tr|F2GC26|F2GC26_ALTMD Tryptophan halogenase; OS = Alteromonas mediterranea (strain DSM 17117 / CIP 110805 / LMG 28347 / Deep ecotype) OX=1774373 GN=MADE_1009520; PE = 4 S V=1
MQDPHNKPIKRVVIAGGGTAGWLAASLMKKVLGKAVDITLVESEAIGTVGVGEATIPPIRLVNQVLGIDEAQFLHDTKATIKLAIRFENWKTKGESYYHTFGAPGKSMAFCHFHHYWVKARQQGLKADLWDFDLNYHAAEAGRFAQINAKDPVVELPFAYHFDASLYAQYLRKLSENMGVVRKEGKISRVQRFTDSGFIQALHLESGDVVEGDLFVDCTGFKGLLIEEALGAGYDDWSHLLPCDSAIAVPSERHEKTAPYTRSIAHDAGWQWRIPLQHRNGNGHVYSSRYISDDQACDTLLSNLDTKPLGDPKLIKFTTGRRRKQWYKNVVAVGLSSGFLEPLESTSIHLIQSAIVRLIQLFPHNGFAPSLESEYNKQSELEFEQIRDFLVLHYTVNERTDSAFFNDMRNITLPDSLAHKIALFKESGNLLREQNDLFLESSWLQVLYGQGITPKDYHGLVNSVPEVQLNQMLTRLLEIKKEPIAKLPTHDEYINGMVAKYKRAMS

SEQ ID NO: 89923 - protein, 507 aa, Rheinheimera sp.
  REGION 1..507: note = tr|A0A1B7UGT4|A0A1B7UGT4_9GAMM Tryptophan halogenase; OS = Rheinheimera sp. SA_1 OX=1827365 GN=A5320_17355 PE=4; SV = 1
MHPQTKQIVIVGGGTAGWMAANLMAKSWQDQPVAITVIESPEIGIIGVGEGSTPQLKGLMDFLGLAEADWMPACYATYKTGIRFDGWSTKPGFTSYFHPFAAQPDDYTAPAFFYNSYVRRQGIDVEGHPDPFFLATYLAQQQLAPIANENFPFEINYGYHFDSSLLGKFLAKNATKLGVVHLQDTIEHVELTAGGDIAALVTRDGLTVAADIFVDCSGFRGLLIQQALQVPFISFDDNLFNDSAVVVQTPGQTKLDCQTISTAMQHGWRWTIPLTHRNGNGYVFSSAFCSADQAETEFRQSLGLLDSDLQCRHLKMKVGQLSKHWVKNCVAVGLSQGFIEPLEATALHLVQETVQGFIEHYQAGNFSNERSEQFNASVHQRFEAIRSYIVAHYRVNSRQDTEYWRANANNPRIPPSLYQILKVWLSGQNLSDELLRQQIDQYYPSMSWHCLLAGYGIYPDPKQLKVGNAAAQKYDLATIEQFIRRCGLNFIDHRRFVELQAAAHVAG

SEQ ID NO: 89924 - protein, 511 aa, unidentified
  source 1..511: note = Sphingomonadales bacterium
  REGION 1..511: note = tr|A0A4Q5SYJ8|A0A4Q5SYJ8_9SPHN Tryptophan 7-halogenase (Fragment) OS=Sphingomonadales bacterium; OX = 1978525 GN=EOP59_10860 PE=4 SV=1
MATATSRIVIVGGGTAGWLAACLIAARADREAAAPLEITLVESPDIPTIGVGEGTWPTMRGTLERIGLREADFLLACDASFKQGSRFDGWRTGAPGEHYYHPFTAPADGDARALVAAWQDVGGERPFAEVAGAQARIAGLDLAPRQRAMPDYAGALNYAYHLDAAKLAGLLSRHAVQRLGVTHVRDHVTAVERSADGDIAAVQTRENGAIAGDLFIDCTGHAALLIGDQLGVPFIDRSDVLFNDRALAVQVPVAPGSAIASQTTATAHAAGWIWDIGLPERRGVGCVYASAFMSDEEAAETLGGYLRATTPGGDAAAPSFRRLTFKSGHRARFWERNCLAVGLSAGFLEPLEASAIVLIELSLEALLDNFPATRASMDIHAARFNARFRYRWDRIVEFLKLHYVPSERDEPYWRAHRDPASIPPRLAELLALWRDQPPSLADLPMAGEIFPAASYQYVLYGMGFAPPAPGAIRSGGTAAVIAQMRQAEQRGRALAASLPSNRAYLDALRAE

SEQ ID NO: 89925 - protein, 497 aa, Sphingomonas sp.
  REGION 1..497: note = tr|A0A345WPI7|A0A345WPI7_9SPHN Tryptophan halogenase; OS = Sphingomonas sp. FARSPH OX=2219696 GN=DM480_08740 PE=4; SV = 1
MTLNTIVIAGGGTAGWMAAAALGHLLGEHVAIRLVESEEIGTVGVGEATIPQIRLFNQALGLDEDAFLRATGGTFKLGIAFDGWTAPGHSYMHAFGDVGRDVGPVPFQHYWLRARAAGVAGPLGDYCMNDVAARAGRMHRGAPLTARTIPAIPYAFHFDANLYAAYLRRFAQNRGVVRTEGRIAHVERDGESGDVAALVLDGGERVAGDLFLDCTGFRALLSEGALATGYEDWSRWLPCDRAVAQPSAGAGAPLPYTRAIARQAGWQWRIPLQHRTGNGHVYCSAFTSDDEAAATLAANLDGAATGDPRPLRFVTGRRRRAWNHNVVALGLASGFLEPLESTSIHLIQSAIARLVKLLPAMPVAPALRAEYNRQADFEMERIRDFLILHYWANGRDEPFWQACRDMALPDTLQAKIDLWREAGVITREHEELFTEDGWLQVLVGQGVAAQAYHPLADAISDGDLAEYMEMLPLLYRREAGALAEHGAFVAKHCAMRR

SEQ ID NO: 89926 - protein, 126 aa, unidentified
  source 1..126: note = Sphingomonadales bacterium
  REGION 1..126: note = tr|A0A4Q5SJD5|A0A4Q5SJD5_9SPHN Tryptophan halogenase (Fragment) OS=Sphingomonadales bacterium OX=1978525; GN = EOP59_14830 PE=4 SV=1
MKRIVVAGGGTAGWMAAAAIARTMARTVEVTLVESDAIGTIGVGESTIPPLVTYNRLLGINEAEFMRATQATFKLGILFDNWKVDGDRYFHSFGFTGKDHWSAGFQHFWLAGRSKGHQQPYDDYCL

SEQ ID NO: 89927 - protein, 492 aa, unidentified; identical to SEQ ID NO: 86093
  source 1..492: note = Alteromonadaceae bacterium
  REGION 1..492: note = tr|A0A2D5M1S6|A0A2D5M1S6_9ALTE Tryptophan halogenase; OS = Alteromonadaceae bacterium OX=1916082 GN=CL579_08680; PE = 4 SV=1

SEQ ID NO: 89928 - protein, 498 aa, Sphingomonas sp.
  REGION 1..498: note = tr|A0A0Q4QR50|A0A0Q4QR50_9SPHN Tryptophan halogenase; OS = Sphingomonas sp. Leaf242 OX=1736304 GN=ASF09_15485 PE=4; SV = 1
MRDGAGGLMPGERLRSVLVAGGGITAWCAAAALKRRAPFLDVTILRCTPSREALVDRIACTLPSLLGFHDDLGIGAADGIARTASGYRLGTLFSGWATGLPDYVHAYGRYGRSLGPTAFHLHWVRSVLEGARAAPFDSHSPAAALARAGRFAPPMPETPFADHEYGLTLDLPRYRTMMRAFALHVGVREIVGEIADVVRDTGDGIAAVALAGGSRIVADLFVDATGPDATLRGALDDVRDDWSAWLPCDRVLLAEGSAEPLVLTTAVAHPAGWRWSSGAQSGFAYASGEISDAKAARVLRNAAGTAPGEPIRVRPGTRPHPWLGNCIAIGDAATEVEPLEWCNLHLALSAIDRLIAMLPGRVSTPGEAAEFNRQTLAEAERVRDFLALHYHVAQRDDPLWQAVAAAVPPASLSHTLAQFTERGRLPFYEEETFARDSWAAVLIGQGVLPRRIDPLVAAVPAAAAQTAMARLTTEIAAALPHIPTHAAYRAAQTRHLLS

SEQ ID NO: 89929 - protein, 509 aa, unidentified
  source 1..509: note = Sphingomonadales bacterium
  REGION 1..509: note = tr|A0A4Q3APG0|A0A4Q3APG0_9SPHN Tryptophan 7-halogenase OS=Sphingomonadales bacterium OX=1978525; GN = EOP58_04825 PE=4 SV=1
MSDMLRSIVIAGGGTAGWMTAAALARFCGKGWRITLVESEEIGTVGVGEATIPMIRNFNQALGIDEAQFLRETHGTYKLGIEFAGWGGLTDRYIHAFGLVGRGLGLLPFHHYWLRGRAAGSAGPLGDYVLNAVAAYGNRFAHVQRAADSALPPMPYAYHFDAGLYAAFLRRYAEARGVVRVEGRIGAVERDGKTGDVAALTLTGGERIDGALFVDCTGFRGLLIEGALATGYEDWSHWLPCDRAVAVPCAGVRPLTPYTRSTARKAGWQWRIPLQHRTGNGHVFASRHISEDEATATLLANLDGEALAEPRMLRFTTGKRKQFWNRNVVAIGLSSGFIEPLESTSIHLIQTGINRLLDFLPSGPVASADRDAFNRIADVEIERIRDFVILHYTANGRTGEPFWDALRTMELPEPLANRIAMFRSDGRIMREHDELFDVPGWLQVMVGQGIVPERWHPLADQLDDAQLDQFLSTVATAFARDAARMPDHEDFVARFVATPQTQPQEVTRV

SEQ ID NO: 89930 - protein, 521 aa, Erythrobacter sp.
  REGION 1..521: note = tr|A0A3D5XHT1|A0A3D5XHT1_9SPHN Tryptophan halogenase; OS = Erythrobacter sp. OX=1042 GN=DHU71_13545 PE=4 SV=1
MRPDDGQAQAIGSICIVGGGTAGWSAAALLSQVLRGSGCRITLVESSAIPTVGVGEATIPPIFDFLRNIGADEVEFIRRCRATFKLGIQFRDWLHHGHAYWHPFGNLGVTINQRPFHHYYCMNRAAGHGETLADLCPSVALAEAGKFAFPSPDGQWPGGAVAYALHFDAGLVAAFLRDHAVAAGVERLDRRIVGATRGEGERIAAVQFDDGESLEADFYIDCSGFRGLLIEETLGAGFEDWKHWLPCDSAVAAPTAAQEQRAPYTVATARSAGWQWRIPLQHRTGNGLVYASDFISDADAQAQLLAGLDGEPQADPRVLRFTAGLRKRAWVGNCLAIGLSAGFLEPLESTSIHLIHTGLNRLLDLFPDRRFDPALIAAYNHDVHREYAHIRDFLLLHYVPNQREGEPFWDHMRGLDLPDTLAEKIELFTRTGRIMSRQRELFSDISWFYVMHGMGLTPAALDPLAEAAPFGEVRKVIDQLRGAMQAFRSAAPTHDAILDRLLDPAETRRPQFGTGGGWTTR

SEQ ID NO: 89931 - protein, 507 aa, Sphingomonas sp.
  REGION 1..507: note = tr|A0A0Q4RBF4|A0A0Q4RBF4_9SPHN Tryptophan halogenase; OS = Sphingomonas sp. Leaf242 OX=1736304 GN=ASF09_05575 PE=4; SV = 1
MSDRALRSIAIIGGGTAGWMAAAALARVLGTHNVAITLVESEEIGTVGVGEATIPPIQAFNALLGIDEDAFVKATMGSFKLGIEFVDWLRPGTRYFHPFGVYGTDIGAVPFEGLWHRLRTQGLADPLEAYSICAQAAKDGRFMRPLADGGNTPLHRIGYAFHFDASLYARFLRTHAEAAGVVRREGRVVDVALRAADGFVEAVTLASGARIEADLFVDCSGFRSLLLGETLGTGFEDWSHWLPNDRAIAVPTVSNGPPTPFTRSTARAAGWQWRIPLQHRTGNGYVFSSAHLSEDEATATLLANLDGEPLADPRTLRFRTGRRDAFWVRNCVGLGLSSGFLEPLESTSIHLIQAGIARLLEMLPNRDFEAADIRRYNRLMTAEYDSIRDFIILHFHATERADTPYWDHVRTMAVPETLAERIRIYQATGRVFRESDDLFSKTSWLAVMDGQGLRAEGFDPLAASLSVDDARTRLARIAAVTAAAAARMPPHAEFIARHCAGAIASRT

SEQ ID NO: 89932 - protein, 507 aa, Sphingomonas sp.
  REGION 1..507: note = tr|A0A0Q4R828|A0A0Q4R828_9SPHN Tryptophan halogenase; OS = Sphingomonas sp. Leaf242 OX=1736304 GN=ASF09_06915 PE=4; SV = 1
MTDTPAARITKVVIVGGGTAGWMTAAALSRLVATGVAVTLVESEDIGTVGVGEATIPSLRDYNRMLGIDEDALVRATGGTFKLGIEFRDWRWLGDSYLHPFGTHGRDIEGVSFHQLWLRQANLGGDPGPIGDYCLSAVAARKGRFTRPASNPQSVLSTLSYAFHFDAALYAKFLRGMAEEAGVVRVEGRVAAVDRDAESGFITGLRLDGDRRIDGELFIDCSGFRSLLLGDALGVPFTSWQHWLPCDRAWAVPSERQGTLTPYTRATAETAGWRWRIPLQHRVGNGHVYASDHVDDDDALRALLAGLDGKPLAEPRQLRFIAGRRERLWEKNCVAIGLSGGFLEPLESTSIHLIQSGITRLMALFPDRGFGGVEIAEYNRVMLREYAQIRDFIILHYHATERSDSTFWNHCRTMTIPDTLQAKLDLWSGKARTFREQGELFTPDGWIAVLLGQGVRPVSTDPLVAALPPEESARFMDHVRDMIGKTADAMPTHEQFIAQHCAAAIAP

SEQ ID NO: 89933 - protein, 491 aa, Sphingomonas sp.; identical to SEQ ID NO: 82623
  REGION 1..491: note = tr|A0A430E7D4|A0A430E7D4_9SPHN Tryptophan 7-halogenase OS=Sphingomonas sp. ABOLH OX=1985881; GN = CA237_08200 PE=4 SV=1

SEQ ID NO: 89934 - protein, 535 aa, Rheinheimera sp.
  REGION 1..535: note = tr|A0A1B7UQX2|A0A1B7UQX2_9GAMM Tryptophan halogenase; OS = Rheinheimera sp. SA_1 OX=1827365 GN=A5320_05545 PE=4; SV = 1
MTTAQAPINSVAIKTVVIVGGGNAGWLTAGRIAAKHKTKQGGVKVILVESPTIAPIGVGEGTWPTMRSTLIALGISETDFIRHCDATFKQGAKFARWVDGSKDDFYYHPLVLPQGFGKADMAAYWQAQHATAGMPSFSPASSFSNALCYQETICEQGLAPKTIRTAEFSAVANYAYHLDSGKFGQFLQQHCTEKLGVTHILDDVIAIHSVADGNHAANGDIAAVETKNHGAISGDLFVDCTGFSSLLLGKHYQVPFKACDDILFIDTALAVQVPYENADSPIASHTISTAQEAGWIWDIGLQHRRGVGYVYASKYCTEEDARATLAQYVGPAIEGLTVRKIPIVSGHRTKFWQNNCVAVGLSAGFLEPLEASALVLVELSAQMISEQLPANRALMDIVAKRFNDTFLYRWDKIIDFLKLHYLLSQRDEPFWRDNRDPATIPQSLLDLLQLWRYRAPGDLDFTSNNEVFPAASYQYVLYGMGFKTDYSHSGYLLDNWDFATQQFAQNQKMINQALSMLPTNRELITKIRDYGLNAL

SEQ ID NO: 89935 - protein, 500 aa, unidentified; identical to SEQ ID NO: 86823
  source 1..500: note = Alteromonadaceae bacterium
  REGION 1..500: note = tr|A0A2D9KF50|A0A2D9KF50_9ALTE Tryptophan halogenase; OS = Alteromonadaceae bacterium OX=1916082 GN=CL582_10160; PE = 4 SV=1

SEQ ID NO: 89936 - protein, 264 aa, unidentified; identical to SEQ ID NO: 86969
  source 1..264: note = Alteromonadaceae bacterium
  REGION 1..264: note = tr|A0A2D9KL26|A0A2D9KL26_9ALTE Tryptophan halogenase (Fragment) OS=Alteromonadaceae bacterium OX=1916082; GN = CL582_20915 PE=4 SV=1

SEQ ID NO: 89937 - protein, 480 aa, Simiduia agarivorans
  REGION 1..480: note = tr|K4KXS8|K4KXS8_SIMAS NAD(FAD)-dependent dehydrogenase OS=Simiduia agarivorans (strain DSM 21679 / JCM 13881 / BCRC 17597 / SA1) OX=1117647 GN=M5M_07630 PE=4; SV = 1
MKPPRSLAIVGGGTAGWMAACLLQAAWGDACTITLIEDPDTPTIGVGEGSTPLLKRFFSRLGLCESDWMPACDATYKAGILFDGWSASEPDYFHPFFSALDLNTGDAFFHQADRRRRGAAVDARPADYFVAAQVAELGLAAAPANALPFEVDYGYHFDAGKLSALLRRHACGRGVRYRPVKLAAVHTDDQRITGLALADGTECKADFYLDCTGFRSLLLQQGLGVGFHPYTDALLNDAAVVLQDSVPLPGLPARTRSTALTAGWAWQIPLQQRTGYGYVYSRRFCAPDQAAAELRAHAGVGADHPVRHLQFPVGRVHQHWQGNCLAVGLSQGFVEPLEATALMLVQSTIELFIQAREVASFNAHINRLFDGVRDYIVGHYLLAGRNEPYWQAARDTRCASEALRALLTRWDQGQDLHSLLAGPLGSVYMRPSWYVLLAGLGRFPRVQCADNSVGDSARHQCEQLARAHFSDHRRWLAAQR

SEQ ID NO: 89938 - protein, 498 aa, Sphingomonas sp.
  REGION 1..498: note = tr|A0A369VY03|A0A369VY03_9SPHN Tryptophan 7-halogenase OS=Sphingomonas sp. WZY 27 OX=2283317; GN = DVW87_06460 PE=4 SV=1
MKRLNRIVVAGGGTAGWMAAAAIARTLGKAVSVSLVESEAIGTVGVGESTIPPLVAYNRLLGINEAEFMRATQATFKLGILFDGWRDGTDRYFHSFGLTGKDHWSAGFQHFWRYGLERGFDRSYDDYCLELVAAMSAKFAHLPDDRMNYAYQLDSGLYAKFLRAMAEKDGTRRVEGRIARVELDGETGHIAALHLDSGEAIEGDLFLDCTGFRALLIEGALHAGHDDWTHWLPCDAAIAIQTESVAPPVPYTRAIAHEAGWQWRIPLQHRRGNGIVYCSRYMDKDAALDRLLSTIEGKTLVEPNFLRFGAGARRRQWHRNCIAVGLSGGFMEPLESTSIHLIQRAVLRLIRMLPLGEISERDVAEFNDQQMADMLQIRDFLVLHYKVTNRGDSPFWRYCRDMEVPDTLAQKIELFRETGRVFRRNEELFAENSWVQVMMGQGITPAAWHPIAEKLPDEELGRLFAGLADQVSRTVAGLPEHAAYVAHYCGTPDSVKAA

SEQ ID NO: 89939 - protein, 495 aa, unidentified
  source 1..495: note = Sphingomonadales bacterium
  REGION 1..495: note = tr|A0A4Q2YXS0|A0A4Q2YXS0_9SPHN Tryptophan 7-halogenase OS=Sphingomonadales bacterium OX=1978525; GN = EOP63_09165 PE=4 SV=1
MSARENLVRRIVIVGGGTAGWMTAAALGRALAGQPHVISLIESEAIGTVGVGEATVPPIHEFNRYLRIDQAEFLRATHGTIKLGIQFEGWGGEGHRYFHPFGYFGVEMSGIHFHHYWLRHLAAGGDADHTPYNLETVAARDARFAPMTRHGPVHHAVQFDAAAYARFLRSYAEDKGVVRIEGKVADVHLDPEDGFINAIAMDDDRIIEGDLFVDCSGFRGLLIEGALRTGYTEWSHWLPCDSAVAMPCENEGDPSPFTQSTVREAGWQWRIPLQHRTGNGYVYSSAHLGHDEAEALLRARLPGAPLADANRLRFTAGHRKAIWNRNCVAIGLAGGFLEPLESTSIHLIQTTIIRLLALLPRDAINPNVVARFNRDALREYEVIRDFVIAHYALAGRDDTQFWRDVAAAGMPDSLAERIEAFRATGNILFEPGDLFGPTNWYAVLTGQGVRPQGWHPIADGLSDAELASRFATLRGRVAEQLAELPPHIAFLRGLG

SEQ ID NO: 89940 - protein, 498 aa, Simiduia agarivorans
  REGION 1..498: note = tr|K4KJJ4|K4KJJ4_SIMAS Tryptophan halogenase; OS = Simiduia agarivorans (strain DSM 21679 / JCM 13881 / BCRC 17597 / SA1) OX=1117647 GN=M5M_10725 PE=4 SV=1
MPVKTKVSKVVVLGGGTAGWMSAALLKKVLGDTVSIELVESEQIGAVGVGEATIPPIQLVNSVLGLNEAEFLRETNATIKLAIKFENWKQQGHSYFHTFGAPGKSTAFCHFHHYWTRANQAGHPSDLWDYDLNYQCAINGRFAHIKSQDPVFELPYAYHFDASLYAKFLRKISEAMGVSRTEGIVKDATLNSETGMVESLLLDDGRQVAGDFFIDCSGFRGLLIQSKCGAGYDDWSHLLPCNSAVAMPSERLPETLPYTRSIAHQAGWQWRIPLQHRNGNGMVYCSHYISDDEAIATLSANLDTAPLADPKIIRFTTGRTRKPWSRNVVAVGLSSGFLEPLESTSIHLIQSAVVRLIKLFPHNGIDAANVAEYNKQSEIEYLQVRDFLILHYFVNERQDSPFWRDMQQLDIPASLRHKIDLFESTGKLFREQEDLFAESSWLQVMLGQGITPRDYHPLANAPSEHKLLEMLANLRAVKAKPAAELPTHDEFLKSFCGR

SEQ ID NO: 89941 - protein, 497 aa, Sphingomonas sp.; identical to SEQ ID NO: 82614
  REGION 1..497: note = tr|A0A430E9S3|A0A430E9S3_9SPHN Tryptophan 7-halogenase OS=Sphingomonas sp. ABOLH OX=1985881; GN = CA237_04335 PE=4 SV=1

SEQ ID NO: 89942 - protein, 492 aa, Sphingomonas sp.
  REGION 1..492: note = tr|A0A0Q4R9B5|A0A0Q4R9B5_9SPHN Tryptophan halogenase; OS = Sphingomonas sp. Leaf242 OX=1736304 GN=ASF09_04255 PE=4; SV = 1
MTITPRRIVVAGGGTAGWMAAAAIARTMGGTAAVTLIESDAIGTVGVGESTIPPLVTYNRLLGIGEADFMRATQATFKLGILFDGWKNGSDRYFHSFGTTGKDHWSAGFQHFWLNGRTRGHDQSYDAYCLELAAAMDGKFAHLPDEGMNYAYQLDSTLYGKFLRGMAEADGTTRIEGRIARVELNAESGDVAALHLESGAVVEGDLFLDCTGFRALLIEQALHAGFDDWTHWLPCDSAIAVQTENVRPPVPYTRAMAHDAGWQWRIPLQHRTGNGIVWCSRYLDRDAALERLLGNLEGEVLTEPNHIRFVTGARRRQWHRNVIAIGLSGGFMEPLESTSIHLIQRAILRLIRMMPQGAISPRDVAEFNDQQFADMEQIRDFLILHYKATDRRGSPFWRQCAAMPIPDSLAQKIELFRETGRVFRRNEELFAENSWVQVMMGQGIVPRAHHPIADKLGDEELTRFLSTLRENVLRTVAGLPRHADYVAHYCGG

SEQ ID NO: 89943 - protein, 493 aa, unidentified
  source 1..493: note = Alteromonadaceae bacterium
  REGION 1..493: note = tr|A0A2E9KB39|A0A2E9KB39_9ALTE Tryptophan halogenase; OS = Alteromonadaceae bacterium OX=1916082 GN=CL587_18850; PE = 4 SV=1
MCAAALARTAQPETQVTLLESDQIGTIGVGEATIPLLAEFNAFLGIDEHDMLKECAGTFKLGIEFIDWYRKGHAYFHPFGFFGKDTPEFPFHQLWLKLNSLVRNGELPEELCGNICEYNLCTVAAKSGRFSQAQGGANTILSTMRHAWHFDSGAYGKLLRRYAEQRDVQRIEGKIVDVSVEPKSGDITSVRLENGLVVAGDLFIDCSGFRGLLINEHLQSEFNDWTHYLPCDRAIAIQTYENIHAPPYTRAYAKEAGWRWQIPLQSRFGNGYVYSGQFQEQQEALTSLLSDLHGEPVTGPNFLRFRTGHRRTFWKNNCIAIGLAGGFIEPLESTSIHLVQTGIQLLISLWSASGSNDELRSRYNKMMTDEYEDIRDFIILHYKATLRDDTAFWRFVRDMSVPDSLSEKMEQFARNGNIATRPDALFTSHSWLAVMLGQGIVPMHYDSRVDRIPGDILIQNMHGLREAVKRTAASLPSHQQYINKHCAFYNTHG

SEQ ID NO: 89944 - protein, 498 aa, unidentified; identical to SEQ ID NO: 86805
  source 1..498: note = Alteromonadaceae bacterium
  REGION 1..498: note = tr|A0A2D9KM72|A0A2D9KM72_9ALTE Tryptophan halogenase; OS = Alteromonadaceae bacterium OX=1916082 GN=CL582_22810; PE = 4 SV=1

SEQ ID NO: 89945 - protein, 496 aa, unidentified
  source 1..496: note = Alteromonadaceae bacterium
  REGION 1..496: note = tr|A0A2E7GN83|A0A2E7GN83_9ALTE Tryptophan halogenase; OS = Alteromonadaceae bacterium OX=1916082 GN=CL578_09090; PE = 4 SV=1
MNTAIKKVVIVGGGTAGWLTAALLQKVVGASINITLVESEAIGTVGVGEATIPPIRLVNQVLGINEAEFLRETKATIKLAIKFENWRRPNESYFHTFGSPGKSMAFCHFHHFVNRAKAFGAKASIWDYDLNYLCATQGKFAHIKAQDTVLDLPYAYHFDASLYAQFLRRYCTKLGVTRIEGMIESVQQHSSGNIAAVTLQDGQRIDGDLFIDCSGFRGLLIQQTLGVGYDDWTHLLPCNRAVAVPSERFETTVPYTRAIAHTAGWQWRIPLQHRNGNGLVYCSSHMSDDEATQTLLNNLDSAPLGDPKVIHFTTGRRRKQWYKNVVAVGLASGFLEPLESTSIHLIQSAIVRLIHLFPHAGIDSAAVDEYNQQSELEYLQIRDFLVLHYHLTERDDSQFWRNMQHMDIPASLRHKMTLFKQNGKLFREQNDLFLESSWLQVMTGQGIEPEDYHPIANTLSEQQLMNMLEQMRSVKHEPLANLPSHDAFLSHYCQTK

SEQ ID NO: 89946 - protein, 500 aa, Sphingomonas sp.
  REGION 1..500: note = tr|A0A430E6F7|A0A430E6F7_9SPHN Tryptophan 7-halogenase OS=Sphingomonas sp. ABOLH OX=1985881; GN = CA237_09655 PE=4 SV=1
MPHEPVRSIVIVGGGTAGWMAATYLARRLAHLNLSITVVDSAAIGTVGVGEATVPAIRDFLSAIELGEADVLRETGGTIKYGIRFDGWGGEGHRFFHPFGLYGVGAEGVAFHQYWLRLNALGKAGPLADYCLATQLARNGLFLPPVDRPANDIGVFNFALHFDAAAFAALLRRPALANRVAHVDGRIVSVATDQPRGLVTQVTLEDGRTIAGDLWIDASGFRSLLLGEALGVPYVDWRHWLPCDRAVAIPCRAAPGDPTPYTVATARKAGWQWRIPLRHRIGNGSVYCSSFQSDADAEDALLATLEGAPLADPNRLRFVTGHRARFWSGNVVGLGLASGFLEPLESTSISLIQSGLERFVALFPDRDCDPRLAATYNRQSVLEFERLRDFLFLHYLANGRDEPFWQAIRAVEPPAPLQIKLDAWRSGGEFVRNEWDTFQDPSWLSLYAGFGDLPDRHSPLADAIGEDALLESFGRMRAAIARTLSHAEPHGAFLARVAGA

SEQ ID NO: 89947 - protein, 493 aa, Rheinheimera sp.
  REGION 1..493: note = tr|A0A1B7UQL5|A0A1B7UQL5_9GAMM Tryptophan halogenase; OS = Rheinheimera sp. SA_1 OX=1827365 GN=A5320_05220 PE=4; SV = 1
MIKKVVIAGGGTAGWMAAALLKKVLQQQIDVELVESDDIGIIGVGEATIPPIQVFNQYLGLDEAEFLRETKATIKLAIKFENWRTQGESYYHTFGAPGAQLGFCPFQHYWLQAKKAGLTQSLWDFDLNFLCAEQGKFNIIKTPNPLYEMPYAYHFDSGLYGRYLRKIAEKSGVVRTEGLIELVQQDAISGHIRSLHLKDGRQIHGDLFIDCTGLRALLVRKTLGVAFEDWSHYLPANSAIAVPSERFAQTLPYTRSIAHKAGWQWRIPLTHRNGNGLVYCSDYLSDDEAHHTLMGNLDANALAEPRKISFQTGRTTEQWCKNVVSIGLSSGFLEPLESTSIHLIQSGIVRLLKMFPHQQISQTVIDYYNADSKQEFETIRDFIVLHYHVNQRDDSKFWRDMRHMAIPPRLAEKIALFQQTAAIFNDQNDIFRDASWLQVMLGQGIQPLEHHPAAKAVPDAQLLQTLQKIRDAKQQPLAQMLSHDEFLLRYTKQ

SEQ ID NO: 89948 - protein, 415 aa, Pseudomonas fluorescens
  REGION 1..415: note = tr|L7H431|L7H431_PSEFL Tryptophan halogenase, putative OS=Pseudomonas fluorescens BRIP34879 OX=1205750; GN = A986_20156 PE=4 SV=1
MPTVEMERRQVVVIGAGPSGAIAAALLKRKGHDVVIIEREHFPRFSIGESLLSHCIDFIEEAGMLEAVQAAGFQVKTGAAFAWGERYSAFDFGDTFSNGKPTTYQVQRGEFDKLLADQAALQGVDIRYGQTIVGADFSGDCRYLQVLRQNGSKYHLKAKFVLDASGYGRVLSRLLDLEAPSNFPLRRAVFTHVEDRIEHPGFDRSKILITTHPVKRDIWFWTIPFSNGRCSVGVVAAQTHFDGRDSDLDACLRGFIDETPSLSGVLQNAVWDTPARSIGGYAANVKTLHGPGFALLGNAAEFLDPVFSSGVTIAMRSASMAAGLLHRQLTGETVNWQTDFAEPLKRGVDTFRCYVEGWYAGTFQDVIFHPASSPEIRRMISAILAGYAWDERNPFVSEPKRRLRMLSEICASDAV

SEQ ID NO: 89949 - protein, 498 aa, unidentified; identical to SEQ ID NO: 86951
  source 1..498: note = Alteromonadaceae bacterium
  REGION 1..498: note = tr|A0A2D9KF22|A0A2D9KF22_9ALTE Tryptophan halogenase; OS = Alteromonadaceae bacterium OX=1916082 GN=CL582_10180; PE = 4 SV=1

SEQ ID NO: 89950 - protein, 489 aa, unidentified; identical to SEQ ID NO: 83476
  source 1..489: note = Alteromonadaceae bacterium
  REGION 1..489: note = tr|A0A2D9KE51|A0A2D9KE51_9ALTE Tryptophan halogenase; OS = Alteromonadaceae bacterium OX=1916082 GN=CL582_08460; PE = 4 SV=1

SEQ ID NO: 89951 - protein, 495 aa, unidentified
  source 1..495: note = Alteromonadaceae bacterium
  REGION 1..495: note = tr|A0A2D9KDK3|A0A2D9KDK3_9ALTE Tryptophan halogenase; OS = Alteromonadaceae bacterium OX=1916082 GN=CL582_07465; PE = 4 SV=1
MPQTIQNVVIAGGGTAGWMTAALLRRVLSPTIRIELVESEQIGIVGVGEATIPPIQTFNQFLGIDEKAFLRETHATIKLAIKFENWKTHGDSYYHTFGAPGTTMGFCSFHHYWLKAKQAGLAQSLWDFDLNYLSCLQGKFNKINTPNPLYEMQYAYHFDSALYGQFLRKTAEQAGVVRTEGIIEHVQQDPDSGFITALQLTNGKQIQGDLFIDCTGLRGLLIQQALGVSYEDWSHWLPADSAQAVPSERFDKTLPYTRSIAHRVGWQWRIPLTHRNGNGIVYSSQYLSDDEAGQTLLNNLDTKALDTPRTIRFKTGRTDQQWCKNVVAIGLSSGFLEPLESTSIHLIQSGIVRLMKMFPNQGISQAMVDLYNAESKDEFETIRDFIILHYHVNQRDDSDFWRDMRNMAIPDRLAQKIAAFEDTAAIFNEQSDIFRDASWVQVMMGQGLDPKDYHPAADAMDNAQLMDAMQQIYKAKQQPLDKLMSHDEFIKRYTA

SEQ ID NO: 89952 - protein, 497 aa, unidentified
  source 1..497: note = Alteromonadaceae bacterium
  REGION 1..497: note = tr|A0A2D9KHW5|A0A2D9KHW5_9ALTE Tryptophan halogenase; OS = Alteromonadaceae bacterium OX=1916082 GN=CL582_15015; PE = 4 SV=1
MHTSAIHHYVIAGGGTAGWMTAALLGKLLNGTGARITLVESPDQPGVGVGEATVPSFVDFIKLLGIDEQTFVKATQATFKLGIQFSHWQTLGHSYWHPFGHVGARIDGKPFFQQWLHAHRSGLTQTYTDFSASARMAQENKFYIPNPQQPNNLSQMGYAYHFDAQQVAVFLRDFAVSKGVVHKKALIEHVQMCPDNSVIQRLITRTGEHIDGDFFIDCTGTQARLMGQALNTGFTDWQRYLPVDHAWVVQTQNTDEPVPYTKAIAEPMGWRWQIPLQHRTGNGLVFCSQYTSPVEAKRYLQTQLTTPLLNEPRLLTFKTGHLEQFWRSNCVAIGLSAGFLEPLESTGIYLIMRGILNLTKLLPSSPPCQATIHEYNQLMLSEYQHIRDFIVLHYCVSQRNDTSFWQSWQQREIPTTLAHKLALYRTRGVVSHGQSDLFADHSWHAVATGMNVLPRDVDPVVATTDVKALQDLLARIDHALAHSVGQLMPHGEYLKAW

SEQ ID NO: 89953 - protein, 533 aa, Streptomyces collinus
  REGION 1..533: note = tr|S5V8T9|S5V8T9_STRC3 Tryptophan halogenase; OS = Streptomyces collinus (strain DSM 40733 / Tu 365); OX = 1214242 GN=B446_23735 PE=4 SV=1
MTDNDSRIRKVVILGGGTAGWMTAAYLGKALQGTVDIQVLEAPAIPRIGVGEATVPNLHRVLFDYLGIPEEEWMRECNASFKMAVRFVNWRTPGRGEAGARTLEDGRPDHFYHPFGILPDHDNTPLSHYWFKNKYEGSTDQPFDYAVFREPPVMDAKLSPKWLDGTPSTRYAWHFDAALVADFLRRFAVEKQGVEHVQDEMVRVEQDERGHVTALHCKSGRVMDADLFVDCSGFRGLLINQALGEPFLDMSDHLMCDRAVATAVPHDDEANGVEPYTSAIAMSSGWSWKIPMLGRFGSGYVYSSKFTTQEEATAEFCEMWGLDPNETQFNHVRFRVGRNRRAWVNNVVSIGLASCFLEPLESTGIYFITAAIYQLAKHFPDRSFNPALVDSFNHEIEEMFDDTRDFIQAHFYYAPRNDSPFWRAQKELVLPENIQKKIEAYKAGLPINSPIADESTYYGNFEAEFRNFWTNGSYYCIFAGLGLEPDAPLPALAHKPESVAGAQPLFEQVRQQQEHLLQTLPSAHDYLRRLHGK

SEQ ID NO: 89954 - protein, 506 aa, Sphingomonas sp.
  REGION 1..506: note = tr|A0A430E5L9|A0A430E5L9_9SPHN Tryptophan 7-halogenase OS=Sphingomonas sp. ABOLH OX=1985881; GN = CA237_11540 PE=4 SV=1
MAIDQEPVRTVAIIGGGSAGWMAAAALARFLPAGTVITLVESDAIGTVGVGEATIPQLRLFNQHLGIDEDDFVARTGGSFKLGIEFAGWNGADSRYLHAFGTIGRAVGLVPFHYYWLAAGGGDRPQSLWSHSACAVAAAANRFDRDPGNPQAPSGIAWAYHFDAARYAAYLRERAERAGVVRVEGRVVDVSQDGETGLIAGVTLYDGRRVEADFFIDCSGFAALLIGRMAGDRWDDWSALLPCDRALAVPCASVEPITPYTRATARTVGWQWRIPLQERTGNGLVYSSAHLSDDEAATTLLDNLDRAALGDPRPLRFTTGRRQAPWIGNCVALGLAAGFMEPLESTSIHLVQSGIARLLSLWPSAKPRTADIAEFNRQSAREWLSIRDFLIAHYALNGRDEPFWQERRATPLPDSLIERIALFEQSGRIVRDEHELFAEVAWLQLLVGQGVVAKGYHPLADALPAARRDQFLDISAQHVAATVARMPTHDQFLRAHCPAPDAKVAA

SEQ ID NO: 89955 - protein, 492 aa, Simiduia agarivorans
  REGION 1..492: note = tr|K4KIY7|K4KIY7_SIMAS Tryptophan halogenase; OS = Simiduia agarivorans (strain DSM 21679 / JCM 13881 / BCRC 17597 / SA1) OX=1117647 GN=M5M_09655 PE=4 SV=1
MKHIAIVGGGTAGWMAAVLFAHIWRDFSVTLVEAPDIPTVGVGEGSTPALKKYFDFLGIAESEWMAATGATYKTGIRFAGWSGRADYPDYFHAFDSALDLHTEPAFLYNCDMRRLGIAVQAHPDDYFINARLAAENRVPVPDRQFPFATGYGYHFDAGRLAGYLSQQAAARGVLHSRARVTGVPVDASGIARLQLDSGETLVADLYVDCTGFSAHLLQGALAEPFVSYEDQLLNDRAVVIGLAPESPAPVYTRAEAADCGWIWKIPLAHRTGYGYVYSSRFCSPAQAEQSLRRHLGVTDAVPARHLTMRVGRRARHWVKNCLALGLSQGFIEPLEATALNLVQTTIEQFADSWELSDFTDTQRQAFNQRVNDHFDGVRDYIVAHYLASARRDTPYWQAATAVPASDPLAPLLQAWHQAGDLRLLLKQPQYDRFYAPMSWYSLLSGYGCFLPGDQLRPGSDKANRFPVQTIRQFLSACATHYPGVGSDSTIHQ

SEQ ID NO: 89956 - protein, 494 aa, Stakelama pacifica
  REGION 1..494: note = tr|A0A4R6FYL0|A0A4R6FYL0_9SPHN Tryptophan halogenase; OS = Stakelama pacifica OX=517720 GN=EV664_101505 PE=4 SV=1
MVEQRVKRVVIAGGGTAGWCAAAALSRQLGALIEVVLVESDAIGTVGVGEATIPTIRTFHQLLGIDEREFLRATSATFKLGIAFENWGQVGDRYIHSFGEVGHGTWMGGFQHFWLQAREAGFAEPIGAYSLEHEAAEARRFATGDQSAISYAYHLDATGYARFLRAIAESSGAVRKEGRIARVERDGQSGDLTALVLESGERVAGDLFVDCTGFRALLIEEALETGFDDWSHWLPTDRALAVQTEATGPAVPYTRAIAHEAGWRWRIPLQHRIGNGLVYSSAHLSDDAAHDALIAGIEGDRRTDPRLIRYRTGQRRKAWNANCIALGLSSGFVEPLESTSIHLIMIGVTRLMQLFPFGGVSDALRDRYNDLAEREIEGVRDFIILHYHLTQRGDSEFWKSRRTMAIPDSLARRIALFRESAQAFQASDELFRVDSWLQVMLGQGLEPQGYHHMGKIMPPDRLKAALESMRSNIADAVGAMPTHQAFLDRYCNGR

SEQ ID NO: 89957 - protein, 497 aa, unidentified
  source 1..497: note = Alteromonadaceae bacterium
  REGION 1..497: note = tr|A0A2E6SNQ7|A0A2E6SNQ7_9ALTE Tryptophan halogenase; OS = Alteromonadaceae bacterium OX=1916082 GN=CL590_08390; PE = 4 SV=1
  VARIANT 4: note = Xaa can be any naturally occurring amino acid
  VARIANT 40: note = Xaa can be any naturally occurring amino acid
  VARIANT 56: note = Xaa can be any naturally occurring amino acid
  VARIANT 111..112: note = Xaa can be any naturally occurring amino acid
  VARIANT 137: note = Xaa can be any naturally occurring amino acid
  VARIANT 259..260: note = Xaa can be any naturally occurring amino acid
  VARIANT 264: note = Xaa can be any naturally occurring amino acid
  VARIANT 283: note = Xaa can be any naturally occurring amino acid
  VARIANT 337: note = Xaa can be any naturally occurring amino acid
  VARIANT 354: note = Xaa can be any naturally occurring amino acid
  VARIANT 361: note = Xaa can be any naturally occurring amino acid
MTQXKTRVVIAGGGTAGWLSAFSLVTRLGALLDITLVESXQIGTVGVGEATIPTMXNFHRLMGLDEREFMAATQATFKLGIQFDNWGNQGDSYVHSFGEIGQRSWMAEFHXXWMEAVANGQQDTLEDYCLELKAAKXNKFALKVGNRPLNFAYHLDATAYAAYLRNKAEQAGVTRIEGKITTVNKHPDSGNLRELVLDNDARIEGDVFIDCTGFRALLIGEALGVGYDDWSHLLAADRAIAVQTTAVEPPRPYTIATAXXAGWXWRIPLQSRVGNGIVYSSRXSDDETALATLMSNVTGEAVTEPRYLKFKTGMRQQAWAKNCVAIGLSSGFLEPLXSTSIHLVTTALIRLMKXFPFEGEXGLLAERYNRETQKEMETIRDFIVLHYHLTQRDDSAFWDFYRNMEIPESLQHRMAMFAEHGYVWPDDVALFRVDSWVQVMMGQGLMPKRHHGASRMLPTASLTQQLTAFKQSVNNALAQLPEHEAFIKQYCPADKSA

SEQ ID NO: 89958 - protein, 490 aa, unidentified
  source 1..490: note = Alteromonadaceae bacterium
  REGION 1..490: note = tr|A0A3R8BVI5|A0A3R8BVI5_9ALTE Tryptophan 7-halogenase OS=Alteromonadaceae bacterium TMED7; OX = 1986650 GN=CBB67_010280 PE=4 SV=1
MSTKPLHVVIAGGGTAGWMTANLLAKRWLNQPVTITLVESPDIGIIGVGEGSTPTLKRFFSDMGIAEQDWMPACNATYKVSIRFEGWSPGANVPAYSHPFISQLDTFSERAFYVNCFHRRMGQDVITRPDDFLFNGWLARHQRSPLTPSNFPFRIEYGYHFDSGLVGEFLKCHAQGLGVVHKALNITDVECHPNGEIAALHSKEGERIEGDFFIDCTGFRSLLLQKTLGVNFKSFKDNLFNDSAVVCPTPAQTTLPVETRATALSAGWAWQIPLTNRTGNGYVYSSDFISDEQAASELCRHLGVDEESAALRKLTMNVGQVERHWANNCLAVGLSQGFIEPLEATALHLVQTSVEIFLDHVDEGGFSDTQCNAYNQLITERFERVRDYIVAHYRLNTRSDSEYWLANQHNENLSDSLLHLFNVWYRRGDLGQEIQRQQLDSHFGNTSWHCLLAGYGAFPPLEKGATTTDLYKQNQLAAFFEGCLLNFKPQ

SEQ ID NO: 89959 - protein, 463 aa, unidentified
  source 1..463: note = Alteromonadaceae bacterium
  REGION 1..463: note = tr|A0A2A5HTW2|A0A2A5HTW2_9ALTE Tryptophan halogenase (Fragment) OS=Alteromonadaceae bacterium OX=1916082; GN = COA42_10120 PE=4 SV=1
MQERKIQKVVIAGGGTSGWIAAAALSKLIGKNLEICLIESDEIGRIGVGEATIPTLRTFHKLLGIDEQDLMRSVQATFKLGIEFINWGEKEDNYFHSFGMNGKDCWACDFQHFWLSGKKRNMAGEFSEYNVEQQVAKARKIAVSEKSNLQYAYHLDAGLYAEYLKKFSFKHGVKYIEGKIKHVHIAPDTGYIESLELENTEKITGDLFLDCTGFGARLIEGALNTRYEPYGEFLPCDSALAIQTEKVPDPRPYTQAIAHDYGWQWRIPLQHRVGNGLVYSGRYASDEQATDLLMSQLESPAVTDLRSFKYNTGRRLKAWNKNCIAVGLSAGFLEPVESTSIHLAMSSVLRLLRLFPGSEGINDANVNEFNQQAKEEMEVVRDFIVLHYHATERADSPFWRYCKDMKVPDTLAHRMELFKRSGSVPLNPSELFKIDSWTQVLFGQRIMPTDHHPIVDEMRDEEL

SEQ ID NO: 89960 - protein, 499 aa, Simiduia agarivorans
  REGION 1..499: note = tr|K4KWI6|K4KWI6_SIMAS Tryptophan halogenase; OS = Simiduia agarivorans (strain DSM 21679 / JCM 13881 / BCRC 17597 / SA1) OX=1117647 GN=M5M_05410 PE=4 SV=1
MQQPLNRLIILGGGTAGWMAAAAMSHQLRGTQVRIQLVESSAVGTVGVGEATLPGLRNFNASLGIDERAFIRATNATFKLGIRFEGWAGQSSDIFHPFSDYGAPIAGTPFHQWFYRARALGLDVGALHEYSFSAMLAGQQRFAQPHAEPGNPLADYKYAFHFDATAYAAFLRHYAEARGVERVDDRLTSVVKDPANGHIQALKLESGLELAGDFFIDCSGFRSLLLGEALSVPFEDWSHWLPVDGAYAVAAEPAPVLRPYTRAIARDGGWQWQIPLQHRTGNGSVFASRFIDESRVVEDLMAGLEGAATGSPNRIRFVTGRRQKFWEKNCVALGLASGFLEPLESTSIALIQTGLSRLLMFLPLAGIDAAEVEEANRTARIEMERIRDFLILHYCRNGRQGDLWEYCRNMPLPDSLAQKIALFESRGHLQQRELESFEPASWLTFYEGFGVAPCQPDPAVLNASPDDIARALASMRSQIASAANQPLSHAAFIARHCAA

SEQ ID NO: 89961 - protein, 495 aa, unidentified
  source 1..495: note = Pseudoalteromonas fuliginea
  REGION 1..495: note = tr|A0A5B0V4X7|A0A5B0V4X7_9GAMM Tryptophan 7-halogenase OS=Pseudoalteromonas fuliginea OX=1872678; GN = EU509_00945 PE=4 SV=1
MTKTNAVKNVVIAGGGTAGWMAAAALAKLVGNNINITLVESDDIGTVGVGEATIPPIRTFHKLLGINEQAFMKATQASFKLGISFENWGDENTHYIHSFGATGKECWAGEFHHFWLQGKTLGINNPFGDYCYELQAAKGGKFAFNQQNPINYAYHMDATRYAQFLREFSEPLGVKRIEGKIQKVVKNTKTGHIESLTLNNGEHINGDFFIDCTGFRGLLIEQALHTGYEDWSHLLPCNSAIAVQTKSTSETVLPLTRSIAHKSGWQWRIPLQNRVGNGLVYCSQYMDDEQAKALLLNNIEGEALTEPRIIKFKTGRRLKGWNKNCLALGLASGFVEPLESTSIHLIMSGIIRFMRLFPFNGITNHAIDEYNKQLKSEIENIRDFIVLHYKVTNRDDSEFWQHCNAMGVPKTLQHKIDLFKQTGRVFLDDGDIFRVDSWVQVMLGQGIEPNQHHLIASMMSDEELTRFLHGIKQQIEQRVSQLPPHHEFLKQYCPA

SEQ ID NO: 89962 - protein, 512 aa, Pseudomonas chlororaphis
  REGION 1..512: note = tr|F1JTQ1|F1JTQ1_9PSED Tryptophan halogenase (Fragment) OS=Pseudomonas chlororaphis OX=587753 GN=prnA; PE = 4 SV=1
PIKNIVIVGGGTAGWMAASYLVRALQQQVNITLIESAAIPRIGVGEATIPSLQKVFFDFLGIPEREWMPQVNGAFKAAIKFVNWRKSPDHSRDDHFYHLFGNVPNCDGVPLTHYWLRKREQGFRQPMEYACYPQPGALDGKLAPCLADGTRQMSHAWHFDAHLVADFLKRWAVERGVNRVVDEVVEVRLNDRGYISTLLTKEGRTLEGDLFIDCSGMRGLLINQALKEPFIDMSDYLLCDSAVASAVPNDDAREGVEPYTSAIAMNSGWTWKIPMLGRFGSGYVFSSKFTSRDQATADFLNLWGLSDNQPLNQIKFRVGRNKRAWVNNCVSIGLSSCFLEPLESTGIYFIYAALYQLVKHFPDTSFDPRLSDAFNAEIVHMFDDCRDFVQAHYFTASREDTPFWLANRHELRLSDAIKEKVQRYKAGLPLTTTSFDDSTYYETFDYEFKNFWLNGNYYCIFAGLGMLPDRSLPLLQHRPESIEKAEAMFASIQREAERLRTSLPTNYDYLRS

SEQ ID NO: 89963 - protein, 516 aa, unidentified
  source 1..516: note = Pseudoalteromonas fuliginea
  REGION 1..516: note = tr|A0A5B0UV06|A0A5B0UV06_9GAMM Tryptophan 7-halogenase OS=Pseudoalteromonas fuliginea OX=1872678; GN = EU509_00950 PE=4 SV=1
MTKPITKIVVLGGGTAGWLSAGLLAAEHPHLNVTLVESANVPILGVGEGTWPSMRNTLQRIGIKESDFITQCDASFKQGSKFINWRNLNEGENYYHPFMNPQGYEHTNLHASWQRIAPNQKFADVVNMQSFVCQAALAPKQLQTPEYAAVTNYGYHLDAGKFAEFLKNHCVKNLNVTHIIDDVTEVINDEHGYIASLKTNNNGDITGDLFIDCSGSCARLIGEHFNSEFIAQDHILFNNSAVAAQIPNAHINQPIASATLSTAQSNGWIWDIALPTRRGTGYVFSSKYQSDESATNTLKSYIAKSTSEQQAEQLTYRVLKFSPGYRQKFWIKNCVAVGMSAGFLEPLEASALAMVELSISMISEQLPQTRTHMSQLETRFNDRFSTRWQRVIEFLKLHYVLSERDDTPYWQNISNLNTAPERLQNLLKLWQFQPPSRFDFIENEEVFSSSSYQYVLYGMGFNTQTVSAQNTFNDPRAGDYYYQQNREEIAQCLNGLPSNRALLNHLLSNNGQPHND

SEQ ID NO: 89964 - protein, 383 aa, Streptomyces albogriseolus
  REGION 1..383: note = tr|M1M1P4|M1M1P4_STRAO Aminotransferase; OS = Streptomyces albogriseolus OX=1887 GN=thdN PE=3 SV=1
MTARQVTQPSFRTSELDRFSAYRATEGTEATEATQGTEATQGTEATEATEPGRAEDILDLSNNELMLPPLPAVVDSLRRSSLQVNLYPDPTARVLKTTLARHFGAETEETVVGPGSGGVLQQLLLVLAGRGDEVLHAWPGFDAYPLLIAVSGAKGVPVPLTTTGEHDLAGLLERVNPRTRAVILCSPHNPTGRRIPTGDLLGFLDSLPSHVVAILDQAYMEFDEEEDPHDLGLIREYPNVVLLRTFSKAYGLAGLRVGYAFASSEIAVRARKTVIPFSVTRSGERAAVISLAQESDLAERLATVRRMRADLRSDLGAQGLVPLPSSANFVWLPLGPDSDRFAAAALRAGVRVRSYSGDGVRISVGTEEAHRRVLIAAKDFLSV

SEQ ID NO: 89965 - protein, 500 aa, Rhodanobacter sp.
  REGION 1..500: note = tr|A0A522NB55|A0A522NB55_9GAMM Tryptophan 7-halogenase OS=Rhodanobacter sp. OX=1883446; GN = EPN49_05630 PE=4 SV=1
MTDRRIRRIVIVGGGTAGWMTAAALANALQGNCRIELVESQEIGSIGVGEATIPPIKLFNHSLGIDENAFLAATQGTFKLGIEFVDWTRGGQRYFHPFGQFGTEFDAVPLHHYWLRERERGDDTPLQDYALAWVAARAGKFDLPVADRRQVLSSLDYAYHFDASLYAHFLRNYAEQRGVRRTEGKVVDVALRGDDGLIQSVTLDGGTAIEGDLFIDCSGFRGLLIEGALKAGYDDWTHWLPCDRAVAVACTHRKEVTPYTRSTAHAAGWQWRIPLQHRMGNGHVYCSRFISDDEAAATLLDNLEGEPLGSPRQLRFTAGMRRQSWSRNCVAIGLSAGFMEPLESTSIHLIQTAINRLLALFPDRDFDPVGAQEYNRLTHTEYERIRDFLILHYHAVQRDEPLWRQTAAMSIPDTLQYKIEHFRRYGRLVAESMELFQNSNWLAVLVGQEVWPQRYHPLADMRSQVDAAGRLRGLRQVIDQAVQAMPTHRQYIDRHCRAPS

SEQ ID NO: 89966 - protein, 151 aa, unidentified
  source 1..151: note = Actinobacteria bacterium
  REGION 1..151: note = tr|A0A537X7C2|A0A537X7C2_9ACTN Tryptophan 7-halogenase (Fragment) OS=Actinobacteria bacterium; OX = 1883427 GN=E6G66_18350 PE=4 SV=1
MDGTWDVVVVGGGPAGATVSGLLARSGHRVLVLEREKFPRYHIGESLVPGVLPVLKELGLEERIREFGFVKKYGITLGWGKQPEPWSVYFGEGGPIEHAFQVVRSEFDYILLQNARRLGAMVVEEAEVVDFNFEDGRCSGVEYRVGGRTQS

SEQ ID NO: 89967 - protein, 514 aa, Rhodanobacter sp.
  REGION 1..514: note = tr|A0A522ST17|A0A522ST17_9GAMM Tryptophan 7-halogenase OS=Rhodanobacter sp. OX=1883446; GN = EPN35_09335 PE=4 SV=1
MNDPRIRRLVIVGGGTAGWLAAALLAQALGPQVQIRLVESAEIGTVGVGEATIPQIRHINRFLDIDEDAMLRFAHGTYKLGVQLNGFTRLGDSYLHAFGDLGLPLGLTPFHHYWLRAVQERGGTDTPDLWAYSLNAAAAAENRFAPLEKIPDSPLGGTRYAYHFDASRYAQYLRERIAPGAVQRTEGKVVDVRLREGDGFIESLQLDSGELVEGDFFIDCSGFRGLLIEGALNTGYENWQQWLPCDRALAVGSAPGGPMRPYTQASARTAGWQWRIPLRHRTGNGHVYCSRFISDDEAAAQLLANLETEPLGDPRPLRFVTGMRKLAWNRNCLALGLAAGFMEPLESTSIHLVQSGVSRLLAMFPDRRCDSALVDEYNRQTRFEYEHVRDFLILHYKATERTDTPFWQQCGAMEIPPSLARRIELFRRTGMVFREGEELFAETGWVQVLLGQRIVPQRHHPLADALTDAQLDGFLADIRTLIGRAKNTLPLHHEFVARAGCATDVAQRTAVAAP

SEQ ID NO: 89968 - protein, 441 aa, Rhodanobacter sp.
  REGION 1..441: note = tr|A0A522KBB1|A0A522KBB1_9GAMM Tryptophan 7-halogenase (Fragment) OS=Rhodanobacter sp. OX=1883446; GN = EPN68_08320 PE=4 SV=1
AFLGIDEDDMLRATHGTFKLGVQLNNFGRLGDSYLHAFSDIGLPLGLIGFHHYWLRKRASDPANDLWSYSLNTQTANEHRFGRMDKVGSSPLGGIKYAYHFDAGLYGQYLRQRCDPQVVQRIEGKVVDVQLREVDGFIESVRLESGERIAGDLFIDCSGFRGLLIEGALHTGYESWQHWLPCDRAMAVASARTEPLWPYTRATARTAGWQWRVPLQHRTGNGLVYASQHLSDDEASAMLLANLDGEALGTPRPLRFTTGMRRKAWQRNCVALGLAAGFMEPLESTSIHLIQSGISRLLAMFPDRHCDPVLVDEYNRQTRFEYESIRDFLILHYKATERDDTPFWRQCASMDIPPTLARKIELFRGHGQIFREHEELFTEVAWLQAMIGQHIEPQAYHPLADALDETQLDAFLGDIRTLVGRAAGSLPDHARFVADHCLTRT

SEQ ID NO: 89969 - protein, 497 aa, Massilia sp.
  REGION 1..497: note = tr|A0A519PDU9|A0A519PDU9_9BURK Tryptophan 7-halogenase OS=Massilia sp. OX=1882437 GN=EOO64_04320; PE = 4 SV=1
MHERIAKVVVVGGGTAGWMSAALIRRVLGTQVAVEVVESETIGTVGVGEATIPPIHHLNAVLGISESEFLRETNGSIKLAIRFEGWRVPGESYFHTFGVPGRNHAFCDFQHFWTRGLRLGQTRSLWDYDLNYLACKTGQFGRPRTQDPFLDVPYAYHFDSGLYGQYLRRICVANGVQRTEGLIEQVLLAPESGHVRTLTLQDGREVHGDLFVDCSGMRGLLIQQKLGVPYEDWSHWLPCDRALAVPSERLPHTLPYTRSIAHRAGWQWQIPLQHRIGNGLVYSSRHISDDEATATLMASLPAPALAEPKLIRFRTGRVRDIWAKNVCAIGLSGGFLEPLESTSMYLIQSAIVPLLKLFPHQGITPALVDEYNAQSTLEYETIRDFIILHYHVNERPDTGFWQDVRHMAVPQRLRDKIALFRATGRLFQDPHDIFKDASWLQVLVGQGVMPADHHPIAEAFAPDELARTLAEMAAAKAKGLEGFMSHDDYLAAATRAR

SEQ ID NO: 89970 - protein, 502 aa, Xanthomonas sp.
  REGION 1..502: note = tr|A0A0P7HFS4|A0A0P7HFS4_9XANT Tryptophan halogenase; OS = Xanthomonas sp. Mitacek01 OX=1732019 GN=AO715_04350; PE = 4 SV=1
MQNESDIAARPVKRVVIAGGGTAGWMAAAAISRTLGKVLDITLIESEEIGTVGVGEATIPTLMTFHRLLDIKEQDFMAATQGTIKLGISFEDWLDQGVDYIHSFGLTGTDHWTAGFQHFWMKGRERGLAGDYGDYCVELKAAEQQRFAHLPKRRLNYAYHMDASLYARFLRTFSEGNGAKRVEGKITEVKTDAASGFITSLVLANGDEIEGDFFIDCTGFRALLIEKTLGVGFTDWSHWLFNDSALATQTTAVRDAVPYTRAIADTAGWQWRIPLQHRVGNGIVYSSRYISDDEAKSRFLSSIEGKVIKDPWPVRFRPGQREQCWHKNCVALGLAGSFIEPLESTTIHLIQRGIIHLMQTFPRVVSQPDIDQYNARLSEEIQHTRDFVILHFHLNNRTDTQYWIDYREMTIPATLKHRIDLFRETGRVFHVPTELFAENSWIQVMMGQGIYPRTFHPSADLMGDAELSQFLGQISTDVERTVRQLPAHMDYMRSYAPGAPPA

SEQ ID NO: 89971 - protein, 331 aa, unidentified
  source 1..331: note = Sphingomonadaceae bacterium
  REGION 1..331: note = tr|A0A520YIN0|A0A520YIN0_9SPHN Tryptophan 7-halogenase (Fragment) OS=Sphingomonadaceae bacterium; OX = 1930536 GN=EX258_01470 PE=4 SV=1
MGIKKIIIVGGGTAGWMTAAALSRLTTSTPVSITLVESEAIGTVGVGEATIPPFVDFNRLLGLDESELLSAVQGTFKLGIHFVNWESRGASYFHPFGNYGYEIDGFDFHHLWIKQRMAGDDRPLHAFSPETMAAMNRKFAKTDANQREDLPPINYAYHLDAGAYAQYLRKFAEGRGVKRQEGRIADVHLHGESGFVRAVQLESGEELAGDLFVDCSGFRGLLIEQALESGYEEWTHWLPCDRAVALPSAGDGTVLPYTRATAHEAGWQWRVPLQKRNGNGHVYCSSFMEADEATDILLANVDGEVQADPNHLRFVTGRRKKFWNKNVVALG

SEQ ID NO: 89972 - protein, 538 aa, Pseudomonas chlororaphis
  REGION 1..538: note = tr|A0A1W5X9Y5|A0A1W5X9Y5_9PSED PrnA OS=Pseudomonas chlororaphis OX=587753 GN=prnA PE=4 SV=1
MNKPLKNIVIVGGGTAGWMAASYLVRALQQQANITLIESAAIPRIGVGEATIPSLQKVFFDFLGIPEREWMPQVNGAFKAAIKFVNWRKSPDHSRDDHFYHLFGNVPNCDGVPLTHYWLRKREQGFRQPMEYACYPQPGALDGKLAPCLADGTRQMSHAWHFDAHLVADFLKRWAVERGVNRVVDEVVEVRLNDRGYISTLLTKEGRTLEADLFIDCSGMRGLLINQALKEPFIDMSDYLLCDSAVASAVPNDDAREGVEPYTSAIAMNSGWTWKIPMLGRFGSGYVFSSKFTSRDQATADFLNLWGLSDNQPLNQIKFRVGRNKRAWVNNCVSIGLSSCFLEPLESTGIYFIYAALYQLVKHFPDTSFDPRLSDAFNAEIVHMFDDCRDFVQAHYFTASREDTPFWLANRHELRLSDAIKEKVQRYKAGLPLTTTSFDDSTYYETFDYEFKNFWLNGNYYCIFAGLGMLPDRSLPLLQHRPESIEKAEAMFASIQREAERLRTSLPTNYDYLRSLRDGDAGLSRSQPGPTLAARDIL

SEQ ID NO: 89973 - protein, 506 aa, unidentified
  source 1..506: note = Acidimicrobiales bacterium
  REGION 1..506: note = tr|A0A520XPE4|A0A520XPE4_9ACTN Tryptophan 7-halogenase OS=Acidimicrobiales bacterium OX=2201156; GN = EX271_04735 PE=4 SV=1
MDKNQDQSSSRQVKKIVIVGGGSSGWMTACLLNARLNSDAKNPIKISLIEAPDIPVIGVGEATVPSIRRTLQAIGISEQDFMRGADATFKSLIRFENWNAGEHFDHPFDRRERPQTDAAALSWLAGSKGGGNSFSTKFSVLSNTSSRMLAPKAIGWPEYQSTFPYAYHLDAVKLGQLLTRFGTERGIEHILARIEKVEMTEAGDIAALISESGEQFTADLFIDCTGFSAHLAGQTMAETRDYSKHLLCDRAVTLSIPYDVYRPDHILPYTSANARSAGWLWDINLQSRRSLGYVHSSSHISAEAAETEMRRHEGPHTEGLEAKHIRFKTYKRIKSWHRNCIAIGLSDGFVEPLESTGLYMMQFAAQSVADILRLNPVFTPATTSQFNRLMQSLFDEIFGYVALHYLTSNRRDSIFWRDATDPSRVPDGLKFLMGEWKGRPPHDMDLLSTHRLFSLESYEYLLFGMGYVSDCAAQSQSAHFSLQETLDKCYAKLPLHENWLAKTLAQ

SEQ ID NO: 89974 - protein, 506 aa, Xanthomonas campestris; identical to SEQ ID NO: 89007
  REGION 1..506: note = tr|A0A556SE14|A0A556SE14_XANCG Tryptophan 7-halogenase OS=Xanthomonas campestris pv. glycines; OX = 473421 GN=C2859_23565 PE=4 SV=1

SEQ ID NO: 89975 - protein, 502 aa, unidentified
  source 1..502: note = Rhodanobacteraceae bacterium
  REGION 1..502: note = tr|A0A522RMM2|A0A522RMM2_9GAMM Tryptophan 7-halogenase OS=Rhodanobacteraceae bacterium OX=2052182; GN = EPN36_16130 PE=4 SV=1
MTDPAIGGIVVVGGGTAGWMAAAGLARILGPACSIRLVESEQIGTIGVGESTVPHLKLFNDLLGIDDVSFVRHTHGTFKLGTQFVDWARIGDCYMHGFGTIGHDISLLPFHQFWLKARRLGIADELGAYSLHTVAGPQGKFTPSVTNAPQNSPLADIAYAYHFDAGLYGRFLRDYAEKLGVLRTEGKVVAARRRGEDGFVEAVVLESGEHIEGDLFLDCSGFRGLLIEQTLHAGYEDWSHWLPCNRAVALSCETAGPPTPYVRCTARAAGWQWRIALQNRIGNGYVYSSGHLSDDEAMGTLLKHLDGRPIGEPRVLRFTAGRRRKPWDRNVVAIGLAAGFIEPLESTTIYMVQSAITRLTKLWPRRDCSDALRDRYNAETAFEIERIRDFIILHFCATERDDTPFWNDCRTMAIPELLAENIRLFRDSGRFYRNAEELFALPSWVEVMIGQRILPRSWHPVVDQLPDADLQKLMEGVRQVVATCVEAMPPHQAFIDRHCRAA

SEQ ID NO: 89976 - protein, 506 aa, Rhodanobacter sp.
  REGION 1..506: note = tr|A0A522SLW0|A0A522SLW0_9GAMM Tryptophan 7-halogenase OS=Rhodanobacter sp. OX=1883446; GN = EPN35_15255 PE=4 SV=1
MTDPRIRNIVIVGGGTAGWMAAAAFAKVLDTGCSIRLVESEEIGTVGVGEGTVPHLKLFNNLLGIDDVEFVRNTQGTFKLGVQFNDWGRLGDSYVHGFGTIGHDVGLLPFHQYWIKARQAGKADEIGAYSLNTVAAPRGRFMPSASDAPPGSPLANVAYAYHFDAGRYARFLRGYAEQRGVRRTEGKVAQTVLRADDGFVEAIVLENGERIEGELFIDCSGFRGLLIEQALHTGYLDFSHWLPCDRALAVACEKVGPPTPYTRASARPAGWQWRIPLQHRTGNGYVYSSAHISDDEAAATLLGHLDGVPMGEPRLLRFTTGVRRQAWNRNVVALGLAGGFLEPLESTSIYMIQSGIARLLNLLPRRDFSPLLIERYNAQSRFEYEHIRDFLILHYHATERDDTPFWNQCRTMSIPPQLADNIRLFRDSGRFFRDGEEMFATPSWVQVMLGQRIAPQSYHPLVDQMPDAELAGFMASVSHVVASCVEVMPAHQAFIDRCCTAPAMVA

SEQ ID NO: 89977 - protein, 510 aa, Rhodanobacter sp.
  REGION 1..510: note = tr|A0A522GZL2|A0A522GZL2_9GAMM Tryptophan 7-halogenase OS=Rhodanobacter sp. OX=1883446; GN = EPN74_11570 PE=4 SV=1
MTDRRIRRIVIVGGGTAGWMTAAALANALQGNCRIELVESEQIGSIGVGEATIPPIKYFNRTLGIDENAFLAATQGTFKLGIEFVDWTRGGQRYFHPFGQFGAEFDAVPLHHYWLRERERGDDTPLQDYALAWVAARAGKFDLPVADQRQVLSSHDYAYHFDASLYARFLRTYAEQRGVRRTEGKVVDVSLRGEDGFIESVTLDGGTVIEGDLFIDCSGFRGLLIDGALKTGYDDWTHWLPCDRAVAVACTHRRELTPHTRSTAHAAGWQWRIPLQHRMGNGHVYCSQFISDDEAAATLLGNLEGELLGSPRQLRFTAGRRKQSWNRNCVAIGLSAGFMEPLESTSIHLIQTAVTRLLALFPDRDFDPVAVQEYNRLTHTEYERIRDFLILHYHAVQREEPLWRQTATMSIPDTLRYKIEQFRRGGRLVAESMELFQNANWLAVLVGQEVWPERYHPLADMRSQVDATGRLQGMRQVIEEAVRSMPTHQQYIERHCRAQPDALPANGPRA

SEQ ID NO: 89978 - protein, 522 aa, Pseudoalteromonas sp.
  REGION 1..522: note = tr|A0A5B0TZH7|A0A5B0TZH7_9GAMM Tryptophan 7-halogenase OS=Pseudoalteromonas sp. FUC4 OX=2511201; GN = EU510_04590 PE=4 SV=1
MNDTLKSIVIVGGGTAGWLSAGIIAAYLQKHHSLNYKITLVESSDIATVGVGEGTWPTMRRTLQNMGVDEAQFINQCNVTFKQGAKFANWHSTKENDFYYHPLMMPQGFVDNALAAAWLTQNTDSAEPYNHFANFVCPQHALCEHNLAPKALTTAQYSGVANYAYHLDAGLFATFLKDHCINKLNVTHVIASVLSVNNNVHGDIHSLSLDNNTTICGDLFIDCSGFKSLLLGENLKVGFKSCKDILFADSALAVHMPYEDDTQAISSHTISTAQTAGWIWDIGLQTRRGVGHVYSSRHISEEEAKEQLFDYLNISPTKRADFNVKKISFEPGHREKFWHKNCVAIGLSAGFLEPLEASALLLVEISANFIAEQLPANRQVMDITAARFNRTFNYRWQRIIDFLKLHYMLSERTDSLFWQQHCAEQSIPQSLQDDLALWRTHIPNDNHFDYSVEVFPAASYQYVLYGMGFKTATTHYGNHPSAIKKAQNLATKNTKDTAELVNKLPDNRTLLKQIKQYGLQKI

SEQ ID NO: 89979 - protein, 497 aa, Kitasatospora sp.
  REGION 1..497: note = tr|A0A0U2JMC9|A0A0U2JMC9_9ACTN Tryptophan halogenase; OS = Kitasatospora sp. 152608 OX=1769566 GN=smcD4 PE=4 SV=1
MTQVIVVGGGPAGSTAAALLARAGISVTLLERATFPRYHIGESFSTSCRVVLDYLGALEKVDARGYTSKTGLLVRWGQEKDWSIDWTAQFGPDVRSWQVDRDDFDTVLLDHASESGVQVVQGAHVHRVLFDGDRATGVEWTAPGETAKQISRADFVLDASGRAGLISAQHFNNRRPQEIFRNVAIWGYWEGGELLPGSPSGGINVISSDDGWYWVIPLRDNRFSVGFVTHKSLFVERRKEFDSIEDMLLKVVDESPAVREILAKGTFQPGTRVEQDFSYAADSFCGPGHFLLGDAACFLDPLLSTGVHLGMYSGLLAAASVVAITDGDVSEHEALAFYESLFRNAYQRLFTLVAGFYQKHAGKDRYFALAETLARQEPEHWHSSEQSFGEITAGLTDMREAADAAARGRKPIQEIIEKAATGEPSPVQQLLIAAAVAQARAQGDTEPGARLTAAPGVIDANDLYDAVSGLHLVMQPRLGIRSVASQKQGHDAAPVLP

SEQ ID NO: 89980 - protein, 572 aa, Rheinheimera sp.
  REGION 1..572: note = tr|A0A486XMT6|A0A486XMT6_9GAMM Tryptophan halogenase, putative OS=Rheinheimera sp. BAL341 OX=1708203; GN = BAL341_1050 PE=4 SV=1
MHRSVFLPEQTADGQGLRFAASPVFSCIDMVTNVIKQPPQHDQATPITQQTATAPIRTVVIVGGGNAGWLTAGRIAAKHKSNQPDGVNVILIESPTLPPIGVGEGTWPTMRSTLIALGISETDFIRQCDVTFKQGAKFAQWVDGSSSDFYYHPLVLPQGFGKAEMAGYWQQSTATANNTSRNTSSFSNALCYQEALCEHGLAPKTIRHAEFGAVANYAYHLDSGKFGPFLRQHCIEKLGVTHILDDVVAVQSSSNGDIAAVNTKQSGVIAGDLFVDCSGFSSLLLGKHYQVPFKACDDILFIDTALAVQVPYEHPDTPIASHTISTAQDAGWIWDIGLQHRRGVGYVYASKYCTEKQARATLARYVGPAIADLSVRKIPIVSGHRTRFWQNNCVAVGLAAGFLEPLEASALVLVELSAQMISEQLPANRALMDIVAKRFNETFLYRWDKIIDFLKLHYLLSQREEPFWRDNRNPATIPQSLQDLLQLWRYRAPGDLDFTSNNEVFPAASYQYVLYGMGFKTDYSQSHYLLDNPEFAAQQFAQNQKMIAQALSILPSNRELISKIREFGLSQL

SEQ ID NO: 89981 - protein, 502 aa, unidentified
  source 1..502: note = Alphaproteobacteria bacterium
  REGION 1..502: note = tr|A0A1V5FTR5|A0A1V5FTR5_9PROT Flavin-dependent tryptophan halogenase RebH OS=Alphaproteobacteria bacterium ADurb.BinA280 OX=1852793 GN=rebH PE=4 SV=1
MNLHPDAIRKVVIVGGGTSGWMTATALIEMLAGRVDVTLIESDEIGIVGVGEATIPPIRRFNAGMGIDEDEFLRATQGTFKLGIEFKDWTRIGHAYHHAFGSVGGRDLGMVQFYNYWLKLRTLGEVGPLDDYTFNAIAARQNKFMRSAKIENSPLANITHAFHFDASLYSQFLRKRAEAKGVRRIEGKIVDVQLCAEDGFIESVQLQNGPRIEGELFVDCSGFRGLLIERALHTGYVDWSHWLPANRALAVPCESVAPLTPYTRSTAHHVGWQWRIPLQHRIGNGLVYCSDYISDDEASALLLSKLDGKALADPRPIRFVTGMRRKFWQRNCVAIGLASGFLEPLESTSIHFIQTSISKLLAYFPDRRFNPVDIDAYNRQTQFEFERSRDFIILHYLATERTEPFWQDRRRIDVPDTLQQKIDLFRSAGRIIREQEELFTESSWLQVFAGQNVLPEQYHPIVDVMPLDDIRKMARSVAGVLDRSAQAMPAHASYIEKHCKAI

SEQ ID NO: 89982 - protein, 530 aa, unidentified
  source 1..530: note = Rhodanobacteraceae bacterium
  REGION 1..530: note = tr|A0A522S3P1|A0A522S3P1_9GAMM Tryptophan 7-halogenase OS=Rhodanobacteraceae bacterium OX=2052182; GN = EPN38_03660 PE=4 SV=1
MQLTGVPPRNGDTAAIRRVVVVGGGTTGWLTAALLARALGPAHEIQLVESAQIGTIGVGEATIPQILHINTFLGLDEGDLLRHIHGTYKLGVQLNNWGRLGDSYLHGFGDVGLPLGLLPFHHYWLRSRAGGDTHSLWDYSLNGVAARQDRFARVDKVPGSPLGGIRYAYQFDAARYVGYLHERIPAGRVRRIEGKVVAVNLRGADGFIESLTLDNGQVITGDFFFDCSGFRGVLIEGALETGYENWQHWLPCDRALAVGSVRTKPMRPYTQATARSAGWQWRIALQHRTGNGHVYCSRFISDDEATAQLLAGLESERLEEPRPLRFVSGMRRLSWNRNCLALGLAAGFMEPLESTTIHLVQSGVARFLGMFPDRHCDPVLVDAYNRQTRFEYEHVRDFLVLHYKATERDDTPFWRHCGAMDVPESLARRVALFRRTGLIFREADELFTEVAWLQLLIGQRIEPAQYHPLADDLEAAKLAGFLSDIRTLVERAVAGLPTHDDFVARVCAAPATAPDARSTMSPGVLAGSAS

SEQ ID NO: 89983 - protein, 78 aa, Xanthomonas oryzae
  REGION 1..78: note = tr|A0A5C2EMH0|A0A5C2EMH0_9XANT Tryptophan halogenase; OS = Xanthomonas oryzae pv. oryzicola OX=129394; GN = XOCgx_0628 PE=4 SV=1
MQVMLGQGIVPQQHHPVADLMGDAELSRFLDTIRARVEAALVRLPAHADFLQRYCPAPPPPEPAARLPAPPVMATPAR

SEQ ID NO: 89984 - protein, 481 aa, unidentified
  source 1..481: note = Sphingomonadaceae bacterium
  REGION 1..481: note = tr|A0A520YCB7|A0A520YCB7_9SPHN Tryptophan 7-halogenase OS=Sphingomonadaceae bacterium OX=1930536; GN = EX258_04260 PE=4 SV=1
MAACLLQHHWPGTMIRLIEGSEIGIVGVGEGSTPQLKVFFDTIGVSEAEWMPAANATYKVGIQFEHWSQKPGYERYFHPFPTALDGHSAGQLFRAARLRRSGLDVQAHPDDFLFPGLLAERKLAPLNPENFPLEVSYGYHFDAHKVGEVLKGIATKRGVEWVDTRIASVEMTDDGEVAALIGEDGGRHEADFFIDASGFRALIAEQALGGAHVSFADNLFADSAVVLPTDVAQGGPECATRAIAMDAGWRWSIPLTNRTGNGYVYSSKYIEADAAETELRAALGVGKDVEARHLKMRCGRLDKSWNANCLAIGLAQGFLEPLEATALHIVLVTVEQFIKAVDTDGLGPEARGPFNDSIAARYEGIRDYIVAHYRCQLRRDTDYWRDNAAHENLSPSLKGIMTAWFTRQDLTLEVQRQDIARYYNAVSWHCLLGGYGNFPQKLEKPGEDVHLPDMYRIDDFLERCAMNFPSHNEALKAREAR

SEQ ID NO: 89985 - protein, 503 aa, Rhodanobacter sp.
  REGION 1..503: note = tr|A0A522GZK7|A0A522GZK7_9GAMM Tryptophan 7-halogenase OS=Rhodanobacter sp. OX=1883446; GN = EPN74_11560 PE=4 SV=1
MPANPIQRVVIVGGGTAGWMTAALLSRAMGPQLDIRLIESDQIGIVGVGEATIPQIRHVNQFLGLDEDDVLKATQGTFKLGIQFNDWRRIGDSYLHAFGDIGLPLGLLGFHQYWLRKRQQDPAADLWAYSLNAQAAGANRFARMETVGSSPLTGIKHAYHLDAGLYSKYLSQHCDSRIVRRTEGKVVDVQLRADDGFIESLKLESGEIVDGDLFIDCSGFRGLLIEGALETGYEDWRQWLPCDRAIAVASERIEPMRPYTQASARPAGWQWRIPLQHRNGNGHVYCSQFMGDDEATALLLGNLEGDAIAEPRPLRFTTGMRRQFWNRNCVSLGLAAGFMEPLESTSIHLIQTGVSRLLTLFPDRHFDPGLSAEYNRQTRFEYERVRDFLILHYRATERDDSPFWRHCAHIDMPESLLRKLELFRSSGQVFREGEELFTEVAWLQVMLGQGIEPTRHHPLADALAPTQLDEFLGNIRTLIGRAVNTMPQHTRFVTEHCRATMPG

SEQ ID NO: 89986 - protein, 423 aa, Rhodanobacter sp.
  REGION 1..423: note = tr|A0A522MXM1|A0A522MXM1_9GAMM Tryptophan 7-halogenase (Fragment) OS=Rhodanobacter sp. OX=1883446; GN = EPN49_15740 PE=4 SV=1
PGRQHYFHPFSVPSQRSGSLELLPYWLLGAAPEGVSFADAVTMQSPLVEHGRAPKRIGDPDYQGPLNHAFHFDAACFAAVLAEHGQSLGIIRHLATVERAELDEHGAIARIVTAELGALSADLYVDCTGLRGSLIGGAMQSPFRSRRDVLFADRAVALQVPYPRADTPIPSCTIATAQEAGWIWDIGLHQRRGIGYVYSSRHAGATRAEEVIRSYVGDAAAGLEALHIRFETGYRPEHWRKNCVAVGLAGGFVEPLESTGIALIELAAYMLTHQLPGDVDDMERTARHYNAMMVARYERIIDFIKMHYCLSQRRDSGFWIDNTDPASIPDTLQDRLALWRHRPPHRLDFVTDLEMFLPASWQYVLYGMEFHTDLEPMRSAYPHMDAARREFAMIRQAASRALDDLPEHRVLVEHMCRQPAQRK

SEQ ID NO: 89987 - protein, 97 aa, Rhodanobacter sp.
  REGION 1..97: note = tr|A0A522KA93|A0A522KA93_9GAMM Tryptophan 7-halogenase (Fragment) OS=Rhodanobacter sp. OX=1883446; GN = EPN68_08825 PE=4 SV=1
DRLALWKHRPPHRLDFVGDLEMFLVSSWQYVLYGMEFKTDLEPMRSVYTRVDDARREFAMIQQMAGHALGDLPGHRELVEQMVREYRQRNEAAEAVA

SEQ ID NO: 89988 - protein, 468 aa, Rhodanobacter sp.
  REGION 1..468: note = tr|A0A522KHJ4|A0A522KHJ4_9GAMM Tryptophan 7-halogenase (Fragment) OS=Rhodanobacter sp. OX=1883446; GN = EPN68_06050 PE=4 SV=1
MARLQKILVVGGGTAGWLTACYLAKSLNSVAPGSIKVELVESPRIGLLGVGEATFPSIRGTLSAIGLDERRFLAGSTGTFKQGIRYRHWVRPQGAPGASDFFHPFSMPSQRTGGPELLPYWLLGAAPAGVPFADAVSMQKRLVDGNRAPKRAKDADFHGPMNYAYHFDAARVAEVLAEHGQTELGVVRHLATVERAELDAQGAIARIVTREAGELSADLYVDCTGLRGYLIDGAMKSPFRSRRDVLFVDRAVAMQVPYPQPDSPIPCYTMATAQEAGWIWDIGLQQRRGCGYVYSSQHSDATRAEAVFRQYLGAAAEGVTAQHIRFETGYRPEHWRKNCVAVGLAGGFVEPLESTGIALVELGAYLLTHLLPGDVDDMERTARHYNEMVVARYDRIIDFIKMHYCLSQRRDTAFWLDNANPDSIPDTLKDRLALWKHRPPHRLDFVGDLEMFLVSSWQYVLYGMEFKT

SEQ ID NO: 89989 - protein, 505 aa, Rhodanobacter sp.
  REGION 1..505: note = tr|A0A522GX69|A0A522GX69_9GAMM Tryptophan 7-halogenase OS=Rhodanobacter sp. OX=1883446; GN = EPN74_13755 PE=4 SV=1
MTDPRIRNIVIVGGGTAGWMAAAAFAKVLGPAYSIRLIESEEIGTVGVGEATVPHLKLFNNLLEIDEIEFIKHVQGTFKLGIQFNDWGRLGDSYIHGFGTIGHDVSLLPFHQFWIKARQQGFAADIGAYSLNTMAAPRGKFMPSATDVPESSPLANIAYAYHFDAGLYAKYLRGYAERRGVRRTEGKIAQTLLKPDDGFVEAVVLENGERVDGELFIDCSGFRGLLIEQALHTGYNDFTHWLPCDRAMVVPSEIVGPPTPYTRSSAQAAGWQWRIPLQNRIGNGHVYSSAYLSDDEAATTLLENLDGPALDDPRVLRFTTGMRKKFWNKNVVALGLASGFLEPLESTSIYMIQSGIARLLNLFPQRDFSEVVIDRYNAQARFEYERIRDFLILHYHATGRNDTEFWNQCRTMSIPAQLQDNVRLFRDSGRFFRDAEEMFALVSWVQVMIGQGIAPHSYHPIVDQMPEQDLRQFIDGVGKVVASCVESMPPHAAFIERYCTARAGS

SEQ ID NO: 89990 - protein, 522 aa, Massilia sp.
  REGION 1..522: note = tr|A0A519PG08|A0A519PG08_9BURK Tryptophan 7-halogenase OS=Massilia sp. OX=1882437 GN=EOO64_02110; PE = 4 SV=1
MSACMDRRRQWLIVPMSDVDAALQSNEATGGRMRQKFDHIVVVGGGSAGWMTAAALATGLKGRATVEVVESEDIGIVGVGEATFPSIRNYNQLIGIDERDFLRATNGTYKLGIRFCDWLTPGHDYFHTFGHFGDLCGSQTLWAQHRSAGSTEPLGTQCLPTVMAMQGRFVLPSEQAQFNYAYHFDAVQYAAFLRKLALQRGARHTQGRIAEVSRRMDGGVAALHLEDGRRIDGDVFVDCSGFRSLLLGQTLQEPFVDFSHWLPVDGAWACPTERVGEELAPYTQATALEGGWAWRIPLQNRTGHGHVFASRFIDADRARAQLLARLDGKPLVEPRLLRFTTGHRERFWVHNVVAIGLSSGFLEPLESTSIYLIQDGIARLMTLLTAGRALDENDRALFNDGAVRRFTRIRDFIILHYCLTRRRDSGLWRHVATMELPETLAFRMELWRRYGVLHEYDDEGFDATSWLAIYAGMDHWPERTDPVFAEIAPERALQALQGRREAISASVDRMPMHHRMLSQRLG

SEQ ID NO: 89991 - protein, 507 aa, Rhodanobacter sp.
  REGION 1..507: note = tr|A0A522NGI2|A0A522NGI2_9GAMM Tryptophan 7-halogenase OS=Rhodanobacter sp. OX=1883446; GN = EPN49_01300 PE=4 SV=1
MTDQRIRNIVIVGGGSAGWMTAAALAKTLGRECSIRLVESEEIGIIRVGEATVPHLSVFNKVLGIDEADFVRQTMGTFKLGVQFVDWQKPGKSYVHGFGTMIGLDVGMLPFHHYWLRARQAGQAGDIGDYSLNTLAAPRGKFMVSAIDAPANTPLANIAYAYHFDTGLYGRYLRRQAESMGVQRTEGKVCDTVLRPHDGFVDAIVMESGEVIQADLFIDCSGLRGLLIEQALHTGYEDWGHWLPTDRAVTVGCEAVGPPTPYTRATAQAAGWQWRIALQHRVGNGHVYAGRYLSDDEAAATLLHNLDGRATGDPRLIRFRAGTRKQAWNRNVVAIGLSSGFLEPLESTGIFLIQSAVMRLLNLFPQKDFSQALIDRYNAQSRFEIERIRDFLILHFHATERDDTPFWRYCRTMDIPDSLRSVMALFRESGQFIRNADELFGLVSWVQVMLGQGVIPQHYHPIADQMPEPELRHLMDHVKQVIGACVDAMPPHQAFIDRYCAAPALAS

SEQ ID NO: 89992 - protein, 504 aa, Xanthomonas sp.
  REGION 1..504: note = tr|A0A0P7GGD7|A0A0P7GGD7_9XANT Tryptophan halogenase; OS = Xanthomonas sp. Mitacek01 OX=1732019 GN=AO715_15845; PE = 4 SV=1
MDHLQRIVIVGGGTAGWMTAAALSRVLGPAYDIALVESEQIGTVGVGEATVPHIKAFNQLLRIDEADFVRSTQGSFKLGIEFVDWLDVGERYIHGFGTEIGHPLGLLPFHQYWLKARAQGRAGPLGDYTLNTLAAQRGRFMVSATDVPAGSPLSNIAYAYHFDAGLYARYLRRYAEQRGVRRHEGMIDHVAQHPESGFVSAVRLQDGTVLEGDLFVDCSGFRGLLIEQTLQTGYHDFTQWLPCDRALAVPTANVGPPAPFTRATARPAGWQWRIPLQHRTGNGYVYSSAHVSDDEAAATLLANLEGEALGDPRPLRFVTGRRKQCWNRNVVAIGLSSGFLEPLESTSIHLIQSGISKLLELLPREGFNPVLAERYNAQLAFEFDRIRDFIVLHYNATRRDDTPFWRHCRTMEVPAELCTAVDLFRDSGRFFRNASEMFDTISWVQVMIGQGIVPQGWHPLVDNLPDEEIARFVDSVGRTLNACVDAMPPHQAFIDRHCKASPPT

SEQ ID NO: 89993 - protein, 494 aa, Rheinheimera sp.
  REGION 1..494: note = tr|A0A486XV79|A0A486XV79_9GAMM Tryptophan halogenase; OS = Rheinheimera sp. BAL341 OX=1708203 GN=BAL341_2897 PE=4; SV = 1
MQTVRDVVVLGGGTSGWIAAALLKKVLGNVVNVQLVESEDIGTVGVGEATIPPIRLLNNVLGINEAEFLRETKATIKLAIKFENWRVPGEGYFHTFGAPGKSLAFCHFHHLWRRAQMLGDTTSLWQYDLNYLCAEAGKFAPINSKDPVLELPYAYHFDAGLYARFLRKFSEQMGVVRHEGKVSSVTQHNNGDIQHLVLEDGRVLAGDLFIDCSGFRGLLIQQKLNTGYEDWSHWLPCDRAIAVPSERFEHTLPYTRSIAHSSGWQWRIPLQHRNGNGLVYSSAHYTEQQAADILLSNLDSKALADPKVIQFKTGRRRKQWHRNVVSVGLASGFLEPLESTSIHLIQSAVVRLLQLFPHQGITDALVNEYNRQSQIEFEQIRDFIILHYHVNERTDSLFWRDVRQMEIPATLARKIQLFAENGSLFREQNDLFLESSWLQVMLGQGIVPKDYHPLANSFAEPQLKQMLQTMLAIKRDPLAKLPSHDEYLRRVCAG

SEQ ID NO: 89994 - protein, 495 aa, Rheinheimera sp.
  REGION 1..495: note = tr|A0A486XVS6|A0A486XVS6_9GAMM Tryptophan halogenase; OS = Rheinheimera sp. BAL341 OX=1708203 GN=BAL341_2898 PE=4; SV = 1
MHNILIVGGGTAGWMTALLMAHSWRNKPVKIALVESSDIGIIGVGEGSTPSMKRFFATLGITDNEWMPACEATYKVNIRFDGWSPATGVNSYCHPFISQLDRHSEAAFIENCLKRRQGLAVVTAPEQFLFNGYLAERYLQPLASDNFPFRIEYGYHFDSILLGRYLRDHAISLGVTHHTATIKQVEQAVNGDIRAVIADDGRSFAADLFVDCSGFNSLLLQQTLQVPFESFNTHLLNDAAIALPSAALAPLPTQTQATAMQAGWAWQIPLRHRTGNGYVYSSAFLSKDQAETELRAALGLLDTDVNVRHLNMQVGQVRQHWFRNCVAVGLSQGFIEPLEATALHLVQTAVETFIEDYDAGQWSAQFQSRFNASIRQRFEATRDYILAHYVFNTRNDSDYWLAARQRPELPDTFEAIQQAWFAVRDLTPVLQKQNRETMFGPLSWYCLFAGYGVFPPLSPNQPPAAFLQQQDAWLTHGIGSLFAGCVKNFSRANSL

SEQ ID NO: 89995 - protein, 501 aa, Rhodanobacter sp.
  REGION 1..501: note = tr|A0A522N3W4|A0A522N3W4_9GAMM Tryptophan 7-halogenase OS=Rhodanobacter sp. OX=1883446; GN = EPN49_11405 PE=4 SV=1
MQANPIQRVVIVGGGTAGWMAAALLARALGPQVQIRLVESDEIGVVGVGEATIPSIRLVNQFLGLDEDDLLRATHGTFKLGIEFNDWRRLGDSYLHAFGDLGLPLGLIGFHHYWLRDRQRAGAADLWAYSLNATAARAHRFGRMERVGSSPLTGIKYAYQLDAIAYGQYLRRHIDPAIVQRIEGRIVDVQLRAGDGFIESVQLASGERVAGDLFIDCSGFRGLLIEGALKTGYDNWQQWLPCDRALAVASARVAPMRPYTQAGARTAGWQWRIPLQHRSGNGHVYCSRFISDDEAAATLLANLEGEPLADPRPLRFIAGMRRQSWNRNCVALGLAAGFMEPLESTSIHLIQSGVSRLLAMFPDRHCDVALSTEYNRQTRFEYERIRDFLILHYKATERDDSPFWRHCAQMEIPESLARRIALFRGNGSIFRDADELFTEVGWLQVLLGQGIEPQRHHPLADTLDQGQLDEFLGNIRTLVDRAAGTLPPHERFVAEHCKAQT

SEQ ID NO: 89996 - protein, 537 aa, unidentified
  source 1..537: note = Rhodanobacteraceae bacterium
  REGION 1..537: note = tr|A0A522S388|A0A522S388_9GAMM Tryptophan 7-halogenase OS=Rhodanobacteraceae bacterium OX=2052182; GN = EPN36_01270 PE=4 SV=1
MSYATATVFNYNVTATRPGARTDAEPPVKHIVIVGGGTAGWMTALTLSRSAYGPRLKITLLESPRVGAIGVGEGSTPWLRGFFESMGIEEREWMPACNATYKAGITFDGWSTRRGHEGYFHAFASMLDNITIGPFIDNVHARLDGADVYAHPNRFFIASRLASHCQAPRAPRSFPFDVWYGFHFDSVLLGQFLQKKAIESGVNHVVGHVTNVQLGESGNITSLQLEGDATLAGDFFVDCTGFASLLTGKAMGTPFVPFKENLFNDAAVVINRPNAGPIMSQTISTALRNGWVWKIPLTNRYGYGYVYSTDFCSPDNAELELREHLGIAGASDAPARHLRFHPGRVARSWTRNCVANGLAQGFIEPLEATTLLFAQRTASMLVTALEKGDLGEEVRAQFNDTLNAQIEGTRDYIVTHYKTNTRTDTDYWRANAANTNLSAPLQQLLRTWLGRHSIAGGITDGTFGRGYPVMSWYSLLAGVGLFPDDNETRPPTAQEAKYSLAEIDNLINRSAMNFPDHRAFLQAIEPKPEKSLQVYFY

SEQ ID NO: 89997 - protein, 505 aa, Xanthomonas campestris; identical to SEQ ID NO: 89083
  REGION 1..505: note = tr|A0A556SH67|A0A556SH67_XANCG Tryptophan 7-halogenase OS=Xanthomonas campestris pv. glycines; OX = 473421 GN=C2859_16680 PE=4 SV=1

SEQ ID NO: 89998 - protein, 517 aa, Xanthomonas sp.
  REGION 1..517: note = tr|A0A0P7G699|A0A0P7G699_9XANT Tryptophan halogenase; OS = Xanthomonas sp. Mitacek01 OX=1732019 GN=AO715_04365; PE = 4 SV=1
MNADLRHVVILGGGSAGWLTAALLAADHDGALPSGLRVTLIESPDVPTIGVGEGTWPTMRDTLRRIGVSETDFVRACDATFKQGSQFVRWTRDRADDRYHHPFVLPQGYHDADLVAGWMRHGDVPFDRLVSFQPQLCDAGRAPKQFGTPEYAAVANYAYHLDAAKLGLFLRAHCTQRLGVRLVSDHVEGVDVRDNGDIAALRTRAHGAIDGDLFVDCTGMRALLIGQHYGIDRTPCGDVLFNDRALALQVRYPDADTPIACQTISTAQANGWIWDIGLSARRGVGHVYSSAHTDADAVEAALQRYIADTGGADCEIIARQSLSFEPGYRRRSWHRNCVAIGLSSGFVEPLEASSLVLVELAATMLSDQLPATRETMDTVAARFNETFAYRWERVVEFLKLHYVLSHRDDSAYWRDHRDPEHMPAHLAELLALWRHQSPSRYDLPRVDEVFPSASWQYILYGMGFRPDTRATTRRAADTARAEAAFREASDLARRMIPALPSHRELIDHIHTRGLSPV

SEQ ID NO: 89999 - protein, 508 aa, unidentified
  source 1..508: note = Pseudoalteromonas fuliginea
  REGION 1..508: note = tr|A0A5B0V0M7|A0A5B0V0M7_9GAMM Tryptophan 7-halogenase OS=Pseudoalteromonas fuliginea OX=1872678; GN = EU509_07820 PE=4 SV=1
MNKTIKTIAVIGGGTAGWLSAAIIASYHQGKNSDGLKVMLVESSDIPTIGVGEGTWPTMKNTLQQIGLREVDVFKACNATFKQGGKFVNWTHGNNDFYYHPFTVPLGYGRIDLAPYLDNVEDFAQQTNFQHDICEASLAPRGIAQGEYQGNCNYAYHLDAGAFAQMLKQHCKSKLGIEHIIGTVDQVKLDDDGAINELTLKDQTRTISADLFIDCTGFSSLLLGQALNVPFKKMDHVLFNDSALAMQVPYDENDDSLASHTIATAQSAGWIWDIGLTHRRGVGHVYSSKFLSDDEAEQNLRNYLGDAANGLTARKISFESGYREKFWHKNCVAIGMSAGFVEPLEATAIMLVEISARFVAEHMPADTQVMPIVAKRFNEQMDYRWQRIIDFLKLHYMLTKRPEPYWQAHVQPDTIPQTLQEDLLLWGSRGPLIQDFHGALELFPAASYQYVLYGMGFKPDFTKQAYLYSQHVQAKQIIERNSQLTQQMLQTLPPHRAFIEQWLAANPV

SEQ ID NO: 90000 - protein, 497 aa, unidentified
  source 1..497: note = Pseudoalteromonas fuliginea
  REGION 1..497: note = tr|A0A5B0U157|A0A5B0U157_9GAMM Tryptophan 7-halogenase OS=Pseudoalteromonas fuliginea OX=1872678; GN = EU509_11060 PE=4 SV=1
MKSIKHVVIAGGGTAGWITAALLNKVLGKVINITLIESSSIGTVGVGEATIPPIISLNNALGINEKEFINETNATIKLGIEFENWKKPTHSYMHAFGPIGKDFPFCDFYNFWLKGRITGCEDDLWDFSLNYQAAKQHKFAPLNTIPNTQLPGLSYAYHFDATLYAEYLKKLAISRGVKHIDAKISEVTQCLATGNVETLILDDNKQINGDLFIDCTGLRALLIEKTLNTGFVDWSHYLPCDSAIAVQTKSNDELKPYTQSIAHSAGWQWQIPLQSRIGNGLVYCSRYLSDEDAKALLLNNLPADPITEPRFIKFKTGRRVKQWHKNVVAVGLSSGFLEPLESTSIHLIQSAVTRLIKLFPHHGISDALASEFNKQSVTEIEHMRDFIILHYKLTERGDSAFWRQCKQMEIPDSLAHKLSLFKHTGKVVRENDELFAEVAWQQVFIGQGLIPDDYNSIVDSLSSEQLNDLFSTLKTLITSTVEQLPTHKDFLKEIKKA

SEQ ID NO: 90001 - protein, 517 aa, unidentified
  source 1..517: note = Pseudoalteromonas fuliginea
  REGION 1..517: note = tr|A0A5B0UKH8|A0A5B0UKH8_9GAMM Tryptophan 7-halogenase OS=Pseudoalteromonas fuliginea OX=1872678; GN = EU509_04695 PE=4 SV=1
MNDDIKSIVIVGGGTAGWLSAGIIAAYLQKHHSKKINITLLESSDIPTVGVGEGTWPTMRRTLKDMGIRETEFIQQCNVSFKQGAKFTKWITGEEDDYYYHPLELPTGMYEHNLATSWLTKNEPKPPFAQYVSAQQSICESGLAPKQITTPEFSAIANYAYHLDAGLFATFLKNHCIDNLNVKHIVGTVVGVNNCTNGDIKSVSLNNKIEIAGDLFIDCSGFKSLLLGENLGVGFKSCKDVLFADSALAIHMPYKDDEPICSHTLSTAQTSGWIWDIGLQTRRGIGHVYSSKHISDEDAKQQLFDYLNINKDQQSEYKVKKLSFEPGHREKFWHKNCVAVGLSAGFLEPLEASALLLVEISANFVAQQFPANRHVMNITAQRFNRTFSYRWERIIDFLKLHYMLSKRTDSPFWQAHCHQNTIPQSLKDNLSLWEFHTPSDNHFDHSQEVFPAASYQYVMYGMGFTGSSELYGNSESYFKKAIALVNNNQQYTQKLLNKLPTNKALLAQINQFGMQQI

SEQ ID NO: 90002 - protein, 538 aa, Burkholderia sp.
  REGION 1..538: note = tr|A0A1B4SHR3|A0A1B4SHR3_9BURK Tryptophan halogenase; OS = Burkholderia sp. MSMB617WGS OX=1637831 GN=WT60_26090; PE = 4 SV=1
MSNPIKHIVIVGGGTAGWMAASYLVRALQQQANITLIESAAIPRIGVGEATIPSLQKVFFDFLGIPEREWMPQVNGAFKAAIKFVNWRKSPDRSRGDHFYHLFGSVPNCDGVPLTHYWLRKREQGFQQPMEYACYPQPGALDDKLAPCLPDGTRQMSHAWHFDAHLVADFLKRWAIERGVKQMVDEVVEVRLNDRGYISSLSTKEGRTLEADLFIDCSGMRGLLINQALKEPFIDMSDYLLCDSAVASAVPNADARVGVEPYTSAIAMNSGWTWKIPMLGRFGSGYVFSSKFTSRDQATADFLNLWGLSDKQPLNQIKFRVGRNGRAWVNNCVAIGLSSCFLEPLESTGIYFIYAALYQLVKHFPDTSFDPRLADAFNAEIVHMFDDCRDFVQAHYFTTSRDDTPFWLANRHDLRLSDAIKEKVQRYKAGLPLTTTSFDDSTYYETFDYEFKNFWLNGNYYCIFAGLGMLPDRSLPLLRHRPESIDKAEAMFARIRREAERLRTSLPTNYDYLRSLREGDAGRSRSQPGPTLAAPEIL

SEQ ID NO: 90003 - protein, 500 aa, Massilia lutea
  REGION 1..500: note = tr|A0A4P6KXQ8|A0A4P6KXQ8_9BURK Tryptophan 7-halogenase OS=Massilia lutea OX=321985 GN=EWM63_13225; PE = 4 SV=1
MEQQRLTKPVRRVVIAGGGTAGWMVAAGLSKSLGRLLDIKLIESDEIGTVGVGEATIPTLMNFHHLLEINEQEFMAETMATFKLGISFENWRDVNEDYIHSFGTTGTDHWTAGFQHFWHKGRERGIAGDYGDYCLELKAGLQNRFAHLPNNGMNYAYHMDAGRYAKFLRRFSERFGVQRVEGKIAEVRKNLVSGDIIALRLDSGAELEGDLFIDCTGFRALLIGQTMGVDYDDWSHWLFNDSAVALQTKSVRDAVPYTRSIARDAGWQWQIPLQHRVGNGMVYSSRYTDDESALRTLQAAVDGEALTTPRVIRFTPGQRKQTWKGNCVAIGLASGFLEPIESTSIHLIQRGIIRLMQMFPQDGISQADIDEYNQQADYEIKHIRDFIILHYTVTNRRDTPYWRDAATMKLPPSLQHRIDLFRDTGRVFRVPNELFAENSWIQVMLGQGILPASHHQTADLMGDKELAHFLGNISGTIDRTVAQLPSHQKYVEQYCSGTGW

SEQ ID NO: 90004 - protein, 522 aa, Roseateles aquatilis
  REGION 1..522: note = tr|A0A2D0AM45|A0A2D0AM45_9BURK Tryptophan halogenase; OS = Roseateles aquatilis OX=431061 GN=CDN99_22460 PE=4 SV=1
MNPIQDVLIVGGGTAGWLTAAFLAKQLGTARGGVRITLVESSDIGIIGVGEGTFPSIRGTLSAIGIGEARFLEACSATFKQGIRFDHWVRPEGTPGHDHYFHPFSQPSQRPGAPELLPYWLRGEAGAGRAFADAVTLQKAVVDARHGPKRAVDGDFVGPLNYAYHFDAGRFAALLAEHGQSLGVKRVLATVDRVDLDERGAIATVHTREAGALTADLYIDCSGFRARLIGEAMGSPFKPLNDVLFVDRALAMQVPYGRPDAPIASCTIASARQHGWIWDIGLQERRGIGHVYSSRHCDDDDAERVLRRYVGPAGDALTPRKLTLNVGYRETQWTHNCVAVGLSGGFLEPLESSGIGLIETAAYLIGQLFPFNGDMGPAARHFNAFMRERYVRIVDFIKMHYALTQRRDSAFWRDNADPSSWTGTLTDKLAMWRARPPQRLDFITDVEMYLPASWQYVLYGMEFKTDLGAATAALTRADEARREFQAIAQLGAHALRDLPPHRALIEQMLARAGMKSAATQAA

SEQ ID NO: 90005 - protein, 497 aa, Xanthomonas axonopodis
  REGION 1..497: note = tr|M4TWK1|M4TWK1_9XANT Tryptophan halogenase; OS = Xanthomonas axonopodis Xac29-1 OX=1304892; GN = XAC29_15230 PE=4 SV=1
MVIAGGGTAGWIAACALSHQFRNLLDITLVESEQIGTVGVGESTVPPIRTFHRFLQIDEQEFLRAVAGTFKLSISFEHWRRHGERYIHPFGITGQSTLVCAFHHLWLESQRRGMPGSFGDYCLETVASRVDRFALHGEPAVNYAYHLDAALYAKFLRARSEACGVKRVEGRIQQVTVQPHSGDVASLVLEDGQTIEGDLFIDCSGFRGLLIEQTLHTGYEDWSHWLPCDRAVAVQTEALGPPVPYTRAIAHEAGWRWHIPLQHRVGNGLVFSSKHLSDDQAHAKLLRDVAAPAVREPWMVPFRTGRRLKAWNKNVVSLGLASGFIEPLESTSIHLTISAVVRLLALFPAEGIAPSQVQLFNDVSRAEMEHVRDFVTLHYHATQRDEPLWQQCRQMELPESLALRLRAWRERAHAWQGADELFRVDSWTHVLMGQGIAPEQHHPLTRAFSDHDLRRLLDGIAQPIQHAVQQMPSQQDFIERYCKAGEQVWGMRSPVPA

SEQ ID NO: 90006 - protein, 522 aa, Alteromonas macleodii
  REGION 1..522: note = tr|A0A2K9IGP5|A0A2K9IGP5_ALTMA Tryptophan halogenase; OS = Alteromonas macleodii OX=28108 GN=TE101_18995 PE=4 SV=1
MTTATPITHIVVVGGGSAGWLTAGRIAAQHQCATRKDIKVTLIESPNVPIIGVGEGTWPTMRSTLIALGISETTFIKECDATFKQGAKFAKWTTGEEHDFYYHPLMLPQGFSQTNLGPYWQTVALELNESFSHAVCVQEAICEAGCAPKSIRHAEFAGTANYAYHLDAGKFTAFLTKHCTEKLGVHHVLADVNRVESSNNGDIKALHTEQGVTVEGDLFVDCTGFKSMLLGEHYKVPFIPCDDVLFIDRALAVHVPYDTPQSPIASHTISTAQDAGWIWDIGLQSRRGVGHVYSSRHQSKDDAYARLDTYVRQTSTLNGIDGINVKDITIQSGHRQRFWQNNCVAVGLAAGFLEPLEASALVLVELSASMIAEQLPANRAVMDIVAKRFNDTFSYRWQRIIDFLKLHYMLSKREDSAFWRDNRDSHTIPDSLKELLALWQYHPPSDKDFTSNNEVFPAASYQYVLYGMGFTSDLGAHQQWVNADFAKQQLMQNRKARGMAVEKLPKHRELINKIHQFGLQAV

SEQ ID NO: 90007 - protein, 498 aa, Novosphingobium sp.
  REGION 1..498: note = tr|A0A437NC78|A0A437NC78_9SPHN Tryptophan 7-halogenase OS=Novosphingobium sp. FSY-9 OX=1908524; GN = EOE18_00150 PE=4 SV=1
MEERVKSVVVVGGGTAGWMAAALIAKVIGKGARVELVESDAIGIIGVGEATIPPIQTLNSVLGIDEATFLRETKATVKLAIRFENWGQQGESYYHTFGAAGRNMAFCSFHHFWTRARQRGHETSYWDYDLNYLCCEAGQFAPTTGNDPIWDMPYAYHFDSALYGQFLRRLSEQMGVRRTEGMIGEVRRCATTGDVTSVVLQDGREIAGDLFIDCSGQRGLLIQQALRTGYEDWDHWLPCDRAMAVPSEPFATTAPYTRSIAHGAGWQWRIPLQHRNGNGLVYSSRHYSDDQAAQLLLGNLDSKALDEPRVIPFRTGRARQQWNRNVVAVGLSSGFLEPLESTSIYLIQSAIVRLLHLFPHGPDVAALRAEYNRQSAREYELIRDFIILHYHANRRDDSAFWRDLREMAVPDRLAQKIELFRASGALVQDQLDIFMEASWVQVLMGQGILLQDYHPLANGPSDAELRQQLSQLRQVKAQPLSQLPAHDAWLAAKMGAHA

SEQ ID NO: 90008 - protein, 503 aa, unidentified
  source 1..503: note = Comamonadaceae bacterium
  REGION 1..503: note = tr|A0A257EAC4|A0A257EAC4_9BURK Tryptophan halogenase; OS = Comamonadaceae bacterium PBBC1 OX=2015580; GN = CFE38_19310 PE=4 SV=1
MQQANLIRSIVIVGGGTAGWMTAAALATMLKGRYPIQLIESDEIGIVGVGEATIPMIQRFNKVLGIDEAEFMRETMGSFKLGIEFVNWGRQGERYMHGFGKIGQDLWTTRFDQYWRKMRQLGKAAPLENYSITRMAALANKFMPTPDGVQNSPFNDIAYAYHFDASLYAKYLRKLAEQRGVVRTEGKINQVSQRPIDEHVDAVVLENGKRIEGDLFIDCSGFRGLLIEQTLHTGFEDWTHWLPCDRALAVPCASAFTFTPYTRSTAHQAGWQWRIPLQHRTGNGHVYCSQYISDDEAAAVLLAHLDGKALADPRPIRFTTGMRQKAWNKNVVAIGLSSGFLEPLESTSIHLIQNTISQLVEFFPNQSFNPTQIAEFNRQNRFQMERLRDFIILHYHINQRDDSAFWQACAHMAIPDTLQHKIDLYKTTGRLLRVDNELFAEDGWLQVMEGQNLPTESYHPLVDLQSENSIHEYLESVREVIAKCVSVMPDHADFIAQHCATPK

SEQ ID NO: 90009 - protein, 504 aa, Sphingomonas sp.
  REGION 1..504: note = tr|A0A430DUF9|A0A430DUF9_9SPHN Tryptophan 7-halogenase OS=Sphingomonas sp. ABOLF OX=1985879; GN = CA235_02400 PE=4 SV=1
MTGPDRQRVVVVGGGTSGWMTAAALVKLLPDRCQVHLVESEAIGIIGVGEATLPHIRAFNERLGIPEAEFMATTRATFKLGIEFRNWARIGDSYIHPFGTFGRGAGDVQFHHYYARLLHAGVQLPPIEAFSMACTLARANRFAPPAQDPCQVASTFGYAYQFDAVAFAPYLRRLAEGLGAERTEGRIVHVERDGESGDVTAVLLEGGRRIEGDLFVDCSGFASLLIGKALGEPFQDWSRWLPADRAVALPCRTVTEVTPYTSAVAMPAGWRWRIPLQHRTGNGYVYSSAFLSDEHAADALTAAVEGMPMASPRVLRFTAGRRERSWAHNVVAIGLSGGFLEPLESTSIYLVQQAITALLELFPERRISPVDRDEFNRVVDMEYDRVRDFLILHYHATHRDDSEFWNYVRTMAIPDSLAEKMELFRRRGRIVKYREGAFLDASWVSVYLGQRVIPAGFDPRASGPTLESLVAGMKQMRAEIQAAASAMPDHLSYLGRYCPMAAAA

SEQ ID NO: 90010 - protein, 480 aa, Burkholderia pseudomallei; identical to SEQ ID NO: 82377
  REGION 1..480: note = tr|A8EDE5|A8EDE5_BURPE Putative tryptophan halogenase OS=Burkholderia pseudomallei 406e OX=360118; GN = BURPS406E_H0871 PE=4 SV=1

SEQ ID NO: 90011 - protein, 499 aa, unidentified
  source 1..499: note = Histidinibacterium lentulum
  REGION 1..499: note = tr|A0A3N2R7X7|A0A3N2R7X7_9RHOB Tryptophan 7-halogenase OS=Histidinibacterium lentulum OX=2480588; GN = EAT49_04070 PE=4 SV=1
MTSWPGHIVVVGGGTAGWLAAMMLTDAARRAGQASRVTVIESSRLGTIGVGEGTTAVFRQMLKHFGIDELEFLRETGATIKYGIRHRDWRRLGHHYDGPIDDPHLLTPGLPLHTYAVAAGRPVGEAHLFQALIDARRAPFASREGRLIPAGPFHHAYHFDQALAGAFLKRRARGVTLIDDQVAGVETGEAGIAALTLESGQRIEGDFFLDCTGFRRALVGALGADWISYADVLPVNRAMPFWLDLAEGEEIDPVTLAWAQGAGWMWRIPTQGRLGCGYVYSDAHTTPEAAQREIEAALGRPIEPRRDIRIDAGRLRDAWRGNCVALGLSSSFLEPLEATSIHGTVVQLMMLTDWLGDPAAPARYNAAVARQVDDFRDFIRLHYVSERRDTPFWRDVAASHPPEVTDRLALWQTRLPERADFAPFPLGLAHVEEQLYRPVLDGLGLLDRKVAQAAMASDTARRDRTRAAHGTLVRDYRQAAARCLPHRHFLKSLTTETAA

SEQ ID NO: 90012 - protein, 509 aa, Sphingopyxis sp.
  REGION 1..509: note = tr|A0A0Q8RWQ5|A0A0Q8RWQ5_9SPHN Tryptophan halogenase; OS = Sphingopyxis sp. Root214 OX=1736491 GN=ASE06_18670 PE=4; SV = 1
MNSAIERVVIVGGGTAGWLAACLLASARRAVKLDVTLIEAPDIPTIGVGEGTWPTMRATLSAIGIAEAEFLSACDGSFKQGSRFDGWVTGAEGDRYLHPFTSPPAAPTAELLAAWRAGAPDLPFAAAMTAQAHVCASDLAPRQRAMPDYQGAANYAYHLDAGKFAALLAMHAVRRLGVRHISDHVVDVVRDDEGGIASVATRQNGDIAGDLFIDCSGHASLLIGEHLGVEWIDRGDVLFNDRALAAQVPVAPGSPIASQTVSTAHAAGWIWDIGLPGRRGIGCVYASRFMDDDTAEATLRAYIARALPDAPDVPARRLSFPTGHRARFWQGNCVAVGLSAGFIEPLEASAIVMIELSLKALIDNFPARRAAMPIHADRFNELFRYRWDRIVEFLKLHYALSRREEPYWLAQRDPAHMPPRLTEMLQLWRDQPPSAWDFPRVDEIFSAESHQYILYGMGYPVPADLPSGEKAAALLAENRQRARALAAALPANRDYLDALAPGAHSAAAR

SEQ ID NO: 90013 - protein, 503 aa, Sphingomonas sp.
  REGION 1..503: note = tr|A0A430DFY7|A0A430DFY7_9SPHN Tryptophan 7-halogenase OS=Sphingomonas sp. ABOLF OX=1985879; GN = CA235_18105 PE=4 SV=1
MTAKPLDRVVIVGGGTAGWMTAAVLARLTAAGTSVTLVESEEIGTVGVGEATIPPLLDFNRFLGIDEDAFVRATGATFKLGIEFVDWARRGERYLHPFGTFGRDVQGIKFHQLWLRQARVDPPIADTGSLHDYCLASVAARMARFTRPSGDPAAVLSSLRYAFHFDAALYARFLRGIAERGGVVRVEGRVAQVDLAPEDGFIRAVQLADGRRIEGDLFVDCSGFRSLLLGEALGIPFTSWQRWLPCDRALAVPSASVGPLLPYTRATADRAGWRWRIPLQHRTGNGHVYASAFVRDAEAADTLLEGLDGAPAAEPRPLRFVAGMRERLWERNCIAIGLAGGFLEPLESTSIHLIQSGITRLMSLFPDKDHAPVERDAYNRLARSEYEQVRDFLILHYHATERDDSDFWRHCRTTPPPDSLAHKLELWRARGRVLPEAGSLFTEDSWIAVLMGQAGTPASVDPLVATLPVQETRRFLHHLRTIIGQTAAAMPAHDQFIARHCAA

SEQ ID NO: 90014 - protein, 530 aa, unidentified
  source 1..530: note = Paraglaciecola arctica
  REGION 1..530: note = tr|K6YJ88|K6YJ88_9ALTE Tryptophan halogenase; OS = Paraglaciecola arctica BSs20135 OX=493475 GN=GARC_1257; PE = 4 SV=1
MSQIKTSTMGIPSQVVIVGGGTAGWMAASLLQQAWSQESDASTQITVVESEDIGTIGVGEGSTPTLREFFRKLGIAENEWMPKCSATYKCGIAFPGWLNGNGGSPDGYFHPFFSPLDIQTGEAFMRNACLKRRGVNAAVQPDDFFVGAQLSRQYLSPRLNVSLPFEPEYAYHFDSALLGKFLRERAKKLGVQHIIGTVSDVKRTTTGDIECLYLSRDKRPLKADFFIDCTGFASLLIGKTLETPFYSYSDNLFNDSAVAIASPLDNTQPIPSHTESTALSNGWAWKIPLTTRNGNGYVYSSGYQSAESAEKELRAHMGVSDEVEARHIPMRVGSIRQHWNHNCLAVGLSQGFIEPLEATALMLVQYTLTHFIKAHALALSKGNIEHYRTGFNNNVSQTFAGIRDYIVAHYQCNTRTDSDYWIDNRSHNHISDNLAAILQCWDQGGDFEAELCAQKHQQVYPRPSWYCLLAGSGRFPVSGQRIENAHGIVPTPSAAAREYTAKMSHKFQDHRTLLQTMYGKNFISKGFAPQ

SEQ ID NO: 90015 - protein, 538 aa, Burkholderia ambifaria
  REGION 1..538: note = tr|B1T0C0|B1T0C0_9BURK Tryptophan halogenase; OS = Burkholderia ambifaria MEX-5 OX=396597; GN = BamMEX5DRAFT_1236 PE=4 SV=1
MSNPIKNIVIVGGGTAGWMAASYLVRALQQQANITLIESAAIPRIGVGEATIPSLQKVFFDFLGIPEREWMPQVNGAFKAAIKFVNWRKSPDSSRDNHFYHLFGNVPNCDGVPLTHYWLRKREQGFQQPMEYACYPQPGALDGKLAPCLADGTRQMSHAWHFDAHLVADFLKRWAVERGVKRVVDEVVDVRLNERGYISSLSTKEGRTLEADLFIDCSGMRGLLINQALKEPFIDMSDHLLCDSAVASAVPNDDTRDGIEPYTSAIAMNSGWTWKIPMLGRFGSGYVFSSKFTSRDQATADFLNLWGLSDNQPLNQIKFRVGRNRRAWVNNCVSIGLSSCFLEPLESTGIYFIYAALYQLVKHFPDTSFDPRLSDAFNAEIVYMFDDCRDFVQAHYFTTSREDTPFWLANRHDLRLSDAIKEKVQRYKAGLPLTTTSFDDSMYYETFDYEFKNFWLNGNYYCIFAGLGLLPDRSLPLLQHRPDSIEKAEAMFASIRREAERLRTSLPTNYDYLRSLRDGDARLSRSQRGPMRAAQEIL

SEQ ID NO: 90016 - protein, 515 aa, Aestuariibacter sp.
  REGION 1..515: note = tr|A0A2D6XVN8|A0A2D6XVN8_9ALTE Tryptophan halogenase; OS = Aestuariibacter sp. OX=1872400 GN=CL531_01830 PE=4 SV=1
  VARIANT 32: note = Xaa can be any naturally occurring amino acid
  VARIANT 34: note = Xaa can be any naturally occurring amino acid
  VARIANT 114: note = Xaa can be any naturally occurring amino acid
  VARIANT 144: note = Xaa can be any naturally occurring amino acid
  VARIANT 220: note = Xaa can be any naturally occurring amino acid
  VARIANT 257: note = Xaa can be any naturally occurring amino acid
MNTASKKTRVVIVGGGTAGWLTAGIIAARHPXLXENSNTELVLLESPDVKNLGVGEGTWPTMRDTLKQIGLSERAFLSCCDASFKQASKFAGWRQDPAQHYYHPFTAPAGYGVXSLADAWIEAGYPQDFESWVSAQGHACERQXSPKLPQLPEYAFTYNYGYHLNAGKFVALLQAHCTEKLGVTYRQGHVAHIVSHDSGAIKALQLEDGNTVEGDLFIDXSGFAAVLMGKHFQIPFVSQRGVLFNDTAIAAQVNHAXPQTPIASATVATAQTSGWIWDIALQHRRGIGHVFASEFCAVEDAEQTLRNYIANDPNLQQDKVSTRIIKFDPGHRKYFWHHNCVAIGVSAGFVEPLEATALVLIEKSAEWVAEQLPRSPSAMPVLAKRFDQLTNERWQEIIDFIKLHYVLSDRTDSAYWRAHQQHESWTDSLSEALQLWQSQPPGLYESSNRQELFSSASKQYVLLGMGFRAEQWQSCGRLALQQPLIERFRRDVQQQVNRVNAQLLTNREYLQKLRK

SEQ ID NO: 90017 - protein, 509 aa, Sphingomonas sp.
  REGION 1..509: note = tr|A0A430DKM3|A0A430DKM3_9SPHN Tryptophan 7-halogenase OS=Sphingomonas sp. ABOLF OX=1985879; GN = CA235_12070 PE=4 SV=1
MDPIRSIVIVGGGTAGWMAAAFLARQLDQLRLSITVVESSAIGTVGVGEATVPAIRDFFAAVGLSDAEVLRETEGTIKYGIRFDGWKAPGHRFFHPFGLYGTPAHGVAFHHYWLKLRQAGDPTPLAAYSLATQLAEQGRFLAPAQTPANDLGVFDFAVHFDASKFATLLRHRSVAAGVVHVDGRIDRVERDGETGHVAAVLLEDGRRIGGDLWIDCSGFRSLLLGEALGVPFVDWRRWLPVDRAIAIPCRPRDAAQEPFTVATARRAGWQWRIPLRHRIGNGHVYCSEFLDDASAEIMLLEQLEGEPLGQPNHLRFTTGHRARFWEHNIVGLGLASGFLEPLESTSISLIQTGLERLVRFFPDRACDPRLAAIYNYQSVLEFERLRDFLLLHYWANGRHGEPFWDQMRAMPPTEGLQLKLDTWRASGEFVRREWETFQDPSWLSLYAGFEDLPEHPSPLADRFSIAELTDTFARMRAAIAATVAQAEPHVAFLARTVDGGDGGRRAAAR

SEQ ID NO: 90018 - protein, 522 aa, Alteromonas macleodii
  REGION 1..522: note = tr|A0A1E7DFR4|A0A1E7DFR4_ALTMA Tryptophan halogenase; OS = Alteromonas macleodii OX=28108 GN=BFV94_0599 PE=4 SV=1
MHQANSPLRRIVVVGGGAAGWLTASIIAVTHKHDDNISVTLVESPDVSILGVGEGTWPTMRSTLLKIGISEETFLAQCNASFKQGTSFHNWRSDTIEHQYYHPFSLPFRYFESDVAAWWQSYAAEQDFAHAVCSQAALCDHHLAPKQRQTPAYAGIANYGYHLDANKFAALLQKHATTVLGVQHIVDHVDDVVGSSSEPIAAIVGREHGNITGDLFIDCTGFAARLIGQHYGVPLTSCSNVLANDSAIAIQAPYVDSSVDIASTTHSTAQDSGWIWDIGLPSRKGVGYMYSSAHCSEDEARATLETYLKHDKKTADVDVSKARKITFSPGYRKTLWVENCVAIGTSAGFLEPLEASALVMIELSATHIAKQLPRTYKECQAAGRQFNQAFEKKWERIVDFLKLHYVLSEREASAYWRDMRNQESCSTQLQDWLTLWKSRSPISSDFELREELFPAASYLFVLYGMGFRSQYNDVYQANLHTPEQRQAYAKHVQSIQQQLSGLPTNRQFLNQVAQSQGLSMHY

SEQ ID NO: 90019 - protein, 515 aa, Sphingopyxis sp.
  REGION 1..515: note = tr|A0A270BKI9|A0A270BKI9_9SPHN Tryptophan halogenase; OS = Sphingopyxis sp. GW247-27LB OX=2012632 GN=CD928_01095; PE = 4 SV=1
MTDSPYRIVILGGGTAGWMCAAGLSRLLPAADYDITLIESDEIGTVGVGEATLPHIKTFNDMLGLDEAEFMRATMASFKVGIEFVGWAREGERYIHPFGTFGERWAGADFQHHWARARLAGSDRRSLQDYSFAVAVCRAAGFEHPGEDPNSIRSTYAYAYHFDAGLYARYLREWTTTRGVRRLEGKVASVRRDGESGDVAALALESGAEIAGDLFVDCSGFRSLLLGQTMGVPWHDWSEWLPCDRALALPCAGTAPMLPFTRCTAQLGGWTWRIPLQHRIGNGHVFASEFCSEEEAERTLRGAIDGEAQGEPRLLRFQAGRRGAGWAGNAVAIGLSSGFLEPLESTSIFLIQAAVTDLAALMPRRGQRVDPRLRAEFNRLFEVHYDRTRDFIVLHYAANAREGEPLWDHVRHMALPDSLAHKIELFRESAIAPDYALGLFSRDSWLSVFEGQGVVPRAHSPIAERVPLPEVQRRLDDLAERIAVNAAEMTPLAEFLAGTCAAEGVALPGIAASAA

SEQ ID NO: 90020 - protein, 501 aa, Alteromonas macleodii
  REGION 1..501: note = tr|A0A1E7D8R9|A0A1E7D8R9_ALTMA Tryptophan halogenase family protein OS=Alteromonas macleodii OX=28108; GN = BFV94_4203 PE=4 SV=1
MTVSGLDSSKNQTPVKNVVIAGGGTAGWMAATALSRLLGKSINVTLVESKDIGIVGVGEATIPPIRTFHKLLGIDEKAFMRATQATFKLGIEFENWREQGHSYIHSFGITGRECWAGEFHHFWLRAKEYGFGGEFGDYCPELIAAKQSKFATSEAMPLNFAYHFDAVAYGRFLKSLACDAGVTHKEGDIEKVVVCPQSGNIQSLRLASDEVIDGDFFIDCTGFKGLLIEQALHTGYDDWQHYLFCDSAVAMQTELTAPPVPYTKSVAHQAGWRWQIPLQERMGNGLVFCSRFMSDEDAINTLKSQVTGAPINEPRVIRFTPGKRRRGWNKNCVALGLSSGFIEPLESTSIHLIMTGLIRLMRLFPFDGITQSAIDEYNNKFDSEMSAILDFIVMHYKVTQREDSPFWQQCQRMDIPSSLKHKLDLFAESGRVFLDDGDIFRVDSWTQVLMGQGMTPSQYHRVADEMSEQSLKQFMAGLKQQVDNHVAKLPSHEAFLTQYLK

SEQ ID NO: 90021 - protein, 502 aa, unidentified
  source 1..502: note = Sphingomonadales bacterium
  REGION 1..502: note = tr|A0A258EAV6|A0A258EAV6_9SPHN Tryptophan halogenase; OS = Sphingomonadales bacterium 32-67-7 OX=1970595; GN = B7Z07_01385 PE=4 SV=1
MVVVGGGTAGWLSACLLAARVPGATITLVESPDVATIGVGEGTWPTMRRTLQAIGLDEAEFLTACDASFKQGSRFIGWATGAADDSYYHPFTPPADTDARALVRGWHAAAGDQAFAPAVSVQPRICDLDLAPRQRAMSGYAGALNYAYHLDAAKLAALLARHGVEKLGVQHVRAHVTGADADASGDLRAVLTHEQGAIAGDLFIDCTGHAALLIDGHFGVPFVDRGDVLFNDRALAVQIPVDPDSPIKSQTDATAYDAGWIWDIGLPTRRGVGCVYSSAFIDDDAAAATLARYLGRDPADLGARALRFRSGHRAEFWKRNCVAIGLSAGFLEPLEASAIVLIELSLGALIDGFPADRAAMDIQARRFNALFRYRWDRIVEFLKLHYVLSRRDQPYWRAHRDPASIPDRLSELLTLWRHQPPSIADFPAVDEIFPAASYQYVLYGMGHSAPPPGPVAVDAEAAVRAMTQAAQRGRALAASLPTNRAYLDALHAAAPRRALEIL

SEQ ID NO: 90022 - protein, 502 aa, Ferrimonas balearica
  REGION 1..502: note = tr|E1ST92|E1ST92_FERBD Tryptophan halogenase; OS = Ferrimonas balearica (strain DSM 9799 / CCM 4581 / PAT); OX = 550540 GN=Fbal_2924 PE=4 SV=1
MTQPLNRITIVGGGSAGWMTALYLNRYYNQGGHKTHITLVESEDIGTIGVGEATVHSIRFFFAAMGLDEAELMRETGATFKTGIRFRNWKKPVDGKMHEYFHPFEEQRTNGPLDLATSWFSSERPAGERYDQLNCLSSALADAGHSPKSHTSAPYQGLVPYGYHLDAVRLGRYLRRKAVEAGVEHRIGTVDKLELDGERIRAVHCGGVRFESDIFIDCTGFRSLLMRQLKSDNWQSFEDALPCNKAVALQLPYGPEAQPRPYTQATALDHGWVWEIDLQERRGNGYVYDGKRLSRGQAEAELRQYLGVPADMGQALHLDMKIGCLKSFWVGNCIAIGLSGGFIEPLESTGLHLINLSVRLLATHLNGADVAQPVKDSYNRLMNGIYDDLKRFIILHYCLTDRDDTEFWRKAAASAEHSPRLRQDLTLWQHKVCEFMDQAGSYATVFTDENYRFVLYGMGHWPQFAPLGSAQQHQQLRQQCEARTRMALDQTLPHPAALRALN

SEQ ID NO: 90023 - protein, 506 aa, Alteromonas macleodii
  REGION 1..506: note = tr|A0A1E7DEC7|A0A1E7DEC7_ALTMA Tryptophan halogenase family protein OS=Alteromonas macleodii OX=28108; GN = BFV94_2010 PE=4 SV=1
MQDPHNKPIKRVVIAGGGTAGWLAASLMKKVLGKAVDITLVESEAIGTVGVGEATIPPIRLVNQVLGIDEAQFLHDTKATIKLAIRFENWKTKGESYYHTFGAPGKSMAFCHFHHYWVKARQQGLKDDLWDFDLNYHAAEAGRFAQINAKDPVVELPFAYHFDASLYAQYLRKLSENMGVVRKEGKISRVQRFTDSGFIQALHLESGDVVEGDLFVDCTGFKGLLIEEALGAGYDDWSHLLPCDSAIAVPSERHEKTAPYTRSIAHDAGWQWRIPLQHRNGNGHVYSSRYITDDQACDTLLSNLDTKPLGDPKLIKFTTGRRRKQWYKNVVAVGLSSGFLEPLESTSIHLIQSAIVRLIQLFPHNGFVPCLETEYNKQSELEFEQIRDFLVLHYTVNERTDSAFFNDMRNITLPDSLAHKITLFKESGNLLREQNDLFLESSWLQVLYGQGITPKDYHGLVNSVPEVQLNQMLTRLLEIKKEPIAKLPTHDEYINGMVAKYKRAMS

SEQ ID NO: 90024 - protein, 522 aa, Alteromonas macleodii
  REGION 1..522: note = tr|A0A126Q6I1|A0A126Q6I1_ALTMA Tryptophan halogenase; OS = Alteromonas macleodii OX=28108 GN=AVL55_19030 PE=4 SV=1
MTTATPITHIVVVGGGSAGWLTAGRIAAQHQCATRKDIKVTLIESPNVPIIGVGEGTWPTMRSTLIALGISETTFIKECDTTFKQGAKFAKWTTGEEHDFYYHPLMLPQGFSQTNLGPYWQTVAPELNESFSHAVCVQEAICEAGCAPKSIRHAEFAGTANYAYHLDAGKFTAFLTKHCTEKLGVHHVLADVNRVESSDNGDIKALHTEQGVTIEGDLFVDCTGFKSMLLGEHYKVPFIPCDDVLFIDRALAVHVPYDTPQSPIASHTISTAQDAGWIWDIGLQSRRGVGHVYSSRHQSKDDAYARLDTYIRQTSTLNGIDGINVKDITIQSGHRQRFWQSNCVAVGLAAGFLEPLEASALVLVELSASMIAEQLPANRAVMDIVAKRFNDTFSYRWQRIIDFLKLHYMLSKRKDSAFWRDNRDSHTIPDSLKELLALWQYHPPSDKDFTSNNEVFPAASYQYVLYGMGFTSDLGAHQQWVNADFAEQQLMQNRKARGMAVEKLPKHRELINKIHQFGLQAV

SEQ ID NO: 90025 - protein, 506 aa, Alteromonas macleodii
  REGION 1..506: note = tr|A0A351UAF5|A0A351UAF5_ALTMA Tryptophan halogenase; OS = Alteromonas macleodii OX=28108 GN=DCZ37_03625 PE=4 SV=1
MQDPHNKPIKRVVIAGGGTAGWLAASLMKKVLGKAVDITLVESEAIGTVGVGEATIPPIRLVNQVLGIDEAQFLHDTKATIKLAIRFENWKTKGESYYHTFGAPGKSMAFCHFHHYWVKARQQGLKDDLWDFDLNYHAAEAGRFAQINAKDPVVELPFAYHFDASLYAQYLRKLSENMGVVRKEGKISRVQRFTHSGFIQALHLESGDVVEGDLFVDCTGFKGLLIEEALGAGYDDWSHLLPCDSAIAVPSERHEKTAPYTRSIAHDAGWQWRIPLQHRNGNGHVYSSRYISDDQACDTLLSNLDTKPLGDPKLIKFTTGRRRKQWYKNVVAVGLSSGFLEPLESTSIHLIQSAIVRLIQLFPHNGFAPSLETEYNKQSELEFEQIRDFLVLHYTVNERTDSAFFNDMRNITLPDSLAHKIALFKESGNLLREQNDLFLESSWLQVLYGQGITPKDYHGLVNSVPEVQLNQMLTRLLEIKKEPIAKLPTHDEYINGMVAKYKRAMS

SEQ ID NO: 90026 - protein, 506 aa, Alteromonas macleodii
  REGION 1..506: note = tr|A0A2K9IJP5|A0A2K9IJP5_ALTMA NAD(FAD)-dependent dehydrogenase OS=Alteromonas macleodii OX=28108; GN = TE101_14570 PE=4 SV=1
MNKLPQEIVIVGGGTAGWMTACYLARTAELMANNSNVPACAPKITLLESAVISTVGVGEGSTPYLRHFFEFLGINENEWMLKCSATYKMGISFERWTTTAGTEKTGPAFTDSDSYFHPFFSSLDIPTADMYFSAVNEYRKGASHDINPSHYFTAAHMVEKGITPDAICSSANIDYAYHFDAGLLGDFLKEYALNKGVSHQIGTVANVESHEHTINSLKLDDGNTLSADFFIDCSGFQGLLGKQALSRRFTSYADTLFNDAAVAIASDATASPETALQTRSIALGHGWQWHIPLTSRTGNGYVYSSQFCTEAQAEEELRLVLEPDQSHQQARHLKMTVGRLEEHWKGNCLCIGLSQGFIEPLEATALMLVQYALHHFIDCWQSNNPRREERYNSEINRMFDGIRDYIAAHYYLNTRDDSAYWVACREDLTVPDTLSYLLNAWDKGASFEQALNEVDNKLVYLRPSWYCIFAGMKRFSNNTTPLAQPNTLALRTMQQSVEGAHRVRQP

SEQ ID NO: 90027 - protein, 505 aa, Xanthomonas translucens
  REGION 1..505: note = tr|A0A514EGF1|A0A514EGF1_XANCT Tryptophan 7-halogenase OS=Xanthomonas translucens pv. cerealis; OX = 152263 GN=E4A48_16710 PE=4 SV=1
MIAAPLRNLVIVGGGTAGWMAAAALARVLGPDYRITLIESEQIGIVGVGEATVPHIKAFNNLLGINEAEFVRQTQGSFKLGIEFVDWQRPGTTYIHGFGTEIGHSLGLLPFQQYWFKQALAGKAKPLGAYTLNTVAARRGKFMTSASDAPPNSPLGNIAYAYHFDASLYAAFLRRFSEQRGVTRREGIVEQVQLHPESGDVRSVRLASGDTIAGDLFIDCSGFCGLLIEQALHTGYHDFTHWLPCDRALAVPCAKVGPPTPYTRATARAAGWQWRIPLQHRTGNGYVYSSAHISDDEAAATLLANLDGAALADPRPLRFVTGRRKQVWNRNVVALGLASGFMEPLESTSIHLIQSGISKLLELFPREGISPVLVQRYNDRIAFEFDRIRDFLALHYTATEREDSDFWRQCRTMAITPELQATLDLFGDSGRFYRNGDEMFAEISWVQVMVGQGILPRAYHPLVDQVPAADIERFVASIEQTIGHCVDAMPPHQAFIDRYCAAAPR

SEQ ID NO: 90028 - protein, 500 aa, Alteromonas macleodii
  REGION 1..500: note = tr|A0A351UEY5|A0A351UEY5_ALTMA Tryptophan halogenase; OS = Alteromonas macleodii OX=28108 GN=DCZ37_11735 PE=4 SV=1
MTTPHRIVIAGGGTAGWMAANLLAHRWANQAVSITLIESEDIGTIGVGEGSTPTLKRFFQTLDIPEYDWMEECQATYKVNIKFTGWNGNDSHSYSHPFISQLDVFSERAFHVNALTRRLGLDVETRPDKFLMAGYLAKKNLAPLPSHNFPFDIEYGYHFDSLKLGRFLRERAKSKGVYHVIGNIESVHTSPSGDISHLVCQDGQKLDGDLFIDCTGFSGLLLQKTLGVPFRDFSDNLFNDSAVVLPTPACANLPVETESVAMSNGWRWQIPLRNRTGNGYVYSQQYQEKDAAECELRRALGMENTDVEAKHLSMRVGQCERHWEKNCLALGLSQGFIEPLEATALHLVQTSIELFADNYSFNENSAQQRQAFNQEVSERFERVRDYIVCHYKLNGRNDSDYWRDNRANMKLSESLLSLLDVWYRKGDIVEEIKRQGIGRHFSTTSWHCLLSGYGVYPPPALNQPASLKESGDLFEEKKLAAFFNRCSLNFDKQSTLFNAG

SEQ ID NO: 90029 - protein, 522 aa, Alteromonas macleodii
  REGION 1..522: note = tr|A0A2K9I7A8|A0A2K9I7A8_ALTMA Tryptophan halogenase; OS = Alteromonas macleodii OX=28108 GN=TE101_02860 PE=4 SV=1
MHQANSPLRRIVVVGGGAAGWLTASIIAVTHKHDDNISVTLVESPDVSILGVGEGTWPTMRSTLLKIGISEETFLAQCNASFKQGTSFHNWRSDNVEHQYYHPFSLPFRYFESDVAAWWQSYAAEQDFAHAVCSQAALCDHHLAPKQRQTPAYAGIANYGYHLDANKFAALLQKHATTVLGVQHIVDHVDDVVSSPSQPIAAIVGREHGNITGDLFIDCTGFAARLIGQHYGVPLTSCSNVLANDSAIAIQAPYVDSSVDIASTTHSTAQDSGWIWDIGLPSRKGVGYVYSSAHCSEDEARATLETYLKHDKKTADVDVSKARKITFSPGYRKTLWVENCVAIGTSAGFLEPLEASALVMIELSATHIAKQLPRTYKECQAAGRQFNQAFEKKWERIVDFLKLHYVLSEREASAYWRDMRNQESCSTQLQDWLTLWKSRSPISSDFELREELFPAASYLFVLYGMGFRSQYNDVYQANLHTPEQRQAYAKHVQSIQQQLSGLPTNRQFLNQVAQSQGLSMHY

SEQ ID NO: 90030 - protein, 511 aa, Novosphingobium sp.
  REGION 1..511: note = tr|A0A437NAF6|A0A437NAF6_9SPHN Tryptophan 7-halogenase OS=Novosphingobium sp. FSY-9 OX=1908524; GN = EOE18_02790 PE=4 SV=1
MGEQAPQGEARTRIIIVGGGTAGWMTAAAFGHFLEAGYEVALVESDAIGTIGVGEATIPHIRLFNQALGIDEDAFLRATQGTFKLGIAFDGWLREGHSYIHAFGDVGRDVGLCAFQHYWSRAARLGWAEGTGAYTLNTQAALAGKMHRGAPYTPQNVPVMPYAYHFDAGLYAAFLRKFAQARGVVRHEGMIQRVERDGQSGDITALHLADGRQIAGDLFVDCSGMRALLIGEALGAEYQDWRHWLPCDSAMAVQSPRVADLVPYTRSIAQDVGWQWRIPLQHRTGNGRVYASDYIADERVREQLLGGIEGKALHDPRVIRFVTGRRREAWKHNVIAVGLSSGFLEPLESTSIHLIQTAIARILKFLPGKQQHQADRDAYNRQFAFEMERIRDFIILHYWANQRDEPFWQACRAMTLPDSLCQKIDLFTASGQIHREGEELFSEVGWFQVMANQGLLPRASHGMAQTISEGDLRDYLDLLKALYAREVAQYATHEAFIARHCAAQMPMMVQA

SEQ ID NO: 90031 - protein, 501 aa, Alteromonas macleodii
  REGION 1..501: note = tr|A0A126Q5H0|A0A126Q5H0_ALTMA Tryptophan halogenase; OS = Alteromonas macleodii OX=28108 GN=AVL55_19915 PE=4 SV=1
MTVSGLDSSKNQTPVKNVVIAGGGTAGWMAATALSRLLGKSINVTLVESKDIGIVGVGEATIPPIRTFHKLLGIDEKAFMRATQATFKLGIEFENWREQGHSYIHSFGITGRECWAGEFHHFWLRAKEYGFGGEFGDYCPELIAAKQSKFATSEAMPLNFAYHFDAVAYGRFLKSLACDAGVTHKEGDIEEVVVCPQSGNIQSLRLASDEVIDGDFFIDCTGFKGLLIEQALHTGYDDWRHYLFCDSAVAIQTELTAPPVPYTKSVAHQAGWRWQIPLQERMGNGLVFCSRFMSDEDAINTLKSQVTGAPINEPRVIRFTPGKRRRGWNKNCVALGLSSGFIEPLESTSIHLIMTGLIRLMRLFPFDGITQSAIDEYNNKFDSEMSAILDFIVMHYKVTQREDSPFWQQCQRMDIPSSLKHKLDLFAESGRVFLDDGDIFRVDSWTQVLMGQGMTPSQYHRVADEMSEQSLKQFIEGLKQQLDNHVAKLPSHEAFLTQYLR

SEQ ID NO: 90032 - protein, 507 aa, unidentified
  source 1..507: note = Paraglaciecola arctica
  REGION 1..507: note = tr|K6Z687|K6Z687_9ALTE Tryptophan halogenase; OS = Paraglaciecola arctica BSs20135 OX=493475 GN=GARC_1978; PE = 4 SV=1
MAAVEQQISSIVIVGGGTAGWMTAAALCQHFLDTPVQITLVESSQLGTIGVGEATIPTLRRFYNKLGFSDIDVIRATNATCKLGIEFQDWHSPGSSFIHPFGLFGLPVKDTPFHHYWLKAQQTGNASDLADYSLGVNLAKQDKFCFPSPKPESALQIFDWALHFDAALFADLMRTHAIKNNITAIDGKIAEVVLDSQNGDIKTLQLEDGRQINGDLFIDCSGFAGLLIEKALHCGFEDWSQWLLCDKAFAVQTESVGAPIPRTIAKAHQAGWQWKIPLQHRSGNGHVYSSQYISDDDALQTLIENLDGKALHSPRQFSFKPGRRKNAWHKNCIAVGLAAGFLEPLESTSIALVETAIDKIIQSFPKAAFSQTEVDKFNQVTATEYERVRDFIILHYKANQRDDSPMWRYCREMSVPDSLNEKMQAFKSVGDLSRSPWEIFGPDSWLAIYSGFNYLPDTYAAEVDNMPTEYLNTNLAKMRSAIKNMVTPVPSHLEFLSRFCAYKANTQ

SEQ ID NO: 90033 - protein, 506 aa, Alteromonas macleodii; identical to SEQ ID NO: 88091
  REGION 1..506: note = tr|A0A351UE59|A0A351UE59_ALTMA Tryptophan 7-halogenase OS=Alteromonas macleodii OX=28108; GN = DCZ37_10320 PE=4 SV=1

SEQ ID NO: 90034 - protein, 538 aa, Burkholderia pseudomallei; identical to SEQ ID NO: 84273
  REGION 1..538: note = tr|A8EMZ6|A8EMZ6_BURPE Tryptophan halogenase; OS = Burkholderia pseudomallei 406e OX=360118; GN = BURPS406E_D0266 PE=4 SV=1

SEQ ID NO: 90035 - protein, 520 aa, Streptomyces sp.
  REGION 1..520: note = tr|A0A0M8THW5|A0A0M8THW5_9ACTN Tryptophan halogenase; OS = Streptomyces sp. MMG1533 OX=1415546 GN=ADK57_29550 PE=4; SV = 1
MARLPRPHGRAVGADHRRRAVNPTGEQSEAEEFDVIVVGGGPAGATAASAVALRGHRVLLLEQQTFPRYQIGESLLPSTVHGVCRILGVEEEVARAGFKTKRGGTFRWGRNPDPWQFSFALSPRLADPTSFAYQVERSRFDAILLDNARRVGVDVREGCRVKGVLADEERVRGVGWTGPSGEIREARARYVVDASGNGSRIHGEVGGRRTYSDFFRNIAVFGYFAGGRRLPKPNDGNIFCAAFDEGWLWYIPLRDDLTSVGAVVSRENTAAIQRDPVTAWRRLIDSCPEVRDLLHGVPQATEVPYDQVRVRKDWSYWKSRLWRPGMVLVGDAACFVDPVLSSGVHLATYGALLAARSVNSGLAGALDEGRLFDEFEARYRHEYGLFHEFLVSFYDMHQDERSYFWKARKVTHVDTTELEAFVDLVGGLASGDTSLGGPAEAGARLTAAASELDEAVGRLPDSDGRRNPLFESATIRQVFQEGAVLQERGVFGGPLEDETPLRADGLVASEDGLTWVDPGR

SEQ ID NO: 90036 - protein, 522 aa, Alteromonas macleodii
  REGION 1..522: note = tr|A0A1E7D826|A0A1E7D826_ALTMA Tryptophan halogenase; OS = Alteromonas macleodii OX=28108 GN=BFV94_4006 PE=4 SV=1
MTTATPITHIVVVGGGSAGWLTAGRIAAQHQCATRKNIKVTLIESPNVPIIGVGEGTWPTMRSTLIALGISETTFIKECDATFKQGAKFAKWTTGEEHDFYYHPLMLPQGFSQTNLGPYWQTVAPELNESFSHAVCVQEAICEAGCAPKSIRHAEFAGTANYAYHLDAGKFTAFLTKYCTEKLGVHHVLADVNRVESSNNGDIKALHTEQGVTVEGDLFVDCTGFKSMLLGEHYKVPFIPCDDVLFIDRALAVHVPYDTPQSPIASHTISTAQDAGWIWDIGLQSRRGVGHVYSSRHQSKDDAYARLDTYVRQTSTLNGIDGIKVKDITIQSGHRQRFWQNNCVAVGLAAGFLEPLEASALVLVELSASMIAEQLPANRAVMDIVAKRFNDTFSYRWQRIIDFLKLHYMLSKREDSAFWRDNRDSHTIPDSLKELLALWQYHPPSDKDFTSNNEVFPAASYQYVLYGMGFTSDLGAHQQWVNADFAKQQLMQNRKARGMAVEKLPKHRELINKIHQFGLQAV

SEQ ID NO: 90037 - protein, 506 aa, unidentified
  source 1..506: note = Lysobacter silvestris
  REGION 1..506: note = tr|A0A2K1PZJ7|A0A2K1PZJ7_9GAMM Tryptophan halogenase; OS = Lysobacter silvestris OX=1645665 GN=Lysil_2392 PE=4 SV=1
MDENAIGDIVVVGGGAAGWMAAAALARHLGKNRKIRVVESDEIGIVGVGEATVPHIRTFNAQVLGLDEADFVKATQGTFKLGIQFRDWARIGDTYYHGFGSVGQDLGPVPFHHYWLRARGAGRAQDYCHYGLQSEAAEQGRFMPPASDVPATSPLANIAYAYHFDAASYAKYLRGYAEKLGVVRHEGKIVQVSQRPDDGFIDAVVLESGERIAGDLFIDCSGFRGLLIEQTLKAGYEDWSHWLPCDRALAVPCATTEAPTPYTRCTARPAGWQWRIPLQHRVGNGYVYSSRFVSDDEAAAALLANLDGEALAEPRPLRFITGKRRKFWDKNVVAVGLASGFMEPLESTSIHLIQMSIVRLIDMFPDVGFDPGLVERYNRAVDFDYDRIRDFIVLHYKATERDDTPFWNHCRTMSVPDSLQENIDLFRRSGRFYRDGEEFFAMQSWVQVLLGQRIVPEVCHPIVDQMPEEEVFKFVEHVGKVISACAQAMPPHQAFIDRLCKAPAMT

SEQ ID NO: 90038 - protein, 506 aa, Alteromonas macleodii
  REGION 1..506: note = tr|A0A2K9IB21|A0A2K9IB21_ALTMA Tryptophan halogenase; OS = Alteromonas macleodii OX=28108 GN=TE101_09550 PE=4 SV=1
MQDPHNKPIKRVVIAGGGTAGWLAASLMKKVLGKAVDITLVESEAIGTVGVGEATIPPIRLVNQVLGIDEAQFLHDTKATIKLAIRFENWKTKGESYYHTFGAPGKSMAFCHFHHYWVKARQQGLKDDLWDFDLNYHAAEAGRFAQINAKDPVVELPFAYHFDASLYAQYLRKLSENMGVVRKEGKISRVQRFTDSGFIQALHLESGDVVEGDLFVDCTGFKGLLIEEALGAGYDDWSHLLPCDSAIAVPSERHEKTAPYTRSIAHDAGWQWRIPLQHRNGNGHVYSSRYISDDQACDTLLSNLDTKPLGDPKLIKFTTGRRRKQWYKNVVAVGLSSGFLEPLESTSIHLIQSAIVRLIQLFPHNGFAPSLETEYNKQSELEFEQIRDFLVLHYTVNERTDSAFFNDMRNITLPDSLAHKIALFKESGNLLREQNDLFLESSWLQVLYGQGITPKDYHGLVNSVPEVQLNQMLTRLLEIKKEPIAKLPTHDEYINGMVAKYKRAMS

SEQ ID NO: 90039 - protein, 500 aa, Alteromonas macleodii
  REGION 1..500: note = tr|A0A2K9IDC8|A0A2K9IDC8_ALTMA Tryptophan halogenase; OS = Alteromonas macleodii OX=28108 GN=TE101_13935 PE=4 SV=1
MTTPHRIVIAGGGTAGWMAANLLAHRWANQAVTITLIESEDIGTIGVGEGSTPTLKRFFQTLDIPEYDWMEECQATYKVNIKFTGWNGNNSHSYSHPFISQLDVFSERAFHVNALTRRLGLDVETRPDKFLMAGYLAKKNLAPLPSHNFPFDIEYGYHFDSLKLGRFLRERAKSRGVYHVVGNIESVHTSPSGDISHLVCQDGQKLDGDLFIDCTGFSGLLLQKTLGVPFRDFSDNLFNDSAVVLPTPACANLPVETESVAMSNGWRWQIPLRNRTGNGYVYSQQYQEKDAAECELRRALGMENTDVEAKHLSMRVGQCERHWEKNCLALGLSQGFIEPLEATALHLVQTSIELFADNYSFNETSAQQRQAFNREVSERFERVRDYIVCHYKLNGRNDSDYWRDNRANMKLSESLFSLLDVWYRKGDIVEEIKRQGIGRHFSTTSWHCLLSGYGVFPPPALNQPASLKESGDLFEEKKLAAFFNRCSLNFDKQSTLFNAG

SEQ ID NO: 90040 - protein, 501 aa, unidentified
  source 1..501: note = Paraglaciecola arctica
  REGION 1..501: note = tr|K6YNM0|K6YNM0_9ALTE Response regulator receiver domain-containing protein OS=Paraglaciecola arctica BSs20135 OX=493475 GN=GARC_1258 PE=4 SV=1
MLDNECKPKKILIVGGGTAGWMAANLLATKWKGTEICLVESKEIGIIGVGEGSTPHLKFFFDAIGVADPQWMPRCNATYKNGITFDKWSTHQGFESYFHPFEAQTDDLFTTPHFFKNIQARKQGYNVDAHPDKYFLETYLSRNNLGPLPEETFPFGVAYGYHFDSALLGQFLAENAESLGVTRTYGNVQDVIVNNQGNLSSVKLGDGTTLEADFFIDCTGFSSLLMQQTLKVNYKSFKDNLFNDSAVVMPSEITQALPVETKSTALTNGWAWKIPLRNRFGNGYVYSSDYIDGDQAETELRQHLGLLESDVQARHLKMKVGRVEKHWHKNCLAVGLSQGFIEPLEATAIALSFNTVTQFMQYFGEGKGTNKFEEAFNKDINSRFDGIRDYVVCHYKANQRTDSQYWLDNAANNNISDTLNRILSLWKNSNDFAADMYKYKLMGSYQPKSWACLLAGYGVFPQKNIDPSIDYSAHQQEIDDLSNFIRRCALNFKNHNDLLTL

SEQ ID NO: 90041 - protein, 500 aa, Novosphingobium sp.
  REGION 1..500: note = tr|A0A258V995|A0A258V995_9SPHN Tryptophan halogenase; OS = Novosphingobium sp. 28-62-57 OX=1970409 GN=B7Y36_03190; PE = 4 SV=1
MSNPDLMIRSIAVIGGGTAGWMTAAALAQALQHNCQITLVESDEIGTVGVGEATIPPIRTFNETLQIDEREFVRKTKGSFKLGIEFVDWGTLGNRYFHPFGPHGRAFDIVNLHHYWLKAREAGENAPLDDHSMAWAMAKENRFSRPSPDQRNVLSTFEYAYHFDAGLYARFLREYSEAKGVTRIEGKVASVQQNGQTGFVTGVTLEDGRAIEAELFVDCSGFRGLLIEGALKAGYEDWTHWLPCDRAVAVPCENVGPLTPYTRSTAREAGWQWRIPLQHRTGNGYVFCSQFLSEQDAADKLVSRLDGKALADPRPLRFVTGRRKTFWEKNVVAVGLSSGFMEPLESTSIHLIQAGISKLLALFPDRTFDPLVIEEYNRIAVSEYERIRDFLILHYKLTDRDDSELWRYCAAMDVPDTLSSKIEHFRRYGRLVQRDADLFGPPSWLAVHIGQGNMPQRTDPLADYRKVDGREWLGKLRAAMHHAALQQPSHEQFIAAHCAA

SEQ ID NO: 90042 - protein, 411 aa, Histophilus somni
  REGION 1..411: note = tr|B0UWU1|B0UWU1_HISS2 Tryptophan halogenase; OS = Histophilus somni (strain 2336) OX=228400 GN=HSM_0395; PE = 4 SV=1
MEKFDVVIIGAGPSGSVSASLLHKQGLKVCVLEKQHFPRFVIGESLLPYCMDILQEADLVEAVHAEKSFQFKNGAAFTWGNRYTYFDFTDKFTAGPGTTYQVRRGIFDKILIDETAKKGVEVRFGHEVSAFDNQGDQAELAVKTEQGEEYRLSAGFVLDASGYGRVLPRLLYLETPSHLPIRIAHFTHIDDNIDDPIFDRNKILITTHPEHRDVWLWLIPFADNRCSIGVVGLPEILAGESETVLKKFALECPMLSKILAKANWENEFPYRHIQGYSANVKTLHGKHFALLGNAAEFLDPVFSSGVTIALHSARLASRLIARGLQGQAVDWQQEFADPLMVGVNAFRTYVNGWYDYSFQDVIYARNPQPEIRQMLSSILAGYAWDEKNPFVTKSSPRLKALAELCGEATQD

SEQ ID NO: 90043 - protein, 499 aa, Ferrimonas balearica
  REGION 1..499: note = tr|E1SVG0|E1SVG0_FERBD Tryptophan halogenase; OS = Ferrimonas balearica (strain DSM 9799 / CCM 4581 / PAT); OX = 550540 GN=Fbal_1097 PE=4 SV=1
MQRQQVVILGGGSAGWMTAAMLARVLGSAVSLTLVESEQIGTVGVGEASIPPLALFNQALGIDEAEFMAATAATFKLGIQFEHWGQQGDRYLHAFGAIGRDLGLTPFHHLWLQQQPDEVADLWQYSLNAQAAEQHRFARLDRIDGTPLAGLTHAYHFDAGRYAAYLRQYAEQRGVVRIEGRVEQVEQAANGDIQALRLADGRRIEGQLFIDCSGLAARLIEQTLGSGFEDWSHWLPCDRAWAVPSANTDTLRPYTRAIAREAGWQWQIPLQHRTGNGLVFASRFLDEENARQQLLANLDSEPLAEPRLIRFRVGRRRQQWHRNCIAIGLSSGFLEPLESTSIHLIQSAIMRLVKLFPSAQGEMDALRDSFNRESQREFEQVRDFIILHYHLNQRGDAPLWRHTRTMALPESLAAKLALFGESGRLLRQQDELFTEVAWMQVMLGQGLVPKSVHPLAQSLSPAQLQEFLLNLRTIIGHTAGRLPSHQDFLARYCPMPNTP

SEQ ID NO: 90044 - protein, 536 aa, Roseateles aquatilis
  REGION 1..536: note = tr|A0A246J313|A0A246J313_9BURK Tryptophan halogenase; OS = Roseateles aquatilis OX=431061 GN=CDN99_19980 PE=4 SV=1
MPTTPADPMSPRRPVRRVVIAGGGTAGWMVAACLSKTLGRLLDIRLVESDEIGTVGVGEATIPTLLTFHHLLGINEQEFMAATQATFKLGISFEGWRDVGEDYIHSFGVTGTDHWTAGFQHFWLKGRERGLATEYGDYCLELRAAQEHRFAHLPRAGMNYAFHLDATLYGAYLRRLSEGHGVQRVEGRIADVLMHDADGSGADVPPRDRDIRALRLQDGTQIEGDLFIDCTGMRSLLLGQALGVGYQDWSHWLPCDSAIALQTASVRDAVPYTRSIAHPWGWQWQIPLQHRVGNGVVFSSRHTDDDTAQSALLGNIQGEVLTKPRVIRFKPGQRDVVWKRNCVGIGLASGFLEPLESTSIHLIQRSAIRLMQMFPKDGIRSSDVDEYNAQMAHELEHIRDFIILHYHVTNRSDSPMWRDLRAMAVPASLRHRLDLFRETARVFRVPNELFTENSWIQVMLGQGIAPEQFHPTADLMGDEELARFLGDMRERIEHTVRQLPSHEAYVRKYGAGMGSGLPATPPTGAPTVDARQRSAA

SEQ ID NO: 90045 - protein, 483 aa, unidentified
  source 1..483: note = Lysobacter silvestris
  REGION 1..483: note = tr|A0A2K1Q0Z0|A0A2K1Q0Z0_9GAMM Tryptophan halogenase; OS = Lysobacter silvestris OX=1645665 GN=Lysil_0216 PE=4 SV=1
MIFSLATPEFRIIACSRYYALGMEASEVRPDGQTKSAGVTADTATMPPRSCDVQACDVLVIGGGPAGSTAATLLARDGWQVVMLEKEAHPRFHIGESLLPQNMPILERLGVHDAVRDCSTLKLGADFPNDNGSYEVFDFSKSFRPQSGYAFQVKRADFDKILWDNARAAGVDARDHNKVDRVDFADDGAITVHARGQQFRPRYLLDASGRDTVLGGKLALKRKNARHASAAIFSHYRGVQRREGRDAGNVSIYRHAHGWIWVIPLSDGVTSVGAVCFPDYLKQRRGDQEAFLMQTLMAVPELDARMRDAERIAPVHVTGNYAYECTRMHGRHWSLLGDAYAFVDPMFSSGVFLAMKSAEGCARMVDGILRTPAREASLQRKFQHQFDRGLDEFKWFIYRFTSPTMKHLFANRRDLFGVERAIVSMLSGDVFDAKPILRRLRIFRVIYALTTLGMSGRAFAAWRNRRRQLDVEVREETLQGDAP

SEQ ID NO: 90046 - protein, 505 aa, Sphingopyxis sp.
  REGION 1..505: note = tr|A0A0Q8RYJ2|A0A0Q8RYJ2_9SPHN Tryptophan halogenase; OS = Sphingopyxis sp. Root214 OX=1736491 GN=ASE06_01810 PE=4; SV = 1
MNRVGDSRITKVVIVGGGTAGWMAAAALSRTMDNLSIRLVESDEIGTVGVGEATIPAIRLFNALIGIDENEFIRETGGTFKLGIQFHDWGRIGDVYMHAFGQIGRSLGMLPFQQYWLRGRNEGVAGRLGDSSLNETAGRQNRFARLPQIPNTSLDGIAYAFHFDAALYAAYLRKVAEAAGVERTEGKIASVRRNGEGGHVEAVVLDNGKAIEGELFIDCSGFRALLIEDALETGFEDWTHWLPCDRAIAVPSENAGPARPYTQAIAHKAGWQWRIPLQHRTGNGHVFCSDFISEDEATATLLAHVEGRPLAEPRTLRFRTGMRRKAWNANVVALGLASGFLEPLESTSIHLIQNGIAKLLAHFPDRDFDAANIDGYNRRVRFDYERIRDFVILHYHANQRTDAPFWIRCREMGIPDTLARKIELFKSHGQIVREGDELFIEIGWFQVLTGQNVMPAGYHPMVDQLTPDELAGFFADIETIVARTASHLPTHEEFIAQHCAAGVPA

SEQ ID NO: 90047 - protein, 495 aa, unidentified
  source 1..495: note = Sphingomonadales bacterium
  REGION 1..495: note = tr|A0A258E9S2|A0A258E9S2_9SPHN Tryptophan halogenase; OS = Sphingomonadales bacterium 32-67-7 OX=1970595; GN = B7Z07_02160 PE=4 SV=1
MIKRIVVAGGGTAGWMAAAALARTMGHTVAVTLVESEAIGTVGVGESTIPPLVVYNRLLGINEAEFMRATQATFKLGILFDNWKQPGDRYFHSFGYTGKDHWAAGFQHYWLEGRARGHAQPYDDYCLELIAALQSKFAQLPDNKVNYAYQLDSGLYARFLRQMAEADGVTRTEGKIARVELDGESGDIAALELDGGRRVEGDLFLDCTGFRALLIEGALHAGYDDWTHWLPCDSAIALQTPNVRPPVPYTRAMAHDAGWQWRIPLQHRTGNGIVYCSRYLDHDAALERLLGNIEGEPLTPPNKIRFQTGARRRQWHRNCIAIGLSGGFMEPLESTSIHLIQRAILRLIRMMPQGAISPRDIAEFNDQQFQDMEQIRDFLILHYKATDRRDSPFWRQCAAMDVPDSLAQKIELFRETARVFRRNEELFAENSWVQVMLGQGIEPQSWHPIAGKLNDDELDRLLGMIRQDVTRTVAGLPAHADYVARYCGAAEPAAA

SEQ ID NO: 90048 - protein, 524 aa, Sphingomonas sp.
  REGION 1..524: note = tr|A0A430DLU5|A0A430DLU5_9SPHN Tryptophan 7-halogenase OS=Sphingomonas sp. ABOLF OX=1985879; GN = CA235_10310 PE=4 SV=1
MAAASWQASTTSSDLPLGAGRLCGRRRLYPRGPAVRQIVILGGGTAGWMAAAALSRFLPANHRVTLVESATIGTVGVGEATIPQIRLFNASLGIEQDSFLAATQGTIKLGIEFVGWTGPDSRYIHAFGTVGRGLGLVPFHHYWLRGQSGALSEYSVAAAAATAGRFAPDLGRPDLPTGLTWAYQFDAGLYADLLRQHAEGRGVARVEGTVAEVARDPLSGDVTALIMVDGRRIAGDLFIDCSGFRSLLVGGAMGVPFDDWSRWLPCDRALAVPSEVTQPIQLFTRATARTAGWQWRIPLRHRTGNGLVFCSTFMDEAAAAAELMGGLDAPARAEPRLIRFTTGRRTRAWAGNCVALGLASGFMEPLESTSLHLVQSGIARLLQFWPGEHIATADRDAFNRETEREWTAIRDFLVLHYRANTRAEPFWQACRATPLPDQLATKLDLFRASGRIVREGDELFTEVGWLQVLLGQGVHPNAYHPLADAPSAGDLASFLDAQRQHVAAVVGRMPTHDEFLRAATEELQ

SEQ ID NO: 90049 - protein, 501 aa, unidentified
  source 1..501: note = Paraglaciecola arctica
  REGION 1..501: note = tr|K6YQN8|K6YQN8_9ALTE Tryptophan halogenase; OS = Paraglaciecola arctica BSs20135 OX=493475 GN=GARC_1976; PE = 4 SV=1
MVKPINKIVIVGGGTAGWMAAASLAKYAQGKSLDICLIESSSIQTVGVGEATIPNIVEFNRILGIDEIELIKATKATFKLGIQFEDWHQKGESFFHPFADYGLKIDQLEFHQYLNRLAAGGEKVSIQDYSFSCALAKLGHFAQPHPQPPSPLADYSYAYHFDASLYAQFLQKFAVNLGVTHIDAKVEKVNLHSSNGFINSVTLDDGRDIEGQLFIDCSGFKGLLIEQALHTGYEDWSHWLFCDTAVAVQTESVGVTNPYTRSIAGDAGWQWRIPLQHRTGNGYIYSSQFEKDEDAENKLLETLQGKPINQPRKIAFTPGRRKQIWNKNCFALGLASGFLEPLESTSISLVQTAIAKLLNFFPDTDFNPYDIAEVNRLHNREVENIRDFLILHYKMTGRSDTDFWRRCQAMEIPDLLAHKMGVYQSRGHIVMTDNESFQSASWLTMYQGFNHLSKRFDPRAETVELAVLRQKLAQMRQSIDSAAQQAMSHDSFIDTHCRAQL

SEQ ID NO: 90050 - protein, 509 aa, Stenotrophomonas sp.
  REGION 1..509: note = tr|A0A427CGZ1|A0A427CGZ1_9GAMM Tryptophan 7-halogenase OS=Stenotrophomonas sp. 278 OX=2479851; GN = EGJ34_00725 PE=4 SV=1
MNAADTTDVRIRRVVIAGGGTAGWLAGCALAHQFRDQLDITLVESEQIGTVGVGESTVPPIRTFHRFLQIDEQEFLREVAGTFKLSISFENWRRPGERFFHPFGTIGQNTWATPFHHFWLDSLRRGMPSDLGDFCLESLASRGDQFSLDTQPQVSYAYHFDAGLYAKFLRRKAEAQGLKRVEGKIREVRQHPHDGSVQALVLEDGQVIEGDLFIDCSGFRGLLIEQTLKTGYEDWHEWLPSDRAVAVQTEAVAPPVPYTRAIAHEAGWRWHIALQHRVGCGLVFSSRHMSDDEAHAKLLRDVEGEPLRDPWLVPFRSGRRLKAWNRNVVSLGLASGFIEPLESTSIHLTISAVVRLIQLFPFDGISPSLVRLFNEVSQQEMEHVRDFIILHYHATQRDEPMWKACREMALPESLDIRLRAWRERAHAWQDPGELFRVDSWTSVLLGQGIQPGAPHPLARALGDADLRTLLARIQQPLHQAVARMPTQDAFIERYCRAAPEVWPSRVALA

SEQ ID NO: 90051 - protein, 498 aa, Sphingopyxis sp.
  REGION 1..498: note = tr|A0A0Q8RTG5|A0A0Q8RTG5_9SPHN Tryptophan halogenase; OS = Sphingopyxis sp. Root214 OX=1736491 GN=ASE06_18685 PE=4; SV = 1
MSDKKPVRVVIAGGGTAGWMMAAAIARTMGQTVDLTLVESEQIGTIGVGESTIPPLVNFNRILGIPEPEFMRATQATFKLGILFDNWKHDGDSYFHSFGLSGKDHWSAGFQHFWLNARERGHEQPYSDYCLELVAGMEGKFAHLPEDRMNYAYHVDATLYGRFLRKLAEADGCKRLEGKIARVELDGESGDIAALHLDGDRRVEGDMFVDCTGFRGLLIDGALHAGFEDWSHWLPNDSAIAVQSKHLRAPQPYTQAIAHDAGWQWRIPLQHRMGAGIVYSSGYLSRDAAYDRLMSSVGEPLIEPFDIKFKGGVRRKQWFRNCVAVGLAGGFVEPLEATTVHLIQRAVLRFIRMMPNGRVSERDAAEFNDQQRVDIEQIRDFVVLHYKATNRRDSPFWRHVANMPVPDSLQQKIELFRETGRVFRKYEELFAENSWVQVMMGQGIEPQSYHPIAEKLRDDEVERLFQSIRDNIAQTVATLPEHHAYVARYCGADVPQPA

SEQ ID NO: 90052 - protein, 497 aa, Aestuariibacter sp.
  REGION 1..497: note = tr|A0A2D6XX52|A0A2D6XX52_9ALTE Tryptophan halogenase; OS = Aestuariibacter sp. OX=1872400 GN=CL531_04525 PE=4 SV=1
  VARIANT 182: note = Xaa can be any naturally occurring amino acid
MHTSAIHHYVIAGGGTAGWMTAALLGKLLNGTGARITLVESPDQPGVGVGEATVPSFVDFIKLLGIDEQTFVKATQATFKLGIQFSHWQTTGHSYWHPFGHVGARIDGKPFFQQWLHAHRSGLTQTYTDFSASARMAQENKFYIPNPQQPNNLSQMGYAYHFDAQQVAVFLRDFAVSKGVVXKQAHIEHVQMCPDNSVIQRLITRTGEHIDGDFFIDCTGTQARLMGQALNTGFTDWQRYLPVDRAWVVQTENTEEPVPYTKAIAEPMGWRWQIPLQHRTGNGLVFCSQYTSPDEAKRYLQTQLTSPLLNEPRLLTFKTGHLEQFWRSNCVAIGLSAGFLEPLESTGIYLIMRGILNLAKLLPSSPPCQATIHEYNQLMLSEYQHIRDFIVLHYCVSQRNDTRFWQSWQQREIPTTLAHKLALYRTRGVVSHGQSDLFADHSWHAVATGMNVLPRDVDPVVATTDVKALQDLLARIDHALAHSVGQLMPHGEYLKAW

SEQ ID NO: 90053 - protein, 497 aa, Aestuariibacter sp.
  REGION 1..497: note = tr|A0A2D6XVP1|A0A2D6XVP1_9ALTE Tryptophan halogenase; OS = Aestuariibacter sp. OX=1872400 GN=CL531_01835 PE=4 SV=1
  VARIANT 4: note = Xaa can be any naturally occurring amino acid
  VARIANT 137: note = Xaa can be any naturally occurring amino acid
  VARIANT 264: note = Xaa can be any naturally occurring amino acid
  VARIANT 267: note = Xaa can be any naturally occurring amino acid
  VARIANT 475: note = Xaa can be any naturally occurring amino acid
  VARIANT 484: note = Xaa can be any naturally occurring amino acid
MTQXKTRVVIAGGGTAGWLSAFSLVTRLGALLDITLVESDQIGTVGVGEATIPTMCNFHRLMGLDEREFMAATQATFKLGIQFDNWGNQGDSYVHSFGEIGQRSWMAEFHEFWMEAVANGQQDTLEDYCLELKAAKXNKFALKVGNRPLNFAYHLDATAYAAYLRNKAEQAGVTRIEGKITTVNKHPDSGNLRELVLDNDARIEGDVFIDCTGFRALLIGEALGVGYDDWSHLLAADRAIAVQTTAVEPPRPYTIATAHNAGWXWRXPLQSRVGNGIVYSSRFSDDETALATLMSNVTGEAVTEPRYLKFKTGMRQQAWAKNCVAIGLSSGFLEPLESTSIHLVTTALIRLMKLFPFEGECGLLAERYNRETQKEMETIRDFIVLHYHLTQRDDSAFWDFYRNMEIPESLQHRMAMFAEHGYVWPDDVALFRVDSWVQVMMGQGLMPKRHHGASRMLPTASLTQQLTAFKQSVNXALAQLPEHXAFIKQYCPADKSA

SEQ ID NO: 90054 - protein, 499 aa, Acinetobacter sp.
  REGION 1..499: note = tr|A0A3L9M461|A0A3L9M461_9GAMM Tryptophan 7-halogenase OS=Acinetobacter sp. 2JN-4 OX=2479844; GN = EAH57_11265 PE=4 SV=1
MLNLRGQQRVCIVGGGTAGWFAALHLRQLFSPSVEILLISAPEVPIVGVGEGGILNLMEALHRLKIPFGEFMQETEAVHKLGFVYEGWRDHQLNPKDCFYHMFPVKNEEIFWDEQGYFPTLSALLNHDIPISYVADSIQLRENNISQDTLTQMLVSDKSHNFASSFHFDTYKVGQYLRRIALQRGVIHQEGMFKEIIRETETGLVSTILVDDQSIHVDFVVDATGFSRKVLGEKLNVSWQSFQNYLPVNTAIPFHLKHSQKNPDLVTRSTAMNAGWVWQIPLQQRVGAGYVFDRNFITSEQAVEEVEQWLGHEIDPIRTISFEAGCYEEVWKGNVLAIGLASGFVEPLEATSIGQMLYQLGLFCAVVQECHGVVPQHSIDKFNQENLQGWHGIRDFIRMHYDTPRTDSAFWKAMQHRPMSATYTELKQCWRSRTPRELDLSCYEMGGVLQFGVYSWLAIGQALGVVKAEASAAELYALAPEKKQKVAQYLSAIKQRYNI

SEQ ID NO: 90055 - protein, 532 aa, unidentified
  source 1..532: note = Streptomyces wuyuanensis
  REGION 1..532: note = tr|A0A1G9TEQ5|A0A1G9TEQ5_9ACTN Tryptophan halogenase; OS = Streptomyces wuyuanensis OX=1196353; GN = SAMN05444921_108238 PE=4 SV=1
MTSTDTRLKKVVILGGGTAGWMTAAYLGKALQGTVDITVLEAPTIPRIGVGEATVPNLQRAFFDYLGIPEDEWMRECNASFKMAVRFVNWRTEGRGEATARTLDDGRPDHFYHPFGLLPDYDQTPLSHYWFKRKYEGRTTEPFDYACFREPPIMDAMKAPRWLDGRSATRYAWHFDAQLVADFLRRFAIEKQSVRHVEDEMTEVVQDERGFVTSLRTRGGKDLDADLFVDCSGFRGLLINKAMAEPFVDMSDHLLCDSAVATAVPHDDEAGGVEPYTSAIAMSSGWAWKIPMLGRFGTGYVYSSKFTEQDEATAEFAAMWGLDPEKTAFNHIRFRVGRNRRAWVKNVVSIGLSSCFLEPLESTGIYFITAAIYQLAKHFPDTTFNEGLIDSFNREIEVMFDDTRDFIQAHFFYAPRNDTPFWQANKKLTLPDNIQQKIAAYRAGLPINSPITDESTYYGNFEAEFRNFWTNGSYYCIFAGMGLEPDAPLPALAYKPESVAGAEPLFETVKRQQQNLLETLPSAYEYLKRLHS

SEQ ID NO: 90056 - protein, 504 aa, unidentified
  source 1..504: note = Idiomarina aquimaris
  REGION 1..504: note = tr|A0A432XDU8|A0A432XDU8_9GAMM Tryptophan halogenase; OS = Idiomarina aquimaris OX=641841 GN=CWE21_09445 PE=4 SV=1
MSMSQPYHIVILGGGSAGWMTAAALSKVLDRQHYKITLIESTAIGTVSVGEATIPGIREFNQLLQIDENEFIRETHGSFKLGIAFENWQNIGDEYMHPFGTYGVTLNGVPFHHYYLRHEREQGSDNAIPLPELNLEWSAALAHKFTRPIADKRSPLGHIKYAYHFDAAAYARYLKNYATQRGVVALEDRMLEAKRHANGYVASLLLEKQGEVNGDFFIDCSGFKALLIGDTLGVSYHDWRKWMPCDSAVALPGKHNADDILPYTRSIAHHEGWRWKIPLQHRTGEGWVYSSRFTESDKAEREFRETIGNFDSKANHLRWINGRRDEAWKHNVCSIGLSAGFIEPLESTGLQLTQSGIMRLISLLPGRGNMTERAKAFNRYTAEEITNIRDFVMCHYKLTDRDDSEFWRYCRDMEIPDSLQERLDLYRENASIFRNSNNELFNEISWFSMFHGQGLTPEQVHPIAQQMPAATMQQHLTTIQRVFKQSVAQLPSHADFIRKHCQAS

SEQ ID NO: 90057 - protein, 518 aa, Colwellia sp.
  REGION 1..518: note = tr|A0A3D3GYN1|A0A3D3GYN1_COLSX Tryptophan halogenase; OS = Colwellia sp. OX=56799 GN=DIS98_02865 PE=4 SV=1
MNKPLKKIVIVGGGSAGWLTAGIIAAEHSNNQGSGIEIILVESTDVPPIGVGEGTWPSMRSTLKKMGISETEFLLECDVSFKQGSKFTNWISNTNEHYYHPFTLPNGFNEINLSSYWQPFSDKISFADAVCEQSHLGAHGLAPKQISTAEYSFVANYGYHLNAGKFGQFLQKHCTVKLGVKHVIDHVSKINSSATGDIASITTKNQGDIFGDLFIDCTGTSSLLLAKHYKIPFISKKHILFNDSALAVHVPYESSDSSIASFTSSTAQTAGWIWDIGLPSRRGVGYTYSSAHISHDDAEQELRNYLIPSMGEDAAHALMIRKIPLNPGYREKFWHKNCVAIGMAAGFIEPLEASALALIELSAKMISEQLPANRQTMDIIAKRFNDKFLHRWENIINFLKLHYVLSQRTDSAYWLDNKNEKSIPKNLQELITLWRYQSPYHYDATHTEEMFPPASFQYILYGMNFVTAPLQHNKRESNKVEADKLFNDNIKKTQQLLSVLPTNRELINKIKKYGLPKI

SEQ ID NO: 90058 - protein, 518 aa, Colwellia sp.
  REGION 1..518: note = tr|A0A3D3GW75|A0A3D3GW75_COLSX Tryptophan 7-halogenase OS=Colwellia sp. OX=56799 GN=DIS98_03475 PE=4; SV = 1
MSTTIDNLVIVGGGTAGWISACNLAKKLNIKSDESLNITIIESPDIPTIGVGEGTWPTMRKTLSNLGIDESEFMRECNATFKHGTKFVNWRETPIGNQSEYYYNLFTSFINPEEFNLGPYWNMGLAPKDKTYPDSVSMQQQICEAGLSPKKITTPAYEGIVNYAYSIDAGLFVKMLKKLATEKLGVKFIQTNVLKVNQDEDGYISSLDTDTAGCIPGDLFIDCTGFKALLIGETLKVPFNSFADKILTNHAVFIKVPYPDNETEIVPCTVSTAQECGWTWDISLSNRRGVGYVYSDKYSTHERAEEVLRNYIGEKSKGLTAKKIKINVGQRNEAFHKNCLAMGMAAAFIEPLEASAIFLIEAGSNMLANIFPRNRDALKNVANVYNESFNYRWARTIDFVKMHYVLSNRNDSEFWKDNKKLSSIPQSLTDQLNHWKSHPITAYDFPNTFEPFVMESYQFIYYGMMKDIKYHHNGSFPDTEKAKVIFNQIDKMTKQALIELPNHRELINKIYDFGMQKI

SEQ ID NO: 90059 - protein, 391 aa, unidentified
  source 1..391: note = Oxalobacteraceae bacterium
  REGION 1..391: note = tr|A0A4Q3K727|A0A4Q3K727_9BURK Tryptophan 7-halogenase (Fragment) OS=Oxalobacteraceae bacterium; OX = 1871070 GN=EOO77_39650 PE=4 SV=1
RNGGLADFQHFWLEARERGFGGAYGDYSLEQQAAGAGLFGHDERHSLAYAYHLDATAYAQFLRTLAEPWGVRRVEGRIERVERDGQRGDIAALVLASGERIDGDLFIDCTGFRALLTEATLETGYEDWSEWLTTDRALAVQTETVAPPVPYTRAIAHTAGWRWQIPLQTRTGNGLVYSSRHMSDDEAHATLIGALDSRPLFEPRPLRFRSGMRRQAWNRNCIALGLAAGFIEPLESTSIHLIMNAVIRLIQLFPFRGDDHVALASRYNSQSRHEWEHVRDFIILHYHVNERDDSLFWRDCASMTTPDSLAERLSLFTRTAGAWQGQDDLFRIDSWVSVMLGQGVVPRAHHRIASIIKGQELRTSFEDLSRGIASTVRLLPRHCDFLARYCP

SEQ ID NO: 90060 - protein, 513 aa, Shewanella putrefaciens
  REGION 1..513: note = tr|A0A366IQW0|A0A366IQW0_SHEPU Tryptophan halogenase; OS = Shewanella putrefaciens OX=24 GN=DET47_11939 PE=4 SV=1
MTSIKNIKSVVIVGGGTAGWISACHLAKKLNARTPKIQVMLLESPNIPTIGVGEGTVPMLRETLKYFGIREDEFIRCCDVTFKQSVKFIDWNKPNSGEYYHHLFDYPYFKDFTSTWLNKSLSDRGRYADLVAVQGHLIDAGFGPKAMTQPQYRGAMHYAYHLDAAKFTKMLTKFGVEQLGVKHLLAEVIDTKIDAQGNILELHTDNAGILTADLYVDCTGFSAQLIGSACNVPFVDKSDILFVDSALVVQLPYEDKYTPIPCFTKSTAQEAGWIWDIGLSERRGVGYVYSSQYSSIEQAKSVLREYLGKATEHVSFRHIPMKVGYREKSWQGNCVAIGLSSGFVEPLEATGLLMFDATARMLAECFPANTDVMPLVANRYNQRVSNAWNRVIDFIKLHYVIAKRMDTPFWVDNKNEISIPDTLKEHLELWRYHIPTAYDFTSTLEFFNLENYLYVLYGSDFESKLERKLNDEEERLFTVMTEKLGKQVTLLKSQLLPHRELIERIKLYGIQLN

SEQ ID NO: 90061 - protein, 504 aa, Pseudoalteromonas ulvae
  REGION 1..504: note = tr|A0A244CTY7|A0A244CTY7_9GAMM Tryptophan halogenase; OS = Pseudoalteromonas ulvae OX=107327 GN=B1199_01120 PE=4; SV = 1
MSAVDNAIKEIVILGGGTAGWMAAAIIGNIFKSSDVSITLVESEQVEIIGVGEATIPPLLAVLESLGIDQADFIQATQASFKWGIEFVDWCEKGQQYFHPFGALGRPIDGHDFYQCWLKSQAEGDHTPLMAHSPEAMLSAHNKFYLPFEAMNTPLAGAHYALHLDAVLVGQYLRRFAENIGVKREVGHVEVANTDSKGFITDLVLQDGQTIAGDFFIDCSGFQGKLIEQTLQTGYDDWSEYLPCNRAVTVQSENINEPTPYTTAKAQDAGWTWRIPLQHRTGNGYVFCDKYISDEEAIATLLANLEGPAVCEPRVIPFLTGIRKQAWNKNCLALGLAQGFLEPLESTAIHLVSKTLALFVRMFPNKDCDSKLQHEFNRRVRVDYEEIRDFLVLHYCATQREDTAFWRWCKTMTVPESLQYKIEFFKTAGGLIPEAETLFQPTSWYAVFEGMQVRPENYNPTLDALDTTKLLQSMEQGRQSLAKAVLKQPSHQSFLSQYCAAKKP

SEQ ID NO: 90062 - protein, 507 aa, Shewanella decolorationis; identical to SEQ ID NO: 87014
  REGION 1..507: note = tr|V1DB21|V1DB21_9GAMM Tryptophan halogenase; OS = Shewanella decolorationis S12 OX=1353536 GN=SHD_2638; PE = 4 SV=1

SEQ ID NO: 90063 - protein, 521 aa, Microbulbifer donghaiensis
  REGION 1..521: note = tr|A0A1M5B552|A0A1M5B552_9GAMM 2-polyprenyl-6-methoxyphenol hydroxylase OS=Microbulbifer donghaiensis OX=494016 GN=SAMN04487965_2073 PE=4 SV=1
MNTTDKTIRHVMIVGGGSAGWLTAAVLAAEYIPDTERGIQVTLVESPDVPTVGVGEGTWPSMRGTLKRIGVSETEFLRACDASFKQGSRFIDWIRGDGDEYFHPFTPPVSFQQLNLAPHWQKYRDQVPFADAVCGQAQISREALAPKMISTAEYAFALNYGYHLDAGKFAAFLQRHCTDKLGVRHLQERITDISGDTDGYIESLTTESGEKLTADLFVDCSGSASLLIGKHYGIPLRPQQQVLFNDRALAVQVAYPRPDSPIASCTHSTARAAGWVWDIGLPSRRGVGYTYSSAHTTDAEAEQVLREYIDQDAAVSGALLFEPRQIKFDPGYREKFWHRNCVAIGMAAGFIEPLEASALVMVEKSAQMLAELLPPDRAAMDAVERRFNRRFSGHWQRIIEFLKLHYVISQRSDSDYWLAHRNTESIPQSLKDSLEIWRYQPASLNDARMADELFPAASYQYVLSGMEFIADTTTVQRQGNQAAEAERLFRENARQAQRMSRALPSNRALLQQIGEVALPTI

SEQ ID NO: 90064 - protein, 500 aa, Sphingobium sp.
  REGION 1..500: note = tr|A0A1B3MNB0|A0A1B3MNB0_9SPHN FAD dependent oxidoreductase family protein OS=Sphingobium sp. RAC03; OX = 1843368 GN=BSY17_3569 PE=4 SV=1
MSTLPPPRRIVVAGGGTAGWMTAAALARTLGPVAQVTLVESEQIGTIGVGESTIPPLVAYNRILGINEADFMRATQATFKLGINFENWRVPGESYFHSFGGTGKDHWSAGFQHFWMHGQAQGHDAPYGDYCLELKAAEAGRFAHLPDDRMNYAYQLDSGLYARFLRRMAEADGAQRIEGRITQVELDSESGDIAALLLDGDRRIEGDLFIDCTGFRALLIEGALHVGYDDWTHWLPCDGAVAIQTSSVRPPVPYTRAIAHEAGWQWRIPLQHRQGNGIVYCSGFLDPDAALEKLLASVEGDKLVQPNPIRFRTGARRRQWHRNCVAVGLSGGFMEPLESTSIHLIQRAVLRILRMLPAGTVSPLDIAEFNDQQMTDMEQIRDFLILHYKATDRRDTPFWRHCAAMAVPDSLAHRVELFRQTGRVFRKNEELFAENSWVQVMMGQGITPQSHHPIASKLRPDELTHLLASLKDQVSRTVANLPDHAAYIARYCSAQEPVAA

SEQ ID NO: 90065 - protein, 492 aa, Colwellia sp.
  REGION 1..492: note = tr|A0A3D0C663|A0A3D0C663_COLSX Tryptophan halogenase; OS = Colwellia sp. OX=56799 GN=DEO86_04780 PE=4 SV=1
MNTNKINKVVIAGGGTAGWMAAAALSKLLGKNLDITLVESDEIATVGVGEATIPTLQYFHQLLNINEADFLKATHGTFKLGISFENWRDKNEDYIHAFGTTGKDCWAAGFQHFWLKGQQKGIAGEYGDYCLEKAAASAEKFAQLPNNGLNYAYHIDATLYGQFLRKISEQHGTIRVEGKIDKVNLNPESGYIDSLTLASGKVIEGDLFLDCTGQRALLIEQALHTGFEDWSHWLPCDSAIAVQTKSVANPIPYTRSIAHDFGWQWRIPLQHRVGNGIVFSSKFVTDDEAKSTLMNNLVGEAITEPRVIKFRTGTRRQHWNKNCVAVGLSSGFLEPLESTSIHLIQQAVVRLMRMFPHTGIQQSDIDEFNKQTKFDTASIRDFIILHYSVTNRQDSNFWRHCSNMPIPDTLATKIKLFKETGRFFRENNELFDDSWMQVMIGQGLLPKNYHPIVDNMSDDELKRFLEHIKANVDGTVNQLPNHAAFIEQFCHT

SEQ ID NO: 90066 - protein, 553 aa, unidentified
  source 1..553: note = Nostoc carneum
  REGION 1..553: note = tr|A0A1Z4HG63|A0A1Z4HG63_9NOSO Tryptophan halogenase; OS = Nostoc carneum NIES-2107 OX=1973483 GN=NIES2107_04390; PE = 4 SV=1
MMSDNVRQIVIVGGGSAGWMTAAYLSKALDERVKITLIESSNITKIGVGEATFSTIKVFFDFLGLKEQDWMPKCNATYKMAIKFMNWNAKGQHFYHPFQRYEVIDSFDISEWWLKMKRAQEAFDYACFVIPWLCDNQKSPRYLDGKVFDDKVQNEFSQEQIAKKNILDNLKVQYPYAYHFDANLLAKFMKDYAMQRGVQQIVDDVVDVQLTEDGNIDSLNTKKYGLLQGDLFIDCTGFQGLLINKTLNEPFISFSESLLCDRAIAMQIPSDMQKNGINPYTTSTALSSGWVWDIPLYGRNGTGYVYSSAFISEEEAEQEFRQHLGEVANNSKASHIKMRIGRNRNSWVKNCVAIGLSSGFVEPLESTGIFFIQHAIEELVNHFPGKCFNEELIRSYNKAVADCIDGVRDFLILHYCASDRADTKFWQATKNDIKVPEELQEKLRLWKNRLPSNKSINPKYHGFESYSYSVMLLGLNYIPESSLPVLEHIRNHNAQAVFQAIKERADYLISTLPSQYEYLTYVIQSQEHSEYLRDNHFPTALVNDMAQISVPIS

SEQ ID NO: 90067 - protein, 508 aa, Pseudoalteromonas sp.; identical to SEQ ID NO: 89546
  REGION 1..508: note = tr|A0A1R4KA91|A0A1R4KA91_9GAMM Tryptophan halogenase, putative OS=Pseudoalteromonas sp. JB197; OX = 1434839 GN=CZ797_10320 PE=4 SV=1

SEQ ID NO: 90068 - protein, 522 aa, Colwellia sp.
  REGION 1..522: note = tr|A0A3D0C803|A0A3D0C803_COLSX Tryptophan halogenase; OS = Colwellia sp. OX=56799 GN=DEO86_09425 PE=4 SV=1
MSVISSQPKKIIILGGGSAGWMAASLLHKAWAKKGTEILLIESDVINKIGVGEGSTPSLRLFFEHLGISEQEWMPECNATYKCGISFPGWTSLDDPAYANYPAYIHPFYSQADWKTGNAFMHNARLRREGVDVPAHPDNYWLQSYLAKHFKAPIARQQLSDEMDYGYHFDSALVGDFLKKRLLSLGLNHLTDTVDGVELDESDQISSVITKSNGAQRADLFIDCTGFAARLIRQALNVNFIDYSDSLFNDRAVAIQSPIDCSKNIPSQTTSTALSAGWAWQIPLSNRYGNGYVYSSKYISDEDAEKELRKHIGPSCKDHNARIIKMRLGRLSQHWHKNVLAVGLSQGFIEPLEATALMLIQHTVESFINNYEDMQLRKRDVLVQQDSFNDQLNEVFESIKDYIVAHYRLNSRTDSQYWCDNRENKNNSPRLNALLSTWHTPGGDFEAELHRHNAELTYFAPSWYCLFSGKGHFPTSLNEPSSNTKVAPTAEIIKYCHQVSQQFYHHNEQLERVYGDQWPKKV

SEQ ID NO: 90069 - protein, 101 aa, Ruegeria halocynthiae
  REGION 1..101: note = tr|A0A1H3G0J5|A0A1H3G0J5_9RHOB Tryptophan halogenase; OS = Ruegeria halocynthiae OX=985054 GN=SAMN05444358_1228; PE = 4 SV=1
MQPTGSVNYHVHSDTRQAFHIDAGGVTGKLISPELVATVIDVKDVCMGDAAVRFAVDSVGFLRAPTKVTNFTAGELWKADYDRELTDLLCPSSGILGQMAA

SEQ ID NO: 90070 - protein, 795 aa, Methylobacterium sp.
  REGION 1..795: note = tr|A0A0Q5CUX8|A0A0Q5CUX8_9RHIZ Tryptophan halogenase; OS = Methylobacterium sp. Leaf123 OX=1736264 GN=ASF53_01045; PE = 4 SV=1
  VARIANT 85: note = Xaa can be any naturally occurring amino acid
MFRSERSAPPRLVIAGGGPAGWLAAFYLKRVLRRAGWTVTLVGTAPATGISVALATRPSFTRFLNGFDIDEAIVMRRCAATYRLXSRYDDWFVQGEGHWHPFGACGPRIAGRDLFHYWMKLRGAGAEEEAGSYSDYAPQALMAAAGRGPRPDAAPSSLTESGEYGYHLDRAALVRFLRELALSEGVRAVTGRVGGIERDLYGDVAALVLDGGQKVEGDIFLDCTGAASQLIGTALGEAWIAGSGPGDRLARLSLPRSPEPPPFTAYRGRAEGWTASLPLADRTEHHFVYDSRATSPDAAAEILHRAFDGEGGLAHAELRYGRRAAPWQRNVVALGAAAGAVEPLVGFDLDLVLAGLEAFLAYLPRQGEGGDVLRRAYNARLNRFHDDAAEAVAAHYVLGRRPDRFWANARAVTIPDRLADRLDLYELAGHVAPSEEVLFGEGDHYLLFSGADFLPRRPFAPVDVADGREVARLLASIRAQSGGVAQAMAPHARLIEALHGPAPADAPVIRVAAAEVPSGPASLRRTPEGARLADLVAGLGQPFGYERSVKASPAGLQTERFLVSLHRSSLGLAPGKTLDELAARLGLPERERAEAAGLIADADILHLGYEDGPSGALYKLYVEWSSRTDAAWSAADAAGAEPMLVHRAYKWRPEGGHPPVVTLYHWPRVRSPDEIGARLTRIAGAWGAAGTSVRDTAQALLRLAQERGRGAVHYLEAREEPGLRLSYDLNLYACGLTVADAEPLLGQAFVDLGTSPQAAAAVLGERLRESLGHVAGGVGRDGQPFVTVYSGKAGA

SEQ ID NO: 90071 - protein, 287 aa, unidentified
  source 1..287: note = Oxalobacteraceae bacterium
  REGION 1..287: note = tr|A0A4Q3JSJ3|A0A4Q3JSJ3_9BURK Tryptophan 7-halogenase (Fragment) OS=Oxalobacteraceae bacterium; OX = 1871070 GN=EOO78_30060 PE=4 SV=1
MSNTIEHIVVVGGGSAGWLAAAVIAAEHRHLRVTLVESPGVPPIGVGEGTWPSMRDTLHRIGVSESAFFRECDAAFKQGSRFDRWVDGSAGDYYFHPFVLPQGYGDANLAAAWQAQHRTVPFADLASFQPHLCVQGRAPKQARTPEFAAVANYGYHLDAGKFGVFLRSHCVDKLGVRHVLDHVDAVVSHEDGERRGDIAGLRLRDGGVLAGDLFVDCTGMQSLLLGGHYGVALLHQRHVLFNDRALAVQVPYATPDAPIASQTTSTAQTCGWIWDIGLPTRRGIGHV

SEQ ID NO: 90072 - protein, 521 aa, unidentified
  source 1..521: note = Gammaproteobacteria bacterium
  REGION 1..521: note = tr|A0A0S7YXE4|A0A0S7YXE4_9GAMM Tryptophan halogenase; OS = Gammaproteobacteria bacterium SG8_30 OX=1703404; GN = AMJ58_11425 PE=4 SV=1
MNRPVTRVVVVGGGAAGWITAGLIAAEHDAASPSGVQVALVESPDVGPIGVGEGTWPTMRTTLSKLGIAETDFVRECDASFKQGTRFDGWCKGASYDRYYHPFTLPGGYVTTNLAEHWLTLSERVPFADAVSVQSHLCARGLAPKQAATPEYAAVANYGYHLDAGKFATLLQKHCTRRLGVRHILDHVTGVNSDEDGQIASLDSKIHGQIAGDLFVDCTGFASLLLGKHYRVPFISRRDNLFIDTALAVQVPYAGPESPIESQTISTAQQAGWIWDIGLSSRRGVGYVYSSAHTTDEQAECDLRAYVAPALGAGAESVPLRRIPINPGHRERFWHQNCVAVGMSAGFLEPLEASALVMVELSAQMISEQLPATRETMPIVAKRFNENFRYRWDRVIDFLKLHYVLSRRTDSDFWIDNREERSVPESLNEALALWRHRVPWHGDLPHVDEVFSSASYQYVLYGMGFRTEPRATTRRSRDREVADRLFRDNVSRTQQLIAALPKNRELIDQVRKFGLPKGKAA

SEQ ID NO: 90073 - protein, 504 aa, unidentified; identical to SEQ ID NO: 86132
  source 1..504: note = Alteromonas naphthalenivorans
  REGION 1..504: note = tr|F5ZGD3|F5ZGD3_ALTNA Tryptophan halogenase; OS = Alteromonas naphthalenivorans OX=715451 GN=ambt_22070; PE = 4 SV=1

SEQ ID NO: 90074 - protein, 514 aa, Sphingobium sp.
  REGION 1..514: note = tr|A0A1B3MQ93|A0A1B3MQ93_9SPHN FAD dependent oxidoreductase family protein OS=Sphingobium sp. RAC03; OX = 1843368 GN=BSY17_3555 PE=4 SV=1
MVHPVRNIVIVGGGTAGWLTAGIIAARHRTRIGQGFSVTLVESPNTPIIGVGEGTWPTLRTTLSRMGVSESDFFRECDAAFKQGARFDGWTTGAVDDGYYHPLMLPQNFGQVNLAPHWLASNQGESFCDSVSAQGRICDDGLAPKTIATAEYDALANYAYHLDAGKFAPFIQRHCCETLGVHHVLADVQQVLMHENGDIRAIQTAQAGEIEGDLFVDCTGFKALLIEGAMKVPFKDCNDVLFCDTALAMQVPYERPDSPMASHTISTAQTSGWIWDIGIQTRRGVGHVFSSSHISDEEAERELRAYIGPAADGLNARKIKIRSGHRETFWKGNCVAVGLAAGFLEPLEASAIVLIELSAKIIAEQMPACREVMDIISSRFNATTHYRWGRIIDFLKLHYVLTKRTDSDFWRDNVRDETIPDRLKELLLLWRYQSPWFHDEFDRVEEVFPAASYQYVLYGMGYHTEVDPASLSRDHRLADRARRENAALTDKLCAGLPRHRDLINKIVAHGLPPV

SEQ ID NO: 90075 - protein, 547 aa, unidentified
  source 1..547: note = Idiomarina aquimaris
  REGION 1..547: note = tr|A0A432XG67|A0A432XG67_9GAMM Tryptophan 7-halogenase OS=Idiomarina aquimaris OX=641841; GN = CWE21_07890 PE=4 SV=1
MEKRKILIVGGGSAGWMAAAYLNGALNRRGNDHRVDIELLESPDTPRISVGEATIPSMRHLLAAIGIDEMEFMRVTEGTFKQSIKYVNWVHNDNSFYHHPFSSLRTHPIDYAGSNWLRSDRSVPFMETCSIQPLICEWGRAPVMFGEWRMGARLNYAYQMNAQKFADYLRDFSTARGVVHTKANMAQVKKHANGDIASVTTDKGQEITADIFVDCTGFRSLLLEKEMGVGYEDFGKYLLCDRAVTMHVPYDTHYPGMVRPYTTATALSNGWIWDIPMQTRRSIGYVHSSAFIDEEAAEREMRAYQGGNTDDLPCRFIPFKAGRRHQQWQGNCVAIGLSGGFIEPLESTGLYLSDLGAVLLAEHFPWRREDQEMLAARYNRLMTNRYYEILDFINMHYCLTKRTDTEFWRTVQEREHITDRLQAKFDYWRRKPPSPHDFQDQNFAAMLGQDTSALPPIGNGRQDARAPVDTGGLWNHESYECILYGMEFLQKECDQWFGERRPPTQVNPAILQRLQMARQMLPPHELWLQQALGMQDYPKAARPKGWI

SEQ ID NO: 90076 - protein, 490 aa, Colwellia sp.
  REGION 1..490: note = tr|A0A3D0C5A2|A0A3D0C5A2_COLSX Tryptophan halogenase (Fragment) OS=Colwellia sp. OX=56799 GN=DEO86_04765 PE=4; SV = 1
DGVSITLIESPDIKPIGVGEGTWPTMRNTLEKIGISEDDFFRCTDASFKQGSQFIGWNTGQINDSYYHPFIAPHGFGQTNISANWQQLNNHIPFAHAISFQPYLCDHGCAPKQQQTPEYAGVANYGYHLNAGKFSALLQQHCIEKLGVQHISDDVIKVNGEIEENITSVTTKRNGDISAQLFVDCSGSKSILLGQHYQVPFISKKNILFNDTALAVQVPYSSPDAPIASHTISTAQKAGWIWDIGLPTRRGIGYVYASDYLTDSEAETTLRDYLKQDLPEQIINETVIRKISFTPGHREKFWHKNCVAVGMAAGFLEPLEASALALVELSANMIAKELPANMSIIDITAKRFNQRFHYRWQRIIEFLKLHYLLSKRTDSQYWRDNQSAESVPQRLQELIKLWRFQAPSYNDFSEIEEIFPAASYQYILYGMGFLTEKRSTSTHYDNTALAEKYAVENRQLCEKYLAGLPKNRQLIDHILARGNNNNVRSI

SEQ ID NO: 90077 - protein, 513 aa, Novosphingobium mathurense
  REGION 1..513: note = tr|A0A1U6I6F8|A0A1U6I6F8_9SPHN Tryptophan halogenase; OS = Novosphingobium mathurense OX=428990; GN = SAMN06295987_104262 PE=4 SV=1
MQRPTKKIVIVGGGTAGWLTAGVIAAKHRSRMPGGFSVTLVESPNTPIIGVGEGTWPTLRTTLARIGVSETDFFRECDAAFKQGAKFARWTTGAPDDAYYHPLMLPQSFAQLNLAPHWLANGESSFCDAVCPQGRICDDGLAPKTIATPEFEALANYAYHLDAGKFAPFLQRHCTQKLGVRHVLADVQRVEMTDDGDIKSVVTEQAGEIEGDLFVDCTGFKALLIGEALGVPFKDCSDVLFCDTALAVQLPYESETSAIASHTISTAQSAGWIWDIGLPTRRGIGYVYSSDHTSGDEAEQELRAYLGAAGKDLPLRKIPIRSGHRETFWKRNCVAVGLAAGFLEPLEASAIVLIELSAKLIAEQMPACREVMDAIARRFNATTDYRWGRIIDFLKLHYVLTQRTDSAFWQDNLRPETIPERLQELLLLWKYQGPWFHDEFDRVEEVFPPASYQYVLYGMGFRTEVESEALAGDASLAARAMRENAAQTQRLRAGLPRHRDLIRKIVDHGLQPV

SEQ ID NO: 90078 - protein, 496 aa, Shewanella decolorationis
  REGION 1..496: note = tr|V1DGU0|V1DGU0_9GAMM Tryptophan halogenase; OS = Shewanella decolorationis S12 OX=1353536 GN=SHD_3043; PE = 4 SV=1
MSQIKDIVIVGGGTSGWMTAALLAKLFKHTLNITLVESEDIGTIGVGEATIPPLQLFNSVLGIPENEFIQATHATFKLGIQFEHWGKQGDSYMHAFGNIGKDIGYTQFHQYWLSTQPEMMASFWDYSLNYQAALNNKFQSLEQIPHSPLSGLTHAYHFDAARYALLLRQYSEKSGVKRIEGKIESVNCAANGHITNLTLVSGNSVQGDFFIDCSGFAALLIGKTLNVGYESYQDWLLCDSAYAVPSEKACEIKPYTRAIAHEAGWQWRIPLQHRTGNGIVYSSRYMKDEEAKAKLLSTLEGKPLAEPKKISFIPGRRLKQWQHNCVAIGLSSGFLEPLESTSIHLVQSAIIRLTKLFPHQGVVQATVDEFNRQSQLEFEQIRDFIILHYYLNRRSDSDTDTLWSACQQMQIPESLQQKISLFSETGAIFRHKDELFTEAAWVQVMLGQGIIPTDYNPLANTVAPEALTEFLSNIKVIIKNTVSNMPTHEQYLAQLV

SEQ ID NO: 90079 - protein, 497 aa, Microbulbifer donghaiensis
  REGION 1..497: note = tr|A0A1M5B632|A0A1M5B632_9GAMM Tryptophan halogenase; OS = Microbulbifer donghaiensis OX=494016; GN = SAMN04487965_2076 PE=4 SV=1
MDTEKKIKKVVIAGGGTAGWMTAAALSKLIGKHLDIRLVESDAIGTVGVGEATIPTLHIFHQLLGLNEQEVMAATNATFKLGIKFENWRDVGKDYFHSFGTLGKDCWAAQFHHFWRKGLDRGIDFDIGDYCKEHLAAREGRFAVLPNQDRNHAYHLDATLYARFLRKFAEKNGVTRTEGKIAEVRLNHSDGFIEALQLESGELIEGELFIDCTGFRGLLIEQSLHTGYHDWTHWLPCDRAIAVQTEAVDRPVPYTRSIARESGWQWRIPLQSRVGNGLVYCSKYMDEEQARTQLLENVEGQLLSDPRVIPFRTGTRRKHWNKNCVAIGLSSGFIEPLESTSIHLIQRSVVRLMQLFPSRGICPADVDEFNAQTLNELEYIRDFIVLHYHVTERTDSKFWRYCRTMPIPDSLAHRLQMFRESGTLFNYEADLFGIASWIQVMLGQGLMPERHHPIVDLMGETELENFLASIRQQVRRQVENMPSHLDFIDHYCKANLD

SEQ ID NO: 90080 - protein, 531 aa, Streptomyces sp.
  REGION 1..531: note = tr|A0A3R8TW68|A0A3R8TW68_9ACTN Tryptophan 7-halogenase OS=Streptomyces sp. RP5T OX=2490848; GN = EHS43_01480 PE=4 SV=1
MEDHRIRNVVILGGGTAGWMAASYLGKALQGTATITVLEAPSIPKIGVGEATIPLLQNAFFNYLGIPEDEWMRECNAAFKTAVKFINWRTPGPAQAEGRPHEGRSDHFYHPFGLLPNHDGIPLSHYWYRKRALGETDLPFDYACFKEPAMMDAKRAPRWADGGPATRYAWHFDAHLVADYLRRYATGKQGVVHVQDEMTEVLKDERGFLTELRTKNGHSLPGDLFIDCSGFRGLLINQAMEEPFIDMSDHLLCDSAVATSVPHDDEKNGIEPYTSAIAMESGWTWKIPLLGRFGSGYVFSSRFADHDRAAQDLCRLWGLDPDATQVNRIRFRVGRNRRAWVRNCVSVGLASCFLEPLESTGIHFTYGAIYQLVKHFPDRRFDQALIDGFNREIEVMFDDTRDFIQAHFYFSPRNDTEFWRANKELKLTDNILEKVEAYKAGLPINQPYTTADTYYGDPGAEFRNFWTNGSYYCIFAGLGLMPDHPLPILDHRPESVAGAEQHFSAIRKEQELHAEGLGDNYRYLRSLHGLQ

SEQ ID NO: 90081 - protein, 479 aa, unidentified
  source 1..479: note = Gammaproteobacteria bacterium
  REGION 1..479: note = tr|A0A0S7YXU6|A0A0S7YXU6_9GAMM Tryptophan halogenase; OS = Gammaproteobacteria bacterium SG8_30 OX=1703404; GN = AMJ58_11440 PE=4 SV=1
MAAAALGKLMGRNLDISLIESDQIGTVGVGEATIPLLSAFHQLLGIDERDFMRQAQVTFKLGIQFENWGAIGDKYLHGFGIVGQDCWACPFHHFWVKSVKLGNKAPLTEYLLHRHAANAGRFELDRKNGLAYAYHFDATLYAKYLRRFSEQHGVTRIEGRIVDVATSRENGGIESLTLESGRKIEGDLYLDCSGFRALLIEQALHSGYADWTHWLPCDRAIAVQTRSVGPPRPYTRSIAREAGWQWQIPLQHRVGNGLVYCSQYLSDDDARKLLLDHVDGESISEPRLIRFRTGRRLKQWNRNCVSLGLASGFLEPLESTSLYLVQSGIVRLMHFFPTRGIDQLEIDEYNRKSRLEFEYIRDFIIMHYHVTQRDDSPFWNHCRTMDIPDSLSHRLELYKRNGRIFREDFELFFDGSWSQVMTGQRLMPEGYHPIVDMMSDQELKGLLSEIRSRHAQTVSRYPSHEAFLDEYCRAENPDR

SEQ ID NO: 90082 - protein, 457 aa, unidentified
  source 1..457: note = Xanthomonadales bacterium
  REGION 1..457: note = tr|A0A354Z1M6|A0A354Z1M6_9GAMM Tryptophan halogenase (Fragment) OS=Xanthomonadales bacterium OX=2006849; GN = DDZ76_01025 PE=4 SV=1
MPADLTPFRVAILGGGTAGWMAACLMATRWQDRPVEITVIESPEIGIVGVGEGSTPQLNVFFRTLGLTEADWMPACNATWKNGIRFRRWSSAPGFDSYFHPFLSVIDVHTQQAFFLSTLLRRNGYDVPAHPDAFFLSTRLAEQRLAPLPARQFPFDMAYGYHFDAFLVGQCLARFAQSLGVRHQQARVDAVDLTDSGDVAALRLDDGSRITADLFVDSSGFRALIGQRALGVPFRAFTDNLFADAAVTLPTPPDPTGTNAHTTATALDCGWVWDIPLRNRTGNGYVYASAFCSADAAEQELRRHLGLLDADVEARHLKMRVGRVEQHWARNCLSVGLSQGFIEPLEATALHLVQATVEGFLDAFDGEGAIETRRAAFNARINRRFDGVRDYIVCHYRMNRRDDTPYWRANREHDRLSDSLKAILSTWFTGADLSAEIERQGIADIYPALSWHCLLAG

SEQ ID NO: 90083 - protein, 507 aa, Colwellia sp.
  REGION 1..507: note = tr|A0A3D3GZZ4|A0A3D3GZZ4_COLSX Tryptophan halogenase; OS = Colwellia sp. OX=56799 GN=DIS98_05275 PE=4 SV=1
MTVGENKQQKINKVVIVGGGSAGWMTAAALAKVLGKNYCKIQLIESDQINTVSVGEATIPQISLFNKILGIDENEFVKQTQGTFKLGIEFLNWNKKKGGYMHPFGDHGRSMHAIQFHHYWLKMFNQGLAPDLEQYSLAAVAAREGKFMRSQNMGDSPLSDINYAFHFDATLYAKYLRKFAEKRGVTRTEGKVVDVSLRDSDGFIDSVILEDGQRINADLFIDCSGFKGLLIEKALNTGFEDWSDLLPCDSAVAIPCKPKDPDKLYPFTQSKAQKAGWIWRIPLQHRIGNGYVYPSKYISDEEAVDILTAQLEGEVIGKPNFLRWKTGIRKKTWNKNCVAIGLSAGFVEPLESTGLHLIQSAIAKLMALFPHQGFNQIDIDTFNKQSKTELEYIRDFIVLHYKVTDRDDSEFWRHCQSMKVSERLQAKIDLYQANGRIYREDNELFNETSWLSVMNGQGLVPSGYHPFVDALTDEDIDNRLKHIHKVIQKSVDVMPLQTDFINENCKA

SEQ ID NO: 90084 - protein, 515 aa, Pseudoalteromonas sp.
  REGION 1..515: note = tr|A0A1R4IBK1|A0A1R4IBK1_9GAMM Tryptophan halogenase, putative OS=Pseudoalteromonas sp. JB197; OX = 1434839 GN=CZ797_00815 PE=4 SV=1
MHHNKIKHIVIVGGGSAGWLTAGLIAAQPHLTRQAKVTLIESPDVPILGVGEGSWPTLRQTLKTIGVSETEFIRQCDASFKQGSRFDGWINDAGNEHYYHPFSLPVGYQQLNIAPYWFGQHHAVSFSHAVSSQSYLCDHHKAPKTHLHCDYQSDANYGYHFDAGKFAELLKRHCIDKLGVTHLVSHVDEVINDADGYISALATRDLGLLQGDLFIDCSGHHARLISQHYAIELEPQEHILFNNRAVAAQVPYSNRQQDILSYTKATAQQTGWIWDIGLQSRRGVGMVYSSEFETAAGATDKLLAYLSNTQKELDTSQLSVRELSFTPGYRSQFWYKNCVAIGMSAGFIEPLEASALVMVELELGLNYLLANFPTQRNAMPHLSKRYDQQCHYRWQRVIEFLKLHYVLSERSSDYWQAHRDTSTIPQTLLDNLALWQYQSPWLNDFDRAQEVFSAASYQFILYGMKHLPAFPKMNMPASIIEHFTNNQQAAKQGLANLPTNRQLLEHIQKFGLQPI

SEQ ID NO: 90085 - protein, 496 aa, Colwellia sp.
  REGION 1..496: note = tr|A0A3D3GW13|A0A3D3GW13_COLSX Tryptophan halogenase; OS = Colwellia sp. OX=56799 GN=DIS98_02880 PE=4 SV=1
MNDKAIKKVVIAGGGTAGWMTAAALSKLFGKNLEVVLVESDDIPTVGVGEATIPTLHIFHRLLGINEQEFMAATNATFKLGISFENWRNVNKDYIHSFGFLGHNCWAADFQHFWLKGKQRGIVSEIGDYVPEHLGARQGKFTVEANQASNYAYHLDAGLYAVFLEKIAEKHGLKRIEGCINKVVVDKDSGFIDSLELVNGKVVEGDLFIDCTGFRGLLIEQALHTGYEDWSHILPCDSAIAVQTKTVGKPVPYTRSIARDAGWQWKIPLQNRTGNGFVFCSKYMSNEEATQTLLANIEGEMLNEPRVIKYKTGSRRKHWNKNCVAIGLSSGFIEPLESTGIHLFQKAIIRLMQMFPSQGIKQADVDEFNTQTKTEVDSIKDFIILHYNLTERKDTPFWRYCSTMDIPETLKHRMLLFKESANVFKKEEELFGETSWVQVMMGQGLMPEQYHPIVDLMDDNELQKFLDNIRLSVKRKVDNWPDHLDFIEQYCKATVK

SEQ ID NO: 90086 - protein, 537 aa, Colwellia sp.
  REGION 1..537: note = tr|A0A3D3GWC1|A0A3D3GWC1_COLSX Tryptophan halogenase; OS = Colwellia sp. OX=56799 GN=DIS98_06705 PE=4 SV=1
MSNQQNPHNIVILGGGTAGWMTANLMASAWQTQLNNGQLSITLIESPAIGIIGVGEGSTPQLKTFFETIGVTEKEWMPACNATYKNGILFQNWSTRPGFTRYFHPFTSVIDAHTAPAFVHNSHFKRQGYDIDSHVDRFFLSATLAAQQKAPIGQENFPFDISYGYHFDAVLMGKYLSKVASTKGVKHIVAKVEQVILAKSGDISQLLLNNGGTVSADLFIDCSGFESVLLQKSLQVPFVSFKENLFNDRAVTIATPRTPQQKINSQTISTAMKYGWAWDIPLTNRTGNGYVYSSQFCSAEQAEQELREKLGLTNNEIKANHLNMKVGRVTEHWHRNCLAVGLSQGFIEPLEATALHFVQETIEGFIVTYNNTATIGLNDANFNKISGDISQQVAAQKVQFNQKMNDRFDGIRDYIVGHYRLSNRSDTEYWRLNSENPNISNNLKKIVQVWLHGEDLNKAFIEGKVKSFYPPVSWHALLAGYGVFPETNQQLAYNAQANKYDLSHIDQFIKRSALNYDDHQVFLTGMQQEDDGDVSNR

SEQ ID NO: 90087 - protein, 492 aa, Porphyrobacter sp.
  REGION 1..492: note = tr|A0A2N4WWC3|A0A2N4WWC3_9SPHN Tryptophan halogenase; OS = Porphyrobacter sp. TH134 OX=2067450 GN=C0V72_05685 PE=4; SV = 1
MTAAALVRVLGAMPGLSVTLIESEAIGTVGVGEATIPQIIGFNRLLGLDEMQFMRETRATYKLGIEFVDWLRPGHAYVHPFGSFGIDMLGIEFQHIWLRGQQAGDTSRIDDYSIAAMAGKSGRFAWPRPDNPKSPMSKLSYAFQFDAGRYARFLRRFAESAGAVRVEGRITDVRRDGETGFVTSVLLDDGREFGGELFIDCSGFRSLLLGQALGVPFTDWSKWLPCDSAVAVPCEIGGRNEPLTRSTARTAGWQWRIPLQHRIGNGHVFSSAHIDRTAATDLLLANLDGKPLADPNQIAFKAGHRERVWDKNVVALGLAAGFLEPLESTSIHLVQSGIARLLALFPDTGFSPAETERFNRESVREYVNIRDFLVLHYRASERDDSEFWRYCRHLPPPDGLAEKLELFRSSGRIIRDNNELFTEDSWLSVMLSQGVQPQTYHPAAWMLDEGETRKRLAHIRDVIAQTVSQLPSQDDFLRANGGAIAAAEYLTA

SEQ ID NO: 90088 - protein, 520 aa, unidentified; identical to SEQ ID NO: 84418
  source 1..520: note = Cellvibrionales bacterium
  REGION 1..520: note = tr|A0A3R7VPU5|A0A3R7VPU5_9GAMM Tryptophan 7-halogenase OS=Cellvibrionales bacterium TMED157; OX = 1986773 GN=CBD17_003410 PE=4 SV=1

SEQ ID NO: 90089 - protein, 502 aa, Microbulbifer donghaiensis
  REGION 1..502: note = tr|A0A1M5FBQ1|A0A1M5FBQ1_9GAMM Tryptophan halogenase; OS = Microbulbifer donghaiensis OX=494016; GN = SAMN04487965_2867 PE=4 SV=1
MNDHKKRVVILGGGTAGWITANLMATHWKDKGFDITLVESPDIGIIGVGEGSTPPLKGFMDVIGVKESEWMPECNATYKVGITFKDWSTKPGFTEYVHPFLAQPDQFTAPAFFHNSFLRRKGVDLEGHPDHFFLATEMIRQKLAPVTPENFPFEIAYGYHFDSGLLGKFLARVAEKKGVKYKSATVTDVLLDTQGNIDCLKTAEGETLKADLYVDSSGFRGQLIQQALKVPFQSCAESLFNDSAVVFATEQEESYAPHTISTALKYGWAWKIPLTNRNGNGYVYSSRFVDDDKAETEFRQHLGLLDSDVEARRLKFKVGRVEQHWAKNCLAVGLSQGFIEPLEATALDMVQETVTRFIEAYNNGNYTDKYRKEFNDRISGRFDAVRDYIVCHYRITSRSDSDYWIANGSNEKISPSLRAILMSWMAGKNITDELLDQKLDVYFPNVSWNCLLTGKGIYPPQEQLRPGNELANKYKMEDIHEFIRRCALNFKSHQEQLQLLRQ

SEQ ID NO: 90090 - protein, 509 aa, Colwellia sp.
  REGION 1..509: note = tr|A0A3D0C9J3|A0A3D0C9J3_COLSX Tryptophan 7-halogenase OS=Colwellia sp. OX=56799 GN=DEO86_09430 PE=4; SV = 1
MSMKKIVVVGGGTAGWLAANHLGKKFKHNSAITVTLIESPDIAPIGVGEGTVPNIRKTLSSFGISETEFIRECDVTFKQSIKFVNWMDKHKQGSDNFFHHLFDAPDKYAEDLTPYWLNHGQDSRYADMLSPQHSACEHNKAPKSITTPEYEGTLGYAYHLNAAKFAHLLCKNAVGKFAVEHLKANVIDVELNNDGAITSLVTKELGKLEYDFYLDCTGFESLLLGKALNVPFVDKSKELLVNSALVVQVPTQEEDEIPPYTVATAHQAGWIWDIALTNRRGVGFVYSNNHMSDDEAKTKLDHYLKGNPAGLTYRKLPMKVGHREKFWHKNCVSLGLAQGFLEPLEATSILLTDFAASYLADRFPESDEQMVMLEQRFNHVMGYAWDRVVDFIKLHYCISDRTDSQFWLDNKKAETIPDTLKARLHLWQQFSPQKEDFFSKFEIFDYDNYLYLLYGMNFKTKLASLPSHSHDKSKVQAEGIKAIAAQLNLQLPSHRELINKIKQYGLQAI

SEQ ID NO: 90091 - protein, 384 aa, Pseudomonas sp.
  REGION 1..384: note = tr|A0A2R7RRG1|A0A2R7RRG1_9PSED Tryptophan halogenase (Fragment) OS=Pseudomonas sp. HMWF010 OX=2056847; GN = DBR41_28015 PE=4 SV=1
DHWSAGFQHFWMHGLTKGHVHSYDDYCLELKAALEGKFAHLPDERMNYAYQLDSTLYAAFLRKMAEGEGATRIEGKIARVELDGTTGNIAALCLDGDRRVEGDLFIDCTGFRALLIEGALHAGYDDWSHYLPCDSAIAVQTASVRPPVPYTRAIAHDAGWQWRIPLQHRQGNGIVYCSRYLDKDAALDRLLGSVEGEVLTKPNVIGFTTGARRKQWHRNCIAVGLSGGFMEPLESTSIHLIQRAILRIIRMLPNGKVSERDIAEFNEQQFADMYQIRDFLVLHYKVTERRDSPFWRHCAALPIPESLEQKIELFRETGRVFRRNEELFAENSWVQVMMGQGIMPETYHPVATKLPPEELEGFLAAQREAVANTVARLPDQQSYL

SEQ ID NO: 90092 - protein, 507 aa, Shewanella putrefaciens
  REGION 1..507: note = tr|A0A252EW56|A0A252EW56_SHEPU Tryptophan halogenase; OS = Shewanella putrefaciens OX=24 GN=B7D78_08000 PE=4 SV=1
MTIRKIAIIGGGTSGWLAANHLGRVLQGRSELSITLIESPDIPIIGVGEGTVPSIRKSLQSFGISESEFIRSCDVTFKQSIKFVNWLDKARHGKDNFYHHLFDIINLQGVDTVSAWLGEKQGDFADYVSPQHLVCEAAKAPKLITTPEYAGVLGYAYHLNAAKFAKLLAKNAIEKFNVEHIFATVQDVRLGDDGAISSLLTEQGTLSFDFYIDCSGFESILLAKALKVPFISKAHQLFIDTALVAQIPTQPTDIIPPYTQATAHRAGWIWDIALTQRRGTGFVYSSAHMAQSEAERKFDHYLGGKLADVPHRKIPMTVGHRQQFWVKNCVALGLAQGFLEPIEATSILLTDFSARFLAERFPVHTDDVDYLAKRFNDTVGYAWERVVEFAKLHYCLSDRTDSSFWLDNQASETIPEGLRQRLELWKSYSPIAEDFPSKFEVFNLDNYLYVLYGMKYQTNLCGGSSATQASLNMYMNKMSKVKQQMLDGLPEHRELLDKICTYGLQSI

SEQ ID NO: 90093 - protein, 530 aa, Caulobacter sp.
  REGION 1..530: note = tr|A0A4R3H178|A0A4R3H178_9CAUL Tryptophan halogenase; OS = Caulobacter sp. BK020 OX=2512117 GN=EV278_110131 PE=4; SV = 1
MSQAINDILIVGGGTAGWMTAAYLARRLGSTRPDGVRITLIESSEIGIIGVGEGTFPTIQNTMRTLGVDEARFMREAGAAFKQGIRFVDWKTAPRDGVHSHYYHPFAQPRLLNGGLDLAPYWLMGEAGDIPFSDAVTLQDKVCEAMRGPKRLDDPQYGGPMAYAYHFDAGKLASLLREVGKATGVKHLLGNVLTVNKAEDGSIASVTTREHGDLVADLYVDCTGFAGALIGEAMGSAWIDRGDTLFVDRALALQVPYERPDAPVATTTISTAHEAGWTWDIGLPDRRGTGYVYSSRHTTDERAEQVLRGYVGRAGDGLTPRLLKLKVGHRQAHWIGNCVAVGLSGGFLEPLESTGVVLIEAAAYMLARNLPRRGGMDAAARQFNAAMTDRYLRAIDFIKLHYCLSQRTDNRFWTDNADPASIPETLLDHLAMWKHRPPNVFDFPNLHESFKYFNYQYILYGMGFETTVDPAAHVHGDLARADFARVREAGLRAAASLPDHRALLTDIYTRGFSTQAPGLATAEAGEAPRR

SEQ ID NO: 90094 - protein, 506 aa, Xanthomonas arboricola
  REGION 1..506: note = tr|A0A2S6Z0Z5|A0A2S6Z0Z5_9XANT Tryptophan halogenase; OS = Xanthomonas arboricola pv. populi OX=487823; GN = XaplCFBP3122_17580 PE=4 SV=1
MIPAPLRNIVIVGGGTAGWMAAAAFARVLGPGFNVQLIESEQLGTVGVGEATVPHIKAFNNLLGIDEAEFVRQTQGSFKLGIEFVDWQRPGTSYIHGFGTQIGHPLGLLPFHQYWIKQHLRGKAQPLGAYTLNTVAAVRGKFMTSAGDVPANSPLANIAYAYHFDATQYARFLRNYSEQRGVTRIEGLVEQVQLHADSGRVQSLQLASGQVVSGDLFIDCSGFRGLLIEEALHTGYHDFTHWLPCDRALAVPSENVGPPTPYTRSTARAAGWQWRIPLQHRTGNGYVYSSAHISDDEAAATLLANLDGRPLADPRPLRFTTGRRKQFWNRNVVALGLASGFLEPLESTSIHLIQAGISRLLELFPREGISPVLVQRYNDRLAFEFDRIRDFLLLHYHATERDDSAFWRHCRTMPITPELQTTLDLFCDSGRFYRNAEKMFAEISWVQVMVGQGILPQGYHPLVDQVPDHDAEGFLASVAQTIGHCVDVMPTHQQFIDRYCKAAAPR

SEQ ID NO: 90095 - protein, 502 aa, Altererythrobacter sp.
  REGION 1..502: note = tr|A0A369Q813|A0A369Q813_9SPHN Tryptophan 7-halogenase OS=Altererythrobacter sp. HME9302 OX=2161824; GN = prnA PE=4 SV=1
MAIGKIVIVGGGTAGWMAAAAMSRLVSGNDVSVTLVESEQIGTVGVGEATIPHFVDFNRLLDIDEREMLSEVQGTFKLGIQFVNWGQIGESYFHPFGNYGYQIDGVDFHNIWLKQRMEGNDRPIHAFSAETIAAMHRKFSRTEDFQRDDLPPINYAYHLDAGRYAQYLRKYAEARGAVRREGKVADVALYGETGHVASVTLDSGDVIEGDFFIDCSGFRGLLIEQALASGYEDWSQWLPCNRAVALPCTNDGGTLPYTRATAHSAGWQWRVPLQERNGNGHVYCSEYMSDDEAHAILRNNLDGEVLAEPNFLRFTTGRRNKFWNGNVVALGLSAGFMEPLESTSIHLINTGISKLVALFSLDGVTQAQEDAFNRLTGKEYARIRDFLILHYKATQRTDSAFWDYCRTMDVPETLQEKIDLFRANGQIFREEDELFTATSWVAVMLGQGIAPTGYNPMTATLKEPALSEELSEVERSITHLVGAMPSHRDYVQKYCPAPATMS

SEQ ID NO: 90096 - protein, 509 aa, Porphyrobacter sp.
  REGION 1..509: note = tr|A0A2N4WTL4|A0A2N4WTL4_9SPHN Tryptophan halogenase; OS = Porphyrobacter sp. TH134 OX=2067450 GN=C0V72_08425 PE=4; SV = 1
MTQPAPLKSIVIVGGGSAGWMTAAALSHAVGSACAITLIESEAIGTVGVGEATIPPIRHFNQRLGIDEATFVRETQGSYKLGIEFVDWGELGHRYFHPFGQYGAEFDSVPFYHHWMHEHLAGRIDGPIDDFSMCWAMARAGKFSHPAADRRMIQSTFDYAYHFDAGLYAAFLRRFAESRGVVRKEGRVVDVASRAEDGFIAAVTLDDGTRIAGEFFVDCSGFRGLLIEEALEAGYDNWQHWLPCDRAVAVPSERAGERGEFTPYTRSTARAAGWQWRIPLQHRTGNGYVHCSQFISEDEAAATLLANLDGKALADPRTLRFVTGKRREFWKRNCVAIGLSAGFMEPLESTSLHLIQYGILRLIALLPDSAMSPLLAREYNAQTALEYERIRDFLILHYKASTRDDSELWRYCAAMPIPDSLQYKIDHFREGGMLVSDERELFANPSWIAVYLGQGIVPKRAPALAEMRGSVPVAERLAQIRQAMAEAVAAMPSHGEFVARHCAAPPISA

SEQ ID NO: 90097 - protein, 501 aa, Caulobacter sp.
  REGION 1..501: note = tr|A0A4R3HEZ2|A0A4R3HEZ2_9CAUL Tryptophan halogenase; OS = Caulobacter sp. BK020 OX=2512117 GN=EV278_102292 PE=4; SV = 1
MNDGPQQHIVILGGGAAGWIAAALLAKQTDRRQTRITLVESEEIGIIGVGEATVPLLAQCNAMLGIDEFDFIRRTQGTFKLGIEFCDWGVAGNRHFHAFSDYGHPVQGVSPHHYWLRLRQAGDERPIDDYSFAYAVAKDNRFAPSDPENSRYHHAYHFDAALYARYLRDVATELGVQRIEGKMTHVDLDGDTGDIAGIHLANGVTVPGDLFLDCTGFASELLGKALGTPFVDWSRWLLCDSALAVPSKRAGPPMPFTRSTAHAGGWRWTIPLQHRSGNGMVYSSQFWSDEAAREALLGAIDGEPLAEPRLFRFTSGHRKQFWNRNCIGIGFASNFLEPLESTGLQLIVMGILKLFKYFPQRTIDPALRDEYNRVSTREIERIRDFIIAHYHLSRRPEPLWAACRDIDIPDSLRHKLEVWTASGQIALGDLESHVEPSWLAILLGNGAVPARYNVLADLHSLEQIREGMRLRREEILRSAQAVTSHQDFIDRYCKAPQAAAR

SEQ ID NO: 90098 - protein, 196 aa, unidentified
  source 1..196: note = Sphingomonas hengshuiensis
  REGION 1..196: note = tr|A0A2W5CRV3|A0A2W5CRV3_9SPHN Tryptophan halogenase (Fragment) OS=Sphingomonas hengshuiensis OX=1609977; GN = DI607_03575 PE=4 SV=1
VGDDAPAARHLRMKVGRIEKVWTANCLAVGLSQGFIEPLEATALHVVQATVEGFINAWQSGGFTPRHRDRFNASIAARFEGIRDYIVCHYRANQRDDTDYWRDNATNPHISMSLADVLACWRSGGDLVAEIERQGIATYYSTMSWHCLLSGYGCYPPDHALHAAQGGSDMAQIDDFLARCATNFAPHHVQLASLAH

SEQ ID NO: 90099 - protein, 522 aa, Streptomyces sp.; identical to SEQ ID NO: 88858
  REGION 1..522: note = tr|A0A069JZE3|A0A069JZE3_9ACTN Tryptophan halogenase; OS = Streptomyces sp. NTK 937 OX=1487711 GN=DT87_23565 PE=4; SV = 1

SEQ ID NO: 90100 - protein, 500 aa, unidentified
  source 1..500: note = Novosphingobium ginsenosidimutans
  REGION 1..500: note = tr|A0A5B8S3V7|A0A5B8S3V7_9SPHN Tryptophan 7-halogenase OS=Novosphingobium ginsenosidimutans; OX = 1176536 GN=FRF71_08605 PE=4 SV=1
MGDGRPYRIVILGGGTAGWMSAAALARFAPATHSITLIESEAIGTVGVGEATIPAIMLFNQALELDEAEFLRETMGSFKLGIEFAGWLKPGHSYMHAFGEVGRQLGLLPFRHYWARGRKLGLAKPLAHYSPNELAARTGRAGPGAPGVSLPYAYHFDAGLYAGYLRRYAEARGVTRHEGKIASVQRAESGDIAAVTTDDGRSFEGDFFIDCSGFRGLLIEQELGAGYEDWRHWLPCDRAVAVPCAASGDFTPYTRSTARSAGWQWRIPLQHRIGNGHVYCSEFISDDEATAVLLANLDGPPAADPRPLQFVTGRRRKFWDRNVLAVGLSSGFMEPLESTSIHLIQSTITRFLTVLPGGPVDDAVRDGFNRRAALEFERIRDFLILHYWANQRHGEPFWDHCRNMDLPDSLKARIEEFQAACVIQPSADELFTEVGWLQVMVGQGLEPASWNPIADGLSDADLGRFLDGVERAAIEAVRPMPQHIDYLASLVTAEAARGAA

SEQ ID NO: 90101 - protein, 524 aa, Caulobacter sp.
  REGION 1..524: note = tr|A0A4R3H089|A0A4R3H089_9CAUL Tryptophan halogenase; OS = Caulobacter sp. BK020 OX=2512117 GN=EV278_1186 PE=4 SV=1
MSASASERANLRGQPIRRVVIVGGGTSGWMAAAALARMAPPDLSITLVESDEIGTIGVGEATIPTLADFNAFLGVDEDDFVRQTQATFKLGIEFVDWGRMGERYLHPFGVHGHPTPEFKFHQLWLRLVHWAGDDPERRALVGDLGDYNVGTVAARLGRFSRPQAGVHNVLSTIRHAFHFDAGLYARYLRAYAEARGVVRLEGMVVGAQQRPQDGFFEAVRLRDGRVIEGDLFIDCSGFRGLLINGVLGAGFIDWSRYLPCDRAVAVPYERTAPPDPFTRATADLAGWRWRIPLQHRMGSGYVYCSDHLSDQAATDRLVSQAEGRLLADVRPLRFTAGLRERFWVKNCVAIGLAGGFLEPLESTSIHLAQMGVARLILLWPDLAFGQAEIDEYNTAARLEYEQIRNFIILHYKATRRVDTEFWRRCGAMQIPDGLAHKIELFASSGRVFRFQDDLFTEDSWLAVMLGQGVRPQGYDRLVDRIAHDELLTNMGRLKDVVLKSALSLPAHQTFINTHCRGATGIAPA

SEQ ID NO: 90102 - protein, 520 aa, Xanthomonas arboricola
  REGION 1..520: note = tr|A0A2S7B1H2|A0A2S7B1H2_9XANT Tryptophan halogenase; OS = Xanthomonas arboricola pv. populi OX=487823; GN = XaplCFBP3123_15975 PE=4 SV=1
MTDTAPSDPQQRPVRRVVVAGGGTAGWMAAAALSKVLGRHLQITLVESDEIGTVGVGEATIPSLVTFHRLLEIDEAAFMAATQATIKLGIGFEHWRDVDRHYIHSFGHTGTDHWSAGFQHFWLKGRQRGVARDFGDYCLELRAAQEGRFAHLPNGGMNYAYHLDAGLYARFLRRFSEGFGVQRIEGRIGRVETDAHSGYLTALTLDNGTRVEGDLFLDCTGFAGLLIGKTLGVGTDDWSQWLFADSALAVQTESVGAPVPYTRSRADQAGWMWRIPLQHRVGNGIVYSSRYMDQDSAAQVLQRNLSGWALTQPRALRFTPNQRHRVWEKNCVALGLASGFLEPLESTNIHLIQRGIIRLMQTFPQVINAVDIAEYNRQAAAEITHIRDFVILHYHATDRRDTPFWRDCAAMDIPDTLRHRVELFRQSGRVFHQANELFAENSWVQVMLGQGITPKQHHPVADLMGDAELSHFLETIRTRVDAALVRLPAHADFLRRYCPAPLPDPATRLPADAALATGAG

SEQ ID NO: 90103 - protein, 503 aa, Colwellia sp.
  REGION 1..503: note = tr|A0A3D3GWY5|A0A3D3GWY5_COLSX Tryptophan halogenase; OS = Colwellia sp. OX=56799 GN=DIS98_06710 PE=4 SV=1
MSATDKINDIVIVGGGSAGWMTAAMLAKQLEANVNITLVESDDIGTIGVGEATIPPIKAFNRLLGIDENDFLKKCNGSIKLGISFENWSQKNHSYFHPFGRFAVDFDYMPFGYFWNKQRESGNAKPLQEYASAWHLAKHDKFSLPTNDPKSLFSGFDYAYHFDSSLYANYLKEYATKRGVIRQEGKINHVSTHANNGFIRSVTLASGQVINGDFFIDCSGGSALLINKTLGVKFIDWSEHLLCNRAIAVQTKHVKPISPYTRSIAGEAGWQWRIPLQTRMGNGFVHSSHFIDEQQAIDKLVDSVDGELLTDPRVINFKVGRREKFWYKNCVAIGLSSGFLEPLESTSLHLIQRAIMRLIYLFPNKHCDEINTRFYNKQSIEEYEHIRNFIILHYKATQRDDSEFWRYCQHMQVPDSLQQQIELFATHGHLDLNGKDLFKQDNWLAVLTGQGIHPKSVAPIMAYKQKIDLPRTLNSFYDMMTKTVQQMPNHEDYLRKKCNFSLK

SEQ ID NO: 90104 - protein, 454 aa, Amycolatopsis sp.
  REGION 1..454: note = tr|A0A429F0Q6|A0A429F0Q6_9PSEU Tryptophan halogenase; OS = Amycolatopsis sp. WAC 04182 OX=2203198 GN=DMH01_32870; PE = 4 SV=1
MDDYDVIVVGGGPGGSTAAGLTAAEGHRVLLLDKDRFPRYQIGESLLPATIHGICAMLGVRDEIDRAGFVRKRGGTFKWGTGAEPWTFSFAASDRMAGPTSYAYQVERTRFDALLLDGARRLGAEVRQGHRVLGTIQAGERIGGVRYLDDAGHERQATARFVVDASGHGSRLHHDVGGTREYSPHFRNLALFGYFEGGRRMPAPDTGNILCVSFPDGWFWYIPLSDTLTSVGAVVKHEAADRVQGDPDVAYSALIEDCPLIEEYLRDARRATEPPYDRLRVRKDYSYDRTVLWSPGMVLVGDAACFIDPVFSSGVHLATYSALLAARSINSTLAGFSDEKRCFAEFEARYRREFGLFRDFLISFYQLDSDEDDYFRQARRLTGRHGAAEAAFAGLVGGVSSQDFSRAMFGDVLAEGVQLQLRGLLGEAAGDEPPMFPGGLVPTADGRRWRVPDA

SEQ ID NO: 90105 - protein, 504 aa, unidentified
  source 1..504: note = Caulobacter zeae
  REGION 1..504: note = tr|A0A2N5DHM6|A0A2N5DHM6_9CAUL Tryptophan halogenase; OS = Caulobacter zeae OX=2055137 GN=SGCZBJ_11045 PE=4 SV=1
MVDQRIRKVVVVGGGTAGWMAAAAFSRLLVDDAVSVEVVESEAIGTVGVGEATIPTIRNFNQTLGLDEVEFIRATQASFKLGIDFRDWGRVGHRYFHGFGDFGTDHEAVQAHQLWRRLRALGDPSSLEDWSLPTAAAALNRFIPPSPDPRSPLHDYAYAYHFDAGLYAAFLRRYAEARGVMRAEGKIVDVALRGEDGFVEAVVLEDGRRVEGDLFVDCSGFRALLIEGALKAGFEDWSRWLPCDRALAVPCKLGGDGLTPYTRSTAREAGWQWRIPLQHRIGNGYVYSSAFVDDERAARTLMENLDGQALDDPRQLRFLAGRRRKFWDRNVVAVGLSGGFLEPLESTSISLIQNGVARLLEFFPDRRCDPLLADEFNRVSAQEYERIRDFIILHYCINQRDEPMWRQVREVELPDSLRAKIALYKARGHVAIHEGDGFGRPSWIAIYNGLGVVPEAYDPLADRIPEAELRKLMEHRRALIRHTAQSMPTQDAFIARHCAAAPIG

SEQ ID NO: 90106 - protein, 515 aa, Porphyrobacter sp.
  REGION 1..515: note = tr|A0A2N4WS86|A0A2N4WS86_9SPHN Tryptophan halogenase; OS = Porphyrobacter sp. TH134 OX=2067450 GN=C0V72_11240 PE=4; SV = 1
MARRGWTGIEENVAIERIIIVGGGTAGWMAAAALSRIKAGRAVDITLIESEAIGTVGVGEATIPPFVGFNQLLGINEAEMLAEVGGTFKLGIQFENWGKLGDSYIHPFGAYGYTMGGISFHHVWHRMTRAGDKRPIQVFNLETMAAYFGKFARTEDYTRDDLPPVNYAYHLDAGRYAAYLRRFAETRGVVREEGRIADVALDGETGFVTSVTLDDGRRFAGDLFVDCSGFRGLLIEQALRTGYDDWSHYLPCNRAVALPCQREDGSPPPPFTRATAHSAGWQWQVPLQHRNGNGHVYCSSYMEDSQALDILLGNIAGKPQAEPNWLRFTTGRRKKFWNKNVVALGLAAGFMEPLESTSIHLVNTGIDKLISLLSLDGITKVQEDTFNRLTGREYARIRDFLILHYNATQRSDSEFWNYVRTMAVPDTLTEKVEIFRANGQIFREEDELFTETSWAAVMMGQGITMGGHNAMADAIDSPAARAEVDEMEKSIRYMVQHMPGHGDYLARYCPAPMAA

SEQ ID NO: 90107 - protein, 354 aa, Pseudomonas sp.
  REGION 1..354: note = tr|A0A2R7RPD8|A0A2R7RPD8_9PSED Tryptophan halogenase (Fragment) OS=Pseudomonas sp. HMWF010 OX=2056847; GN = DBR41_29300 PE=4 SV=1
PIIAARTGRFAPPSPDPRALASTFAYAYQFDAGLYAAYLRTYAEARGVVRTEGRIRDVTLRGEDGFIEAVVLESGERIEGDLFIDCSGFRGLLIEQALKTGYEDWTRWLPCDRAAAVPCEAVEPPGPYTRATSDEAGWRWRIPLQHRVGNGYVYCSGYISDDEAAKVLLEKLDGRPQADPRFLRFTTGRRRRQWNRNCVAIGLASGFLEPLESTSIHLIQVAITTLLEMFPDQSCAQADQDEYNRVMDLEFERIRDFLVLHYHATQRDDSPFWRDKAAAPIPDSLSYKMALFRERGMVVKYRDGFFLEPSWLAVYLGQNIMPQGYDPMTDAIDPKDSARLLGELQAAVARTAQA

SEQ ID NO: 90108 - protein, 496 aa, Caulobacter sp.
  REGION 1..496: note = tr|A0A0Q8FUL8|A0A0Q8FUL8_9CAUL Tryptophan halogenase; OS = Caulobacter sp. Root655 OX=1736578 GN=ASD79_11205 PE=4; SV = 1
MAEQVVKKVVIAGGGSAGWMAAAALSKQLGPLLDITLIESDDIGTVGVGESTVPTARTFNALLNLDEPEFMSACQATFKLGISFENWGEIGDRYIHSFGQIGKSTWLGDFHHFWLQAKAQGFGGDLGDYCLELKAAEDHRFFTDENASLNYAYHIDATLYGRYLRAKSEGKGVRRVEGKITSVKQRSDDGFIEALVLESGEVIEGDLFIDCTGFRSLLMGGALEVGFEDWTHWLPNNSALAVQTRTDAPAYPYTRAIAHRAGWLWGIPLQGKIGNGFVYSSDHMSDDEAQAGLRDMIEGEMVAEPRLIRFRAGRRRKAWHKNCVAIGLAAGFIEPLESTSIHMIMVAVHRLLQLFPFAGCNEALSDRFNHLADDEIEKIRDFVVLHYKLTERTDSPFWDHCRTMEIPDSLAHRIALFRDSGHVFRAPGELFQTDSWLQVMLGQRLRPSGHHHMGRLMPPEQLRQALNDLKGNIARAVDRMPSHQAFVDRYCPVAPA

SEQ ID NO: 90109 - protein, 533 aa, unidentified
  source 1..533: note = Gammaproteobacteria bacterium
  REGION 1..533: note = tr|A0A2M7ZX56|A0A2M7ZX56_9GAMM Tryptophan halogenase; OS = Gammaproteobacteria bacterium CG_4_9_14_3_um_filter_38_9 OX=1974022 GN=CO120_07620 PE=4; SV = 1
MQKTQSNIKDIVIIGGGTAGWMSATYIAKSLNFQVNITVIESAEHSPIGVGEATIPTIKTEFFDRLGIPEEEWMPKLGGTFKMGIKYANWKTPAEKGGDHYYHVFGEIPLIDEVPLSSVWIKQYLEGQTKQSFAEACFPSAVAFDHHLSPRLLDGTKVQHYAYHFDALMLAQYLKEWAITRGIRHVVDKLVSTEQDADGQITCVIGQSGKKYPADFFVDCSGFAGFLIDKVYQEPIVSFNDFLLTDRAIAINIPDAPNNTDIRSYTTATAMKAGWTWEIPLYQRSGNGYVYSSQFISDQEAQDEICQHFGKRVEGLNLRPIKFQSRRHRHSWVKNCVAIGLSSSFLEPLESSTIYFIYAALYQLIKCFPQKNIDPVLREKFNKKINYMVDDNRDFIAMHFKTVQREDTEFWRVNKYETKIPETLELILQKHKSGLPIKRPTVDNNNIYPTFKSLFQNFWTETNYQCILCGVGYLPNNPYPLLNYREDIMTIGKQLLQQITKRQKELMKILPTHYEYLTHQLEHSKMKKEKVDA

SEQ ID NO: 90110 - protein, 509 aa, unidentified
  source 1..509: note = Caulobacter zeae
  REGION 1..509: note = tr|A0A2N5DMN1|A0A2N5DMN1_9CAUL Tryptophan halogenase; OS = Caulobacter zeae OX=2055137 GN=SGCZBJ_08000 PE=4 SV=1
MSEAIRNIVVVGGGTAGWMTAAALAQTVGTQRYSITLVESEQIGTVGVGEATIPMILLFNKVLGLDEDVFIRETNATFKLGIEFVDWRRLGHSYFHPFGLYGADMDGVGFQHFWLRWARESGDRNHDGFNAETLAAATGRFMRTPPAPNLPKINYAFQFDAALYAAFLRRYAEARGVVRVEGKIAGVERDGESGHVSRLVLDDGRTIDGDFFVDCSGFRGLLIEETMGAGYDDWSRWLPCNRAAAMPCERAGQLTPYTRATAREAGWQWRIPLQHRSGNGYVFCDAFIGEEEAVRLLGERLDGAALAEAKVLKFTAGRRRKSWIGNVLAIGLSSGFLEPLESTSIHLIQAAIAKLLTLFPKTGFDPFVVDKFNREMALEYEKVRDFIIAHYKVGERDDTEFWRWCRDMVPPDSLAQRLEVFRTRGEVLIDQKELFKETNWFAILVGQGLVPDDHHAVADAISSEELRSRMGRIRAAINERVAGMPPHDLYLEKAGLLGAAARAGRRAPA

SEQ ID NO: 90111 - protein, 512 aa, unidentified
  source 1..512: note = Caulobacter zeae
  REGION 1..512: note = tr|A0A2N5DFT8|A0A2N5DFT8_9CAUL Tryptophan halogenase; OS = Caulobacter zeae OX=2055137 GN=SGCZBJ_11885 PE=4 SV=1
MSEDVRNGRIRSIVIVGGGTAGWMAAASLRRHFGKAPIDITLVESSEIGTIGVGEATIPTIRNFYQSLGLDDLEVLRATQGTCKLGIRFKDWMAPGSAFIHPFSLYGQDLNGVPFQHYWLKARSVAEVGEMGEYSLGASLAAAGKFTVPAANPPSSLSVFDWALHFDAALFAQLMRRVAEANGVRRIDAKVVKVNLRPEDGFVASLDLHTGQSIEGDLFIDCSGFRGLLIEEALQTGYEDWSQWLFCDRALAVQSQPPEGAEPPPYTDVTAHSAGWRWRIPLQHRYGNGYVYSSRHIDDQAAEAELVAAVPDRLLHEPRLIRFTPGRRKKVWNRNVVALGLASGFLEPLESTSIALIETGIEKLKALFPDRSFDPAVVDEFNDWSRREMERVRDFVVLHYKAAQRGDTPFWRTTRDADVPETLARKVELFRSRGHIARYRWEMFQPPSWLAIFAGFDILPGGWDPALDGIDGAALAASLNQMRAGVARAVAQASTHGDFLRRYVGQAPAAAE

SEQ ID NO: 90112 - protein, 504 aa, Caulobacter sp.
  REGION 1..504: note = tr|A0A0Q8FYF4|A0A0Q8FYF4_9CAUL Tryptophan halogenase; OS = Caulobacter sp. Root655 OX=1736578 GN=ASD79_22890 PE=4; SV = 1
MAHLNKIVIVGGGSAGWICAAMLSHYFQNGPTQVELIESEEIGTIGVGESTIPPFLQLIRTLGIDEQDFIQQTQAAFKLAIRFENWRKKDEVYYHPFGQIGGPLEVNEFYQCWLRAKQNGHPSGLQDFAPATVMADTGKFMLPGKAQRTMIANANYALHIDARLVALYLRKFAEARNVKRTEGIVTDVVTRPDGGIEKVIMKDGREVAGDFFIDCSGFRSLLIGKTLGEPFRDWSDVLLCDRAVATQTENISPPHPYTLAQAQDFGWRWRIPLQHRAGNGYVYSSKYLSDDEATATLLSQTEGEVLRDPWVVHFKTGMRERLWVKNCVAIGLAGGFIEPLESTALHLIYKGMDYLLRFFPDMDADQTLAAEYNRRMTVDYEEIRDFVVLHYAVTQRDDTPFWREYQKVELPESLQQRIALFKAGAVLRDGVDDMFRAPSWQSVMEGMGIRPQRYQQLVDRIPLSVINNMLDKSAPMLAEFVATLPNHEDFLREHCPAEPLKRSA

SEQ ID NO: 90113 - protein, 239 aa, unidentified
  source 1..239: note = Sphingomonas hengshuiensis
  REGION 1..239: note = tr|A0A2W5C0B8|A0A2W5C0B8_9SPHN Tryptophan halogenase (Fragment) OS=Sphingomonas hengshuiensis OX=1609977; GN = DI607_12195 PE=4 SV=1
MKPVRIAILGGGTAGWMAANLFAHAWPLARITVIESPEIGIIGVGEGSTPQLKAFFDRLGIAERDWMPACNATYKNGIGFHGWSARAGAESYFHPFPTMIDVHTADAFFNHSAARRRGMAAEAHPDRFNLPARLAAEQRGPIPGDSFPFAVSYGYHFDAYLVGAFLREHAVARGVIHLPQRVREVRVAPDGAVQALMTEDGAAVEADLFVDASGFASVIAQTALGVPFRSFADNLFNDS

SEQ ID NO: 90114 - protein, 501 aa, Caulobacter sp.
  REGION 1..501: note = tr|A0A4R3H868|A0A4R3H868_9CAUL Tryptophan halogenase; OS = Caulobacter sp. BK020 OX=2512117 GN=EV278_105227 PE=4; SV = 1
MTDHRLRRIVIVGGGTAGWMTAAALGRFLKDGRTQVTLVESEEIGTIGVGESTIPQINIFNRMLGLDENEFVRRTKATFKLAIDFVDWKQIGHRYYHPFGPYGLDMEGVSFHAYWLRLNAMGEAADLTEYSLQALASAQGKFMRANGQRNSPLGTLSHAYHIDAGLYALFLREYAEQRGVARQEGRIVEVHQRVEDGFIEAVTLQSGQRVEGDLFIDCSGFRGLLIEQTLKTGFEDWSHWLLNDRAVAVPCALAGSRQPVTRATARPTGWQWRIPLQHRLGNGYAYSSAHVSDDEATADLLANLDGVPLRDPFTLRFTAGRRKKSWNKNVVAIGLSAGFMEPLESQSIHLIQVGIARLLAMFPDRRFQTPDIDRYNRVMQFEYETIRDFLILHFHVTRRNDTPYWDYLREMPIPDYLADKMAVFQSYGRVFRENEELFTDTSWFAVMVGQGLEPRGHDPMADVMSDDELRARMANIHAVIAKSAQAMPDHMRFIAENCAAA

SEQ ID NO: 90115 - protein, 509 aa, unidentified
  source 1..509: note = Caulobacter zeae
  REGION 1..509: note = tr|A0A2N5DMR4|A0A2N5DMR4_9CAUL Tryptophan halogenase; OS = Caulobacter zeae OX=2055137 GN=SGCZBJ_07990 PE=4 SV=1
METSAPLDIVIVGGGTAGWMVGTALVSGLRPHQARVRLVESDEIATVGVGEATIPAMRDYNRFVGIDEVEMMRETNGTFKLGIEFLDWGFKGSSYHHPFGVHGAAIGGAGFHHQWNRARLAGHDLDIEQFSYAIAAARDDRFEFPNPDPDKIDSTYSYAYHFDASLYAKYLRKVAEGRGLKRTEGKVVDVARDPLSGDVASITLASGEVVRGDFFVDCTGFRGLLIGQALNSPFEEWTDWLPCDRAWAVPCARAGRFTPFTRSTAREAGWQWRIPLQHRTGNGYVYSSRYISDDEAAATLMANLDGEALAEPRQIRFKAGRRTASWTRNVMAAGLASGFLEPLESTSIYLVQIAVMNLLKLFPGKRVEPALVEEFNRRVDMEYDRVRDFLILHYHANTRTDGELWKHCREMEIPESLKHKLELFRHRGVAPNYHDGLFALPSWISVLLGQGVLPGGYDRMVDNVPLPQALAEMERQRSAIARRVPAMPMHADFVASHCAIPRPIAEAVA

SEQ ID NO: 90116 - protein, 504 aa, Caulobacter sp.
  REGION 1..504: note = tr|A0A4R3HBK6|A0A4R3HBK6_9CAUL Tryptophan halogenase; OS = Caulobacter sp. BK020 OX=2512117 GN=EV278_10229 PE=4; SV = 1
MAHLNKIVIVGGGSAGWICAAMLSHYFQNGPTAIELVESEEIGTIGVGESTIPPFLQLIRTLGINEQEFIQETQAAFKLGIRFENWLEKGDVYYHPFGQIGGPLEVNEFYQCWLRAKQNGHPSKLQDFAPASVMAQAGKFMLPAAAQKTMIANANYALHVDARLVALYLRRFAEARGVTRTEGVVTDVATRSDGGVQKVILKDGREVAGDFFVDCSGFRALLIGKTLGEPFRDWSDVLLCDRAVVAQTENVGPPHPYTLVQAQDFGWRWRIPLQHRAGNGYVFASKYLSDDEATATLMSQIQGEVVLGPNIIPFKTGVRERPWVRNVVSIGLSCGFIEPLESTALHLIYKGMDYLLRFMPDMDADPILAAEYNRRMVADYEEIRDFIVLHYVTTRRDDTPFWRDYQQVAPPESLRERMALFKAAGVLRDGVDDMFRAPSWQSVMEGMGVRPDRYQQLVDRIPLSVIMNLMDKSAPMLAAVVAALPSHEEFLRTHCPAAPLRRSA

SEQ ID NO: 90117 - protein, 533 aa, Streptomyces sp.
  REGION 1..533: note = tr|A0A024YP53|A0A024YP53_9ACTN Tryptophan halogenase; OS = Streptomyces sp. PCS3-D2 OX=1460244 GN=AW27_14945 PE=4; SV = 1
MTSTDTRLQKVVILGGGTAGWMTAAYLGKALQGTVDITVLEAPTIPRIGVGEATVPNLQRSFFDYLGIAEDEWMRECNASFKMAVRFVNWRTDGQGESTARELPGGGPDHFYHPFGLLPDYDQTPLSHYWFKRKYEGRTTEPFDYACFREPPVMDAMKAPRWLDGRPATRYAWHFDAQLVADFLRRFATEKQGVNHVQDEMVRAEQDSRGHVTTLHTKGGLALDADLFVDCSGFRGLLINQAMQEPFIDMSDHLLCDSAVATAVPHDDEANGVEPYTSAIAMSSGWAWKIPMLGRFGTGYVYSSKFTDQDAATREFADMWGLDVEETKFNHIRFRVGRNRRAWVKNVVSIGLSSCFLEPLESTGIYFITAAIYQLAKHFPDKTFNEGLIDSFNHEIEVMFDDTRDFIQAHFFYAPRNDTPFWQANKKLVLPDNIKQKISAYKAGLPINSPITDESTYYGNFEAEFRNFWTNGSYYCIFAGLGLEPDAPLPTLAHRPESVAGAEPLFDTVKRQQQNLLETLPSAYDYLRQLHGA

SEQ ID NO: 90118 - protein, 513 aa, unidentified
  source 1..513: note = Sphingomonas hengshuiensis
  REGION 1..513: note = tr|A0A2W5BB87|A0A2W5BB87_9SPHN Tryptophan halogenase; OS = Sphingomonas hengshuiensis OX=1609977 GN=DI632_03080; PE = 4 SV=1
MTERIRRIVIVGGGTAGWLAACRIAAAADSHAADPLTVTLIESPDVPTIGVGEGTWPTMRGTLARIGIDEATFLRAADAGFKQGSRFDGWRTGLPGDSYHHPFTAPAALSPGDLLRDWRQGSFAAHVSAQPAICDEHLAPRQPTMPPYAGALNYGYHLDAGKFAELLRETACTRLGVRHLRDHVTGIEAAQNGDIAAVDTRTSGRIAGDLFLDCTGHAALLIGGHYGVGSIDRTDILFNDRALAVQVPVAHDSPIASQTIATAHDAGWIWDIGLPTRRGIGCVYASGFSSDADAAATLTAYLQRIAPEVEPARLSFRQLRFRSAHRERFWRNNCLAIGLSAGFLEPLEASAIVTIELSLDALLDGFPADRSAMDLHARRFNALFRYRWDRIVDFLKLHYALSERDSPYWRAHRDPASIPPALHDLLALWRTQPPSPADFAHANEVFPAASHQYVLYGMGMPPPPPGPLRAERSDTKMVLEQVRQRARALTASLPTNREYLNALTRAPAEVAHV

SEQ ID NO: 90119 - protein, 487 aa, Caulobacter sp.
  REGION 1..487: note = tr|A0A0Q8FHZ3|A0A0Q8FHZ3_9CAUL Tryptophan halogenase; OS = Caulobacter sp. Root655 OX=1736578 GN=ASD79_09535 PE=4; SV = 1
MAAAAFSRLLGESFVEVVLIESDQIATVGVGEATIPPIRHFNDKLGLDEADFVRQTQASFKLGVDFQDWGTIGHRYFHAFGDFGADIEAVGAHHYWRKLQGLGEVFPLEDLSMPTMAAYRGKFIPPNPDPRSVMHDYSYAFHFDASLYARYLRGYAEARGVVRTEGRIVDVQLRGTDGFIEAVALDSGDRVEGDLFIDCSGFRGLLIEGALKTGYEDWSHWLPCDRAIAAPCASGGDGLTPYTRATARAAGWHWRIPLQHRTGNGYVHCSQFVGEDEAVSDLLSNLDGPLIGQPQTIHFTPGRRLKAWNRNCVAMGLASGFIEPLESTSINFIQTAIGRLLDFFPNKDFDPTLVDEFNRLSRQEMEQVRDFIILHYKLTDRTDSGLWDYCRAMAIPDGLAHKIEVFRRTGRVVMHEGDAFAVPSWLAIFQGLKAVPERYDPLVDRMSVEQIREVLAGRRAAILRAAEAMPGQQAFIDKFCRAELPAA

SEQ ID NO: 90120 - protein, 598 aa, Microcystis aeruginosa
  REGION 1..598: note = tr|A0A1V4BLU6|A0A1V4BLU6_MICAE Tryptophan halogenase; OS = Microcystis aeruginosa KW OX=1960155 GN=B1L04_20720; PE = 4 SV=1
MVTTDTKVYDVVIMGAGFAGVCQARHLLLNVPNIKIALIDPRPEERTNKDLKIGESMVEIATLFVCKELGLYEYMIENHPPKFGLNFHWPKKKDKTTTTDDYYHIWNNRQPPLASFQMNRAKFERDLLKMNKAMGATFYQGRVVDVDLTSKDELKTVIAKVENEQITLKAKHVIDAAGRKFIIGQKTDNLLFGADNLFGLDTGSVWVRVNNIDRTIFHDGYDPYGTTCSHYYATNHWFGHGHWLWMIPTEKDSQEISIGIAYHRSAIADNQINTKEKFYDFLKANHEILYRLVNSGENIDFHYLPRPSHTSKTMFSADNWYVIGDAACIFDPFYSLGSSMISYQIECTTEIIRSKLVGEAIGEKKQAAYNDFILTYTRFNNHLIKHHDQQLGDASIMSWRIYHDYIWWFGVQVPMYTGKWFLDLDFLARYTLGLKEHQTGYCEHLYQQFNEVIKQGKNLGFMDCYRGDQLWGDYHTLQHFDNFVENTKLEPKRSNVFASMKWTNFYTAIWYAKFLWKGFGWRGFLNGKNLYYLVEHFVHMLQAIIGEMFYKHFTKGIPDNSQIEQMRQEFTHYRYRPQLNSWLKEEVKRSPEKIPIIV

SEQ ID NO: 90121 - protein, 501 aa, Caulobacter sp.
  REGION 1..501: note = tr|A0A4R3H213|A0A4R3H213_9CAUL Tryptophan halogenase; OS = Caulobacter sp. BK020 OX=2512117 GN=EV278_11840 PE=4; SV = 1
MSRPIRSVAVVGRDVSAWLTALALQRAFGRQGVSVTVVELPSALRAVDAVIALPALEGLHRLLGLDESEVLAACSGVYALGQQFANWSRSRPPFVHAYDSQGAALRQIPFLHYWLKARAEGLNVALEDFSLGAAAAKHGRFIVHNDATDSFSKARNGYHLDAQSYVRLLRHKAMAAGAQRVAGTLDRVARTPVGVASVTLNGGTSVAADLFVDASGPDAVLAGRALEVPFESWSSWFPCDRILAASGPRLKPLPAMSRISAFGAGWMGMFPLQDRTPVVAAYDSRRISDEEMARTASVLAGMALGDAVVSPFAAGCRAAPWTGNCVAIGEAAACLEPLDAAPLHMIHLGISHLITLFPVDADNLLEAHPYNEAVLSHARNLRDFQIAHYRLNERLDESFWDGARAAEPPPGLAYKLDLFAARGAVALYEDETFQEENWISILIGHGLIPRGHDPQADAMPREEQIQSFQRMLGFIAAEVREMPSIEAQLELFAPPPSSASF

SEQ ID NO: 90122 - protein, 509 aa, unidentified
  source 1..509: note = Caulobacter zeae
  REGION 1..509: note = tr|A0A2N5DFV0|A0A2N5DFV0_9CAUL Tryptophan halogenase; OS = Caulobacter zeae OX=2055137 GN=SGCZBJ_11880 PE=4 SV=1
MANNLRKIVIVGGGSAGWITAAMISHYLKDSPCEIELIESEQIGIIGVGESTIPPFLQLIRSLGIDEKEFMQETQAAFKLAIRFENWRKKGEVYYHPFGLIGGLVDVHEFYQVWLRGKAEGHPSSLQDFAPASVMADRWKFMSPAMAPRTMLANANYAVHIDAALLAKFLRKFAEARGVKRTEGIVKDVATRPDGFIEKVILQDGREASGDLFIDCSGFRSLLSGKTLGTEFLDWSDVLLNDRAIAVQTANIQDPHPYTLAQAQDAGWRWRIPLQHRAGNGYVYCSQYCSDDEALATLMSQVEGEAVRDPWLVPFKTGMRKQLFNKNCVAIGLAGGFIEPLESTALHLIYRGVDYLLRFFPDRDCDPVLAAEYNRRMQVDYEEIRDFIVLHYFTTKRDDTPFWRAYQQVTPPESLRERIELFKASGVLRDGVDDMFRAPSWQSVMEGMGIRPKRYQQLVDTLPAGVVKGLLDKSAPMLSELVDTLPSHGDFLRQHCPAPVPEALLKKAG

SEQ ID NO: 90123 - protein, 506 aa, unidentified
  source 1..506: note = Sphingomonas hengshuiensis
  REGION 1..506: note = tr|A0A2W5B4B2|A0A2W5B4B2_9SPHN Tryptophan halogenase; OS = Sphingomonas hengshuiensis OX=1609977 GN=DI632_07295; PE = 4 SV=1
MAIDQEPVRRVAIVGGGSAGWMAAAALARFLPPGVHVTLIESDAIGTVGVGEATIPQLRLFNQHLGIDEDDFVARTGGSFKLGIEFVGWNGPDSRYIHAFGTIGRSLGLVPFHHYWLAAGGGDRPQSLWSHSACAVATAQHRFDREPGHPQAPAGTNWAYHFDAARYAACLRERAEAGGVERVEGRVIGVAQDGETGLVEAVMLDDGRRIAADFFIDCSGFAALLIGRMAGDRWDDWSPLLPCDRALAVPCAATHPITPCTRATARSAGWQWRIPLQARTGNGLVYSSGHLSDDAAAAVLTGNLDGAALADPKLLRFTTGRRHAPWIGNCVALGLAAGFLEPLESTSIHLVQSGIARLLSLWPVATPRGADIAEFNRQSAREWLAVRDFLIAHYALNDRDEPFWQERRAVPVPDSLRDRIALFEQSGRIVRDEHELFAEVAWLQLFVGQGVMPNGHHPLAGALPADRCARFLDMSRQHVAATVARMPTHDQFLRAHCQAPDAKVAA

SEQ ID NO: 90124 - protein, 519 aa, Colwellia sp.
  REGION 1..519: note = tr|A0A3D3GVZ5|A0A3D3GVZ5_COLSX Tryptophan halogenase; OS = Colwellia sp. OX=56799 GN=DIS98_06020 PE=4 SV=1
MSKVTKRVVIVGGGSAGWITAGVIAAEHKANSPSGIQVILIESPDVQTVGVGEGTWPTMRKTLKKIGISENDLFKECDASFKQGAKFAKWVTGAEDDFYYHPFVLPHGYLETDLVIPWQKTQAKIPFADVVSFQGKICEQGLAPKQITTPEYAAVANYAYHLDAVKLGQFLRKHCIEKLGVQHIIDHVTQVNSAHDGDIASILTNEHGSVEGDLFIDCTGKASLLLGQHYQIPFICKKGILFNDSALAVHVPYPDEDSPIAPHTNSTAQSAGWIWDIGLPTRRGVGYTYSSKHISDEDAEVELRKYIEDSTSKNIVDSLMVRKITIKPGHREKFWHKNCVAVGIAAGFLEPLEASALVLIELAAEKISNDLPATRDVMDIVAKRYNKQFLYRWNRIVEFLKLHYILTKRTDSAYWIDNCKEETIPDSLLELLVLWRHHPPCPDDFIHINEVFPSASWQYVLYGMGFETQARSTTRKSVNTEAAQRLFSENKAITNKYLSALPVNRELIDKIKKYGMKKV

SEQ ID NO: 90125 - protein, 537 aa, Caulobacter sp.
  REGION 1..537: note = tr|A0A4R3HAY8|A0A4R3HAY8_9CAUL Tryptophan halogenase; OS = Caulobacter sp. BK020 OX=2512117 GN=EV278_10228 PE=4; SV = 1
MITTKTGAGSPREEAASASIEGVSHMQDSARDRRIRDIVIVGGGTAGWMAAASLRQHFGAAPVTITLIESSEIGTIGVGEATIPTIRRFYQALGLSDIDVLRATGGTCKLGIRFNDWTAPGASFIHPFGLYGQDLKGVSFHHYWMRLRALGEDVPISDYSLGASLAAGGKFTTPSRNPPSTLSVFDWALHFDAGLFARLMRQVAEQNGVRRIDARIVKTNLRAEDGFIESVSLDSGATVAGDLFIDCSGFRGLLIEEALHTGYEDWSPWLLCDSALAVQSEGQGAPPPYTDVTAHEAGWRWRIPLQHRWGNGYVYSSRHTTDEAARAVLTGALDERLLHEPRKIGFHPGRRLKAWNKNCIALGLASGFLEPLESTSIALIETGIEKIKALFPNRDFDPAVVDEFNEMSRLEMERVRDFIILHYKLNQRPDDPTGFWTHCRQMTVPDTLQKKIDLWRAQGHFVRYRWEMFSPPSWLAIYAGFGLLPETYDLSVDGFDAGQLSAALAEMRKAVADTVAATRAHGDFIEQYARPQPVAAE

SEQ ID NO: 90126 - protein, 502 aa, unidentified
  source 1..502: note = Sphingomonas hengshuiensis
  REGION 1..502: note = tr|A0A2W4Z4P2|A0A2W4Z4P2_9SPHN Tryptophan halogenase; OS = Sphingomonas hengshuiensis OX=1609977 GN=DI632_12820; PE = 4 SV=1
MTDNHIRQIVVLGGGSAGWMAAAALATYLGRAVSVRLVESEEVGIVGVGESSVPFMKTFNSETLGIDEREFVTRTSSTFKLGIRFTDWGRIGERYIHGFGTIGRGLGPLPFHQLWLKRFLAGRAGPLGDYSLQTVAAPAGRFQWSGPADTPLGDIAYAYHLDAVLYARFLRELAERRGVERIEGRVVDVEQDGGIGHVRAVVLADGRRVAGEFFIDCSGFRGVLIEQTLKTGYLDWRHWLPCDSAFVMPSAPVGPPMPYTEAAARPAGWQWRIPLQHRVGNGYVYSSAHLDDEAALATLLGTIEGQAIDVPRRLRFTAGRRARAWNGNVVALGLAAGFLEPLESTGIYLAQAGIRRLLGLFPGRDFNPALAERFNRETAFEYERTRDFLVLHYHATTRDDTPFWNDCRTMDVPDPLREAIALFRADGRYFRNGEDFFALPSWVQVMIGQGIVPAGYHPIVDAMPEGHLDQYLERVRGEIAAAVATMPAHHAFIDRYCKATVP

SEQ ID NO: 90127 - protein, 483 aa, Caulobacter sp.
  REGION 1..483: note = tr|A0A4R3H8Q8|A0A4R3H8Q8_9CAUL Tryptophan halogenase; OS = Caulobacter sp. BK020 OX=2512117 GN=EV278_105225 PE=4; SV = 1
MTGSPLNNVAILGGGVAGWMTAAALARVLPPACEIRVIETADAAPRGALSTLPALRGFHGLLGLDEATVMRTARGTFKLGARYGGWTGFDHDHVEGFSDAGANLDGVAFHHHWLRARQRGEAGRYEDYSLAAVAGRLGRFAPPSEDPRSVLSTLSYGLHLDSAGYVAALRSTAGRVAARPGEIAQVVLDTEGAVQAVVLADGERIAADLFIDTTPDGRLIGATPSGGWIDETVALPCNRLALRELARRADPPPLTEFETVTEGWLRRVPLRDADAVTLAYASDLTSDDEARAILGGEATIIRRHNGRRERAWSKGCLAIGPAASQLEPLNGDDAQAIQSGVGRLIALLPTAEGSPLAAAEYNRLMAETFDRARDLAVLRYVAASRTDRFWSRARRAAPSTALAYKQAQFESRGRVVLYDEETFVEGAWVGALLGLGITPRRHDRLADRLPAGQADAALTRLRGLIRQAALAMPTHADALKDRP

SEQ ID NO: 90128 - protein, 507 aa, Caulobacter sp.
  REGION 1..507: note = tr|A0A4R3H6T9|A0A4R3H6T9_9CAUL Tryptophan halogenase; OS = Caulobacter sp. BK020 OX=2512117 GN=EV278_105226 PE=4; SV = 1
MTPPPIRKVLVLGGGTAGWMTAAALSKVLGGQIEVTLIESEQIGTVGVGEATIPPILTFNAMLGIDERAFMRATRATFKLGIEFRDWTRLGDRYMHPFGSFGLDIEAIKFHQVWRKVRDQVGPLEDFNLAAVAARRNRFALPDPDPAKVLSSLKYAFHFDAGLYARFLRGFAEARGATRVEGKVADVTLRGDDGFIQSLTLEDGRVFEADLFIDCSGFRALLIGQALGGRYVDWSHWLPNDRAVAIPCDTGGDGLTPYTRATADKAGWRWRIPLQHRTGNGYVYSSAHLGDDAALAALIAGLDGPARAEPNVLRFQAGRRDRAWIKNCVAIGLSSGFLEPLESTSIHLIQAGITKLLALFPDKGFDPLEIDEYNRLTAQQVELVRDFIILHFKATERADTPYWDHVRTMDVPDSLQRKIDLFAGRGRLFQSDYDLFAEPSWIAVLMGQGIVPRRYDALVDSLPEAALVQRLQRMSALIGQTAQAMPDHAAFIARYCAAETVVAPILA

SEQ ID NO: 90129 - protein, 504 aa, unidentified
  source 1..504: note = Novosphingobium malaysiense
  REGION 1..504: note = tr|A0A0B1ZUU6|A0A0B1ZUU6_9SPHN Tryptophan halogenase; OS = Novosphingobium malaysiense OX=1348853 GN=LK12_00405; PE = 4 SV=1
MNGPDRKTTRYVVAGGGSAGWITAAILAHFLPPDAASIILVESEEIGIIGVGEATVPLLGQLNALLGIHEPDFVAATNGTFKLGIEFVDWGEKGNRHFHGFGDFGEDIDGLAPHQHWLRLNKTGAIPPLGEWSMPWAAGRRDRFAPPQAMKGEAAQFSYAYHFDAALYAGFLRRLAEAKGVKRVEGRIIDAERDGETGLVSHLTLDGGHRIDGDIFVDCTGFASLLLGKTLGVPYRDWSEWLPCDRAAAVPSSRAGRLTPFTRATALPAGWRWRIPLQSRTGNGHVYASRFLSDDEAVAQLLTGLDGEQLAEPRLLRFTPGRRDRFWEGNVIAIGLAAGFLEPLESTAIQLIQTGAARIVEYLPSGRPDAALAAEYNRQTALEYERIRDFIIAHYCRSRRTEPLWREVATMDLPETLAHKLAVWSACGRVPLYELESHQEASWVSILIGQGIIPNSHNPRADALPESKVRTILEQRRMFLAQAAGRMPAHDYFISRTCSAREMA

SEQ ID NO: 90130 - protein, 506 aa, unidentified
  source 1..506: note = Caulobacter zeae
  REGION 1..506: note = tr|A0A2N5DED2|A0A2N5DED2_9CAUL Tryptophan halogenase; OS = Caulobacter zeae OX=2055137 GN=SGCZBJ_14235 PE=4 SV=1
MADNRIGRIVIVGGGTAGWMSAAMLARALGPAAKISLVESEAIGTVGVGEASIPQLRNFNAFLGLDEDAFLRATEGTIKLGIEFVDWLHPGHRYMHAFGPVGRPLGTTPFHHYWLDARRRGTAGDDFWAWSANALAARAGRFGRTPGEAGAEPLTWAFHFDAALYARHLRTYAQARGVQRIEGRIIGVDQDGESGFLRAVALEGERRVEGDLFIDCSGFRGLLIEETLKSGYEDWRKWLPMDSAWAAPSRDDAPPVPYTRAWARDAGWQWRIPLQHRTGNGHVFSSAWTDKDAAARTLMANLEGEALAEPRLLTFVTGRRRKSWNRNVVALGLASGFMEPLESTSIHLVQSGLARLLALFPDQGFDPLLADEFNRQTEQEYACIRDFLVLHYKATQREDTPFWASRKAMEIPHSLAERMALFAGSGRVFSRDEDLFKESSWVQVLLGQGVTPAAAHPMTAVAADAQVDGWLDDLARIAGRTAASLPTHAAFLAAAGGPRPAQRLAG

SEQ ID NO: 90131 - protein, 505 aa, unidentified
  source 1..505: note = Caulobacter zeae
  REGION 1..505: note = tr|A0A2N5D3G7|A0A2N5D3G7_9CAUL Tryptophan halogenase; OS = Caulobacter zeae OX=2055137 GN=SGCZBJ_21790 PE=4 SV=1
MSDQRVRSVIVVGGGTAGWMTAAALAKTLSAQGLKITLVESEAIGTVGVGEATIPPILTFNTMLGVDEREFMRATRASFKLGIEFVDWGAIGEMYHHPFGTFGLDLEGIKFHQVWRKFAASAGPIGDYNLTEAAARRWRFSLPDPDPSKVMSSLRYAYHFDAGLYARFLRGFSEQRGVVRIEGRIGQVDQNAESGFVEAVVLEDGRRVEGDFFVDCTGFRGLVIGQALKAPYQDWGRWLPNNRAVAIGCELGGDGLTPFTRATAREGGWQWRIPLQHRIGNGYVYSSHHVDDQRALDTLLANLDGAPTDEPNFLRFTPGRRERAWEKNVCSIGLSAGFIEPLESTSIHMIQAGITKLLALFPRNGVDPLEVDEYNRLTAEQVDRIRDFVILHFHATRRDDTDYWRYLASMTVPDSLARRMELFAHRGRWFPSEYDLFHEPNWLAVLLGQGIVPEEWDPLVDSLPENEVRQRLSHLSALIARTAEAMPDHAQFVARYCGAAQGVAA

SEQ ID NO: 90132 - protein, 511 aa, Caulobacter sp.
  REGION 1..511: note = tr|A0A4V2UGG0|A0A4V2UGG0_9CAUL Tryptophan halogenase; OS = Caulobacter sp. BK020 OX=2512117 GN=EV278_105224 PE=4; SV = 1
MTDQTVRNILIVGGGTAGWMTAAALSAKLAGLPIAIRLVESAEIGTVGVGEATVPHIRHFNAALGLDEADFMRKTQATYKLGIEFRGWGKLGDSYIHPFGAYGAAIAGVSFHHHWLRARQGGDDTPLEAYSLPVMAARGGKFAPPSPDLSSVASTYNYAYQFDAGLYAAYLRAYAEARGVVRTEGKVADVALRGDDGFIEAITMEGGERIGADLFIDCSGFRGLLIEQALKTGYEDWTRWLPCDRAAAVPCETVEASTPYTRCTADAAGWRWRIPLQHRVGNGYVYSSQHISDDAAAAALLAGLEGRAQADPRVLRFVAGHRRKQWSKNCVAVGLASGFLEPLESTSIHLIQVAVTTLLELFPDRTCDQADQDEYNRVMTLEFERIRDFLVLHYHANQRTGEAFWDDRRNLPIPDSLAYKMDLFHDRGVVVKYKDGFFLEPSWLAVYLGQNIVPRAYDPVSGSVPDAVLAQRLKAIRDSIAEATRAMPAHDDWIARFCAARSGATAQAVTA

SEQ ID NO: 90133 - protein, 504 aa, unidentified
  source 1..504: note = Caulobacter zeae
  REGION 1..504: note = tr|A0A2N5D3G3|A0A2N5D3G3_9CAUL Tryptophan halogenase; OS = Caulobacter zeae OX=2055137 GN=SGCZBJ_21795 PE=4 SV=1
MSNDRIRHVVIVGGGTAGWMTAAALGRFLKDGVTKVTVIESEAIGTVGVGESTIPQINMFNRMLGLDEDDFLRRTKATYKLAIEFRDWKQIGHTYHHPFGPYGVDMEGVSFHAYWLRYQAMGEAADLSEYSLQSLAAAQAKFQRPTGQKNSPLGDIAYAFHFDAGLYARFLRDYAEARSVRRIEGRIVDVALRGTDGFVESVTLENGAVVEGDLFIDCSGFRGLLIEGAMKSGFEDWSHWLLNDRAVAVPCASGGSTDPVTRATARPAGWQWRIPLQHRIGNGYAFSNAHISEDEATAYLLANLDGEALATPWTLKFKAGRRKKSWNKNVVAIGLSAGFMEPLESQSIHLIQVGISRLLAMFPDRRFQQPDIDRYNRVMTFEYEKIRDFLILHYKATQRSDTPYWDYLREMEIPDYLADKIAVFESHGRIFRENEELFNDTSWFAVMVGQGLKPKGWDPMADVMSDDLLRARMREIQAVIARSAEAMPDHMSFVADRVARAQAA

SEQ ID NO: 90134 - protein, 512 aa, unidentified
  source 1..512: note = Novosphingobium ginsenosidimutans
  REGION 1..512: note = tr|A0A5B8S2D6|A0A5B8S2D6_9SPHN Tryptophan 7-halogenase OS=Novosphingobium ginsenosidimutans; OX = 1176536 GN=FRF71_02055 PE=4 SV=1
MESPIRQVVIVGGGTAGWLSACLLAARLPELTVTLVESPNIPTIGVGEGTWPTMRETLASIGIPEAEFLRECDAAFKQGSRFDGWVTGAGDDTYLHPFTLPPLGDLRELLAAWQQVAPDQPFAQAMTPQGAVCAAGLAPRQRAMPDFAGALNYAYHLDAGKFAALLMRHATGRLGVRHVSAEVCGTRAAANGDIAAVLLRDAGELAGDLFLDCTGQAALLIGGHCQVDWIDRSDVSFNDRALAAQVPVEPGSPIAAQTVGTAHRAGWIWDIALPTRRGIGCVYASRFLDDDAAEAVLRDYIAAKVPGADAATIQPRRLAFQTGHRARFWQGNCLAVGLSAGFIEPLEASAIVLIELSLRRLIEAFPADRAAMEPLSRRFNDLFRQRWDRIVEFLKLHYVLSRRTEPYWLAQRDPATIPERLTESLELWRHLPPSPRDFPDFEEIFPAASQQYVLYGMGFPLPSRLPQPSGQALARISEVRDRARAMQAGLPENRSYFAALAASAPERPAAAS

SEQ ID NO: 90135 - protein, 521 aa, Xanthomonas arboricola
  REGION 1..521: note = tr|A0A2S6Z2N8|A0A2S6Z2N8_9XANT Tryptophan halogenase; OS = Xanthomonas arboricola pv. populi OX=487823; GN = XaplCFBP3122_14600 PE=4 SV=1
MTDTAPSDPQQRPVRRVVIAGGGTAGWMAAAALSKVLGKHLQIVLVESDEIGTVGVGEATIPSLVTFHRLLEIDEAAFMAATQATIKLGIGFEHWRDVDRHYIHSFGHTGTDHWSAGFQHFWLKGRQRGLARDFGDYCLELRAAQEGRFAHLPNGGMNYAYHLDAGLYARFLRRFSEGFGVQRIEGRIGNVETHAHSGYLTALTLDNGTRVEGDLFLDCTGFAGLLIGKTLGVGTDDWSQWLFADSALAVQTESVGAPVPYTRSRADQAGWMWRIPLQHRVGNGIVYSSRYMDQDSAAQVLQRNLSGRALTQPRALRFTPNQRHRVWEKNCVALGLASGFLEPLESTNIHLIQRGIIRLMQTFPQVINDVDIAEYNRQAAAEITHIRDFVILHYHATDRRDTPFWRDCAAMDIPDTLRHRVELFRQSGRVFHQANELFAENSWVQVMLGQGITPKQHHPVADLMGDAELRHFLETIRTRVDAALARLPAHADFLHRYCPAPPLPEPATRLPANAALATGAR

SEQ ID NO: 90136 - protein, 511 aa, Caulobacter sp.
  REGION 1..511: note = tr|A0A4R3HBN4|A0A4R3HBN4_9CAUL Tryptophan halogenase; OS = Caulobacter sp. BK020 OX=2512117 GN=EV278_103354 PE=4; SV = 1
MLTEISRENGPLRRIAIVGGGAAGWMAAAALARVLGPQGPAITLIESEEIGIVGVGEATIPPIRAFNAMIGLDEDVFVRETRGTFKLGIEFVDWRQRGHRYFHPFGVYGPDFGPTPFEGAWRRLRQAGRAEPLETYSVCAQAAAAGRFARPQPGGGPLSQLAYAFHFDAALYARLLRAHAEAAGVVRREGKVAAVNLRGGDGFVESVTMEDGERIAADLFLDCTGFRALLIGQALESPFEDWSRWLPNDRAVAVPSANAGPPAPYTRSTAREAGWQWRIPLQHRTGNGYVFSSRHVSEDEATANLLANLDGEPLAEPRVLRFQAGRRPAGWVRNVVALGLASGFLEPLESTSIHLIQVGIARLLEMLPTRAFEPADARRYNRLMAAEFDGVRDFLILHFHATERRDTAYWEELAAMSVPDTLVERLRIYRATGRVFRESDELFTKTSWLAVMDGQGPRVEGCEPLAEGLPLDQLEARLARIAEATAEAVRRMPSQADFIRVHGQAATVVAG

SEQ ID NO: 90137 - protein, 498 aa, unidentified
  source 1..498: note = Novosphingobium ginsenosidimutans
  REGION 1..498: note = tr|A0A5B8S188|A0A5B8S188_9SPHN Tryptophan 7-halogenase OS=Novosphingobium ginsenosidimutans; OX = 1176536 GN=FRF71_03490 PE=4 SV=1
MASQAQPIRKILIVGGGSAGWMTAAALSANLAQGCEIALIESEEVGTVGVGEATIPPIRTFNQMLGIDEAEFMKRTQASYKLGIEFVNWGRAGHRYFHPFGPHGRAFDVVPVHQHWLLAKAAGETAGFDEHSMAWHLAKANRFVRPSGDPRSVLSTFDYAYHFDAGLYARYLRAYSEQRGVVRHEGKIGSVQQHGETGFVTGVTLEDGRSLEAELFIDCSGFRGLLIEGALQAGYADWTHWLPCDRAVAIPCEKAGDFTPYTRSTAREAGWQWRIPLQHRTGNGHVYSSQFTSDEAALDVLLSNLDGKPLAEPNRLRFTTGMRRKFWDKNVIAVGLSSGFLEPLESTSLHLIQAGISKLLALFPDTSFDPAVIAEYNHIAATEMERIRDFIVLHYKLMDRDEPMWRHTAAMEVPDSLAFKIDHFRRYGRHIPRDMDLFAPPSWHAVHIGQFNLPEGTDPLGAYRPSGREWLGKLRSAMANEAARQPSHQAFIDQHCKA

SEQ ID NO: 90138 - protein, 477 aa, Amycolatopsis sp.
  REGION 1..477: note = tr|A0A429EUT7|A0A429EUT7_9PSEU Tryptophan halogenase; OS = Amycolatopsis sp. WAC 04182 OX=2203198 GN=DMH01_40650; PE = 4 SV=1
MSSPQYDVIVVGGGPAGSTVSTLVSKAGHRVLLLEKEKFPRYQIGESLLPATVHGVIPILGVEKEVAEAGFTVKRGGTFKWGKRPEPWTFEFAVSSKMPGPTSFAYQVERMKFDDILLRNARKHGVEVREESSVVKAITDETGRVRGVHYKDSDGKVHEVFARYVVDSSGNTSRLFKASGAERHYSPFFRNLALFTYFEGAGRLPEPNAGNIFSVAFEHGWFWFIPLSPTLTSVGAVVHQDSAELVQGDPDEAMRRFIDACPRIKDILGDAKRITEGPYGSYRVRKDWSYCNSRFSGPGMVLVGDSACFVDPVFSSGVHLATYGGLLAARSINGCLAGTVDEEAAFAEFEKRYRREYGLFHEFLIGFYDMNKSEDSYFWQARKVSESASTDVEAFVELVGGVASNDLRLTADDLAATVESVEHKPGGAANGTVLTRMLKAGAGLQGRALLGSRSGEGAALEPGGLRASDDGLSWVRS

SEQ ID NO: 90139 - protein, 514 aa, Caulobacter sp.
  REGION 1..514: note = tr|A0A4R3HBS7|A0A4R3HBS7_9CAUL Tryptophan halogenase; OS = Caulobacter sp. BK020 OX=2512117 GN=EV278_102208 PE=4; SV = 1
MVRPVKNIVVVGGGTAGWLTAGLIAAKHKARQATGFTVTLVESPNTPIIGVGEGTWPTLRTTLAKIGVSETDFFRECDAAFKQGAKFARWTTGAADDAYYHPLMLPQGFSQVNLVPHWLVGGNGRSFCDAVTPQGRLCDDGLAPKTITAPPYQGAANYAYHLDAGKFAPFLQRHCCDKLGVRHVLADVRSVAMTEDGDIRGVVTQQQGEIQGDLFIDCTGFRALLLGEALGVPFRDCGDVLFCDTALAIQVPYETEASPIASHTISTAQSAGWIWDIGLPTRRGVGHVYSSRHISDDDAERELRAYIGPAGRDLSARKIAIRSGHRETFWKRNCVAVGLAAGFLEPLEASAIVLIELSAKLIAEQMPACREVMDIVAARFNATTHYRWGRIIDFLKLHYVLSQRSDTAFWRDNRARETIPDRLADLLQLWRHQPPWLHDEFDRADEVFPAASYQYVLYGMGFRTEIEPEALVDERAMAERALRETAVQTERLRATLPRHRDLIRKIVEHGLQPV

SEQ ID NO: 90140 - protein, 240 aa, Pseudomonas sp.
  REGION 1..240: note = tr|A0A2R7S5P8|A0A2R7S5P8_9PSED Tryptophan halogenase (Fragment) OS=Pseudomonas sp. HMWF010 OX=2056847; GN = DBR41_23025 PE=4 SV=1
MSRPVRNVVIVGRDAAAWLTALGLKRAFGRQGVNVTVLELPSMVRSADVLVGLPTLEGLHRLLGLDTDDMLAATAGAYALGQQFANWSQARPPFVHAYDTHGAPIHRIDFLQHWLKARSEGMNVPLEEFSLGAAAAKHGRFVVHGDATSGFSKARAGYHLDASAYIRLVRQKAIELGVQRQAGTLGEVVRSDSGIVSVSLAGGEPLAADLFVDASGVDAVLIGKVLEQPLESWSPWFGCD

SEQ ID NO: 90141 - protein, 505 aa, unidentified
  source 1..505: note = Sphingomonas hengshuiensis
  REGION 1..505: note = tr|A0A2W4YVM2|A0A2W4YVM2_9SPHN Tryptophan halogenase; OS = Sphingomonas hengshuiensis OX=1609977 GN=DI632_13940; PE = 4 SV=1
MTPLRRILIAGGGSAGWMTAAMFARLFKGRYAITLVESDAIGTVGVGEATIPAIKKFNELLGIDEDDFLRRTQGSFKLGIQFNDWSRIGSSYVHGFGVIGRDLEWLRCHQYWLKLHGEGRGGPLDAYSINTVAATANRFMRPRADMPDSPIGQIAYAFHFDAGLYAAYLAEYARERGVERREGEIVAVAQDADTGFLTSVTLADGSMIAADLFIDCSGFRGLLIERTLAAGYEDWRHWLPCDRAVAVPSRRSADFTPYTRSTARPAGWQWRIPLQHRTGNGHVYASRYMDDEMAEAMLLDHLDEPAVGDPRRLAFVPGRRRRGWVRNCVAIGLAAGFLEPLESTGLHLIQSAILRLVRLMPDARFDPATSAEYNRQTDFEMERIRDFIILHYKATTRDDTPFWRHVRTMDVPDTLARKMALFAANGRIFREDDELFAEESWIQVLIGQGIVPAAPDPLVDVTPRAEVERHLADVRGVIAKCVDRMPDHGAFVARHCAAPPPQPAP

SEQ ID NO: 90142 - protein, 496 aa, Colwellia sp.
  REGION 1..496: note = tr|A0A3D3GWL1|A0A3D3GWL1_COLSX Tryptophan halogenase; OS = Colwellia sp. OX=56799 GN=DIS98_06025 PE=4 SV=1
MKNEKIQKIVIAGGGTAGWMTAASLSKLLGKGFDITIVESDEIGTVGVGEAAIPTLVTFHRLLAIDEQAFMRATHATFKLGINFENWKQKNENYMHGFGNVGKACWAGEFQHFWLHSLRKNVDVPYDKYCYEIQAAKAGKFAKSQEAPLNYAYHLDATLYGRFLRNFSEELGVKRIEGKIVSVIKNEDNGHISSLMLDSGKQIEGQLFIDCTGFNGLLIEKSLHTGYEDWSHWLPCDSAIAVQTKPTDSALPYTRSIAQDSGWQWRIPLQNRVGNGLVYCSNYLTDENAKSLLLKNIDGETINEPRVIKYRTGRRRKGWNKNCIAIGLSSGFVEPLESTSLHLIMSGILRLIKLFPFAGINQSAIDEYNQQFNEEIESIRDFIIMHYHVTERDDSPFWRYCKNMDVPPSLKHRINLFEETARLSVNDGELFHPDSWSQVMFGQGIIPKQYHQIANVMGKDEFTNFLRGLREPIKKKVEQLPSHQEFIDYYCKAEKT

SEQ ID NO: 90143 - protein, 508 aa, Caulobacter sp.
  REGION 1..508: note = tr|A0A4R3GX88|A0A4R3GX88_9CAUL Tryptophan halogenase; OS = Caulobacter sp. BK020 OX=2512117 GN=EV278_11839 PE=4; SV = 1
MPALPTPPARIRDIVVVGGGTAGWMAAAALSKVMGTQAYTITLVESELIGTVGVGEATIPMITMFNSVLGIDENEFVRETNATFKLGIEFAGWRREGHSYFHPFGQFGVDMDGINFNHYWLRWMQAGGGTDHGRFNAETEAARQGKFGRTGDGRSPGLPNINYAFQFDASLYAAYLRRYAEKRGARRTEGQVVKVERNGQSGLIESLLLKDGQAIRGDLFIDCSGFRGLLIEETLQAGYEDWSHWLPVNRAAAVPCAKVEDPVPYTRATAREAGWQWRIPLQHRTGNGYVFCDQFISEDEAARLLMTRLDGAPLAEPRILRFVTGRRRKSWIGNCVALGLASGFMEPLESTSIHLVQVGISKLLAMFPKGGFNPLITDRYNAEMEADYVNIRDFLIAHYKITEREDTPFWRYCKSMSIPDSLATRLEIFRTRGEAMVVHHELFKEQSWFAVLMGQGLTPVDHHPVADLLSEDELKLRLAKVRTSIQDRVNGLPGHQQFIDKNCRSAAG

SEQ ID NO: 90144 - protein, 519 aa, Caulobacter sp.
  REGION 1..519: note = tr|A0A4R3H8H6|A0A4R3H8H6_9CAUL Tryptophan halogenase; OS = Caulobacter sp. BK020 OX=2512117 GN=EV278_104163 PE=4; SV = 1
MDRRRRILIVGGGAAGWLTAAYLAKSLRIAEQAHLEITLLESPEVGIIGVGEATFPTIRTTLQFLGVDEARFIRETSATFKQGIRFNDWAWAPTENGERHQYFHPFEAPFSTDGASLAPYWLLQNEATRAPFAEAMTIQARVADAQRAPKRPHEGNFSGPLNYAYHFDAAKLAQVLAERARELGVRHLQGRLTQVELDATGAIDHVVCAEHGRLEAELYIDCTGFHAELIGKALKAPFKSARPILFADRALACKASYDRPDAPIQSFTIATAHEAGWIWDIGLKDARGVGCVYSSDHVDDDRALAILGDYVGRDVEIAPRALSFEAGYRTRQWVKNCVAVGLSAGFLEPLESTGVVLIEAAVAIIAELFPHNGPISAPALRFNELMTARYDNIITFLKLHYCLSRRSEPFWRQNADPATMPERLVDLLEQWRWRPPTRYDFILDLETFAFFNYQYILYGMGFKTDLSPGRDEFPDVAGAEKLFAKIRNFGERATHDLPSHRDLIAQINRFGFDRSLEPA

SEQ ID NO: 90145 - protein, 152 aa, Pseudomonas sp.
  REGION 1..152: note = tr|A0A2R7S413|A0A2R7S413_9PSED Tryptophan halogenase (Fragment) OS=Pseudomonas sp. HMWF010 OX=2056847; GN = DBR41_24175 PE=4 SV=1
MPAPLKVVIVGGGTSGWMSAAALVAGLPPGLCEVRLVESDEIGIVGVGEATLPQIKDFNDHIGVDEADFMRQTQATFKLGIEFVDWGFKGSSYIHPFGVHGKPLGGVPFYQYWAKARLNGRVDDLGDYSLPIVASRQNRFAFPSTDEDGLSS

SEQ ID NO: 90146 - protein, 520 aa, Caulobacter sp.
  REGION 1..520: note = tr|A0A0Q8FHJ0|A0A0Q8FHJ0_9CAUL Tryptophan halogenase; OS = Caulobacter sp. Root655 OX=1736578 GN=ASD79_09530 PE=4; SV = 1
MTDASIRKIVIVGGGTAGWMTAAALSRVLREFRAEPSKVAIQLIEAPDIGTVGVGEATIPPLMLFNQLLGLDEDTFIRETQGTFKLGIEFVDWTRLGHRYVHPFGRYGADLEASAFHHYWLRLRSLGDTTEFGDYSLPTLASWMRRFDRPTRDSASVMSTYSYAFHFDAALYARFLRGYAEARGVERIERKVVDVTLRGADGFIESITLDDGRVVDGDLFIDCSGFRGVLTEGALKTGYEEWSHWLPCDRAVANQSESVEDLTPFTRATAQTAGWQWRIPLQHRIGNGYVYSSPFISDDDATATMLRTLDGKPCTDPRILKFTAGRRRKAWNKNCLAIGLAGGFMEPLESTSIHLIQSGVTRLIQLFPDRNFDPVLLGEYNRLTQQEYEKIRDFLVLHYHANERADSPLWKHVREMSIPDTLAHKMELFRASGRLASMGLDLFQEPSWLAVLIGQNVMPRGYDPLVDLMDLDRVRKNLAAMKLTLRQAAEAMPTHRDFIAAHCAAPSSELTVSREWTRRT

SEQ ID NO: 90147 - protein, 561 aa, Ruegeria halocynthiae
  REGION 1..561: note = tr|A0A1H2W124|A0A1H2W124_9RHOB Tryptophan halogenase; OS = Ruegeria halocynthiae OX=985054 GN=SAMN05444358_1011641; PE = 4 SV=1
MNNRLSKITIVGGGTAGWMTALLLDMVFSRTSAPKDRPRLCLIESPNISTVGVGEATVPRMPVTIRQAGISEREFFRETNASFKLGVKFCNWNKDAKGNRIDYVNPFAHGQMLYGLEAAEYFLRFGNGDRDFTQSISPHDHLGRLCKGARQLGQPEFEQRFGYAYHLDAVKFAGMLAKVCTKRGVEHIQDEVQSVELDEQGNVSHLMLERAGRHDIEMVVDCTGFRGLIINKALGEPFMDYSDYLPNDRAMALQIDHPDPDKIESLTRSTALGAGWTWRVPLYNRVGTGYVFSSAHRTDDQAADEYLEWLGDSGKGATPRIIPMRIGRVRNAWVKNCVAIGLSGGFIEPLESTAIHMIDHAVRWLAEHLPTRDIEPSLRTRYNRQMNKLYNEVLEFICLHYRLGNRTDDQYWIDARTELKLPDRLAENLELWQHRLPLNHDTEFTTLFDHRVYQTVLLGKQVYDTGYGAGIRDRLRPLKKPIWFQGMKRAKVDLAQIVKSMPDHKTLLRDIRGELEQPAFGMAAAMKPTVAMPGAEPASATIQNMPDLAEIQSGTKDLQLF

SEQ ID NO: 90148 - protein, 516 aa, Caulobacter sp.
  REGION 1..516: note = tr|A0A0Q8G0A8|A0A0Q8G0A8_9CAUL Tryptophan halogenase; OS = Caulobacter sp. Root655 OX=1736578 GN=ASD79_22885 PE=4; SV = 1
MQETAQDRRIRDIVIVGGGTAGWMAAASLRRHFASAPINITLVESSEIGTIGVGEATIPTIRRFYQAMGLSDIDVLRATGGTCKLGIRFNDWLKPGSSFVHPFGLYGQDLNGVAFHHYWMRLRALGEKVPVGDYSLGASLAAAGKFTTPSRDPPSSLSVFDWALHFDASLFAKLMRQVAEQGGVRRIDARITKVNLRGEDGFIESVDLDTGATVTGDLFIDCSGFRGLLIEEALHTGYEDWSHWLLCDRALAVQSEGKGDPPPYTDVTARPAGWQWRIPLQHRYGNGYVYSSRHTTDEEARAVLVGSLDERLLHEPRRITFNPGRRLKAWNKNCIALGLASGFLEPLESTSIALIETGIEKIKLLFPNRDFDPCVVDEFNEMSRLEFERVRDFIILHYKANQRPGTPGGDPTGFWTHCREMSIPDTLQKKIDLWKARGHFVRYRWEMFSQPSWLAIYAGFEMLPESYDPSVDGFDAGQLSGALAEMRRAVAEVVAATPAHGDFIEQYARPRPVAAE

SEQ ID NO: 90149 - protein, 502 aa, Glaciecola punicea
  REGION 1..502: note = tr|H5TD19|H5TD19_9ALTE FADH2 O2-dependent halogenase I OS=Glaciecola punicea ACAM 611 OX=1121923 GN=prnA PE=4; SV = 1
MDTEKKSKVVIVGGGSAGWMTAAALSHLLPRDRFAITLIESKTIGTVSVGEATIPSILEFNQMLGIDEAEFLSFTHGSFKLGIEFHDWYKKGHQYMHPFGPYGVNMNGIPFHHYWLKDKLQGKEDPLSDYCLEYQAALNNKFCHPQAQSRSAMANIKYAYHFDAVKYAEYLSAFSVKRGVNKIIAQITKVHQHAQTQDISSVALSNGELIEGDLFIDCSGFKGLLIAQTLKVGFEDWRQYLPCDSAIAQPSESLSTIKPYTISTAHECGWQWQIPLQHRIGNGFVFSSQFLSKDLAIDCLAKRLPSKALSEPRQLNWINGKRQQAWKNNCIAIGLSAGFIEPLESTGLQLIQSAIMRLLSLFPSGRCQQVDIDTYNRYTDDELWRIRDFIILHYKATQRNDSAFWRYCASMPIPDSLQNKIELYQSSGRIFRENNELFSEISWLSVMNGQGLVPKAYHPLVNNLSEQQRQQNLSHIAGAMREAEQQMPDHKAYLQKYCRVST

SEQ ID NO: 90150 - protein, 507 aa, Caulobacter sp.
  REGION 1..507: note = tr|A0A4V2UH26|A0A4V2UH26_9CAUL Tryptophan halogenase; OS = Caulobacter sp. BK020 OX=2512117 GN=EV278_101389 PE=4; SV = 1
MSDGNWIQTIVIVGGGSAGWMTAAALARGLDRRYRIHVVESQDIGVVGVGEATIPPIRLFNAMLGLDEAEFMRETQATYKLGIQFRDWGAVGQSYFHPFGVYGVNAELGHFFQYWLKLNTEGADLDLADYALCAQAAKAGRFDRQSDDPRDPMSTFGFAYHFDTILYGQYLRRFAQKLGVVRTEGEVVQVDQNAETGFVTALRLKSGQVVEGDLFIDCSGFRGLLIEQTLKAGYEDWSDLLPMDRAAAAPCGLSGPLSPYTTSTAREAGWQWRIPLQHRVGNGYVYSSRFISDDDAVATLTANLESKPLAEPRLLRFNTGRRRKAWDKNVVAIGLSSGFMEPLESTSIHLIQASINKLLQHFPDRSFSPANRDVYNRRIQIDMETIRDFLVLHYKATVRDDAPLWSYVRQMPIPDSLAERIALFEERGQLVIHPDEMFTPTSWLAVLLGQGVRPRSYSPLVAGQDSRAIAEGFRNMKTMMARRIEAMPSHVDYLKRHRMWAAEAAMA

SEQ ID NO: 90151 - protein, 90 aa, Pseudomonas sp.
  REGION 1..90: note = tr|A0A2R7RNN3|A0A2R7RNN3_9PSED Tryptophan halogenase (Fragment) OS=Pseudomonas sp. HMWF010 OX=2056847; GN = DBR41_29330 PE=4 SV=1
MERRRSILIVGGGTAGWLTAAYLARSLRIAEQGHLEITLLESPEVGVIGVGEATFPTIRNTLQFLGIDEGRFIRETTATFKQGIRFDDWA

SEQ ID NO: 90152 - protein, 503 aa, Caulobacter sp.
  REGION 1..503: note = tr|A0A4R3H757|A0A4R3H757_9CAUL Tryptophan halogenase; OS = Caulobacter sp. BK020 OX=2512117 GN=EV278_105218 PE=4; SV = 1
MNRIERLVILGGGTAGWMTATALAKAFGPRLTIELLESEAIGTVGVGEATIPTIHWFNALIGLDEAEFVRATKATFKLGIEFVDWARPGDRYFHPFGRHGVELDAVPFHQHWLKARSDGFDRPLSAFSLATQLAAANRFARPADDPRSILSTLGYAYHFDASLYAQHLRGLAEAAGVRRREGRVNQVERAPDTGFVMALTIDRGERIEGDLFVDCSGFRALLIDGVMEAGFEDWSHWLPCDRAVAVPCTRVAETTPYTRSTLRPAGWQWRIPLQHRMGNGYVYASAFLSDDEAAATLLGGLDGEALGEPRLLRFRAGFRRETWRKNVVAIGLSSGFLEPLESTSIHLIQSGIAKLITLFPDRDCDPGLARQFNTLFGRDMDGIRDFLILHYHATHGHEAPLWRQARRMALPESLIDREAQYRRAGRLMLTSDELFREASWLAVLEGQGVRAEGCSPLADTLDPAANRRQLEQIEAVIARAAPTLPKHDDAIAAMIGGIAPVPG

SEQ ID NO: 90153 - protein, 495 aa, unidentified
  source 1..495: note = Sphingomonas hengshuiensis
  REGION 1..495: note = tr|A0A2W5BGD5|A0A2W5BGD5_9SPHN Tryptophan halogenase; OS = Sphingomonas hengshuiensis OX=1609977 GN=DI632_03065; PE = 4 SV=1
MSAAPVRVVIAGGGTAGWMAAAAIARAMGRTVEVVLVESEAIGTVGVGESTIPPLVTYNRLLGINEAEFMAATAATFKLGILFEGWKTADSRYFHSFGITGRDHWAAGFQHYWLNGLTRGHDRPYDDYCTELVAALQGKFAHLPGDATNYAYQLDSARYARFLRTMAERDGVTRIEGRIAQVELDAETGDIAALRLDGGRRATGDLFLDCTGFRALLIEGALHAGYDDWTHWLPCDAAIALQTESVGPPLPYTRATAHDAGWQWRIPLQHRVGNGIVYCSRYLDRDAAFDRLTGNVEGAVLTEPNFLRFTTGARRRQWYRNCVAIGLSGGFMEPLESTSIHLIQRAVLRLIRLFPQGRISPADVTEFNDQQRQDMEQIRDFLILHYNVTDRRDSPFWRQCANMDVPETLAQKIGLFRQTGRVFRRNEELFGENSWVQVMMGQGIVPERHHPLAAKLTDDELDRLLSTLRRQVIDTVATMPPHGDYVARYCPADRS

SEQ ID NO: 90154 - protein, 364 aa, Pseudomonas sp.
  REGION 1..364: note = tr|A0A2R7S5Y3|A0A2R7S5Y3_9PSED Tryptophan halogenase (Fragment) OS=Pseudomonas sp. HMWF010 OX=2056847; GN = DBR41_23030 PE=4 SV=1
EDGLSSNFAYAYHFDAHLYARFLRGFAEARGLRRTEGRIVDVTLKPEDGHIASIRLESGEVIAGDLFIDCSGFRSLLMGQALGVGYEDWTPWLPCDRAYAVPCERAGALTPYTRSTAREAGWQWRIPLQHRTGNGYVYSSRFISDDEAAATLLANLDGEAQGDPRPLRFQAGRRETSWSRNCIAIGLASGFLEPLESTSIYLIQVAITNLLKLLPGRAIDPALVSEFNRLIDVEYGRVRDFLILHYHLNGRDDAPLWRYCREMPVPDSLTSRMALFEHRGHIAKYKDGLFQPPSWLAVFVGQGLLPAGYDPLVDNVPQEHILRELDQFRADVAQTVEAMRDHGGFVADFCAAPANRPLSSRVAS

SEQ ID NO: 90155 - protein, 285 aa, Pseudomonas sp.
  REGION 1..285: note = tr|A0A2R7S8M5|A0A2R7S8M5_9PSED Tryptophan halogenase (Fragment) OS=Pseudomonas sp. HMWF010 OX=2056847; GN = DBR41_21295 PE=4 SV=1
MNIDNRLRSIVIVGGGTAGWMTAAALGRFLTKDGQTRVTLVESDAIGTVGVGESTIPQINIFNRMLGLDENEFVRRTKATFKLAIEFRDWERIGHSYHHPFGPYGLDMEAVSFHAYWLKLHAMGEDDDLGAYSLQAVGARQDRFMRPNGQANSPLGAIAYAFHFDAGLYARFLRDYAEARGVRRREGRITSVQQDGLNGHVTSVILESGEAVEGDLFIDCSGFRGLLIEETLHSGFEDWSNWLLNDRAVAVPCASGGSFSPVTRATARPAGWQWRIPLQHRIGNG

SEQ ID NO: 90156 - protein, 505 aa, Pseudoxanthomonas sp.
  REGION 1..505: note = tr|A0A4Q8LYF4|A0A4Q8LYF4_9GAMM Tryptophan 7-halogenase OS=Pseudoxanthomonas sp. NML130969 OX=2480811; GN = EA655_17220 PE=4 SV=1
MASESIASIVVVGGGAAGWSAAAALIRHLPHCRVQLVESEEIGIVGVGEATVPNVRYFNRQVLGLEEGEFVRRTQGTFKLGVEFRDWRRPGDAYMHGFGAVGYDMGPLAFHQLWLHEVRAGRADADIGRYVLQNLAARQGRFMTAPADAPAGSPLAEIAYAYHFDATLYAGYLRERAERQGVVRVEGRVVEATLRAQDGFVEAVVLADGRRIEGDLFIDCSGFRSLLLGEALQVPWVDWSHWLPCDRAVAVPCAPAGPPEPFTRSTARTAGWQWHIPLQHRVGNGHVYSSAFMDDATATEQLMSSLEGPARAEPRLLRFATGRRARFWERNVVAMGLASGFMEPLESTSILLVHNAVLRLLDVFPDKRFDPALLRRYNETTVFEWERIRDFLILHYKATERDDSAFWRHCAAMAIPDSLQQVIDLFAGSGRYHRNGEEFFSTSSWVQVLLGQGIVPRREHPLLAAIPEPQIQQFVGRVAQVLDNCVAAMPPHEQFIARTCAAPPP

SEQ ID NO: 90157 - protein, 509 aa, Pseudoalteromonas luteoviolacea
  REGION 1..509: note = tr|A0A541BDP6|A0A541BDP6_9GAMM Tryptophan 7-halogenase OS=Pseudoalteromonas luteoviolacea OX=43657; GN = FLM44_04720 PE=4 SV=1
MASITIVGGGTAGWMTAVLLNQAYNKFGNTVSIQLVESPDVDIVGVGEATVPAIKDFLQAVGIDEAEFIKSTNATIKNGILFKNWCAPTKEGEVHQYMHPFDQERVEKRLDVATSWLLSSRNKSYDDSVSIAKALSDKNLTPKVQQSKSFQSIVPYSYHLDARLFGQFLRKHAIARGVTRVEAHVNNVVAKEGKIVSLSTDKGEITSDLFIDCTGFRALLMSKLEEQENWHSYSDVLLCDKAVTIQTANDTSYAPNPYTISHALSAGWSWKIDLQNRSGNGYVYSSRHISPEQAELEFRKHLGLDEQSKFNHIDMHVGRRRQQWIGNCVAVGLSSGFIEPLESTGLHLIYLAARQFVLHNNFSKTQQSTRDNYNKTMNDTYDELKDFIVLHYVLSDRTDSEFWRDIPKTLDGCELLKSRLSVWKHKVCEYFDVSNSTSHMFSDVSYRYILYGMNYFPELDIPFVEGEFDDVFAYIENRQQQACHHTLSHKEYLNATVHGQSGFVSVSMK

SEQ ID NO: 90158 - protein, 500 aa, Pseudoalteromonas luteoviolacea
  REGION 1..500: note = tr|A0A1C0TTI2|A0A1C0TTI2_9GAMM Tryptophan halogenase; OS = Pseudoalteromonas luteoviolacea OX=43657 GN=A7985_01290; PE = 4 SV=1
MSSRKIVILGGGTAGWMAANLIAKSWRDKNIQISVVESPDIGIIGVGEGSTPQFKAFMDFIEVPESEWMPKCNASFKNGIRFVNWSTRPGFEQYFHPFPAQPDDYSAPAFFHNSFVRRKGIDLEGHPDPFFLATYLAEQAKAPIAAENFPFEINYGYHFDSGKLGELLAEKARESGVEHIEARVQDVRKNTDGTIAALVCEEGREICGDIFIDCSGFSSLLMQQHMQVGFESFENNLFNDSAVVLPTEQGDVIASETVSVARKYGWSWHIPLTNRIGNGYVYSSKYCDKDQAETELRAALGLLDSEVEARHLNMRVGQVKEHWHKNCVAIGLSQGFIEPLEATALHIVQETVQSFIECYQDGEFTCKEQGKHNQMMSQRYQAIRDYIVAHYRVNSRTDTNYWRDNANNNQISKSLFNVLNAWVQGKNLSDELDRQDIDKYYPSVSWHCLLAGYGIYPEKHQLIAGNESANIHDVEKIRDYIRRCGLNFLDHRAQLARFLD

SEQ ID NO: 90159 - protein, 507 aa, Pseudoalteromonas luteoviolacea
  REGION 1..507: note = tr|A0A541BDJ6|A0A541BDJ6_9GAMM Tryptophan 7-halogenase OS=Pseudoalteromonas luteoviolacea OX=43657; GN = FLM44_04725 PE=4 SV=1
MLVNDYVVVGGGTAGWLSACLLASATSEQAAKTVTLIESPDIPIIGVGEGTVPSIRDTLKRVGISESDIFNHCDGSFKQSIKFVNWMDKKKHGENNFYHHLFDYPFPFGDNLCQYWHNQSTSSFAEIVSIQQYLAESMKAPKGICDPEFAGVSDYAYHFDAHKFAQLLKRHAIEKLGVIYVSDTVVDVTHSHDGSIDQLVLKEQGSMGFDFYIDCSGFSSYLLGGKLDVPFVDKQDVIFSNKALTVQVPELEASIPPYTISTAHQAGWIWDIALSNRRGVGFVYCDAYLDKDTAFHKLQTYVGRDLNDFNVRDLDMKIGFRERAWEKNCIAIGLSQGFVEPLEATAILLSDFSANLFCNKLPETTADIAVLSKRFNQRVSYAWQSVIDFVKLHYCISDRQDSEFWQDNRASNSIPDSLKERLELWSQTYPTKDDFFSKFEVFDIENYLYVLCGMNFDFNRYGLTEKKTKEFAAQHQQVFVTAEQYKRQLLEQRALLEKVKVNNFSKS

SEQ ID NO: 90160 - protein, 487 aa, Sphingomonas sp.
  REGION 1..487: note = tr|A0A0S9CFK2|A0A0S9CFK2_9SPHN Tryptophan halogenase; OS = Sphingomonas sp. Leaf231 OX=1736301 GN=ASE95_06650 PE=4; SV = 1
MTAVRRVVIAGGGTAGWLAAAMLTKQLGAMVAVTLVESEEIGTVGVGESTIPTVRAFHELIGVDERDFVRATGASYKLGISFEGWTRPDEHYLHSFGKLGQSTWMADFHHFWLEARAQGRAGELGTYCVEHEAARAERFAGGAEAGLNYAYHFDAARYARYLRERCEADGLRRIEGKIARVERDGDSGGIAALVMEDGTRVEGDLFLDCTGFRALLIGETLDVGYEDWGQWLATDRAIAVQTTATAPAVPYTRAIAHEAGWQWRIPLQHRVGNGIVYASAYLSDDEARARLLGNVAGETLIEPRVIRFRTGRRVKAWERNCIALSLAGGFVEPLESTSIHLIMIALTRLLQLFPFDGVSAAAAARFNDMARREIEGVRDFIILHYTLNQRDEPFWQRMRDMPLPDTLVERIALFRESAQAFQASDELFTVTSWVQVMLGQKLEPAGHNRVARMMPPGRLEQTLAHLAGQVTGAVRGLPLHQAYLDQV

SEQ ID NO: 90161 - protein, 501 aa, Pseudoxanthomonas sp.
  REGION 1..501: note = tr|A0A4V2HFR6|A0A4V2HFR6_9GAMM Tryptophan 7-halogenase OS=Pseudoxanthomonas sp. NML130969 OX=2480811; GN = EA655_15170 PE=4 SV=1
MTDSSQPRPVKRVVIAGGGTAGWMAAAALSRTLGKVLDITLVESEEIGTVGVGEATIPTLVTFHRLLDIDEQAFMAATGATIKLGIQFEGWREPGQDYIHSFGTTGKDHWTAGFQHFWMKGRQRGLARDYGDYCLELRAAQEQRFAHLARNGMNYAFHLDAGLYARFLRRFSEGFGARRIEGRIATVQTSAQGDIAALVMEDGTRVEGDLFIDCTGFRALLLGRTLGVAFQDWSHWLFADSALAVQTESVAPPVPYTRSMAGPAGWQWRIPLQHRVGNGIVYSSRFMDQEAARAALLDNLEGPPLFEPRPLRFTPGQRQVTWKRNCVALGLASGFLEPLESTNIHLVSRNLTRLLQSFPHVIRQVDIDEYNAQTEAEMVHIRDFVILHYHVTRRRDTPFWHACAQMDIPATLRHRIDLFAQTGRVFHVPNELFAENSWIQVMLGQGIAPAQYHPVADLMDDAELARFLDGIHQQVEQTVARLPPHADYLRSYCAQPRPAMA

SEQ ID NO: 90162 - protein, 509 aa, Xanthomonas sp.
  REGION 1..509: note = tr|A0A0J6FUS3|A0A0J6FUS3_9XANT Tryptophan halogenase; OS = Xanthomonas sp. NCPPB 1128 OX=1775876 GN=ACP93_04585; PE = 4 SV=1
MNLATTTDGRIRKVVIAGGGTAGWLAGCALAHQFRDRLDITLVESEQIGTVGVGESTVPPIRTFHRFLQIDEQEFLRAVAGTFKLSISFEHWRRPGDRFIHPFGTIGQGTWATPFHHFWLDSLRRGMPSDLGDFCLESVASRADRFSLDTQPQVNYAYHFDAALYAKFLRKKAEAHGLRRVEGQIREVRQHAHDGSVASLLLEDGQVIEGDLFIDCTGFRGLLTEQTLHTGYEDWHEWLPSDRAVAVQTEAVAPPVPYTRAIAHEAGWRWHIALQHRVGCGLVFSSRHMSDDEAHAKLLRDVDGPPLRDPWLVPFRSGRRLQAWNKNVVALGLASGFIEPLESTSIHLTISAVVRLIQLFPHEGISPALVELYNTVSRQEMEHVRDFIILHYHATQRGEPMWKACREMALPESLGIRLRAWRERAHAWQDPGELFRVDSWTSVLLGQGIQPGPPHPLAAAIDDADLRTLLTRIRQPLQQASAAMPSQAEFIERYCKAAPDVWQRGVSLA

SEQ ID NO: 90163 - protein, 504 aa, unidentified
  source 1..504: note = Cellvibrionales bacterium
  REGION 1..504: note = tr|A0A3B8RWB7|A0A3B8RWB7_9GAMM Tryptophan halogenase; OS = Cellvibrionales bacterium OX=2026722 GN=DCE61_03325; PE = 4 SV=1
MNNNKIRRIVIVGGGTSGWMTAAAMSALLPANAYDITLIESDQIGTIGVGEATIPPMQLFNREIGIKEDEFIKETGATFKLGIEFHNWKKQGEHYFHPFGQYGRKLDATPFHQYWLRANKRGTAAKLGEYSLCEIMARTKKFAPTSPDPKSVLSTTGYAYHLDAGLYAKFLRKNAEKKGVKRVEGKVIDVTLREPDGFIQSVTLESSKVIAGDLFIDCSGFRGLLIEEALKTGYEDWSHYLLCDKALAVPSENIDTPRPYTMCTAHKAGWQWRIPLQHRTGNGHVYCSKYTSDDEAASTLLANLEGKALGEPRQLKFTTGRRKKFWNKNCIAIGLSAGFMEPLESTSIHLIQKSITHLITSMPGKEFNRAEIDEFNNINSRDYELIRDFLILHYHLNERTEDFWKHCRTMDVPDSLKHKIALFKNRGRISVEEENLFRLDSWLAVLHGQGITPNGYDPLADCHNKDTVGGFLSDVKSSFVRATKAMPTHEEFIDRHCKSSVGKG

SEQ ID NO: 90164 - protein, 525 aa, unidentified
  source 1..525: note = Alteromonadaceae bacterium
  REGION 1..525: note = tr|A0A495D6J4|A0A495D6J4_9ALTE Tryptophan halogenase; OS = Alteromonadaceae bacterium 2052S.S.stab0a.01 OX=1304900; GN = K256_0698 PE=4 SV=1
MCGFTRNRVTVNSNNNMNPEKFVTANNLRKVAIVGGGTAGWITAAALAKTLENRGIEIVLVESADIGIIGVGEATIPPLMGFLRYLGIDEREFMAATQASYKLGIKFTDWHSPGTSYWHPFGSIGVNIDGQEFFPHWHKARASGENSMLWQYSPSAVMGESGRFYHPSAADKQSFLAGADYALHFDATLVAGYLRDYCLKRGVVRIEDTVETATLTSTGFIDELVLKNHPDLQADFFFDCSGMKGILIGEQLKVPYLDWSNYLLCNRAVALQTENYGNVPPFTHSVARDSGWTWHIPLQHRNGNGYVYSSAFCEPEEAERCLRESVEGKPLTDARHFSFTPGRREQLWYKNCLSLGFASGFLEPLESTAIHLTTKGVETFLSLLPNRDCHPALAQEFNRRFAMEYDSIRDFIVLHYCVTEREDTPFWRKCRELPLPPSLEEKIALYRAQGRIYRNTDDLFKPHSWHSVFDGMNVIPDQHNPMVDRTNAHEVQGIFTQVRELMQKMASGLPTHREFLERHCAAPKV

SEQ ID NO: 90165 - protein, 521 aa, unidentified
  source 1..521: note = Alteromonadaceae bacterium
  REGION 1..521: note = tr|A0A495DH29|A0A495DH29_9ALTE Tryptophan halogenase; OS = Alteromonadaceae bacterium 2052S.S.stab0a.01 OX=1304900; GN = K256_3897 PE=4 SV=1
MSSDGNNENAITRIVIVGGGTAGWMTAAALANFLDTDKISLVLVESDQIGTVGVGEATLPHLRFFNQTLGIDENAFMQATHATYKIGIEFSHWGRKGDSYIHPFGDYGKPVGDIGFHHVWRYLQMQGYQADLSEFSLPVIAAQLGRFDYPDTDMSQIGATFSYAFHLDAGLYAKYLREFSEARGIQRKEGRIQQVQLHPDGGIAALSLDGGEKIEGDFFIDCSGFRSLLLGNTLGVEFCDWSHWLPCDRAIAIPCAGTENPLPYTKAIARDSGWQWRIPLQHRIGNGHVYCSQHLSDDEALAQLTANLDGEPLAEPNFIQFKAGHRVKTWEKNCVAVGLSGGFLEPLESTSIYLIQIAITKLLENFPGSRDETSVMTEFNRQMTLEFERIRDFLILHYHATTRDDTPFWQYCRTMAVPEDLAYKMELFKQRGHVVEYEHGLFLEPSWVAVYLGQGVVPEGFDPRVSGFDFRPLETQLEKLRNSIRAFAEGMPLHSEAIQKYCFAADAVVQPAAHMNLYGRS

SEQ ID NO: 90166 - protein, 504 aa, Sphingomonas sp.
  REGION 1..504: note = tr|A0A3S0R233|A0A3S0R233_9SPHN Tryptophan 7-halogenase OS=Sphingomonas sp. TF3 OX=2495580; GN = EJC47_12020 PE=4 SV=1
MDANAPLRTITIVGGGTAGWMTAALLSHVFRSYTIRLIESDEIGIIGVGEATIPSIRTYNDLAGIDQIEMMRASQATFKLGIDFVDWHRGADRYFHGFGRIGHDFMWLHPHQLWLGERCETRAPFDAYALNCVAAMQNKFRYPDPRSPGSPLGGLDYAYHFDASLFARYLRGRSEANGVIRIEGKIVDVTRDRESGHVAQLVLDDGRAVDGDLFVDCSGMRALLIGDALGVGYEDWNHWLLNDRALAVPCERVAPLTPYTRVTARGAGWQWRIPLQHRNGNGHVYSSAHISDDQAAALLLANLDGKPLADPRAIRFRPGKRHRAWEKNVVAIGLSAGFLEPLESTSIHLIHTGITKLLGLFPHRGFAAADIAEYNRQHDFEFTDVRDFIVAHYKVTDREDTPYWRYLKHMAIPDSLAERLALFASSGRFYKRAAAELFRVESWVQVLLGQGFAMGCDPNAAMVSAEVRSDFLADVADVTADVAAAMPDHAAFIARHCKAPPIAA

SEQ ID NO: 90167 - protein, 511 aa, Sphingomonas sp.
  REGION 1..511: note = tr|A0A432VNZ3|A0A432VNZ3_9SPHN Tryptophan 7-halogenase OS=Sphingomonas sp. TF3 OX=2495580; GN = EJC47_01040 PE=4 SV=1
MTQAAAGKAIVILGGGTAGWMAACLIAQRWPHAQVTLVESPEIGIVGVGEGSTPQLKHFFDRLGIAEAEWMPACDATYKLGIGFHGWSDRAGHGAYFHPFPTALDSHTAPHFFYNTRARRTGRDVAAHPDRFLLPARLAAAACAPQPDANFPFEVSYGYHFDAHKVGAFLGHHATTKLGVVQLQRTIATAERDASGDIAALLCDDGERIPGDVFLDASGFRSILFEKTLGVPFQSFADTLFNDRAVVLPTPRDEAAPLPSQTRATALTAGWVWDIPLTTRTGNGYVYSSCHLSPDQAEAELRAHLGVGDVGTARHLTMRVGRVAKSWSHNALAIGLAQGFIEPLEATALHIVMATVEAFLDAVDANGFTPAASGPFNDAIAARYDGVRDYIVAHYRLNQRGTDPTGYWAEARALAQLSDPLKALMSAWFTGADMAALVEQMGIGRYYNAISWHCLMAGYGTFPDEHRLAPAGPDIERIDLHKIDDFLDRCALNFRPHLTHLPRHLKSRDTR

SEQ ID NO: 90168 - protein, 508 aa, Pseudoxanthomonas taiwanensis
  REGION 1..508: note = tr|A0A562D194|A0A562D194_9GAMM Tryptophan halogenase; OS = Pseudoxanthomonas taiwanensis J19 OX=935569; GN = L613_008200000140 PE=4 SV=1
MDDARLPSTPIRRVVIAGGGTAGWMAAAALARTLGRVLDITLVESEQIGTVGVGEATIPPLRTFHRLLGIGEQDYLAATQGTIKLGISFENWRAQGHRYIHSFGSSGRDHWSAGFQHFWLRGRQEGLAGDYADYCIELQAAHQDRFSHLPDYHVNYAYHMDAALYARFLRALAQRHGCRRVEGKIAEVETDPGSGCIGALKLESGDVLEGDFFIDCTGFRALLIGQALGVGFSDWSQWLLNDRALAAQTTAVRDAVPYTRAIAGTAGWQWRIPLQHRVGNGIVYSSRFMDDDQAREAFLSSLEGEVIRAPWPVRFRPGQRQRCWEKNCVALGLAGSFIEPLESTTIHLIQRGIVRLLQSFPGVLSQAAIDDYNAQLDAELQHVRDFVVLHYHATERRDSPYWEEVASMRLQHRIDLFRETGLVFHQPGELFAENSWVQVMMGQGIVPARHHPAAAVLGRGDLQRFLGDARRQVLETVARMPAHMDYLRRYAPAPPPGLQQAGTAAQDA

SEQ ID NO: 90169 - protein, 537 aa, unidentified
  source 1..537: note = Pseudomonas protegens
  REGION 1..537: note = tr|A0A423EF85|A0A423EF85_9PSED Tryptophan halogenase; OS = Pseudomonas protegens OX=380021 GN=BK644_22490 PE=4 SV=1
MNKPIKNIVIVGGGTAGWMAASYLVRALQQQVNITLIESAAIPRIGVGEATIPSLQKVFFDFLGIPEREWMPQVNGAFKAAIKFVNWRKSPDPSREDYFYHLFGSVPNCDGVPLTHYWLRKREQGFQQPMAYACYPQPGALDGKLAPCLADGTRQMSHAWHFDAHLVADFLKRWAVERGVNRVVDEVVEVQLNDRGYISTLLTKEGRTLEADLFIDCSGMRGLLINQALKEPFIDMSDYLLCDSAVASAVPNDDAREGVEPYTCAIAMNSGWTWKIPMLGRFGSGYVFSSKFTSRDQATADFLKLWGLSDNQQLNQIKFRVGRNKRAWVNNCVSIGLSSCFLEPLESTGIYFIYAALYQLVKHFPDTSFDPRLRDAFNAEIVYMFDDCRDFVQAHYFTTSREDTPFWLANRHELRLSDAIQEKVERYKAGLPLTTTSFDDSTYYETFDYEFKNFWLNGNYYCIFAGLGMLPDRSLPLLQHRPESIQKAEAMFASIRREAERLRTSLPTNYDYLRSLRDGAQLSRNQHGPTLAAQERQ

SEQ ID NO: 90170 - protein, 496 aa, Sphingomonas sp.
  REGION 1..496: note = tr|A0A430BB46|A0A430BB46_9SPHN Tryptophan halogenase; OS = Sphingomonas sp. S-NIH.Pt15_0812 OX=1920129; GN = BRX43_17560 PE=4 SV=1
MNAVTPRRIVIAGGGTAGWMAAAALTRTLGRTAEVTLVESDAIGTIGVGESTIPPLITFNRLLGIGEAEFMAATQATFKLGIQFDGWKGPEDSYFHAFGLTGKDHWAAGFQHFWLDGQARGHAEPYDDYCLELVAAREGKFAHLPDDRMSYAYQLDSTLYGRFLRRMAEGDGTTRIEGRIAGVDLDAESGDIAALRLDDGRRIEGDLFLDCTGFRALLIGQALHVGYDDWTHWLPCDAAIAVQTESVRPPVPYTRAMAHDAGWQWRIPLQHRVGNGIVYCSRYLDREAALRRLLGNVEGKVLTEPNHLRFVTGARRRQWHRNCIAIGLSGGFMEPLESTSIHLIQRAILRLIRLLPPGPISPHDVAEFNDQQLTDMDQIRDFLILHYKVTERRDSGFWRHCAAMDIPDSLAQKIGLFRETGRVFRRNDELFAENSWIQVMLGQGITPQAHHPIAAKLPDEELARFLGGLRQSVATAMRGLPPHADYVARYCGAAPA

SEQ ID NO: 90171 - protein, 506 aa, Erythrobacter flavus
  REGION 1..506: note = tr|A0A3T1CIE4|A0A3T1CIE4_9SPHN Tryptophan halogenase; OS = Erythrobacter flavus OX=192812 GN=EKJ_15570 PE=4 SV=1
MTERAQAIRNVVIVGGGTAGWMTAAALARLLGGTGLAITLVESAAIGTVGVGEATLPQIRRFNSLLGIDEREMMARTAATIKLGIEFRDWGRVGDGYIHPFGRFGQEIGPASFVDYWARAHARGMVAPIGQYCLPIMAALQGRFEPPDASGTRQPYDYAFQFDAGLYAAWLSEHAQSAGVVRREGRIVDVARNSESGAISAVSLEDGAAIRGDLFIDCSGFRALLIGETLETSFEDWSNWLPCNRAFAVPCANGGDYGPYTRATARAAGWQWRIPLQHRVGNGLVYCDAFWDDADAAEALMANLEGEPGAEPRQLRFTTGRRSALWRSNCVAIGLAGGFLEPLESTSIDLIQSGILNLVELFPHTAIEETDRREYNRLMDLEFERIRDFLVLHYVANQREEEFWQAMRAMPLPDSLSARIEDFRERAILPDYADGLFQPVSWISVFLGQNVVPRRWDPRADAMDADELGKRLAAIHGKIADDAAAMPLHLDFLERAGARYGYGAGQ

SEQ ID NO: 90172 - protein, 508 aa, Reyranella sp.
  REGION 1..508: note = tr|A0A5C5SGV4|A0A5C5SGV4_9PROT Tryptophan 7-halogenase OS=Reyranella sp. CPCC 100927 OX=2599616; GN = FQU96_34050 PE=4 SV=1
MLDLTAVKTAAIVGGGIAGWFSALMLRRVLGADVNVTLIDTPGGGAGDIGVSAHVNLVDGLRRNKIPVDEFVRETSAVYKLGVVYEGWRGDDRNDRYYRLFCSAGSRELSWRQNGFCPLLSARIAAGLDLHSWIPGFETIARNAPQKDIPALLRKADLVASYHFDGRRAANYFRKAALARGVKYRTSRVNALELDERGYVRALRITGDSLGVDFVIDASGMARIGIGNTFRAPWRSFSDHLLADRVIPFHWRTSGNPALLTHAVSMNAGWTWLAPQIDRIGAGYVFSSGHIDEPSAIAEIATRFGQAMTPMPMLRFEPGHFETAWVNNVVALGLASGAVEPLEATSMGQLLEQLRNLERIFLGTGGIIGHQTIERFNRANAQCWAGIRDFLRMHYDCQRRDTAFWRDAATAQLSESYAEMRACLQRRTPRFLDIEAYCGSGWQSLFQVVDWILAAASLGITTAAAARDELSRLPPEMRDDVEAYLDGQRRAVVERRPSSAVRYEIVAA

SEQ ID NO: 90173 - protein, 509 aa, Sphingomonas sp.
  REGION 1..509: note = tr|A0A430BIR0|A0A430BIR0_9SPHN Tryptophan 7-halogenase OS=Sphingomonas sp. S-NIH.Pt15_0812; OX = 1920129 GN=BRX43_08840 PE=4 SV=1
MGARVDDETARGDDPRGPLRSIVIVGGGLAGWMAAAQLARQLESVSITIVEAPEDQVAGTAEATTPTIRAYLRGIGVAEQEVIAACQGTARLGTEFVDWRGPGRRFFHPFGQYGMRSRGVAFHHYWRKLRAAGHELPIAELCLASAMARYDRFMLPSDRPEQDLLAFDWGLHLDAGLFARFLMRRAIAQGVVHVDAGVSHVHVEHGLIRAVDTAGGRTITGDLFLDCTGPRSRLLGRALETPFEDWSNLLPCDRVVTVPCVRTGPLHPYTRSTARPAGWQWRIPLQNRIGNGHVYSSRHLSDDAAAAALTGWLEGEAMAEPQLLRMRAGRRTRAWAGNCVALGEAAGFLEPLESTSLALIQSGIERLLALFPDRGCAPALADEYNRVTALEYDRLRDFLVLHYAANARHGEAFWDERRGTALPPMLAHKLRLFRARGHLVQYDGETFGDSSWLSLYAGLGVEATAHDPMADHFSVDDVQAAITRMKASIADTVALAEPHETFLARAVRD

SEQ ID NO: 90174 - protein, 505 aa, unidentified
  source 1..505: note = Alteromonadaceae bacterium
  REGION 1..505: note = tr|A0A495DH11|A0A495DH11_9ALTE Tryptophan halogenase; OS = Alteromonadaceae bacterium 2052S.S.stab0a.01 OX=1304900; GN = K256_3899 PE=4 SV=1
MNQNSIRKMVIVGGGTAGWMTAAAAAKILKNQYCEIQLIESDEIATIGVGEATIPQMRVYNRVLDLDENDFIKKTQATFKLGIEFVDWTRLGQSYIHPFGYYGISMEGVEFHHFWLRMYNQGRAAELENYSIAASAAQKGRFMRPVNRPNSPLADIDYAFHFDAGLYARYLREYSEARGVTRTEGKITQVVQRPNDGFIDAVVLEDGTRIEGDLFIDCTGFRGLLIEETLKTGYDDWSHWLPCDRAIAVPCANAGDPIPYTRSTARTAGWQWRIPLQHRIGNGHVFSSRFMSEDEATAILLANLDGEPLADPRTIKFTGGKRRQYWNKNVVAIGLASGFVEPLESTAIHLIQSTIARLFSLFPTRDFHQDEIDRFNRLSDLEIERVRDFIILHYIATERQDSPFWQYIQSVEAPEYLQRKIRMYQNSGRIYREDEELFNETSWLAVFHGQGIRANGYHPIVDTLSDEDVQRRVDNIREVIGNSSEQMPPQMDFIRQHCLADKIKM

SEQ ID NO: 90175 - protein, 525 aa, Erythrobacter flavus
  REGION 1..525: note = tr|A0A3T1CE45|A0A3T1CE45_9SPHN Tryptophan halogenase; OS = Erythrobacter flavus OX=192812 GN=EKJ_00830 PE=4 SV=1
MMTQVQGEGSGANPLRSICIVGGGTAGWSAAALLARVLRGSGCRITLVESSAIPTVGVGEATIPPIFDFLRNIGADEVEFIRRCQATFKLGIQFRDWLHCDHAYWHPFGNLGVTINQRPFHHYYCRNLAQGHGESLADLCPSVALAEDGKFAFPSPDGNWPGGAVAYALHFDAGLVAAFLREHAEAAGVERLDRRIVGATRGEGERIAAVQFDDGESLAADFYIDCSGFRGLLVEETLNAGFEDWKRWLPCDSAIAAPTAAQQQRAPYTVATARSSGWQWRIPLQHRTGNGLVYASDFISDADAHEELLSGLDGEPLADARVLRFTAGLRKRAWVGNCLAIGLSAGFLEPLESTSIHLIHTGLNRLLDLFPDRGFDPALADAYNRDVWREYAHIRDFLLLHYVPNRREGEAFWDHMRSLDLPDTLAEKIELFTRAGRIMSKQRELFSDISWFYVMHGMGLEPAAIDPLVDVAPSAEVRKVIDQLSGAMKAFRSAAPTHDAILERLLDPSETRRPHFGTGRGWATR

SEQ ID NO: 90176 - protein, 506 aa, Xanthomonas codiaei
  REGION 1..506: note = tr|A0A2S7CP12|A0A2S7CP12_9XANT Tryptophan halogenase; OS = Xanthomonas codiaei OX=56463 GN=XcodCFBP4690_12785 PE=4; SV = 1
MIPAPLRNIVIVGGGTAGWMAAAAFARVLGPTFNVQLIESEQLGTIGVGEATVPHIKAFNNLLGINEAEFVRQTQGSFKLGIEFVDWQRPGTAYIHGFGTQIGHPLGLLPFHQYWIKQQLRGTAQPLGAYTLNTVAAARGKFMTSAGDVPANSPLANIAYAYHFDASQYAHFLRRYSEQRGVTRIEGLVEQVQLHPENGHVRSLQLASGQVVHGELFIDCSGFRGLLIEEALHTGYHDFTHWLPCDRALAVPCENVGPPTPYTRSTARAAGWQWRIPLQHRTGNGYVYCSAHISDDEAAATLLANLDGKPLADPRPLRFTTGRRKQFWNRNVVALGLASGFLEPLESTSIHLIQSGISKLLELFPREGISPVLVQRYNDRLAFEFDRIRDFLLLHYHATERDDSAFWRHCRHMPITPELQAALELFRDSGRFYRNAEEMFAEISWVQVLVGQGIVPTGYHPLVDQVPDTDAEGFLASVAQTISRCVDVMPSHQQFIDRYCKAPAIR

SEQ ID NO: 90177 - protein, 514 aa, Streptomyces platensis
  REGION 1..514: note = tr|A0A1Y2NJF7|A0A1Y2NJF7_STRPT Flavin-dependent tryptophan halogenase RebH OS=Streptomyces platensis; OX = 58346 GN=rebH PE=4 SV=1
MINSVVIVGGGTAGWMSASYLKAAYGDRINVTLVESDRVATIGVGEATFSTVRHFFDYLGLDEREWMPECSGSYKLGIRFENWREPGQHFYHPFERLRTSDGYTLADWWLQEGDRSEPFDRSCFITPALCEAKRSPRLMDGSLFAGGLDGSLGRSTLEEQRSQFPYAYHFDAALLAKFLTKYGTDRGVRHVVDDVTHVGRDERGWISHVATREHGDLTGDLFIDCTGFKGMLINETLEEPFESFQDVLPNNRAVALRVPQDDQATTGMNPYTTATAMDAGWIWNIPLFGRNGNGYVYSDEFCSPEEAERTLRNHVAPGRDDLEANHIRMRIGRNRRSWVNNCVAIGLSSAFVEPLESTGIFFIQHGIEQLVKNFPDERWDPALADDYNHRVAEVLDGVKEFLVLHYKAAQREDTPYWKEAKTRALPDGLAERLAIGTSHLLDERTIYQPYHGFEQYSWITMMLGLGHEPERPRPSLAHIDPTNARAELARLRADADELVAALPSCYEYIASLNS

SEQ ID NO: 90178 - protein, 477 aa, Massilia plicata
  REGION 1..477: note = tr|A0A4P7BP15|A0A4P7BP15_9BURK Tryptophan 7-halogenase OS=Massilia plicata OX=321984 GN=E1742_16285; PE = 4 SV=1
MVAAGLSKSLGKRLDIKLIESDEIGTVGVGEATIPTLMNFHHLMEIDEREFMAETMATFKLGISFENWRNANENYVHSFGTTGTDHWTAGFQHFWHKGRERGLAGDYGDYCLELKASLQNRFAHLPKAGMNYAYHMDAGRYAKFLRRFSERYGVQRIEGKIAEVRKDLIGGDIRALRLDSGAELEGDLFIDCTGFRALLIGETMGVGYEDWSHWLFNDSAVALQTTSVGEAVPLTRAIGREAGWQWRIPLQHRTGNGIVYSTRYTDDDTALRTLQDNVEGEALTAPRVIRFKPGQRHQTWKGNCIAIGLASGFLEPIESTSIHLIQRGIIRLMQMFPTDGISQADVDEYNKQAETEIHHIRDFIILHYNVTNRRDTQYWRDAASMKVPASLQHRIDLFRETGRVFRIPNELFAENSWIQVMLGQGIMPRQHHQTADLMGDEELAHFLGSIATSIDRTVAQLPQHEQYVRRYCAGTGW

SEQ ID NO: 90179 - protein, 517 aa, Streptomyces sp.
  REGION 1..517: note = tr|A0A1H0E035|A0A1H0E035_9ACTN Tryptophan halogenase; OS = Streptomyces sp. cf386 OX=1761904; GN = SAMN04487981_106412 PE=4 SV=1
MLNRVVIVGGGTAGWMTASYLKAAFGDRIDLTLVESGKVGTIGVGEATFSDIRHFFEFLGLKESDWMPACNATYKLAVRFENWRKPGHHFYHPFEQMRSVDGFPLTDWWLKNGRTDRFDVDCFVMANICDAERSPRHLGGAMLSQPYDEHVEEPQGLTMSEHQGKTQFPYAYHFEAALLAKYLTTYTVERGAKHIIDDVKDVKLDERGWISSVVTAEHGELTGDLFIDCTGFRGMLLNKALEEPFISFQNTLPNDSAVALQVPQDMEARGIRPCTTATAQDAGWIWTIPLYGRIGTGYVYASDYLSADEAERTLREFVGPSAADAEANHIKMRIGRSNRSWVNNCVGIGLTSGFVEPLESTGIFFIHHAAEQLVKNFPGADWNPVQRDSYNSSVANVMDGVREFLALHYAAAARNDTQYWKDTKTRELPDGLAERIEHWKYQLPDTESVYPYYHGLPPYSYMCILLGMGGIDLKPSPALSLADNSAALKEFQSVHDQAATLIGQLPTQYEYFTHMRR

SEQ ID NO: 90180 - protein, 507 aa, Asticcacaulis taihuensis
  REGION 1..507: note = tr|A0A1G4RXM7|A0A1G4RXM7_9CAUL Tryptophan halogenase; OS = Asticcacaulis taihuensis OX=260084 GN=SAMN02927928_2229; PE = 4 SV=1
MSTAQARGADHFVIVGGGTAGWMAAACLARLLLRTPGPQKVSLVESEDIPTIGVGEATVPSIQDMLRYLNIDEADFVDATDATYKLAIRFRDWSGPGSDFFHGFGELGPTIDNLPLFQHWLREKIAGAPVPPLSDLSMSAQLALHNRFAKPTTNGNSPLYMAGYAYHFDAGKVAQYLRGYAEAKGVRRIEGRIIEVTQDDQGDIAGLRLADGREIAGDFFIDCSGFAGLLIGKTLGSDYEDWSHWLPCDRAVAMPTQGLRPIAPYTLVTARAAGWTWRIPLLSRLGNGYVYASRFCDDETARQTLTDAVDSAPVAEPRLLRFTPGRRRHPWLRNCLSLGLASGFLEPLESTSIHLIFANLFRFFDYFPRTVDCATLSQGFNARSVREIEEIRDFLILHYKASPRRDTDFWRYVTGMDIPDSLSAKSEVFRQQGKLFADYYDFFKPASWMAIYDGLGVVPDAADPLAALVPQDKARAILRDVTEGIRQAALTAPTHEAALSALLRRAL

SEQ ID NO: 90181 - protein, 519 aa, unidentified
  source 1..519: note = Massilia lurida
  REGION 1..519: note = tr|A0A562R5W3|A0A562R5W3_9BURK Tryptophan halogenase; OS = Massilia lurida OX=1036180 GN=IP91_03240 PE=4 SV=1
MAPIRNILIVGGGTAGWLAACFLAKTLGARDAQAIRITLVESKEIGIIGVGEGTFPSIRGTLSAIGIDEATFIRDCSATFKQGIRFDHWVRPSGTPGHDHYFHPFSQPSQRPGGPELLPYWLMGAAGANVPFAAAATLQKHVADQSHGPKRLTDGDYLGPLNYAYHFDAGRFAALLCRHAQTLGVHRIEATVDGVTLGDDGAIASVMTREAGALTADLYIDCTGFRARLVGEALGAPFRSVSDTLFVDRALAMQVPYARVDAPIPSYTIATAHEAGWTWDIGLHERRGIGYVYSSRHTSDERAERILRAYIGPAANDREPRMLKLNVGYRETQWVKNCVAIGLSGGFLEPLESSGIGLIEAATYLVSYLFPHDGNLAPAAKLFNAQMKTRYERIVDFVKLHYCLTQRTDHAFWTDNADPATIPDTLRDQLAMWRARPPHRLDFVTDLEMYPPSSWQYVLYGMEYATRLHANATSLPDLEAARREFQTIAGLARHAVADLPPHRTLVEHFCKRQGALRRA

SEQ ID NO: 90182 - protein, 500 aa, Asticcacaulis taihuensis
  REGION 1..500: note = tr|A0A1G4RHT3|A0A1G4RHT3_9CAUL Tryptophan halogenase; OS = Asticcacaulis taihuensis OX=260084 GN=SAMN02927928_1886; PE = 4 SV=1
MSDHPVKKVVIVGRDDALWLSANVLWRALGQSGLDITVVELPSLLRPGDVYPTLKQQEAYHNLIGINEGPMMKASHATYTLGQRFNNWSKTKPPFIHGYSTYGRPLNRVSFHHYWVKARAQGLKAEFEDFSLNAVAAKYGRFFLPGEAVDGFAICDYAYHLEAQGYCHVLKTVALDRKIKHVSGRLAEVARDTLSGDITGVTLTDGQAIEGDFFIDASGAESALLGEGLDVGFDSWRQWFPCDRLMTTYAAPLAPLPPFSQVSAFRSGWVGLYPLRNCTAVQQVYTSHDLTDEAAYEAAGIFTSLKLNPDAVVTPFTAGTRRRFWEKNCVAIGEAAAVLDPIDSVRMHVNLLGLSHLISLFPIDRDCGIESTEYNRNVHSSLERIRDYQLCHYVLNQRFDQPFWDHCRNIEVPDALRYKLDLFEARGNLVVYDDETFEEDDWLSMLLGHGLIPKAYDPLADQVSDAEAIQHFQKMLGFIKAAVEPMKPMEETLGIVPIRA

SEQ ID NO: 90183 - protein, 527 aa, Asticcacaulis taihuensis
  REGION 1..527: note = tr|A0A1G4SI85|A0A1G4SI85_9CAUL Tryptophan halogenase; OS = Asticcacaulis taihuensis OX=260084 GN=SAMN02927928_2661; PE = 4 SV=1
MTSSPRILIAGGGTAGWMTAAYLARVFGQGAGAPRITLIESPDIGTVGVGEGSIPTIRTTLQTLGIDEAEFLRDCSATFKQGIRFDDWEVEGTSYSHPFEAPYFTDGAGLLPYWLLQDPATRPPFAEAVTLQKRVADAGRAPKRAHEGGYFGGRMNYAYHFDAGRFGNLLARYACLYGVTHLAGRISEVETGTDGIAAVISPEHGRIEADFYIDCTGFAALLIGKALGSPFHSVRDVLLTDTALAIQLPYADPQEAIPSYTISTAHESGWTWDIGLDSRRGVGYVYSSAHSSDDRAREVLRTYLRRYAGDNAASLEPRLIRFDPGYRKAQWVRNCCAIGLSAGFYEPLEATGIMMIEVAIGLLVDCFPFTGPADASAALFNERMCQRYEKTAEFLKLHYCISRRPEAFWRDNADPATIPENLRALLDMWTYRPPSRFDTLTDIDIFAASSYQYILYGMNYPTDLRAQAPIHSRTEAADKIFARIRAFTDGAIRDLPSHRDLITQIYAHGFAPPPALKRTDPFLTVSR

SEQ ID NO: 90184 - protein, 361 aa, Burkholderia pseudomallei; identical to SEQ ID NO: 87386
  REGION 1..361: note = tr|A0A0F6G2S4|A0A0F6G2S4_BURPE Tryptophan halogenase; OS = Burkholderia pseudomallei MSHR2543 OX=1249472 GN=prnA; PE = 4 SV=1

SEQ ID NO: 90185 - protein, 502 aa, unidentified; identical to SEQ ID NO: 87509
  source 1..502: note = Terrabacteria group
  REGION 1..502: note = tr|A0A537K705|A0A537K705_9BACT Tryptophan 7-halogenase OS=Terrabacteria group bacterium ANGP1; OX = 2569760 GN=E6H00_03780 PE=4 SV=1

SEQ ID NO: 90186 - protein, 499 aa, unidentified
  source 1..499: note = Alphaproteobacteria bacterium
  REGION 1..499: note = tr|A0A537M958|A0A537M958_9PROT Tryptophan 7-halogenase OS=Alphaproteobacteria bacterium OX=1913988; GN = E6G94_03185 PE=4 SV=1
MQDRAIRSIVIVGGGTAGWMAAAALAKVAGTQNRSITLVESEEIGTVGVGEATIPPITIFNRLLGIDEDEFVRETQATFKLGIEFVDWLRVGHRYFHHFGLFGADLKDGVSFAHYWLRWVGQGGNPDNLRFSSEAEAARMGKFARARTKRGDTPNINYAFQFDAARYAAFLRRFAEKRGVERVEGKVVDVQQNGESGHIESVELAGGKRIEGDFFIDCSGFRALLIGKTLGCPFDDWSQWLLANGAVAMPSRRDGDPEPFTRVTAVESGWQWHIPLQHRTGNGYVFCDRFITPDDAAAKLAGRLGDTALADPRILRFTAGQRRSWEKNCLAIGLSCGFLEPLESTSIHLIQVAISKLLDLFPDRDFHPAILDRFNKEMDLLYVSIRDFLIAHYKLTEREDTPFWRYCKHMDVPDSLATKLHLFETRGEVLAADHDIFREISWFAVLYGQGVVPKGYHPLADAMSDDDLSLTLSQIRAAIRERVDSLPSHAQFLDSIVGR

SEQ ID NO: 90187 - protein, 530 aa, unidentified
  source 1..530: note = Alphaproteobacteria bacterium
  REGION 1..530: note = tr|A0A411JKH3|A0A411JKH3_9PROT Putative tryptophan halogenase OS=Alphaproteobacteria bacterium OX=1913988; PE = 4 SV=1
MAFWQHLPGQQNPGNHGQARPAGIEEHMAIQQIIIVGGGTAGWMAAAALSRLKAGRPVEITLIESEAIGTVGVGEATIPPFVGFNELIGVDEREMLSAVGGTFKLGIQFENWNRIGDSYIHPFGAYGYTMGGISFHHVWHRMAGAGDKRPIQVFNLETMAAYFGKFARTEDYKRDDLPPVNYAYHLDAGRYAAFLRQLAESRGVVRQEGRIADAAIDGESGFVTGVTLDDGRQFAGDLFIDCSGFRGLLIEQALKTGYEDWTHYLPCDRAVALPCKRDDGSPPPPFTRATAHRAGWQWQVPLQHRNGNGHVYCSAHMEDQEALDILLGNIAGKPQAEPNWLRFVTGRRKKFWNKNVVALGLAAGFMEPLESTSIHLINTGIDKLLSLLSLDGITQAQEDAFNRLTAREYARIRDFLILHYNATSRTDSDFWNYVRTMPVPDTLTEKVELFKANGQIFREEDELFTETSWAAVMMGQGITMGGHNAMADALDPAKTAEEVNEMEQSIRYLVGAMPGHGDYLARYCPAPAAA

SEQ ID NO: 90188 - protein, 494 aa, Teredinibacter sp.
  REGION 1..494: note = tr|A0A509DVK4|A0A509DVK4_9GAMM Flavin-dependent tryptophan halogenase RebH OS=Teredinibacter sp. ISS155; OX = 2584524 GN=rebH_2 PE=4 SV=1
MVVVGGGTAGWIAAAVLANEFAEGELVIELVESEEIGTIGVGESTIPPFLELLKNLKIDERDFIQKTQASFKLGIEFVDWHTKGERYFHPFGHITAGMDEYMFYNLWIKSYLNGEHYAIQDFCASSVMARHNKFFLPQSAQNTPIAESRYALHLDAKLVAQYLREYAEARGVIRTEGRVERVEQNDDGSIAGVKLQNGTQVAGDFFIDCTGFHALLTEKTLHVDFVDWTHYLPCDRAVVVQTKNAGEILPYTRATAQDFGWSWRIPLQSRTGNGYVYASEYCSDEEARKTLLNAVDGELLTEPRVIPYRTGVRQQIWTQNCLALGLASGFIEPLESTAIHLVVRGMVHFMRHFPDREISSAFIDEYNRRMTVDYEEIRDFIVLHYCLTDREDTEFWRWCKNMELPESLSRIIDYFKVQGNVPEVLDPLFHPVSWRSVCEGMAVRPRKYSALIESTNYDEAKQHFDKYKIMLEEFIQKLPSCSEFVSKNCPAKVS

SEQ ID NO: 90189 - protein, 497 aa, Streptomyces iranensis
  REGION 1..497: note = tr|A0A060ZPC6|A0A060ZPC6_9ACTN Tryptophan halogenase; OS = Streptomyces iranensis OX=576784 GN=SIRAN1886 PE=4 SV=1
MSSEGREQYDVVVVGGGPGGSTLAALVAMRGHRVLILEKETFPRYQIGESLLPSTIHGVCRMTGVAEKLAAAGFTPKKGGTFRWGANAEPWTFSFSVSPKIAGATSHAFQVERSKFDNILLEHAVEKGAEVRFRVSVTDVIEDAERVTGVRYTDADGTEHEVHATYVVDASGNGSRLHKRVGGTREYSQFFRSLALFGYFEGGKRLPAPNSGNILSVAFESGWFWYIPLTPDLTSVGAVVRRENADKIQGDPERALLALIDECPLIKEYLSDATRVTEGQYGQLRVRKDYSYHQTNFWRPGLVLIGDAACFVDPVFSSGVHLATYSALLAARSISSSLAGIVSEEAAFTEFEARYRREYGVFYEFLMSFYDMHVDEDSYFWSAKKVTRNQHTELESFVELVAGVSSSEFDLDGAESAALRMKSKSAEFVSAIDEMSADADGNMTPLFRSSAVRQAMQEGAQVQSRAFLGEDLGPDVPMFPGGLITSDDGMLWQPGPA

SEQ ID NO: 90190 - protein, 314 aa, Alteromonas sp.
  REGION 1..314: note = tr|A0A520WJ35|A0A520WJ35_ALTSX Tryptophan 7-halogenase (Fragment) OS=Alteromonas sp. OX=232; GN = EVA22_10110 PE=4 SV=1
MTTPHRIVIAGGGTAGWMAANLLAHRWANQAVTITLIESEDIGTIGVGEGSTPTLKRFFQTLDIPEYDWMEECQATYKVNIKFTGWNGNNSHSYSHPFISQLDVFSERAFHVNALTRRLGLDVETQPDKFLMAGYLAKKNLAPLPSHNFPFDIEYGYHFDSLKLGRFLRERAKSKGVYHVVGNIESVHTSPSGDISHLICQDGQKFDGDLFIDCTGFSGLILQKTLGVPFRDFSDNLFNDSAVVLPTPACANLPVETESVAMSNGWRWQIPLRNRTGNGYVYSQQYQEKDAAECELRRALGMENTDVEAKHLSM

SEQ ID NO: 90191 - protein, 511 aa, Teredinibacter sp.
  REGION 1..511: note = tr|A0A509E0P7|A0A509E0P7_9GAMM Flavin-dependent tryptophan halogenase PrnA OS=Teredinibacter sp. ISS155; OX = 2584524 GN=prnA_3 PE=4 SV=1
MQPERITSIVIVGGGTAGWISAAILAKLLPSTACKITLIESSEIATVGVGEATIPPIIELLRYLEIDEQDFICKTEATFKLGILFKDWLTPGSNYFHPFGSVGVGINKVSFFHYWQIIRAQFPDTQFADFSPAAAMANAGKFIPPAMSGEDSLLRGANYALHFDANLVAKYLQTYSLAKGVERRQATINSVHQNDKGFIQQLTLHNGETIAGDLFLDCSGFTGLLIEKTLHAGYENWQKYLPCDSAVTVLSQKSEKTPPYTVATAKAAGWQWQIPLQHRMGNGYVYCSKDCEDSDAQHLLLNSLATPAISEARKLTFTTGYRKIMWKHNCIAVGLSAGFLEPLESTGIHLIMRAVKKLVELLPNKNCDPALADEFNRTMIAEYEAIRDFLVLHYVTTQRSDSPFWRRCSSMDIPESLARKIAIFLDQGKIAFNPHDLFMEQNWHAIFEGMNVRPNSVDWFADFTPESEALNIARQLQHLLHKIVGTLPSHDNFLTQVRGNNIRSTKLPQAS

SEQ ID NO: 90192 - protein, 499 aa, Teredinibacter sp.
  REGION 1..499: note = tr|A0A509E1C9|A0A509E1C9_9GAMM Flavin-dependent tryptophan halogenase PrnA OS=Teredinibacter sp. ISS155; OX = 2584524 GN=prnA_2 PE=4 SV=1
MKPNKIVIVGGGAAGWMTANLMAHEWGGSGISIVVVESSSIGTVGVGEGSTPFLREFFAKLNICEDEWMPACNATFKNGIRFPGWSVLDSSYFHPFYVEQDAENAIQFFKASFARRMGFDLVVNPDAYFLATQIANQRRAPIRADGVQSNTDYGYHFDSDLLGRFLKKKAIARGVQYIDDKVLHVNLNDSGDVETVRSEKNGEIAGDFFVDCSGFKGLIIQQSLGERVISFKSKLFNDSAVAIPTPLNNSSDSGLLSETISTAISNGWVWQIPLSNRFGNGYVYCSDFLSEDQAELQLREFLSAHGDESPARHLHWTPGRISQHWKRNCVAIGLSQGFLEPLEAPMMRIIQHTCESFIDNFQNGSFTGQYRDTFNAGINQLIDGTSDYLQAHYKASSRSDSEYWVANRSNMSMSDELKGLLSAWISAASFDEVLAEIADSQVYHKTSWYCLFAGKGCFRPSRQVGPQKLVDQRNSIMSRLELEARRYMKHSEYLKSICS

SEQ ID NO: 90193 - protein, 506 aa, Xanthomonas campestris; identical to SEQ ID NO: 85891
  REGION 1..506: note = tr|A0A1T1S1D0|A0A1T1S1D0_XANCA Tryptophan halogenase; OS = Xanthomonas campestris pv. durantae OX=487862; GN = Xdur_16930 PE=4 SV=1

SEQ ID NO: 90194 - protein, 561 aa, Ruegeria sp.
  REGION 1..561: note = tr|B7QXA4|B7QXA4_9RHOB Tryptophan halogenase; OS = Ruegeria sp. R11 OX=439497 GN=RR11_1384 PE=4 SV=1
MDNRLKKITIVGGGTAGWMTALILETEFARTSAAKDRPKICLIESPNIATVGVGEATVPRMPKTLRQAGISERAFFRETNASFKLGVKFCNWNKDAKGNRIDYVNPFAHGQLLEGLEAAEYFLRFGNGDRDFTQSIAPHDDLGRLCKGARPLGQPEFEQRFGYAYHLDAVKFAGMLTKVCTKQGVEHIRDEVTSVELDEHGNVSHLMLEKRGRHDIEMVIDCTGFRGLIINKALGEPFLDYSEYLPNDRAMALQIEHPDPEKIESLTRSTALGAGWTWRVPLYNRVGTGYVFSSAHRTDDQAADEYLEWLGDSGKGATPRVIPMRIGRVRNAWVKNCLAIGLAGGFIEPLESTAIHMIDHAVRWFAEHLPTKEIAPSLRSRYNRQMDKLYNEVLEFICLHYRLGNRTDDQYWIDARTEMKVPDRLAENLELWQHRLPMPHDIEFATLFDYRVYQTVLLGKQVYDTGYGAGIRDRLRPLKKPIWFQWWKGAKMDLAQILKAMPDHKTLLRDIRGELDQSGFGIAAAMKPTVSMPGEAMAPFAVQNMPSHTEIQTGSKDLQLF

SEQ ID NO: 90195 - protein, 507 aa, unidentified
  source 1..507: note = Terrabacteria group
  REGION 1..507: note = tr|A0A537K886|A0A537K886_9BACT Tryptophan 7-halogenase OS=Terrabacteria group bacterium ANGP1; OX = 2569760 GN=E6H00_03220 PE=4 SV=1
MPAQEIKSVVIAGGGTAGWMAAAAIAKVMGPRLSITLVESDEIGIIGVGEATIPSIALYNDLLRLDENDFLRQTQGTFKLGIEFVNWYEPGHRYMHAFGAIGKDLAYIPFHHYWLQEVLQGRGESLWHYSLNWMAAHQDRFARLERIADTPLPGVIYAFHFDASLYAAYLRRLAQQMGVRRVEGMIAEVLQNPESGDVSALRLKDGREISGELFIDCTGFRGLLIERTLKVGYDDWTPWLPVDRALAIPTERVGPLTPYTRSTALEAGWQWRIPLQHRTGNGHVYSSAFVDDDRAAELLIANLDSRPLADPRPIRFVTGRRRQLWSHNVVCLGLASGFLEPLESTAIHLIQANIQRLVLLFPHHGDCDHRRAQFNQAAAAEYEYVRDFIILHYYLNNRVGERFWDECRHMSVPDSLTHKIELFRETGGIFPTMYDLFHLTSWLQVMWGQGVRPRGAHPFVQTVAPHDRVEYLKNIRDLIAQAASELPLHDEFIARHCRAPAPAAAVT

SEQ ID NO: 90196 - protein, 505 aa, unidentified
  source 1..505: note = Alphaproteobacteria bacterium
  REGION 1..505: note = tr|A0A411JKG5|A0A411JKG5_9PROT Putative tryptophan halogenase OS=Alphaproteobacteria bacterium OX=1913988; PE = 4 SV=1
MTAAAPLKTIVIVGGGSAGWMTAAALADAVGQTCAITLIESEAIGTVGVGEATIPPIRHFNRRLGIDEATFIRETQGSYKLGIEFVDWGKLGHSYFHPFGQYGAEFDQVPFYHHWMHEWLAGRVDGPIDEFAMCWAMAKAGKFTHPSPDRRLIQSTFDYAYHFDAGLYAAYLRRFAESRGVVRKEGRVIDVALRGADGFIEAVTLDDGTRIAGEFFVDCSGFRGLLIEEALAAGYDNWQHWLPCDRAVAVPCERGTFTPYTRSTAKAAGWQWRIPLQHRTGNGYVHCSDFLSEDAAADELLATLDGKPLADPRPLRFVTGKRREFWKRNCVAIGLSAGFMEPLESTSLHLIQYAILRLIALLPDSAMSPLLAREYNAQTTREYELIRDFLILHYKASERDDSELWRYTAAMPIPDSLQYKIDHFRAHGMLVADGQELFANPSWIAVYLGQGIVPQRAPALAHMRTGVPVAERLAQIRSAMDEAVAAMPSHGEFIARHCAAPPVAA

SEQ ID NO: 90197 - protein, 227 aa, Alteromonas sp.
  REGION 1..227: note = tr|A0A520WMQ4|A0A520WMQ4_ALTSX Tryptophan 7-halogenase (Fragment) OS=Alteromonas sp. OX=232; GN = EVA22_04620 PE=4 SV=1
NRTGNGYVYSQQYQEKDAAECELRRALGMENTDVEAKHLSMRVGQCERHWDKNCLALGLSQGFIEPLEATALHLVQTSIELFADNYSFNETSAQQRQAFNREVSERFERVRDYIVCHYKLNGRNDSDYWRDNRANMKLSESLLSLLDVWYRKGDIVEEIKRQGIGRHFSTTSWHCLLSGYGVYPPPALNQPASLKESGDLFEEKKLAAFFNRCSLNFDKQSTLFNAG

SEQ ID NO: 90198 - protein, 505 aa, Xanthomonas campestris
  REGION 1..505: note = tr|A0A1T1S979|A0A1T1S979_XANCA Tryptophan halogenase; OS = Xanthomonas campestris pv. durantae OX=487862; GN = Xdur_09040 PE=4 SV=1
MTQAQIRRVVIAGGGTAGWIAACALSHQFRNLLDITLVESEQIGTVGVGESTVPPIRTFHRFLQIDEQEFLRAVAGTFKLSISFEHWRRHGERYIHPFGITGQSTLVCAFHHLWLESQRRGMPGSFGDYCLETVASRVDRFALHGEPAVNYAYHLDAALYAKFLRARSEACGVKRVEGRIQQVTVQPHSGDVASLVLEDGQTIEGDLFIDCSGFRGLLIEQTLHTGYEDWSHWLPCDRAVAVQTEALGPPVPYTRAIAHEAGWRWHIPLQHRVGNGLVFSSKHLSDDQAHAKLLRDVAAPAVREPWMVPFRTGRRLKAWNKNVVSLGLASGFIEPLESTSIHLTISAVVRLLALFPAEGIAPSQVQLFNDVSRAEMEHVRDFVTLHYHATQRDEPLWQQCRQMELPESLALRLRAWRERAHAWQGADELFRVDSWTHVLMGQGIAPEQHHPLTRAFSDHDLRRLLDGIAQPIQHSVQQMPSQQDFIERYCKAGEQVWGMRSPVPA

SEQ ID NO: 90199 - protein, 485 aa, Teredinibacter sp.
  REGION 1..485: note = tr|A0A509DT86|A0A509DT86_9GAMM Flavin-dependent tryptophan halogenase RebH OS=Teredinibacter sp. ISS155; OX = 2584524 GN=rebH_1 PE=4 SV=1
MSAAAFANVFDPSQYSIKLIESSAISSVGVGEATIPPIRQFNRMLGIDEDEFIRNTNGTFKLGIEFVNWGKIGDAYMHPFGAYGTKFGSLTFYNYWLKYYLQGKSQSISDYSLSVQAAKSKKFMRPAKLPNSPLAEITYAFHFDAGLYAQFLRNFAESRGVQRIDDIVDQVNIDPINGQIRSLDMKSGEHHKGDLFIDCTGFKALLIQGALKTGFEDWSNYLLCDSAVTVATKNTETPAPYTRATAHPVGWQWRIPLQSRVGNGYVYSQSFISDDDAKQVLLDNIQGETINDPRVIRFKTGIRKKVWHKNCISIGLSSGFLEPLESTSIHLIQTALAKLLAFFPTQSFDEELIDQYNALMREEFENVRDFVILHYKLTEREDSDFWRYCKNMDIPVKLQHKMAMFKSTGRLHRENNELFDVISQFAVMFGQGLIPESYHPLADDVNDLEFDKGMNAIKEVITRSAEAMPTQEEFIKKHCEFKPSP

SEQ ID NO: 90200 - protein, 500 aa, unidentified
  source 1..500: note = Alphaproteobacteria bacterium
  REGION 1..500: note = tr|A0A537M925|A0A537M925_9PROT Tryptophan 7-halogenase OS=Alphaproteobacteria bacterium OX=1913988; GN = E6G94_03190 PE=4 SV=1
MATGEPIREVVIVGGGTAGWMTAAAIARFAGPGRRIRLIESEAIGIVGVGEGTIPPILEFNKQVGLDEQAFIRETRATYKLGIEFVGWSKEGERYFHPFGRIGRTYDGVDFHHLWRKYREHPSVGPLIAYTISAVAGLNGRFSHPSPDIRSPLADLSYAFHFDASLYGQFLRRHAEARGVERVEGRIVDVERDPETGHVRAVRLDDDRRVEGELFVDCSGFRSLLLGQAMGVEFDDWSHWLPCDRAIAVPSERTEPLLPFTRATARPSGWQWRIPLQHRIGNGHVYSSAHMEEEEAERLLVEGLDGKPIGGFNHIRFTAGRRAKSWAGNVIAIGLSSGFLEPLESTSIHLIQHGIQKLVALFPDSSFDPVAVAEYNRSFSEMYDSVRDFIILHYKVNQRSGPFWSQVREMEVPDSLAHKLSLFADRGRFFRYHDDLFELASWTAVMLGQGLIPKSWDPLLDSLKDEEVLRAMADLRAGYHKAASTMETHADIIARIAGAR

SEQ ID NO: 90201 - protein, 525 aa, Teredinibacter sp.
  REGION 1..525: note = tr|A0A509E1K4|A0A509E1K4_9GAMM Flavin-dependent tryptophan halogenase RebH OS=Teredinibacter sp. ISS155; OX = 2584524 GN=rebH_6 PE=4 SV=1
MKKIRSVVVVGGGTAGWITAGRIAALQKKRLGKSQNATDKAVQVLLVESANKPPIGVGEGTWPTMRNTLRQLDIRESDFIKHCDATFKQGAKFSGWVTGKQDDYYYHPLVLPQDFSQVDIAPYWLWQKQQQQTESFSKAVCFQEYLCEQNQAPKNIRTPEYAGIANYAYHLNSEKFSRFLQQHCMEHLDVKHLVGDVTGVQSQPNGDIESLVISGQEAPLAGDLFIDCTGFSSILLGKHFNVPLTSCEDVLFADTALATRVNYDSSDAPIATHTNATAQNAGWIWDIGLQTRRGIGYVYSSKHSSEEAALAELLRYTGGQVNEADVRKIPINSGYRQTFWKNNCVAVGLSAGFIEPLEASALVLVELSASMIAEQFPATRELMDIVAKRFNDTFSYRWQRIVDFLKLHYVLTKRQDTAFWKDNQDMTSVPESLQELLQLWRYHSPRDYDFTSNNEVFPAASWQYVLFGMGFEADYSHTYNPDSYSSNMANQAMMKNKGMVDRCVAQLPKHRELIDKIHQYGLQSI

SEQ ID NO: 90202 - protein, 504 aa, Cellvibrio sp.
  REGION 1..504: note = tr|A0A5J6PEK5|A0A5J6PEK5_9GAMM Tryptophan 7-halogenase OS=Cellvibrio sp. KY-GH-1 OX=2303332; GN = D0C16_16015 PE=4 SV=1
MKRTENPLGSICIVGGGTAGWMAASLLSNILHGSNTKITLIESADIATIGVGEATVPSFMAFLKDARLDTKEFMQATAGSIKLGIRFENWYQQNHHFLHPFGKIGRAIDGHEFYQIWLKTLADGNTTRWVDHSPSGIMSEENRFITEMQLAKTPLASYGYAVHLDAAYAARHMREITLARGVQRIESTVESVQTDERKFIQSVQLANGQTIESDFFIDCTGFKGLLISETLKVGYDDWSNYLPCNRAVAVQTENAGDPLAYTIASARAAGWSWKIPLQHRTGNGYVFASDYCSDDEAINTLMSVIKGDLINEPRIIPFVSGMREKIWYKNCLALGLASGFIEPLESTAIHLVYRTLVHFIRNFPDKHFASFLEQQFNCDIARDYMEIRDFVILHYCTTQRGDTAFWRWCQTMEIPESLREKINQFRHRGQLQHHPENLFGADSWYSILEGMNIRPETYHPLVDALDSQKLGQSLKQGANAIRATVMKLPSHGEFLRQHCPAKQS

SEQ ID NO: 90203 - protein, 226 aa, unidentified
  source 1..226: note = Alphaproteobacteria bacterium
  REGION 1..226: note = tr|A0A537M0B0|A0A537M0B0_9PROT Tryptophan 7-halogenase (Fragment) OS=Alphaproteobacteria bacterium; OX = 1913988 GN=E6G94_11200 PE=4 SV=1
IGNGHVYSSAHISDEDATAALLANLDGAPVAEPRLLRFVTGRRKKFWNGNVVALGLAAGFMEPLESTSLHLVQSGITRLLALWPDRDFDPLSIAEYNRITIEEYERIRDFLILHYKLTGRDDSELWRYCGAMEVPETLQYRIDHFRAGGRLVSPGNELFQNASWLAVHVGQLNWPERYDPLADARAADVDAPAILASMAGAAAEAAEAMPRHEAWIDRFCRAGGTP

SEQ ID NO: 90204 - protein, 557 aa, Alteromonas sp.
  REGION 1..557: note = tr|A0A520WQM8|A0A520WQM8_ALTSX Tryptophan 7-halogenase OS=Alteromonas sp. OX=232 GN=EVA22_00835 PE=4; SV = 1
MSDNESHSSMHRVVIVGGGTAGWLAAGILAAKLSANHTVTLIESPNIPSLGVGEGSWPSLRDTLLDIGISETEFLTVCHGAFKQGSSFVNWRKGGHCYYHPFTVPTGYNELDIYTCWKSIAPNTSYEDVFSLQAAMCAAGKAPKQIATPDYAHVLNYGYHFDATKLAELLKNHCVDKLNVAHVVGHVDSVHSHQNGDIESVSTKDGEKIVGDLFIDCSGSRGLLIKEHFTIPWVPVKRTMLNDRAVALQVPYSNEDAEIKSTTVATAQTCGWTWDIALQHRRGVGLVYSSQFTNEEQAKQVLIDYVRERYPSAQDAELSFRTLSFEPGYRSQFWVKNCLSLGMSSGFVEPLEASAIAMVELGLRMLCEAFPQNKAHMEIASKRYNSRFAYRWQRVIDFLKLHYALSDREEPYWLAQRDKASIPDSLAELLELWKYQSPSRLDLIENEEIFPSASYQYVLYGMGFSSSTSPLRLNEEHKRKAVHIRETLQQTKNAYLQGLPSNRVLLNDIAKRYSNEKQHVPSHAQREKNKHASASSCNDIKNTSDKKDTSNDRIGFR

SEQ ID NO: 90205 - protein, 511 aa, unidentified
  source 1..511: note = Terrabacteria group
  REGION 1..511: note = tr|A0A537K8C1|A0A537K8C1_9BACT Tryptophan 7-halogenase OS=Terrabacteria group bacterium ANGP1; OX = 2569760 GN=E6H00_03215 PE=4 SV=1
MNVAQTPGPIPSVVILGGGTAGWMTAASLLQRLSRLGITVTVVESSQIGTIGVGEATVPAILRYFSSLDLDAFDVLRATNGTIKLGIEFDGWKHEGHSFIHPFSRYGIQAGPVAFHHLWNRLRAAGETAPIDDYSLGVQMARAGRVFLPPKQPRAEFEIFDWAVHFDAGRFALFLRRFCEARGVRRIDARLTEVVRDPQSGHITRLRLDNGETVDGQLFIDCSGFHRLLIERVLESGYEDWRHWLMCDRAVALPCAAADPTQLAPYTRARALAAGWAWRIPLQNRVGNGYVYSSDHISDEDAVVSLRRELEGEALAEPNLVRFRAGHVRRFWVGNCVAIGLSGGFLEPLESTSISLIQMGIDKLIHLWPDTRMAPELASEYNRLSVQEFARVRDFIVLHYAANGRSEGDLWRYCREMALPDTLEHKIALYRAGGQLVQYQSESFFDSSWVCMYANFGIEARNWDPLAELIDLDELKNLTRRLRPDIAVLAREGSPHREFLRLKGALAETRA

SEQ ID NO: 90206 - protein, 418 aa, Alteromonas sp.
  REGION 1..418: note = tr|A0A520WLM9|A0A520WLM9_ALTSX Tryptophan 7-halogenase (Fragment) OS=Alteromonas sp. OX=232; GN = EVA22_06040 PE=4 SV=1
MNKLPQEIVIVGGGTAGWMTACYLARTAELMANNSNVPACAPKITLLESAVISTVGVGEGSTPYLRHFFEFLGINEIEWMLRCSATYKMGISFERWTTTAESKTTRPAFTDSDSYFHPFFSSLDIPTADMYFSAVNEYRKGASHDINPSHYFTAAHMVGKGITPDTICSSANIDYAYHFDAGLLGDFLKEYALNKGVSHQIGTVANVECHEHTINSLKLDDGNTLSADFFIDCSGFRGLLGKQALSRRFTSYADTLFNDAAVAIASDATASPETALQTRSIALSHGWQWHIPLTSRTGNGYVYSSQFCTEAQAEEELRLALEPDQPHQQARHLKMTVGRLEEHWKGNCLCIGLSQGFIEPLEATALMLVQYALNHFIDCWQSNNPRREVRYNSEINRMFDGIRDYIAAHYYLNTRDDS

SEQ ID NO: 90207 - protein, 499 aa, unidentified
  source 1..499: note = Alphaproteobacteria bacterium
  REGION 1..499: note = tr|A0A537LTV2|A0A537LTV2_9PROT Tryptophan 7-halogenase OS=Alphaproteobacteria bacterium OX=1913988; GN = E6G94_16140 PE=4 SV=1
MADPRRHHIVIVGGGTAGWMTAAALARFASRTHRVTLVESDAIGTVGVGEATIPQIRLFNAALGIEEDEFVRETQGSFKLGIEFADWLRPGHRYMHAFGTIGRAAGIVPFHQLWLRGRALGVADELRHYSLNEAAALAGKFDRVARAPGSVLPEIPYAYHFDAGLYARFLRRFAEARGVERVEGRIVHVRRDGEGGDIASVELEGGASVAGELFIDCSGFRGLLIGETLGAGFEDWSHWLPCDRAMAVPSERQSAPEPFTRSTARAAGWQWRIPLQHRTGNGYVYSSRHISDDEAASALLAYVEGEALADPRPLRFKAGKRRRMWVRNCVALGLSAGFMEPLESTSIHLVQSAISRLLDLLPAGRVAEAEIAEFNRKSDFEWARIRDFIILHYRGTEREEPLWHACREMALPEELQHRIDLFRAAGRIARDHDELFAEVAWLQVMIGQGMLPEGWHPLADGFPADDLQGFLADMRRLVDHEAARMPAHGDFIERHCAAL

SEQ ID NO: 90208 - protein, 509 aa, Xanthomonas campestris; identical to SEQ ID NO: 82725
  REGION 1..509: note = tr|A0A1T1SLW5|A0A1T1SLW5_XANCA Tryptophan halogenase; OS = Xanthomonas campestris pv. durantae OX=487862; GN = Xdur_04220 PE=4 SV=1

SEQ ID NO: 90209 - protein, 505 aa, Teredinibacter sp.
  REGION 1..505: note = tr|A0A509DZN9|A0A509DZN9_9GAMM Flavin-dependent tryptophan halogenase RebH OS=Teredinibacter sp. ISS155; OX = 2584524 GN=rebH_5 PE=4 SV=1
MLDSRNSPDSIVIVGGGSAGWMAANLFIHSWPRTKITLIESQDIGTIGVGEGSTPYLKSFFNQLGIKDCEWMPKCNATYKAGIRFPSWSQIDGYTSYFHPFYSQLDLNTGDEFFKRCLQKKTGEANSVHPDDYFVAEKIAAYGKAPIENKKLPFDVDYGYHFDAGLLGAYLKKLAISKGLKHLVGNVNEVVIGEEGGIKQLNTSVGTLIADVYVDCTGFAGLLINKALKVEFKSYSGSLLNDSAVTVATDMSDRELIPAETCSTALHNGWIWRIPLVNRYGNGYVYSSSFVSSDDAEVEMLRHLKLDKVNHPECKHIKMKVGRNASHWEKNCIAVGLSQGFIEPLEATALMLTQFTIEKFIENYSSEEIEVNVRRENFNSKVNMLIEGVRDYVQAHYLLNSRSDTEYWKACREDAKISSRLESIVAAWDVGELDLALESLTGKLAYLRPSWYVMLSGMGRFSLLDQKNDSRDVSREKAANYCRQIAQTVFQDHRTLLSRYSNNAK

SEQ ID NO: 90210 - protein, 502 aa, unidentified
  source 1..502: note = Alphaproteobacteria bacterium
  REGION 1..502: note = tr|A0A537LTP3|A0A537LTP3_9PROT Tryptophan 7-halogenase OS=Alphaproteobacteria bacterium OX=1913988; GN = E6G94_16195 PE=4 SV=1
MSEHAIREVVVVGGGTAGWMAAAAFSVLLDRRTVKVTLIESDEIGTVGVGEATIPPLVAYNNMLGIKEDEFLAATQGTFKLGIEFVDWGALGTRYFHPFGEHGQDFRGVHFHQLYLREAKRRALPDIREWSMSGAAAALGRFARPGPDARLPLSQLAYAFHFDAGLYARFLRGLAERNEVTRVEGRIVDVALHHESGNVEAVTLADGRSVAGELFIDCSGFRGLLIEEKLGTGYQDWSRWLPCDRAVAVPCAYSGQPDPFTRSTARASGWQWRIPLQHRMGNGIVYSSAYMERGEAEALLLANLEGEALAEPRHLGFTAGMRRLAWNRNVVALGLSGGFVEPLESTSIHLVQSGIAKLLALFPDRRFDAAERDEYNRQMEEVYEDVRDFIILHYKATQRDDSDFWNYCRTMEVPEKLAAKLDLWRGKARLFREGRELFGTASWVAVLLGQGVIPEAHEPAADALDPDFVADAMEKMRLSYARMAEHMPMQGDFIAQACRAAR

SEQ ID NO: 90211 - protein, 480 aa, unidentified
  source 1..480: note = Alphaproteobacteria bacterium
  REGION 1..480: note = tr|A0A537M962|A0A537M962_9PROT Tryptophan 7-halogenase OS=Alphaproteobacteria bacterium OX=1913988; GN = E6G94_03180 PE=4 SV=1
MSASRRSVRNVGVGGAALTRKAERVVVVGRDAALWIVAASLQSAFGRSGVRVDAIELPSLLQEVDVYAAVPSLGALHKLLGIEESVLLAACAGVPMVGQRFSNWAKSSPPFLHGYDVERTPGGDVTFFQYWVKARLEGLKVGFEEFSLAAVAAKQGRVPFTEDDPNPSAASHGYHLHARGYAALLKQLAGRAGVRHRRGRVAGVERDGERIARVTLDDGEALEADLFVDASGTEAVLAGPANSDNFESWRQWLPCDSTLAASAQPLRPAPAFSQISAFRAGWVGLYPLQDRTAVIATWDSKSFGAAQMVESLPVLSGLAIAGDAVVTPFEAGARLRPWSGNCVAIGDSAISLEPLDAVQLHSVHVGVTQLVALFPVDADRLIEADTYNEVVLQHARNVRDFQAAHYRLNRRFDEPFWVACSPAGGFRCCSKGNRSRSRIGPRSCSAMGSPRRATIRAWTGCRRRSISRRCSSGCARWRWR

SEQ ID NO: 90212 - protein, 111 aa, unidentified
  source 1..111: note = Alphaproteobacteria bacterium
  REGION 1..111: note = tr|A0A537LTT6|A0A537LTT6_9PROT Tryptophan 7-halogenase (Fragment) OS=Alphaproteobacteria bacterium; OX = 1913988 GN=E6G94_16150 PE=4 SV=1
MSDRNIRKVVVVGGGSAGWMAAAALTNALRGGCEIELVESDEIGIVGVGEATIPPIKLFNQTLGVDENDFVRATEGSFKLGIEFVDWAEKGHRYFHPFGTFGVDFDAVPLH

SEQ ID NO: 90213 - protein, 497 aa, Teredinibacter sp.
  REGION 1..497: note = tr|A0A509DZW1|A0A509DZW1_9GAMM Flavin-dependent tryptophan halogenase PrnA OS=Teredinibacter sp. ISS155; OX = 2584524 GN=prnA_1 PE=4 SV=1
MNEQEVKNIVVAGGGTAGWIAATALKKGLGDRVNVTLVESDDIPTVGVGEATIPPLLVLHQILGISEREFMSATNATFKLGIAFENWKDLNTKYIHSFGVAGKDCWACGFSHFWIKGMQEGLADEYGDYCLEHLAARENKFAVVANNGLNYAYHLDAGLYAKFLRGTSEECGVVRKEGKIKTVNLSKTNGFIESLTLESQENISGDFFIDCTGFRALLIGDALHTGFEDWSHWLLCDSAVAVQTESVRPPVPYTRSIAHEAGWQWQIPLQNRTGNGLVYCSRYMDDETAKNTLLKHVEGKTLNDPRIIKFKTGTRLKHWSKNCLALGLSSGFLEPLESTSIHLIQKSVIRFMQLFPGNGVKQVDIDEFNRQTKKDVDYIRDFIILHYCVTERDDSQFWRYCKNMSVPDTLKHRLSLFEETGRIFRGEDELFASESWIQVMMGQGLIPKTYHPIVDLMPRQELQQFLNRLKEITRSKLNQLPMHEEFIDKYCRSGERN

SEQ ID NO: 90214 - protein, 508 aa, Glaciecola sp.; identical to SEQ ID NO: 86499
  REGION 1..508: note = tr|F4AU57|F4AU57_GLAS4 Tryptophan halogenase; OS = Glaciecola sp. (strain 4H-3-7+YE-5) OX=983545; GN = Glaag_3676 PE=4 SV=1

SEQ ID NO: 90215 - protein, 509 aa, unidentified
  source 1..509: note = Alphaproteobacteria bacterium
  REGION 1..509: note = tr|A0A411JKH0|A0A411JKH0_9PROT Putative tryptophan halogenase OS=Alphaproteobacteria bacterium OX=1913988; PE = 4 SV=1
MERPDVRKLVIVGGGTAGWIAAAAFARLLGQRLDIELVESEAIGTVGVGEATIPQIIRLNAILGIDEHEFLRATSGTFKLGIEFVDWARRGSRYLHTFGDTGMNLGNVAFHHYWRRSTIGEAAPDPKGLWHWSLHQLAADEARFGKLDKVGNTAMTGLAYAYHFDASRYALFLRAYAEGRGVTRTEGIVERVERDGESGDITAIVLKGGQRIAGDFFIDCTGFRSLLLGETLGVGYQDWSRWLPCDRALAVPSERLPRLVPYTRATAKDAGWQWRIPLQHRTGNGHVYSSGFTSDEAAADTLLAGLDTKALGDPRPIRFTTGRREASWTHNCAAIGLSGGFLEPLESTSIHLIQSHVSRLIRLFPRTAGASAMREEYNRRCAAEFAQIRDFLILHYHQTEREDTEFWRYCKHMDVPDSLTHKLELFAASGRTGRDPDDLFQDASWVQVMLGQGIIPADYDPMADQIADSQLAEFLANLRRIITRSVAGLPSHEDYLARHCPAAPLDAAA

SEQ ID NO: 90216 - protein, 501 aa, Teredinibacter sp.
  REGION 1..501: note = tr|A0A509DXR0|A0A509DXR0_9GAMM Flavin-dependent tryptophan halogenase RebH OS=Teredinibacter sp. ISS155; OX = 2584524 GN=rebH_3 PE=4 SV=1
MSVQKKKIVIVGGGTAGWMSAAALKFHFKQLVDITLIESSDIGTVGVGEATIPTIRNFYLGLGLKDLDVMRATRATCKLGIQFNDWLRPGSSFIHPFGLYGQDSQGIEFHQFWLKLRKQGLADELGKYSLGVALAEKNKFTLPAKNPPSSLSVFDWALHFDAALFAQYMREFSMSLGVEHLDAKITKVNLRESDGYIANLSTESGATVAGDLFIDCSGFRGLLIEEALHTGYESWQKWLLCDSAQAVQSIAHGTPSPYTRVDAKTAGWQWKIPLQHRFGNGHVYASGFMGDEEAQQVLFNAIPEQTISDAKLIKFTAGRRKKAWNKNCIAIGLSAGFLEPLESTSIALVQTAIEKIRTLLTNFDFDDAVVNEFNETTALEYERVRDFLILHYKATQRSDSEFWRFCQHMEIPESLSHKLALFKSSGYVVNYRWEMFHLPSWLAIFSGFDYLPDNYDMRVDAFPEAQLAKSFAKMQASIQQAVADTPDHDAFIAEFCAAEKY

SEQ ID NO: 90217 - protein, 536 aa, Calothrix sp.; identical to SEQ ID NO: 87469
  REGION 1..536: note = tr|A0A1Z4SQD3|A0A1Z4SQD3_9CYAN Tryptophan halogenase; OS = Calothrix sp. NIES-4105 OX=2005463 GN=NIES4105_25690; PE = 4 SV=1

SEQ ID NO: 90218 - protein, 537 aa, Glaciecola sp.
  REGION 1..537: note = tr|F4ASN5|F4ASN5_GLAS4 Tryptophan halogenase; OS = Glaciecola sp. (strain 4H-3-7+YE-5) OX=983545; GN = Glaag_2348 PE=4 SV=1
MTFNEQLNREKYVQLNSQVKDIVIVGGGTAGWLTAGLLASRLSSRVQSGELNITLCESPDVPTIGVGEGSWPTLRSTLQSIGVTETDFIRQCNVSFKQGSRFVNWQHDRPSQYDHPFDVPQQASQGAEAQHWLSTQSQVPFSQAYCLQTELANNNLAPKLITTPEFTGFANYGYHLDAALFAEFLREHCIQHLQVKHVLANVKQVEQDENGDITCLHLAPPSQNNSNPPDYINGDLFVDCTGFRALLLGDTLGVCNTQVDDVLFANNAIATQLPYVEQNSPIASFTESTAQDNGWIWDIGLPNRRGIGYVYSDRYCDEQDAHRTLVKFLQKTQQNTDTLSYKQIHFTPGYKQQFWKNNCVAIGLSAGFIEPLEASALVLVEMSANMLAEQLPNTRSCMDVIAKRFNQTFTYRWQRIIDFLKLHYVLSRRSSAFWQDNRAQSSVPDSLKELLALWQHKVPDMNDFPARDEVFQAASYQFVLYGAGFKSQLLSTPDKNLLEAAEQQFLSIQGYTSQLTNKTISNRDLLSKIYRYGLQKR

SEQ ID NO: 90219 - protein, 506 aa, Glaciecola sp.
  REGION 1..506: note = tr|F4ASX9|F4ASX9_GLAS4 Tryptophan halogenase; OS = Glaciecola sp. (strain 4H-3-7+YE-5) OX=983545; GN = Glaag_3529 PE=4 SV=1
MQTSLPFKKIIIIGGGTAGWMSACYLAKMWQDYDLEIKIIESDAIGTIGVGEGTTPSIKGFFEQLGIEAKEWMPACNATYKTGIRFVNWSSDPNYKSYFHPFYSQLDEYFQHEFFQNIQLKHRGFDVHAHPDQYLLASELAQQRKAPIEPEHYPFDMAYAYHFDATLLAQFLKKKALQWNVTHQVATINEVKQKDDGSIASVVTESGETIEADFFVDCSGFRSLLLGKSLKVPYNSFADSLLNDSAVTIVTEREDTTPSMTLSTALSCGWAWRIPLTNRFGNGYVFSSRFQSPQDAEEEFRRHLALPESAQFNHLKMRMGHFAKGWEKNVLAVGLSQGFIEPLEATALHFATQSVVDFVSAVDNSTDQAGYSNQTAYNNKLSDRFSCVRDYIELHYLANSRHDTPYWKAARSHTPSRRLQRILTTWHQGKSVPRVLDEEAVSLQLFGHESWLCLLAGKGVFPESEHTIDALPTAMRIDMQKIKHFVETSAKHYPLHDDALAALKQS

SEQ ID NO: 90220 - protein, 496 aa, Shewanella putrefaciens; identical to SEQ ID NO: 83369
  REGION 1..496: note = tr|A0A252ES50|A0A252ES50_SHEPU Tryptophan halogenase; OS = Shewanella putrefaciens OX=24 GN=B7D78_14645 PE=4 SV=1

SEQ ID NO: 90221 - protein, 435 aa, unidentified
  source 1..435: note = Streptomyces toyocaensis
  REGION 1..435: note = tr|Q8KLM2|Q8KLM2_STRTO StaK OS=Streptomyces toyocaensis OX=55952 GN=BU52_01300 PE=4 SV=1
MSAETFDVVVAGGGPAGSTAASLVAMQGHRVLLVEKEVLPRHRVGESLLPSTVHGVCRMLGVTDELAETDFPVKRGATFQWGGRAEPWAFSFGASSRLTDATSFAYQADRARFDEILLKNAKRKGVVVREGCSVTAVVEEGDRVTGLRHTDPDGGEHEVGARFVIDASGHESPLSASVGGTRDRAGSFRGLALSGYFGNGCKRLPEPRSGDGLSVTFDGGWFWYVPLFGGLTSVGAVVSEERAEKLQDDREEAFKALIAECPAISDLLSEGMRVTAGKYGKLRVREDYVYHRTTFWRPGMLLVGDAACSVDPLFSSGVHLATYSALLAARSINSVLAGDVDEKTALTEFEARYRRELGAFSELLTTFHTMTGEEHPEPESFVDVAAGVSSGEWALAAQGGGAAAPGEPMFRGGLAVSPDGMKWLPAASKEREDAR

SEQ ID NO: 90222 - protein, 503 aa, Sphingomonas koreensis
  REGION 1..503: note = tr|A0A2M8WBS4|A0A2M8WBS4_9SPHN Tryptophan 7-halogenase OS=Sphingomonas koreensis OX=93064; GN = BDW16_1664 PE=4 SV=1
MTEEHGEDAIRTIAIVGGGTAGWMAASYLARTLAHTNIAITLIDSSEIGTVGVGEATVPAIRDFLAVVGLADADVLAATEGTIKYGIHFADWAEPGHRFYHPFGLYGVSARGVPFHQYWLKLRAAGHDLSLEDYCLCTQLAEQGRFLPPPEQPGSELGVFDFALHFDASMFATLLRDLSLSLGVTHIDARIDGVEQAPEDGQVRAVRLADGRSVAADLWIDCSGFRGLLIGEAMGVPFVDWRNWLPCDRAIALGCEPSGAYRPVTTSTARAAGWQWHIPLRHRIGNGYVYCSDYISDDEAEAVLRANIEGPALGEARRIRFTPGHRASFWKGNVVAIGLAGGFLEPLESTSITLIQSGLERLVRLFPDRRFDPALAALFDRQSQLEFERIRDFLLVHYCLNRREGEPLWDRMRTMELPGHLQGKIDAWRAQGELVRYEWETFQDPSWLSMYAGFGIEPRRYNVRADQFDGAELLATFGRMRTAIDDTVKLGVPAAQFAAALRR

SEQ ID NO: 90223 - protein, 505 aa, Parvularcula sp.
  REGION 1..505: note = tr|A0A357L228|A0A357L228_9PROT Tryptophan halogenase; OS = Parvularcula sp. OX=1979207 GN=DDZ68_01940 PE=4 SV=1
MTFSPPPNRDPLRSVVIVGGGTAGWMAASVLSKAFGPALSITLIESEEIGIVGVGEATIPQIRHINNFLEIDENAFLKATNGTFKLGIQFNDWGRLGDSYMHAFGDIGMALGLTPFHHYWLRAVAAGKGGSLWDYSVNHQIAIRDRFAIMERIGSSRLTGTRHAFHFDASLYARFLRGRAEAAGVRRVEGKIVEVRRRAADGFIEGVTLEGGARIDGEFFIDCSGFRGLLIEGALAAGYEDWTHWLPCDRAVAAPCAHGAAIRPYTQASARKSGWQWAIPLQNRVGNGHVYCSRHISDDEAAAVLKENLEGELLGEPRLLRFVTGMRKRQWVKNCVSLGLASGFLEPLESTSIHLIQSGVSRLVSMFPDRHFDAALIDEFNRQSRFEFERIRDFIILHYHANERTDSPFWIERREMAVPEALAAKLDLFRSTGRIYREHEELFTEQGWLQVMIGQRIAPLRYHPLADGLSESQLDEFLANIRTLIDRAAAAAPGHADYVKANCAA

SEQ ID NO: 90224 - protein, 503 aa, Sphingomonas koreensis
  REGION 1..503: note = tr|A0A430CPC3|A0A430CPC3_9SPHN Tryptophan 7-halogenase OS=Sphingomonas koreensis OX=93064; GN = DAH55_14415 PE=4 SV=1
MTMGRPFELVIVGGGTAGWMCAAACAAKLVPTGVRVRLVESEEIGTVGVGEATLPQMKDFNDFLGLDEVEFMKATQASFKLGIEFVNWGHEGHRYIHPFGTYGRPVGEADFFSYWIRARRSGIASRLDDYCFPIVAAWQNRFMLPNGDPNDVRNAFAYAYHLDAFLYARYLRGWAEARGIERVEGRIVDVERDGGSGAIAAVTLASGEPVAGDFFIDCSGFRSLLLGSMLGVELEDWSHWLPCDSAQAVPCARSQDFTPYTRSTRRKAGWQWRIPLQHRTGNGYVYSSAHVSDDEAAATLLANLDGEALAEPRVLRFKAGKRRLAWSRNCIGMGLAGGFLEPLESTSIYLVQMAIMHMLTLLPSTEGIDPALPAEFNRVMDVEYDRIRDFLILHYIANEADAPLWAHVTAVDLPDTLQDKIDRFRHRGHVQAYRDGLFGPPSWQAVFVGQGIEPLAADRLADVLPAEALAQRLEMLASTIARGAGSAPSHADFIARYCPAPAP

SEQ ID NO: 90225 - protein, 503 aa, Parvularcula sp.
  REGION 1..503: note = tr|A0A355C313|A0A355C313_9PROT Tryptophan halogenase; OS = Parvularcula sp. OX=1979207 GN=DDZ68_13405 PE=4 SV=1
MTDHPRAIRKILIAGGGTAGWMTAAALSSTLSQGCEIVLVESEEIGTIGVGEATIPPIRLFNDTLGIDERDFVRETQGSFKLGIEFVNWSRKGHRYFHPFGPHGRPFDIVAVHQHWLRARAEGEQASFDDHSMAWAMAKAGRFNKPAADPRSVLSTFDYAYHFDAGLYARYLRRYSEERGVMRVEGKIGGVEQNAESGFVERILMQDGRILEAELFIDCTGFRGLLIEGALKAGYEDWTRWLPCDRAAAAPCAKSGAFTPYTRSTALDAGWQWRIPLQHRTGNGYVYSSNFISDEAALETLLGGLDGAPLAAPNQLRFVTGMRRKFWDRNVIAIGLASGFMEPLESTSIHLIQAGISKLLALFPDRDFDPLIIAEYNRIAVTEFERIRDFLILHYKLTERDDAELWRYCRSMSVPDTVQFKIDHFRRYGRHIAREMDLFGAPSWHAVHIGQFNMPERTDPVAGYRTVNSREWLAKLRAAMTAEAQRQPEHQAFIDQHCKAAAR

SEQ ID NO: 90226 - protein, 512 aa, unidentified
  source 1..512: note = Unknown
  REGION 1..512: note = tr|A0A0K0P9W9|A0A0K0P9W9_9BACT Tryptophan-5 halogenase OS=uncultured bacterium OX=77133 GN=lzrH1 PE=4; SV = 1
MLKSVVIVGGGTSGWMTASYLTAAFGDRIEVTLVESARVGAIGVGEATFSTVRHFFEYLGLEEKDWMPACNATYKLAIRFENWREEGHHFYHPFERQRVVDGFTLPDWWLRNPSSDRFDRDCFLVGTLCDSLKSPRHLDGTLFEGGLGERSTYRTTLSEQSTQFPYAYHFDATLVANFLRDYAVARGVRHVLDDVVDVALDSRGWISHVVTKERGELAGDLFIDCTGFRSLLLGKALEEPFESYQSSLPNDSAVALRVPLDMERKGLRPCTTATAQEAGWIWTIPLFDRIGTGYVYASEYSTPEQAEQRLREFVGPAAEGLEANHIKMRIGRSRRHWVNNCVAIGLSSGFVEPLESTGIFFIQHGIEQLVKHFPDVSWEDGLRDSYNNLVNRCMDGVREFLVLHYYAAKRADNQYWQDTKNRALPDGLAERLERWKTRLPDAESVYPHYHGFEAYSYVCMLLGLGGVELKPSPALGLLDPSSAQHEFKLVAEQATELERTLPTQYEYFARLR

SEQ ID NO: 90227 - protein, 530 aa, unidentified
  source 1..530: note = Unknown
  REGION 1..530: note = tr|V9Y0K0|V9Y0K0_9BACT RebH-like halogenase; OS = uncultured bacterium OX=77133 GN=asmbl_15 PE=4 SV=1
MGNAIEKIVILGGGTAGWMAASYLGKALSETVDITVLAAPEIPTLGVGEATIPNLQTAFFDFLEIEESEWMRACNASYKMAIKFINWRTGGEGVSHLRRFGGRTDHFYHIFGLLPYFDQLPLSHYWVYRTWAEQTDEPFDYACYHEPLILDENRSPRWMDGSRATNYAWHFDAHLVADFLRRFSTGTLGVRHIEDRMEHVRHRTDGSIESLSTRAGHTLEADLFIDCSGFRGLLINQAMAEPFLDMSDHLLCDSAIAAAVPHNDDTLGVEPFTSAIAMKAGWTWKIPMLGRFGTGYVYSSRFATEEKATQDFCVLWGLNPNTMPLNKIRFRVGRNRRAWVKNCVSIGTSSCFVEPLESTGIYFIYAALYQLMKHFPDKGFDSVLIDRFNREIETMFDDTRDFIQAHFYFSPRNDTPFWKANKELKLGDSMQEKVEMYRAGMAINVPATDDASSYYRNFEEEFRNFWNNSNYYCILAGLGVMPRAPSPRLHHMPASRKRAEAVFADVKRQQRDLLDTLPTCYEFLRNQHGG

SEQ ID NO: 90228 - protein, 506 aa, Sphingomonas koreensis
  REGION 1..506: note = tr|A0A430CLE3|A0A430CLE3_9SPHN Tryptophan 7-halogenase OS=Sphingomonas koreensis OX=93064; GN = DAH55_16995 PE=4 SV=1
MSQRSIVIAGGGTAGWMTAAALARFCGSGWTITLVESDAIGTVGVGEATIPMIRLFNQALGIDEAEFLRETHGTWKLGIEFDGWGVPGERYMHAFGQVGRGLGLLPFHHYWLRARAAGRAGPLGNYVLNDIAAKANRFGHVERAADSVLPAMPYAFHFDAGLYAAYLRRYAEARGVARIEGRVERVERDGENGDVTTLVLAGGVRVAGDLFVDCSGFRGLLIEGALETGFEDWGHWLPCDRALAVPCERADPLIPYTRATARKAGWQWRIPLQHRTGNGYVFSSAHISEDEAASVLLANLDGAPQAEPRVLKFRAGKRRKAWNRNVVAIGLSSGFLEPLESTSIHLIQSGITRLLDFLPNGRVADADRDAYNRMTDFEIERIRDFVILHYFANRREGEPMWDALRYMDLPEPLADRIAMFRACGRIVREHDELFDVPGWIQVLAGQGIVPERWHPLADELSAEQLDQFLSTVADAYARDAARLPGHADYLTRFCGAPSTLSQSSIA

SEQ ID NO: 90229 - protein, 503 aa, unidentified; identical to SEQ ID NO: 87684
  source 1..503: note = Citromicrobium sp.
  REGION 1..503: note = tr|A0A2D9IF17|A0A2D9IF17_9SPHN Tryptophan halogenase; OS = Citromicrobium sp. OX=2024827 GN=CL805_02455 PE=4 SV=1

SEQ ID NO: 90230 - protein, 491 aa, Sphingomonas koreensis
  REGION 1..491: note = tr|A0A2M8WBS3|A0A2M8WBS3_9SPHN Tryptophan halogenase; OS = Sphingomonas koreensis OX=93064 GN=BDW16_1640 PE=4 SV=1
MSGPVERVAVYGGGVAAPMAALAVARAYGRLGTQVTWVDTGEAPPPHAALVAVPDLAAFHRLLGITDAALIETASATLNMGQQFAGWSGGDDAFLHAYGDAGTPFASLPLVQHWTRARQAGLRVALEDFCLAAAAAKQGRAGEARDPATRQAVKHGWHLDAAGYTELLRAACKGAAVTIVQGGGAQPHAADGRVDRIVLADGAAVTADLFVDADGALTRSLDPHGAEEGNGLCDRILCGSAARLDPLPLYSRVAAHEAGWVTLIPLSDRLAVEIAYDSRQMPDDAARMVMERAAGRAVETGGSEAFSATLRPRPWFANCVAIGRAASDAPRLDGAELLLLQLAVAQLVLLWPIDRDAMPEADIYNEELTGSYARVRDFAAQHFRLNRRHGEPFWDAARAAPVSAELAAKIDLFAARGMFAHFNYEAHVEDGWALCMTGHGVVPHSFDPQALLVEDQALMAEFQRQLRAIAAEVRSMETHAEALARIRSGGR

SEQ ID NO: 90231 - protein, 512 aa, Sphingomonas koreensis
  REGION 1..512: note = tr|A0A2M8WDI7|A0A2M8WDI7_9SPHN Tryptophan 7-halogenase OS=Sphingomonas koreensis OX=93064; GN = BDW16_2289 PE=4 SV=1
MEAGQTGTGNPPIRRIVIVGGGTAGWMTAALLSKLLFRGYDITLVESDEIGIIGVGEATIPGIKDYNHLAGIDLTEMIRATQATFKLGIEFVNWREPGFRYIHGFGKIGTDLMWLHPHQLWLKLAAMGQAKHFDLYSLNTLAARQNKFCFPDPRNPGSPMGHLDYAYHFDASLYARFLRGRSEAQGVTRTEGRIVEVRQRPEDGFVESVVLADGQTVSGDLFVDCSGMRSLLLGQTLGVGYEDWSHWLPCDRALAVPCESVSPLTPYTRSTAHGAGWQWRIPLQHRIGNGHVYSSAHVSDDEAADVLLANLDGKALADPRPVRFAPGKRHKAWEKNVVAIGLSSGFLEPLESTSIHLIQTGILKLVALFPGQGFNAADIAEYNRQHNFEFDDVRDFIIAHYKVTNREDTPFWAHVRHMEVPDSLAERLELFRASARFFVHGKAELFREESWVQVLLGQGMAMTYDPVVDMIPDEDVIAFMRDIEEVNADVAAAMPTHQAFIDRHCKAPSLAS

SEQ ID NO: 90232 - protein, 509 aa, Brevundimonas sp.
  REGION 1..509: note = tr|A0A2D8FKD1|A0A2D8FKD1_9CAUL Tryptophan halogenase; OS = Brevundimonas sp. OX=1871086 GN=CL682_00475 PE=4 SV=1
MDEIDDPRIRSVVIVGGGTAGWMTAAALVQHFRSTPLKITVVESSDIGTIGVGEATIPTIRRFYGQLGLRDDDVMRATQATCKLGIRFIDWSGPGSDFIHPFGLYGQDVKGIGFHHYWLKQKRAGDPAPLAAYSLGASLAAGGKFIQPSPNPPSQLSVFDWALHLDAGLFAQHLRAYAEAGGCARIDARIRSVELRPEDGFVRALTLDDGREVEGDLFVDCSGFKGLVIGEALGVGFEDWGRWLPCDAAYAVQSANRPGDAPAPFTRVTARSAGWQWGIPLRHRAGNGLVFSSAHLSDDQALAELMPHLLGDPLTEPRRIPFRPGRRTQAWARNCVAIGLSSGFLEPLESTSIALIETGIERLKALFPDRRFAQPILDEFNDQTAREMERVRDFIILHYKLNRRTDTDFWRDCRDMAVPETLERKLALWTARGQFVRYRWEMFHPASWLAIYDGFGLYPDHYDPAVDAMDPAYLARSLAEMRTNIADFVARTPDHAQFLAGLDPAASAA

SEQ ID NO: 90233 - protein, 495 aa, Colwellia sp.
  REGION 1..495: note = tr|A0A2G2F8N1|A0A2G2F8N1_COLSX Tryptophan halogenase; OS = Colwellia sp. OX=56799 GN=COA35_13750 PE=4 SV=1
MTKTNAVKNVVIAGGGTAGWMAAAALAKLIGKNIHVTLVESDDIGTVGVGEATIPPIRTFHKLLGINEQAFMKATQASFKLGISFENWGDENTRYIHSFGATGKECWAGEFHHFWLQGKTLGINNPFGDYCYELQAAKAGKFAFNQQNPINYAYHMDATRYAQFLREFSEPLGVKRVEGKIQKVVKNAKTGHIESLLLNSGEQINGDFFIDCTGFRGLLIEQALHTGYEDWSHLLPCNSAIAVQTKSTSDTVLPLTRSIAHKSGWQWRIPLQSRVGNGLVYCSQYMDDEQAKALLLNNIEGEALTEPRVIKFKTGRRLKGWNKNCLALGLASGFVEPLESTSIHLIMSGIIRFMRLFPFNGITNHAIDEYNKQLKSEIENIRDFIVLHYKVTNRDDSEFWQQCSAMEVPKTLQHKIDLFKQTGRVFLDDGDIFRVDSWVQVMLGQGIVPEQHHLIASMMSDEELTRFLHGIKQQIEQRVSQLPPHHEFLKHYCPA

SEQ ID NO: 90234 - protein, 503 aa, unidentified
  source 1..503: note = Mizugakiibacter sediminis
  REGION 1..503: note = tr|A0A0K8QLJ5|A0A0K8QLJ5_9GAMM Tryptophan halogenase; OS = Mizugakiibacter sediminis OX=1475481 GN=MBSD_1520 PE=4; SV = 1
MSDARIKRVVIVGGGTAGWMAAAVLARALGPAVEIRLIESEEIGIVGVGEATIPQIRLLNPFLGLDENALLRAVNGTIKLGIRFHDWGRLGDRYWHAFGDLGLPLGLLTFHHYWLRSRARSDAPDLWAYSLNAAAAAANRFARLDRVGDTPLTGLRYAYHFDAMLYGRYLRRHSDARSVRRIEGKVVDVQLRGEDGFIEALRLESGETVAGDLFIDCSGFRGLLIEGALKTGYENWQHWLPCDRALALPSARVEPLRPYTQALARTAGWQWRIPLQHRTGNGHVYCSRFISDDEAAAQLLANLDGEALAEPRPLRFVSGMRRQAWNRNCVALGLASGFMEPLESTSIHLVQSGLSRLLAMFPDRHCDPALAAEYNRQTRFEYERIRDFIVLHYKATERDDSPFWRHCAQMPVPDTLAHKLELFRRTGSVFREADELFTEAGWLQVMLGQRIAPARYHPLADGPSAAQLDEFLGQIRALVAHAVSTLPDHARFIEQQCAAPLPA

SEQ ID NO: 90235 - protein, 516 aa, Mitsuaria sp.
  REGION 1..516: note = tr|A0A5C6ZR72|A0A5C6ZR72_9BURK Tryptophan 7-halogenase OS=Mitsuaria sp. TWR114 OX=2601731; GN = FUT87_05935 PE=4 SV=1
MSFTPPAPSVPRSPVRRVVIAGGGTAGWMMAACIAKHLGKQLDIRLVESDEIGTVGVGEATIPTMLTFHQLLGLDEREFMAATQATIKLGIQFEGWRDPDARYIHAFGSTGIDHWTAGFQHFWMKGRERGMASDYGDYCLELRAAQQHRFAHLPGDGINYAFHLDASLYGAFLRRFSDGFGVRRIEGRIAEVLLRPDGDLRALKLQDGSEVEGDLFIDCTGMRSVLLGQTLGVGYQDWSHWLPCDSAIALQTASVRDAVPYTRAIAHPWGWQWQIPLQHRVGNGVVFSSRYTDDETARAALLGNIEGEVLTPHRVIRFKPGQRDVVWQRNCVAVGLASGFLEPLESTSIHLIQRSAIRLLQMFPKDGIRQSDVDEYNAQMRHELEHIRDFIVLHYHLQQRTDSPMWRDLREMSVPASLQHRLDLFRESGRVFRGPNELFTENSWIQVMLGQGLMPEQHHPTADLMSDRELAGFLGGIKARIDQTVQQMPGHQQYIARYAPGTQWQMPQVPQAPVTV

SEQ ID NO: 90236 - protein, 538 aa, Burkholderia pyrrocinia
  REGION 1..538: note = tr|Q9RBU7|Q9RBU7_BURPY Tryptophan halogenase; OS = Burkholderia pyrrocinia OX=60550 GN=prnA PE=4 SV=1
MSNPIKNIVIVGGGTAGWMAASYLVRALQQQTNITLIESAAIPRIGVGEATIPSLQKVFFDFLGIPEREWMPQVNGAFKAAIKFVNWRKSPDRSRDDHFYHLFGSVPNCDGVPLTHYWLRKREQGFQQPMEYACYPQPGALDGKLAPCLSDGTRQMSHAWHFDAHLVADFLKRWAVERGVKRVVDEVVEVRLNDRGYISSLSTKEGRTLEADLFIDCSGMRGLLINQALKEPFIDMSDYLLCDSAVASAVPNADARVGVEPYTSAIAMNSGWTWKIPMLGRFGSGYVFSSKFTSRDQATADFLNLWGLSDNQPLNQIKFRVGRNGRAWVNNCVAIGLSSCFLEPLESTGIYFIYAALYQLVKHFPDTSFDPRLTDAFNAEIVYMFDDCRDFVQAHYFATSRDDTPFWLANRHDLRLSDAIKEKVQRYKAGLPLTTTSFDDSTYYETFDYEFKNFWLNGNYYCIFAGLGMLPDRSLPLLRHRPESIDKAEAMFARIRREAERLRTSLPTNYDYLRSLRDGDAGLSRSQPGSTLAAPEIL

SEQ ID NO: 90237 - protein, 526 aa, Amycolatopsis regifaucium
  REGION 1..526: note = tr|A0A154MSY8|A0A154MSY8_9PSEU Uncharacterized protein OS=Amycolatopsis regifaucium OX=546365; GN = ATP06_0213490 PE=4 SV=1
MARPVEKVVIVGGGTAGWLSAAYLNRAFGEKVDITLVESDRIGRIGVGEATVPTLRTTFAFLGMKEEEWMPRCNAAFKSAVRLNDWRKPHPGKESHTYFHPFFTVPEPPVPNYEKPFHKRFGRGVSLAHFWLKQKLSGDTRLRETFGDAGMPLQGLCELNKAPRPMPGSDGPNPGFRYAYHFDAALMAGYLKELATGRGVHHVIADVESVALDPRGHIEKVVTETGAELTADLFLDCSGFRGLLINQTLNEPFISEKDVLLCDSAIALSSDHHPDGLRPYTSATARNEGWIWEIPLFNREGSGYVYSGQLTTPDKAEKELRDFLGTRAHDVEGNHIKMRVGHNRRSWVNNCVAVGLSSCFVEPLESTTIALIEYQLALLVLHFPDSDLDERRAKRYNETMVSAFEDVRDFIVMHYCLTDRDDTEFWRAVREAPIPDSLAEKLTEYAESVIIPDGSQLRLFETRSLWAILSGMDFDFKKAPPSVELMNDAAAWEMFEQIDKEREIYSASLPNHMDYLKALHALGAKG

SEQ ID NO: 90238 - protein, 501 aa, Altererythrobacter sp.
  REGION 1..501: note = tr|A0A2E1Y7U8|A0A2E1Y7U8_9SPHN Tryptophan halogenase; OS = Altererythrobacter sp. OX=1872480 GN=CL574_05930 PE=4; SV = 1
MRTATTPRRIVIAGGGTSGWMAAAALARTMGDTIELTLVESDAIGTVGVGESTIPPLVKYNQLTGIDEAEFMRETNATFKLGIEFENWKTDGESYFHSFGATGKDHWSAGFQHFWMHGLTQGHEHSYDDYCLELAAAHAGKFAILPDNRLNYAYQLDATAYARFLRRKAESFGATRREGKIAAVELDSESGDIAALTLESGERIEGDLFLDCTGFRALLIEGALHVGYDDWSHYLPNDRAIAVQTESVRDPVPFTRAIAHEAGWQWRIPLQHRQGNGIVYCSRYMSDDEAEARLLSTVEGATCSTPNRLRFTTGARRKQWHRNCVAVGLSSGFMEPLESTSIHLIQRAVLRLIRMLPSGERVSRRDIDEFNDQQLTDMDQIRDFLILHYKVTQRRDSPFWRQCAAMEIPDSLTQKIELFRETGRVFRKNEELFAENSWVQVMMGQGLMPETYHPIATKMSSEELERFLGTLRSNVARTVAGLPEHHAFVKRYCGAKQAEAA

SEQ ID NO: 90239 - protein, 513 aa, Altererythrobacter sp.
  REGION 1..513: note = tr|A0A2E1Y9T1|A0A2E1Y9T1_9SPHN Tryptophan halogenase; OS = Altererythrobacter sp. OX=1872480 GN=CL574_09245 PE=4; SV = 1
MKQSGQSRSGGSRKRRVVVLGGGTAGWMTAAGLVRLLPDGVDVQLVESEDIGIVGVGEATLPHIRSFIETLGIDEAAFMEATHATYKLGIDFRDFGRIGTSYIHPFGSFGEELNGVGFHHYWLELHRHGLAGQLGDYSLAVAAALANKFRPPAADESLASTYGYAYQFDATLFGPFMRSFSTEAGVTRHEGKVVAVQRNTANGDVAALELDDGRLIEGDLFVDCSGFRSLLLGEELGEQWEDWSHWLPCDRAAAMPCTHSSEDISPYTTATAMPAGWRWQIPLQHRMGNGYVFSSTHVSEDRACEAIIGHVDGKPLADPRILRFRPGRRRRSWSHNVIGVGLASGFLEPLESTSIYLAQMAITYLIELFPQADAIDASDRDEFNRLVDMEYDRIRDFLILHYHVTTRDDSEFWNDMRTMRVPDTLADKLELWRRTGRVAKYSEGLFFEPSWVAVYIGQGLLPEQHDARPAALDRTKLTRAVDRLEQAVRAEVQGMPRHRDFLRSDASRLAPAA

SEQ ID NO: 90240 - protein, 503 aa, unidentified
  source 1..503: note = Rhodobiaceae bacterium
  REGION 1..503: note = tr|A0A3C0VLU5|A0A3C0VLU5_9RHIZ Tryptophan halogenase; OS = Rhodobiaceae bacterium OX=2026785 GN=DCP14_02390 PE=4; SV = 1
MSLDMSEENDFKLRKIVIAGGGTAGWMAAAALSKTLGDLVDIKLVESEQIGTVGVGEATIPPIITFHRMLDIPENEFMRETQATFKLGISFENWRVDGEKYIHSFGTTGKDHWTSGFQHFWLNGLKRGHNISYDDYCLELKAALDNKFSHLPNEGMSYAFHLDSSRYAKFLRRFSEKNSVERVEGKINKVNLNGESGFISSLDLDNGITLEGDIFIDCTGFRGLLIGEALGIEFEDWTDQLPCNGAIAVQTESTRPAVPYTRSIAHEAGWQWRIPLQHRTGNGIVYCNDFLDENGALDKLLQTVDGKTITDPNFIKFRAGTRKKQWHKNCVAVGLSSGFMEPLESTSIHLIQRNILRFIRMMPYQEISQRDIDEFNNQADWDMETIRDFLVLHYIANERDDPFWKMCADIKLTDSLKQKIELFRETGRVFRQSDELFAENSWIQVMLGQGIMPEAHHPIASKMTDQEMNLFLKTIREGVEKTVKNLPMHHDYVKQYCGVTETA

SEQ ID NO: 90241 - protein, 498 aa, Alteromonas sp.
  REGION 1..498: note = tr|A0A2D5LGT1|A0A2D5LGT1_ALTSX Tryptophan halogenase; OS = Alteromonas sp. OX=232 GN=CL592_01360 PE=4 SV=1
MAQKKTRVVVAGGGTAGWLTAFSLVTRLGNVLDIILVESDQIGTVGVGEATIPTMCNFHQLMGINEGEFMAATNATFKLGIQFDNWANDGDSYIHSFGEIGQRSWMAEFHEFWMEAAANGQQDSLEDYCLELKAAKANKFATKIGNRPLNFAYHLDATAYAAYLRKKSEAAGVTRCEGKIQSVDTDPQNGNLTRLTLDTGIAIEGDVFIDCTGFRGLLIGEHLGVGYEDWSHWLAADRAIAIQTQSTEAPKPYTIATAHKAGWQWRIPLQSRVGNGIVYSSRFLSDDDALATLKQNIDGEMLTEPRYLKFKTGRREKAWHKNCIAVGLASGFLEPLESTSIHLVTTALIRLMKLFPFSSNHQLLAEQYNRETQKEMETIRDFIILHYNLTKRTDSDFWDHYRTMDIPEPLAHRMEIFAQNGYVWPDDVALFRVDSWVQVMMGQGLMPAQHHGASRMLPTDGLKQQLSAFKQSVDNALGQLPAHADFIARYCPAGEQVK

SEQ ID NO: 90242 - protein, 530 aa, Streptomyces thermoautotrophicus
  REGION 1..530: note = tr|A0A132N2I3|A0A132N2I3_9ACTN Tryptophan halogenase; OS = Streptomyces thermoautotrophicus OX=1469144; GN = LI90_1873 PE=4 SV=1
MDNAIRKIVILGGGTAGWMAASYLGKALNHTVDITVLAAPDIPTLGVGEATIPNLQTAFFDFLGIAEDEWMRECNASYKMAVKFINWRTGGDGVPQARDLNGRPDHFYHVFGLLPYHDQLPLSHYWFYKRWTQQSDEPFDYACYKEPPILDAKLAPRWMDGTRATNYAWHFDAHLVADYLRRFATEKLGVRHIPDQMVHVTQSENGFIESLTTKSGLVLTADLFIDCSGFRGALINRALGEPFLDMRDHLLCDSAVASVVPHDDEANGVEPYTSAIAMKAGWTWKIPMLGRFGSGYVYSSRFADEEEAVRDFCALWNLDPETTSLNKIRFRVGRNRRAWVKNCVSIGTSSCFVEPLESTGIYFIYAALYQLVKHFPDRNFNPVLIDRFNREIELMFDDTRDFIQAHFYFSPRMDTPFWRANKRLQLGDNMRDKMEMYRAGLGINCPPTDDAQVYYGNFEEEFRNFWNNSNYYCVLAGLGHVPEAPTPRLNHMASSLASVDAVFDKVKKEQRELLQTLPTCYEFLRKQHGR

SEQ ID NO: 90243 - protein, 505 aa, Rheinheimera sp.
  REGION 1..505: note = tr|A0A0U4VZZ7|A0A0U4VZZ7_9GAMM Tryptophan halogenase; OS = Rheinheimera sp. F8 OX=1763998 GN=ATY27_05305 PE=4 SV=1
MHQTPATGSAGKPIRKVVIAGGGTAGWMTAALLKKVLADSVEIELVESEEIGIVGVGEATIPPIQIFNQYLGLDEKAFLRDTHATMKLAIKFENWRKPGESYYHTFGAPGASLGFCNFQHYWLRARAAGLPQSLWDYDLNYLSCEAGKFNIIKTPNPVYEMPYAYHFDSALYGQFLRKMAESAGVKRTEGMIEAVQQHGISGDIEALQLKDGRKIHGDLFVDCTGLRGLLIRQTLGVQYESWAKYLPANSALAVPSERFDKTLPYTRSIAHKAGWQWRIPLTHRNGNGIVYSSAYLSDDEAYSTLMGNLDSKALAEPRKISFETGRTSNQWAKNVVAIGLSSGFLEPLESTSIHLIQSGIVRLLKVFPNQGISDAVVDYYNADSKQEFETIRDFIILHYHANERDDSGFWRDMRNMAVPARLQEKMALFRESAQVFNDHNDIFRDASWIQVMLGQGIMPRDYHPAAKVPTTSELMATLGKVQEAKQQPLTQMLSHDEFLARYSGV

SEQ ID NO: 90244 - protein, 533 aa, Xanthomonas campestris; identical to SEQ ID NO: 89408
  REGION 1..533: note = tr|A0A0A6TDH4|A0A0A6TDH4_XANCH Tryptophan halogenase; OS = Xanthomonas campestris pv. phaseoli OX=317013 GN=prnA; PE = 4 SV=1

SEQ ID NO: 90245 - protein, 520 aa, Rheinheimera sp.
  REGION 1..520: note = tr|A0A0U4V0Z7|A0A0U4V0Z7_9GAMM Tryptophan halogenase; OS = Rheinheimera sp. F8 OX=1763998 GN=ATY27_05300 PE=4 SV=1
MSGNLPPFHFAIVGGGTAGWMAALLFAHKWLKPAAEQTRPVQITLIEAPDIGIIGVGEGSTPSLKRFFQQLGIADSEWMPACQATYKTNIRFVNWSPAAAAMGLGSDYSHPFISQPDLHSETAFYSNCFKRRLGLAVETSPEKFLLNGYLAAQQLAPLTPANFPFRIEYGFHFDSGLLGQFLKQKALAMGVQYQALTVTAVNQLPDGHIASLTGEIADGDSKVVQTLDADFFIDCTGFRANLLQQTLQVPFESFASNLFNDAAVVLPTEAFAIPPVETKATALSNGWAWQIPLRHRSGNGYVYSSAFISKDAAELELRQHLGLLDSEVNARHLQMKVGQVTRSWEKNCLALGLSQGFIEPLEATALHLVQSSIEQFIDSFADFSTEGQAEFNRQVHQRFEAVRDYIVAHYKLSSRSDSHYWRANSSNMQLSESLRQILDVWFRQGDLAQELSRQEQGRQQSGSHFGATSWHCLLAGYGIFPPLRQPQPANVSDAFTELELAAFFNGCSLNFQPQHLLWTR

SEQ ID NO: 90246 - protein, 491 aa, Amycolatopsis regifaucium
  REGION 1..491: note = tr|A0A154M6F4|A0A154M6F4_9PSEU Tryptophan halogenase; OS = Amycolatopsis regifaucium OX=546365 GN=ATP06_0208140; PE = 4 SV=1
MSVEDFDVVVAGGGPGGSTVATLVAMQGHRVLLLEKEVFPRYQIGESLLPATVHGVCRMLGVSDELANAGFPIKRGGTFRWGARPEPWTFHFGISAKMAGSTSHAYQVERARFDDILLKNAKSKGVVVREGCSVNDVVEDGERVTGARYTDPDGNEREVSARFVIDASGNKSRLYSKVGGSRNYSEFFRSLALFGYFEGGKRLPEPVSGNILSVAFDNGWFWYIPLSDTLTSVGAVVRREDADKIQGDREKALNALIAECPLISDYLSNATRVTTGRYGELRVRKDYSYQQESYWRPGMILVGDAACFVDPVFSSGVHLATYSALLAARSINSVLAGDLDEKTALNEFESRYRREYGVFYEFLVSFYQMNVNEESYFWQAKKVTQNQSTDIESFVELIGGVSSGETALTAADRIAARSAEFAAAVDKMAAGDGDDMVPMFKSAVVQQAMQEAGQVQMKALLGEDAEPELPLFPGGLVTSPDGMKWLPHHPV

SEQ ID NO: 90247 - protein, 454 aa, Amycolatopsis regifaucium
  REGION 1..454: note = tr|A0A154M575|A0A154M575_9PSEU Tryptophan halogenase; OS = Amycolatopsis regifaucium OX=546365 GN=ATP06_0206385; PE = 4 SV=1
MDDYDVIVVGGGPGGSTVAGLTAAEGHRVLLVDKDVFPRYQIGESLLPATIHGICALLGVREEIERAGFVRKGGGTFKWGTSAEPWTFSFAASERMAGPTSYAYQVERSRFDLVLLDGARRLGAEVRQGHRALGTIREGDRITGVRYADDTGRERLATARFVVDASGHGSRLHHDVGGAREYSPHFRNLALFGYFEGGHRMPAPHAGNILCVSFADGWFWYIPLSDTLTSVGAVVKQESATRVQGDPDVAYASLIDDCPLIAEFLRDAHRATEPPYDRLRVRKDYSYDRTVLWCPGMVLVGDAACFIDPVFSSGVHLATYSALLAARSINTTLAGLGEESRCFTEFEARYRREFSLFRDFLLTFYELDTGEDDYFRQARRLISSHGAADEAFADLVGGVSSQDFSRGMFGNVLAEGVQLQLRGLLGGAAGDEPPMFPGGLVPTADGRRWRVPDA

SEQ ID NO: 90248 - protein, 525 aa, Altererythrobacter sp.
  REGION 1..525: note = tr|A0A2E1YAM2|A0A2E1YAM2_9SPHN Tryptophan halogenase; OS = Altererythrobacter sp. OX=1872480 GN=CL574_09225 PE=4; SV = 1
MASRNGIGTGGGGRIKRVVIVGGGTAGWMAAAALSRFFDDGQRSIELVESDAIGTVGVGEATIPPLAKFNAMLGIREDEFLRETRGTYKLGIEFVNWGQIGDSYFHPFGSYGQPFHGIPFHQLFLREKVRSGNGGKIGDYSMSTVAALRQRFGRPSPTAKSLVNQIAYAYHFDAGLYAAFLRRFAEDRGVTRTEGRIAHVEQDSEEGNVTAVVLENGHRIEGELFIDCSGFRGLLIEETLETGYDDWSKWLPMDRALALPSSNGGSPPPFTRSIAHGAGWQWRIPLQHRIGNGHVFSSAYIEEQTALDVLLANLEGEALQDPRKLAFRSGMRRKAWNRNVVSLGLSAGFVEPLESTSIHLIQNGIARLFALFPDNPISPIERDEYNRGMAELYEDIRDFIILHYKATQREDTEFWRYVRHMPIPDSLSRKMDLWKLHGRVFRENAELFAADSWIAVMLGQNVWPDTYDPIADTLDAEKIASAMVQMRQAYSETADRLPTHEDFLRQSGGWHHRQDMQIKQPDYEA

SEQ ID NO: 90249 - protein, 511 aa, Altererythrobacter sp.
  REGION 1..511: note = tr|A0A2E6K9W4|A0A2E6K9W4_9SPHN Tryptophan halogenase; OS = Altererythrobacter sp. OX=1872480 GN=CL574_09230 PE=4; SV = 1
MMLEPISKVVILGGGTAGWMVAAALSKAMGGIPDFSVKLVESEAIGTVGVGEATIPQIVSFNRLLGIDEMEFLRETHATYKLGIEFVDWLREGHSYIHPFGSFGIDMLGIEFRHFWLRGKEQGASETIDSYSIAAMAAKDGRFDWPRPDMPRSPLSRLAYAFQFDAGRYARFLRKIAEARGVARVEGQVADIRQHPETGFVTGLTLVDGQQIEGDLFIDCSGFRSLLLGQTLEIPFLDWSRWLACDSAVAVPCKLGGRNEPLTRSTARPAGWQWRIPLQHRIGNGHVFSSGHMERDIATETLLDNLDGESLADPIHLSFKAGRRARSWEKNVVALGLAAGFLEPLESTSIHLVQSGIARLMAFFPDKDFSALEIARFNAETEKEYRDIRDFLILHYKATERDDTEFWRYCRNLEAPDGLAEKIAMFRSSGRIFREDNELFTEESWMAVMLGQGIEPDRYHPAARLLDGPETLDRLQHIRNAIAGTVAQMPTQDVFLRQRGGAITAGRIAPT

SEQ ID NO: 90250 - protein, 444 aa, Actinoplanes sp.
  REGION 1..444: note = tr|A0A0A0MP30|A0A0A0MP30_9ACTN Halogenase; OS = Actinoplanes sp. ATCC 53533 OX=1288362 GN=DMB66_27140; PE = 4 SV=1
MPVEEFDVVVAGGGPAGSTVASLVAMQGHRVLLLEKEVFPRYQIGESLLPSTVQGVCRMLGVMNELAGTNFRVKHGGTFRWGARSEPWTFSFADSPQLTGPTSFAYQVERARFDEILLRNAQRKGVEVREGCSVAGVIEGDERVAGLRYTDSDGGEHEVRARFVVDASGNKSRLYSSVGGARNHSDLPGGLALSGYFGRCREPAPYSGNTLIVAFESGWFWYTNITGGLSSVGAVVRPEMAEKIQGDREKAFAALIAECPLISELLSEASRVKAGKYGKLRVSENYSYHQTALWRPGMILVGDAACVMDPVLSSGVHLATYGALLAARSINSVLADDLDEKTALTEFEARYRREYGVFHDFLMSFYDMDVSEESYFRQAKKVTNSERTELESFVDLAVGLSSGEPAPTAPGGEDDAPEVPLFPGGMVASPDGMKWLPYPEAIRS

SEQ ID NO: 90251 - protein, 503 aa, Microbulbifer thermotolerans
  REGION 1..503: note = tr|A0A143HPI5|A0A143HPI5_9GAMM Tryptophan halogenase; OS = Microbulbifer thermotolerans OX=252514 GN=A3224_13185; PE = 4 SV=1
MDKNNNKISRVVIAGGGTAGWIAAAALSKKLGELLDITLVESEAIGTVGVGEASIPPMRVFHRLLGIEERAFMRATGATFKLGIAFENWGREGDRYIHAFGRIGQGSWLCEFHHFWLRARALGMDFALGDFCSELQAAEAGKFATAEQSEINYAYHLDAGAYAKFLRNFSQRLGVRRVEGKIIRVGRNADSGFIEALQLDNGRRIEGDLFIDCTGFRGLLIEEALGTGYEDWSHWLLSDSAVPVQTRVTGPAPPYTRATARGAGWQWRIPLQYRVGNGLVYCSDYLSDDEAAAQLLANIEGEVLTEPKVIRFKTGRRRRAWNKNCIALGLASGFVEPLESTSIHLIITGITRLMQLFPFDGIADATVNHYNALTRTELESIRDFIVLHYHLNERESSAFWRRCRDMEIPQSLAQRIRLFRDNAYAYQGDGELFRVDSWVQVMLGQGLKPQGYHPLTRLMPEAQLAQLLGGLKASIARGVAPLPAHQDFVEGYCAAELAEAVPG

SEQ ID NO: 90252 - protein, 532 aa, Serratia rubidaea
  REGION 1..532: note = tr|A0A447QVU3|A0A447QVU3_SERRU Geranylgeranyl reductase family OS=Serratia rubidaea OX=61652; GN = NCTC12971_03297 PE=4 SV=1
MSKPIKNIVIVGGGTAGWMSASYLVRALQQQANITLIESEAIPRIGVGEATIPSLQKVFFDFLGIPEREWMPQVNGAFKAGIKFVNWRKPPSPSHNDYFYHLFGNVPNCDGVPLTHYWLRKREQGFQQSMAYACYPQPGALDGNLAPCLHDGSRQMSHAWHFDAHLVADFLKRWAVDRGVNRVVDEVVEVKLNEHGFISSLLTKEGRQLEADLFIDCSGMRGLLINQALKEPFIDMSDYLLCDSAVASAVPNDDTQAGVEPYTSSIAMNAGWTWKIPMLGRFGSGYVFSSKFTSRDQATSDFLNLWGLSDNQPLNQIKFRVGRNKRAWVNNCVSIGLASCFLEPLESTGIYFIYAALYQLVKHFPDTAFDPRLADAFNAEIVYMFDDCRDFVQAHYFTSAREDTAFWLANRHELRLSDAIQEKIERYKAGLPLTTTSFDDATYYDTFDFEFKNFWLNGNYYCIFAGLDMLPDRSLPLLQLRPESIDKAEAMFASIQHEAERLRTSLPTNYDYLRSLQKGYAEQSRPASPEIL

SEQ ID NO: 90253 - protein, 533 aa, Kutzneria sp.
  REGION 1..533: note = tr|A8CF75|A8CF75_9PSEU KtzQ OS=Kutzneria sp. 744; OX = 345341 GN=ktzQ PE=4 SV=1
MDDNRIRSILVLGGGTAGWMSACYLSKALGPGVEVTVLEAPSISRIRVGEATIPNLHKVFFDFLGIAEDEWMRECNASYKAAVRFVNWRTPGDGQATPRRRPDGRPDHFDHLFGQLPEHENLPLSQYWAHRRLNGLTDEPFDRSCYVQPELLDRKLSPRLMDGTKLASYAWHFDADLVADFLCRFAVQKLNVTHVQDVFTHADLDQRGHITAVNTESGRTLAADLFIDCSGFRSVLMGKVMQEPFLDMSKHLLNDRAVALMLPHDDEKVGIEPYTSSLAMRSGWSWKIPLLGRFGSGYVYSSQFTSQDEAAEELCRMWDVDPAEQTFNNVRFRVGRSRRAWVRNCVAIGVSAMFVEPLESTGLYFSYASLYQLVKHFPDKRFRPILADRFNREVATMYDDTRDFLQAHFSLSPRDDSEFWRACKELPFADGFAEKVEMYRAGLPVELPVTIDDGHYYGNFEAEFRNFWTNSNYYCIFAGLGFLPEHPLPVLEFRPEAVDRAEPVFAAVRRRTEELVATAPTMQAYLRRLHQGT

SEQ ID NO: 90254 - protein, 515 aa, Rheinheimera sp.
  REGION 1..515: note = tr|A0A0U4VK71|A0A0U4VK71_9GAMM Tryptophan halogenase; OS = Rheinheimera sp. F8 OX=1763998 GN=ATY27_06450 PE=4 SV=1
MQKTTIRTIVIVGGGTAGWMCAAALCQHFSTPQFRAQPVQIRLIESSELGTVGVGESTIPSIRRFYARLGLTDPQVIAATKATCKLGIEFRNWRTVGSSFIHPFGLFGQQVQDVPFIHCYLKAQQLGDTTPLAAYSLGVNLAQQNKFCLPAPQPQSMLSIFDWALHFDASRFAVLMREYSEARGVERTDAMIDQVLTNANGIEALVLQSGEVVKGDFFVDCTGFKGMLIEEALQSGYENWSQWLFCDRAIAVQSEVSGAPVARTKATAHSAGWQWQIPLQHRHGNGYVYASACISDDEATATMLSHVSGQPLHNPRQFRFTPGRRKQAWVKNCVALGLASGFLEPLESTSIALIETSIDRLLQTFSTPAYDQTDIDRFNEVTKLEYERIRDFIILHYKANQRDDAPLWRQSRAMTLPPELADKMQAYQDHAEVPRLPWEIFGADSWLALYDGLGVKPGAFNARADSLPPQQLLAQLQQMRDYISRTVQAVPEHQEFLRRFCGYQSMPQAVAGASK

SEQ ID NO: 90255 - protein, 510 aa, unidentified
  source 1..510: note = Caulobacter flavus
  REGION 1..510: note = tr|A0A2N5CSW5|A0A2N5CSW5_9CAUL Tryptophan halogenase; OS = Caulobacter flavus OX=1679497 GN=C1707_15840 PE=4 SV=1
METSAPLDIVIVGGGTAGWMVGTALVSGLRPHQARVRLVESDEIATVGVGEATIPAMRDYNRFVGIDEVEMMRETNGTFKLGIEFLDWGFKGSSYHHPFGVHGAGIGGAGFHHHWNRARLAGHDLDIEQFSYAIAAARADRFEFPNPDPDKIDSTYSYAYHFDASLYARYLRKVAEGRGLKRTEGKVVDVTRDPLSGDVASITLASGEVVKGDFFVDCTGFRGLLIGQTLDSPFEEWTDWLPCDRAWAVPCARADRFTPFTRSTAREAGWQWRIPLQHRTGNGYVYSSRYISDDEAAATLMANLDGEALAEPRQVRFKAGRRTASWTRNVMAAGLASGFLEPLESTSIYLIQVAVMNLLKLFPGKRVEPALVEEFNRRVDMEYDRVRDFLILHYHANTRTDGELWKHCREMEIPESLKHKLELFRHRGVAPNYHDGLFALPSWISVLLGQGVLPGGYDRLVDNVPLAQALAEMERQRSAITRRMPAMPTHADFVARHCAISERAVAEAVA

SEQ ID NO: 90256 - protein, 512 aa, unidentified
  source 1..512: note = Unknown
  REGION 1..512: note = tr|V9XWY5|V9XWY5_9BACT Putative tryptophan 5-halogenase OS=uncultured bacterium OX=77133 GN=asmbl_19; PE = 4 SV=1
MIQSVVIVGGGTAGWMTASYLKAAFGPRMAVTLVESDRVGTIGVGEATFSTIRHFFDYLDLPEEKWMPQCSASYKLAIRFENWRRPGHHFYHPFERLRVVDGFNLADWWLRLGDRSGDFDRECFLTPWLCDARRSPRRLDGALFAGDIDGGLGRSTLAEQRAQFPYAYHFDADLLAKFLAGYGIERGVQHVVDDVVGIGQDERGWITHVNTRAHGELRGDLFVDCTGFRGLLINQTLGERFQSFNDVLPNNRAVSLRVPRDIERLGMEPYTTATAMGAGWIWTIPLFGRNGNGYVYSDAFCSPEEAEETLRRFAAPGQDDLPANHIAMRIGRNERSWVANCVAIGLSSAFVEPLESTGIFFIQHGIEELVKHFPDDQWDPVLVDSYNARVAHVVDGVKEFLVLHYRAAGREDTPYWKEAKVREIPDGLAERLTLASRLLLDDNTTYPYYHGFEPYSWNTMLLGLGSGPPGPRPAVQVIDPTAARGELAAVRRDADRLTAALPSCYEYLATLH

SEQ ID NO: 90257 - protein, 587 aa, Microcystis aeruginosa
  REGION 1..587: note = tr|A0A5J5LTD0|A0A5J5LTD0_MICAE Tryptophan halogenase; OS = Microcystis aeruginosa EAWAG127a OX=2529855; GN = EZJ55_08485 PE=4 SV=1
MNTTQALHYDVVIMGAGFAGLCQARHLMLNIPNIRVALIDPRPENRPDTDLKIGESTVEIAALLICKELGLHDYMIENHPPKAGLNFHWPKNPAETDSIDDYYHVWINRQPPIPTFQINRAKFERDLLKMNKEMGAIFYNGRVVDVDLTEGDQLKTVTVKLEDTTIEITAKHIVDAAGRRFIIGKKTDNLIFGSDQLLGVNNGSAWVRIKDVDRTIFHSGYHPAGTTVSHYYATNHYFGPGHWLWMIPIDRDSKELSLGVIHHHDVIPAATINTQEKFTAFLKANHTVLYKLLQNSELVDFHYLPRVAHKSKVMFSPDNWYVVGDSACIFDAFYSLGTTMIAIAVESITEIIRAKLANEANAEEKRAVYNDFNLAFTDSVNTFMQEHQKQLGHASIMSWRIYFEYMWWFGVLVPMYIGKWHLDPAFLKQFTGPFRTFLNGLFVDVYQDCNQLVERGVNMGLMDAIRADQLIGSYYTFKHFEDFLENSKLEPQRCNIFTSMKNTFFYVAIWYAMFQWKGFGWRGLLKPRNLAHFSYLLAQSGLSALGEMRHNFLTRSLPDNSEIEEMRQEFKEYRYQGKLQPWSAELS

SEQ ID NO: 90258 - protein, 83 aa, unidentified
  source 1..83: note = Unknown
  REGION 1..83: note = tr|V9Y0Y4|V9Y0Y4_9BACT Tryptophan 5-halogenase domain protein OS=uncultured bacterium OX=77133 GN=asmbl_7; PE = 4 SV=1
MKNCVAIGLAAAFFEPLESTGIFLIQHGIEELVKYFPDGEPDPVVVADYLRRAAHVVDGVKEFLVLHYRAACSSGPTRWPASG

SEQ ID NO: 90259 - protein, 512 aa, unidentified
  source 1..512: note = Unknown
  REGION 1..512: note = tr|B8Y7X1|B8Y7X1_9BACT Putative tryptophan halogenase Hal63D9 OS=uncultured bacterium OX=77133 PE=4; SV = 1
MGGKRIVIVGGGTAGWLTAATLARTLAPTDPGGVAVTLVESRDIPIIGVGEGSFPTLRTTLQSLGVSEQAFCRGADGTFKQGVRFTGWAGRPTPGHAQDDYMHVFELPYGGDAPGLLPAWLATGGSNRPAYADAVSAQEQVMRAARAPKRPGDPDYSAPFAYAYHFDAGKLASFLRDTAIASGVEHVQATVGEIVRAEDGTIAAVVPEGGSAPIAGDLFIDCTGFSARMIGETLGSRFTPVDDVLFNDRALAVQVPYDRPDAEIASYTHATAHGAGWIWDIGLRERRGIGCVYSSRHCSDEEAERTLRAYAGPAAKDLSLRQLRFRTGYRETQWIGNCVAIGLAAGFFEPLESTGIMLIEVAARMVAELAVNADRDAMAAAARLYNRTMPARFAAIVEFLKLHYAISHRRDTAYWRDNTDRASWPDGLADKLAQWRRRPPSRFDFVIDHESFLPPNWQYILYGHGFDTAAPAVGQQEMAGAFQAFAKVRAAQRQAVAALPSHRTLVDHYQRA

SEQ ID NO: 90260 - protein, 229 aa, unidentified
  source 1..229: note = Unknown
  REGION 1..229: note = tr|A0A2I6QNK4|A0A2I6QNK4_9BACT Tryptophan halogenase; OS = uncultured bacterium OX=77133 PE=4 SV=1
MTQLETERPVRSIAIIGGGTAGWMSAAAISKSFGRKIDVVLIESEEIGIIGVGEATVPHLSAFNRLLQIDEAEFVRQTKGSFKLGIQFNDWGKIGDSYIHGFGTIGRDLGLMPFHQYWLKARSQGHAKDISEYSLNTIAAPQGKFMTLRATLRPIRRWRRLPTPTTSTPFSMRASCGNMPKRAAQSGSKARSSPSINRATTASSKASSSRAARSSGPICSWIARVSAHC

SEQ ID NO: 90261 - protein, 494 aa, Pseudoalteromonas distincta
  REGION 1..494: note = tr|A0A5B0UGT6|A0A5B0UGT6_9GAMM Tryptophan 7-halogenase OS=Pseudoalteromonas distincta OX=77608; GN = EU511_06940 PE=4 SV=1
MNQNAIKKIVIAGGGTAGWMCSAAMAKLLGKNIEICLVESDLIPTVGVGESTIPTLHIFHDLLKISESEFMAATNATFKLGISFEGWKQNQQSYFHSFGYVGQGCWAAGFQHFWLKGMQQGVAADIGDYCTEHVASRLGKFAVVPNQDRNHAYQLDAGLYAKFLRNFAQQNGAKRIEGMISKVNLEPTNGFIKSLTLGDGQIIEGDLFIDCTGFKGLLIEQALHTGYEDWSHWLPCDSAVAIQTELVSPIVPYTRAMAHKCGWQWQIPLQSRRGNGLVFCSKYMSDDEAKTALLNNVEGKPINEPRVIKYRTGTRRKHWNKNCVAIGLASGFIEPLESTSIHLIQQSIIRLMQNMPTKAIESCYQDDFNNKMRFEAENIRDFIVLHYHVTQRTDSDFWRYCKNMPIPESLAKRIELFKQSGHVYKAEQELFGEASWLQVMLGQGLVPQNYHPIVDSMSDDELKRFLESIKNHVAKKADSLPSHIDFINHYCKAK

SEQ ID NO: 90262 - protein, 584 aa, unidentified
  source 1..584: note = Deltaproteobacteria bacterium
  REGION 1..584: note = tr|A0A538QF05|A0A538QF05_9DELT Tryptophan halogenase; OS = Deltaproteobacteria bacterium OX=2026735 GN=E6J91_15345; PE = 4 SV=1
MSEYQDKVYDVAIMGGGPAGATLAARLARETELSVAIFEAEFFPRDHIGETLVHTIVPSLYESGALGKVLSSDCYVKKAGGFYSWDPKQPWASYFEHELHEHDGYFRWSIHCNRPEFDHILLTHARDSGAEVYEGTPVNGVSRQDDITTLDLGVHGTARCKLFVNCSGRTSSTTITGERQFLSNYRNIAIWNHIVGGRPAQSLPGDWNIFRERNLSPIASLAFEHGWFWYIPVPKLVQGKRVVTHSLGVVTDPSALSDPKKRFTDPRIFMDTARRVPLLGELIKDAQLVSDKFMTAPNYSRISGRMCDWDKREIRVGDAAYFVDPLFSSAVHFALQHAGMAMVMIKAAFDPTMSDAMKRELWEDYHETLGSVARGFSLAIDQWYCEIARDNPGSVYWKHRSAAPTFLNRAETFQSLINGQIHGDLLQVITKGTNNINSLGKQGGLRRTHDEIRQKEPRGDARIRLRRNVDVKPSLTLEGPVRTPDGKVIPFLHGPYWDNPEKHASEVLPLFPGPRSCHRFHFTDDDTAIKVKFHDPEHKGLELAEQLKSGQYTYGQLKEQLSPPQQHLLLLAVMSDMVEQVPTS

SEQ ID NO: 90263 - protein, 438 aa, unidentified
  source 1..438: note = Unknown
  REGION 1..438: note = tr|A0A059WXQ9|A0A059WXQ9_9BACT Tryptophan halogenase (Fragment) OS=uncultured bacterium OX=77133 PE=4 SV=1
QKYDLPRLLPLTKYGPWQRAYPRIVCGLKRGFSYFLHRPETPFACQPDHGNELLVAASSTDESSDTHWLRADVDMFLAEEAANGGVEYVDRCEAALEPRDDHWRIASPRLSGAVRADFLIDGSGEGGVLARVLKIPNDVGHLKTNSRAIFCHVAGLRKWEELLVAQGNDLRDHPYPCDAAAVHHFLAEGWMWQLRFNNDVTSVGFTLAADAPAPQVSAGEEWRILLDRYPSLHAQFANSTIVQPPEGLRRTGRLQRCAAQMVGPTWAMLPNTAGFIDPLHSTGIAHSLCGIERLVGILSARAAPDAMHAALQKHATLQRREIHLIDRLVSGCYLARQDFRLLVPFASLYFAAATTYEHRRHEGATAKGYLLADDPAFTSLVEQLWERVDELAATPHLPDPKAAAFERKVAAAIRPYNRVGLLEPAVRNMYHHTAAPER

SEQ ID NO: 90264 - protein, 524 aa, Massilia sp.
  REGION 1..524: note = tr|A0A344JMD7|A0A344JMD7_9BURK Tryptophan 7-halogenase OS=Massilia sp. YMA4 OX=1593482; GN = DPH57_25790 PE=4 SV=1
MQPIRNILIVGGGTAGWLAAGFLARTLGTQGGGNAITLVESKDIGIIGVGEGTFPSIRGTLSVLGIDEGRFIRECSATFKQGVRFNHWVRAPGARGPDHYFHPFSQPSQRPGGPELLPYWLQGAAGADVPFAAAVTMQKHVADMSHAPKRSGDADFVGPLNYAYHFDAGAFATLLASHAQSLGVRRVEATVDQVKLDDTGAIAAVVTREAGELAADLYVDCTGFRARLIGEALGSPFRNINDTLFVDRALAMQVPYERPDSPIPSYTISTAHEAGWTWDIGLHERRGIGYVYSSRHTNDDRADQLLRQYIGPASDGREPRLLKLNVGYRETQWVKNCVAIGLSGGFLEPLESSGIGLIEAATYLVSYLFPYDGNLAPAAKLFNAQMKARYERIVDFVKLHYCLTQRTDNAFWIENAHASTIPESLREQLAMWRARPPHRLDFVTDIEMYPPSSWQYVLYGMEFPTRQMAHPAALPDMTAARREFQTIAQLSHHALADLPTHRALVEHYRRGGTMAAAPARRLYV

SEQ ID NO: 90265 - protein, 530 aa, unidentified
  source 1..530: note = Unknown
  REGION 1..530: note = tr|V9Y105|V9Y105_9BACT RebH-like halogenase; OS = uncultured bacterium OX=77133 GN=asmbl_12 PE=4 SV=1
MGNAIEKIVILGGGTAGWMAASYLGKALNGTVDITVLAAPDIPTLGVGEATIPNLQTAFFDFLGISEDEWMRECNASYKMAIKFVNWRTAGDGSPDPRNLDRGSDHFYHIFGLLPYYDQLPLSHYWVQRVLAKQTDEPFDYACYPEPLALDQNRSPRWMDGSRATNYAWHFDAHLVADFLRRFATGKLGVRHVQDRMEHVTHAPDGSIQSLLTRSGETLEADLFVDCSGFRGLLINQAMGEPFLDMSDHLLCNSAVASAVPHDDATQGVEPFTSAIAMKAGWTWKIPMLGRFGTGYVYSSQFADEDEAVRDFCDLWNLDPERVPLNKIRFRVGRNRRAWVKNCVSIGTSSCFVEPLESTGIYFIYAALYQLVKHFPDENFNSILIDRFNTEIETMFDDTRDFIQAHFYFSPRVDTPFWRANKELRLGDRMCEKVEMYRAGMAINSPVSDDATVYYGNFEEEFRNFWNNSNYYCVLAGLGVVPTSATPRLHHMPASVEGVEKVFQDVKRRQRSLLETLPTCYEFLRAQHGR

SEQ ID NO: 90266 - protein, 436 aa, unidentified
  source 1..436: note = Unknown
  REGION 1..436: note = tr|A0A0U3AEW9|A0A0U3AEW9_9BACT Tryptophan halogenase (Fragment) OS=uncultured bacterium OX=77133 PE=4 SV=1
RCEASFKLGVDFVDWGHAGNRYFHAFGDYGAEVEAIQPYALWRRLRELGDPTPLVAYNVPAQIARAHRFLPPNPDPRSPLHDYSYAFHFDASLYAGLLKELVLKRGVTRIDAKIAHVRLKPDDGFIAGVTLDDDREIDADFFIDCSGFRGLLIEEALKTGYTDWSHWLPVDGAWAVPTAKSGDTTPYTRSTAREAGWQWRIPLQHRTGNGHVFSSRFTTAEAARDTLVDQLDGAMLKDPMLIRFQTGHRNKFWHKNCIAVGLASGFIEPLESTSINFIQTEIARFLDLFPLQGPNPALEDEFNRLTLQEYVRVRDFIILHYRLNQRPEPLWRHTAEMAIPDELAHKIAVFQARGRVVMHEGDAFSAASWTAIFDGQGVVSEAYDPLADRLPEADLLSLMQQRRDGIARVVGQLPSLDDFIARHCASPAYLKSQVTA

SEQ ID NO: 90267 - protein, 497 aa, Pseudoalteromonas distincta
  REGION 1..497: note = tr|A0A5B0UDG6|A0A5B0UDG6_9GAMM Tryptophan 7-halogenase OS=Pseudoalteromonas distincta OX=77608; GN = EU511_09300 PE=4 SV=1
MKPIKHVVIAGGGTAGWITAALLNKVLGKVIKITLIESSTIGTIGVGEATIPPIIQLNNALGINEQDFINATNASIKLGIEFENWKTTSHSYMHAFGSFGKDFPFCDFYNFWVKGKITGSEDSLWDFSLNYQAAKQHKFAPLNTIPNTQLPGLSYAYHFDATLYAEFLKKLAMSRGVDHIDAKIEQVEQCPLSGNIKTLTLGNTQQINGDLFIDATGQRALLIEQTLNTGFVDWSHYLPCDSAVAVQSQGTSELKPYTRSIAHSAGWQWQIPLQSRIGNGLVYCSRYLSDDAATQLLLNNLPAEPITAPRVIKFKTGRRLKQWHKNVVSVGLASGFLEPLESTSIHLIQSAVTRLIKLFPHHGISETLVTEFNKQSVIEIEHIRDFIILHYKLTEREDSVFWRQCKQMDIPHSLAHKLKLFKETGKVVRENDELFAEVAWQQVFIGQGLIPDDYNSIVDSLSSEQLNDLFSTLKTLITSTVDQLPTHKDFLAKIKKA

SEQ ID NO: 90268 - protein, 530 aa, unidentified
  source 1..530: note = Unknown
  REGION 1..530: note = tr|V9XX83|V9XX83_9BACT RebH-like halogenase; OS = uncultured bacterium OX=77133 GN=asmbl_21 PE=4 SV=1
MDEPISKIVILGGGTAGWMAATYLARALGCTVGITVLTAPDVPTIGVGEATIPNLQTAFFDFLGIEEDEWMRECNASYKVAIKFVNWRTGGSGEPRPRIDDNGASDHFYHVFGLLPNSDQLPLSQHWVRRRHRTSDDEPFDYACYREPPALDELRSPRFADGRRATNYAWHFDAHLVADFLRRVAIERLGVRHVEDRVESVARRTDGGIRSVTARSGASFEADLFIDCAGFRGLLINQVMGEPFLDMSDQLLCDSAVATAVPHDDAANGVEPFTSAIAMPSGWTWKIPMLGRFGTGYVYASRYATEDEAVRDFSTLWGLDPESAKLNRIRFRVGRNRRAWVHNCVSIGTSSCFVEPLESTGIFFIYAALYQLVKHFPDTGFSPVLRDRFNREIELMFDDTRDFIQAHYYFSPRVDTPFWKANKELALSASMEEKIDSYRAGLPINPPANDDAQRYYGNFEEELRNFWNNSNYYCVLAGLGLVPDRPLPRLAHVAGADERADLRFTEVKRGQQEFLDMLPTCYEYLRQQHG

SEQ ID NO: 90269 - protein, 498 aa, Sphingomonas koreensis
  REGION 1..498: note = tr|A0A2M8WI02|A0A2M8WI02_9SPHN Tryptophan 7-halogenase OS=Sphingomonas koreensis OX=93064; GN = BDW16_3893 PE=4 SV=1
MTEKRPTRVVIAGGGTSGWMAAAAISRTMGRTVDLTLVESEQIGTIGVGESTIPPLVNFNRILGIGEAEFMAAAQATFKLGILFDNWKHDGHSYFHSFGLSGKDHWSAGFQHFWLYARSRGCPEPYDDYCLELAAAMQGKFAHLPQDRMNYAYHVDATLYGRYLRKLAEESGTKRVEGKIQRVELNGETGDIAALHLDGERRIEGDVFVDCTGFRGLLIEGALHAGFEDWGHWLPNDSAIAVQARHLGPPQPYTQAIAHDAGWQWRIPLQHRMGAGIVYSSGYLSRDEAHHRLISTVGEPLIEPFDIKFRGGVRRKQWYRNCVAIGLSGGFVEPLEATTVHLIQRAVLRFVRLMPNGRVSERDAAEFNEQQRQDIEQIRDFVILHYKATDRRDSAFWRHVAAMPVPDSLSQKIELFRETGRTFRRNEELFAENSWVQVMMGQGIDPQSWHPIAEKLSDEELMRLMSTLREDVTRTVATLPEHHTYVAQYCGAADPLAA

SEQ ID NO: 90270 - protein, 515 aa, unidentified
  source 1..515: note = Unknown
  REGION 1..515: note = tr|V9Y1B2|V9Y1B2_9BACT Tryptophan 5-halogenase; OS = uncultured bacterium OX=77133 GN=asmbl_15 PE=4 SV=1
MTPSVVIVGGGTAGWMTASYLAAAFGPRLSITLVESERVGTIGVGEATFSTVRHFFEYLGLEEQDWMPQCAASYKLAIRFQDWQTPGRYFYHPFERPETVQGFSLLDWTLRADAEPRTFDERCFLTRAMCEAGRSPRQLDGSLFVSQLDGPLGRSTLAEQRDQFPYAYHFDADLLARFLQGYGTARGVRHIVDDVVEVGQDTRGWLTHIRTEGHGDFTGDLFVDCTGFRGVLVNRTLGEPFHSFSEVLPNNRAVALRVPRDPAVRAVAPYTTATAMPAGWIWTIPLDQRDGLGYVYSDQFCTPEEAERTLREIAAPGRDDLPANHVQMRIGRTKRPWVKNCVAIGLSSAFVEPLESTGIFFIQHGIEELVKHFPMGEPDPAVVAGYNRRVAHVVDGVKEFLVMHYRAAARDDTPYWKEAKVRPAPDGLVERMTYGARTLLDESDIYPHFHGFEAYSWNTMLLGLGAGPTGPRPAMQLMDSTRAQQAFEALRAEARRTVSALPACGEYLDRLAGRS

SEQ ID NO: 90271 - protein, 494 aa, Sphingomonas koreensis
  REGION 1..494: note = tr|A0A2M8WBT2|A0A2M8WBT2_9SPHN Tryptophan 7-halogenase OS=Sphingomonas koreensis OX=93064; GN = BDW16_1639 PE=4 SV=1
MSARPVRRIVIVGGGSAGWMTAAALGRALAGQSHSITLVESEAIGTVGVGEATVPPILDFNRYLRIDPDEFLRETNGSIKLGIEFEGWGGAGHRYFHPFGFFGVEMSGIHFHHFWLRHVAEVGPRDHSEYHLEAMALREGRFARMTRTGPVHHAVHFDASLYARFLRGRAEASGVVRVEGKVVHVRLDPENGYIDALALDDGRSIEGDLFIDCSGFRGLLIEGALETGYESWNHWLPCDSAVAVPAANAGDPLPFTRSTAREAGWQWRIPLQHRDGNGYVYSSAHLPHAEAARLLSERLPGPAQADPNFLRFTAGHRRKIWNRNCVAIGLAGGFLEPLESTSIHLIQTTIIRLLALLPRDGIDPNVVARFNRESLHEYRTIRDFVIAHYALAGRDDTPFWRDVAATGVPDTLAERIEAFRATGNILFEPGDLFGPTNWYWVMTGQGVWPRSWHPIADGLSSAELTARLAVLRGRVAEQLAELPPHVEFLRRLSA

SEQ ID NO: 90272 - protein, 512 aa, unidentified
  source 1..512: note = Unknown
  REGION 1..512: note = tr|V9Y1F5|V9Y1F5_9BACT Putative tryptophan 5-halogenase OS=uncultured bacterium OX=77133 GN=asmbl_21; PE = 4 SV=1
MIKSVVIVGGGTAGWMSATYLKAALGPRLSVTLVESDRVCTIGVGEATFSTIRHFFDYLGLREEKWMPHCAASYKLAIRFENWRRLGHHFYHPFERLRIADGFHLADWWLRLGDRSSSFDRECFITPSLCESKRSPRHLDGTLFTGNLDVPLSRSTLAEQRAQFPYAYHFDADLLAKFLAGYGIDRGVRHVVDDVVGVGQDERGWITHVTTRNYGDVTGELFIDCTGFRGLLINQTLGERFQSFVDVLPNNRAVSLRVPKDIDRLGMQPYTVATAVGAGWIWTIPLFGRNGTGYVYSDEFCTPEDAERTLRKFTAPGQDDLSANHITMRIGRNERSWVANCVAIGLSSAFVEPLESTGIFFIQHGIEELVKHFPDERWDSALAARYNARVAHVVDGVKEFLVLHYRVAGRDDTPYWKETKVREIPEGLAEKLELGSRLLLDEATVYAHYHGFEPYSWNTMLLGLGGGPNRPRPALELMDPTSAREAFADVRRDAERITASLPSCYEYLAILH

SEQ ID NO: 90273 - protein, 529 aa, unidentified
  source 1..529: note = Unknown
  REGION 1..529: note = tr|M9QSI0|M9QSI0_9BACT Tryptophan 6-halogenase; OS = uncultured bacterium OX=77133 GN=borH PE=4 SV=1
MDNRINRIVILGGGTAGWMTASYLAKALGDTVTITLLEAPAIGRIGVGEATVPNLQRVFFDFLGLREEEWMPECNAAFKTAVKFINWRTPGPGEAKARTIDGRPDHFYHPFGLLPEHGQVPLSHYWAYNRAAGTTDEPFDYACFAETAAMDAVRAPKWLDGRPATRYAWHFDAHLVAEFLRRHATERLNVEHVQGEMQQVLRDERGFITALRTVEGRDLEGDLFIDCSGFRGLLINKAMEEPFIDMNDQLLCNRAVATAIKHDDDAHGVEPYTSAIAMRSGWSWKIPMLGRFGTGYVYSSRFAEKDEATLDFCRMWGLDPENTPLNQVAFRVGRNRRAWVKNCVSIGLASCFLEPLESTGIYFITAAIYQLTQHFPDRTFALALSDAFNHEIEAMFDDTRDFIQAHFYVSPRTDTPFWKANKDLHLPEQMREKIAMYKAGLPINAPVTDESTYYGRFEAEFRNFWTNGSYYCIFAGLGLRPDNPLPMLRHRPEQVREAQALFAGVKDKQRELVETLPSNLEFLRSLHGK

SEQ ID NO: 90274 - protein, 88 aa, unidentified
  source 1..88: note = Unknown
  REGION 1..88: note = tr|V9Y0Z5|V9Y0Z5_9BACT Tryptophan 5-halogenase domain protein OS=uncultured bacterium OX=77133 GN=asmbl_8; PE = 4 SV=1
MLPNNRAVALRVPRAPGAQEVAPYTTATAMPAGWIWTIPLDQRDGTGYVYSDQFCTPEEAERTLREFAAPGSDDLPANHVAMRIGRTQ

SEQ ID NO: 90275 - protein, 74 aa, unidentified
  source 1..74: note = Unknown
  REGION 1..74: note = tr|K1ZZY8|K1ZZY8_9BACT Tryptophan halogenase; OS = uncultured bacterium OX=77133 GN=ACD_54C00242G0001 PE=4; SV = 1
MGLPHVSHELHVPVLDGLGLLSPARAKAWLADRPTLRSLARKTTLASHKDHLQAANRCLPHRAFLVSLQKEPTA

SEQ ID NO: 90276 - protein, 516 aa, Pseudoalteromonas distincta
  REGION 1..516: note = tr|A0A5B0UIR8|A0A5B0UIR8_9GAMM Tryptophan 7-halogenase OS=Pseudoalteromonas distincta OX=77608; GN = EU511_06515 PE=4 SV=1
MTKPITKIVVLGGGTAGWLSAGLLAAEHPHLNVTLVESANVPILGVGEGTWPSMRNTLQRIGIKEIDFITQCDASFKQGSKFINWRNLSEGENYYHPFMNPQGYEHTNLHASWQRIAPDQKFADVVNMQSFVCQAALAPKQLQTPEYAAVTNYGYHLDAGKFAEFLKNHCVKNLNVTHIIDDVTEVINDEHGYIASLKTNNNGDITGDLFIDCSGSCARLIGEHFNSEFIAQDHILFNNSAVAAQIPNAHIDQPIASATLSTAQSYGWIWDIALPTRRGTGYVFSSKYQSDESATNTLKSYIAKSTSEQQAEQLTYRVLKFSPGYRQKFWIKNCVAVGMSAGFLEPLEASALAMVELSISMISEQLPQNRTHMSQLETRFNERFSTRWQRVIEFLKLHYVLSERDDTPYWQDISNLNTAPERLQNLLKLWQFQPPSRFDFIENEEVFSSSSYQYVLYGMGFDTQTVSAQNTFNDPRAGDYYYQQNRDKIAQCLNGLPSNRALLNHLLSNNGQPHND

SEQ ID NO: 90277 - protein, 164 aa, unidentified
  source 1..164: note = Deltaproteobacteria bacterium
  REGION 1..164: note = tr|A0A534RE17|A0A534RE17_9DELT Tryptophan 7-halogenase (Fragment) OS=Deltaproteobacteria bacterium; OX = 2026735 GN=E6J83_02705 PE=4 SV=1
SYDSVRFTGPGYLLAGDAACFIDPVFSTGVHLACLAGFLGGRAVHAVLAGEASEADALAAYEQTYRGAFERYLRFLYFFYDHNEDPDSYFWTARRVLAHAPADLSAREAFVRLISGNGDWDGAPALLAREHARWADGIRAGRAGAVPGIELLRVGLTRRLTGLG

SEQ ID NO: 90278 - protein, 219 aa, unidentified
  source 1..219: note = Streptomyces fungicidicus
  REGION 1..219: note = tr|V9XQT8|V9XQT8_9ACTN Tryptophan 6-halogenase (Fragment) OS=Streptomyces fungicidicus OX=68203 PE=4 SV=1
GGGTAGWMTASYLGKALQDTVAITVLEAPTIPRIGVGEATVPNLQRSFFDYLGIPEEEWMRECNASFKMAVRFINWRTEGRGEPNPRTLPGDGPDHFYHPFGLLPDHDQTPLSHYWFQRKHQGETTEPFDYACFREPPLMDAMKAPGHTDGTAATRYAWHFDAHLVADFLRRFATEKQGVRHVQDEMVRVEQDERGYVTALHTKGGQALDADLFIDCSG

SEQ ID NO: 90279 - protein, 503 aa, unidentified
  source 1..503: note = Unknown
  REGION 1..503: note = tr|B8Y7X2|B8Y7X2_9BACT Putative tryptophan halogenase Hal64E9 OS=uncultured bacterium OX=77133 PE=4; SV = 1
MTADRADQDGSGRRVRSVAILGGGTAGWMTAAALARTFGRHVAITLLESEEIGTVGVGEATIPTIHWYNQLIGFDEAAFLRETKATFKLGIEFLDWTRPGHRYFHPFGQYGVELPGVAFHQRWLRARADGLDLPLPAFSLADRLAREGRFAKPSGGAQSILSTLGYAYHFDASLYARHLRGIAETAGVRRVEGKLADVERDGESGTVTALTTERGERIEADLFVDCSGFRALLIGTELEDWSRWLPCDRAVAVPCARVAETTPFTRSTARTAGWQWRIPLQHRTGNGYVFCSRHVSEDEATATLLANLDGEALAEPRTLRFTAGTRREAWRGNVVAIGLSSGFLEPLESTSIHLIQSGIAKLLTLFPDRDCDPALATRYNALLNADMDNIRDFLILHYHATEREEPLWQEVRAAALPDTLLAREEQYRRAGRLMLGPEELFRDASWHAVLNGQGITAQGYNPLADTLDPVTNRAQVQQIADVIARAAPTLPKHDAALAALMDA

SEQ ID NO: 90280 - protein, 795 aa, Methylobacterium sp.
  REGION 1..795: note = tr|A0A0Q4WFS2|A0A0Q4WFS2_9RHIZ Tryptophan halogenase; OS = Methylobacterium sp. Leaf90 OX=1736246 GN=ASF36_05115; PE = 4 SV=1
MFRSERSAPPRLVVAGGGPAGWMAALYLKRVLRRAGWTVTLVGAAPAAGASAALATRPAFTRFLKGFGIDEAIFMRRCAATYRLASRYDDWFAEGQGHWHPFGACGPRIAGRDLFHYWMKLRGEGPEDEAGSYADYAPQALMAAEGRGPRPLADRSSLTESGDYGYHLDRAALVRFLRELALSEGVRGVTGRVREIERNLYGDVGALILDGGQTIEGDIFLDCTGATAQLIGTALGEAWVAGSGPGDRVARLFLPRSPEVPPFTAYRGRAEGWTASLPLADRTEHQFVYDSRTTPPDAVAATLRRAFDGEAGIVDAELRHGRRASPWQRNVVAMGAAAGAVEPLLGFDLDLVLAGLETFLAYLPRQGEGGDVLRRAYAARLNRFHDDAAEAVAAHYVLGRRSEPFWAAARAVMIPDRLADRLDLYELAGHVALSEEGPFSEGDHYLLFSGADFLPRRPFAPVDVADGREIARLFASIRAQSAQIAGAMAPHVRLMDALHGEAPVAAPAVRIAAASAPAGPAALRRTPEGARLADLVAGLGQPFGYERSVKASPAGLQTDRFLMSLHRASLGLTPEATLDRLAAGLGLPERERAEAAGLIGGADILHLGYEDGPSGALYKLYVEWSSRTDAAWTGADEAGAEPMLVHRAYKWKPGGTHPPVVTLYHWPRVRGPEEIEARLNRMAGAWGPAGAPARDTAHAILRLAQERGRGAVHYLEAREEPGLRLSYDLNLYACGLTVADAEPRLGQAFVDLGVPREAAAMVLRERLQETLGHVAGGVGRDGQPFVTVYSGVAGG

SEQ ID NO: 90281 - protein, 501 aa, Sphingomonas koreensis
  REGION 1..501: note = tr|A0A1L6JDC4|A0A1L6JDC4_9SPHN Tryptophan 7-halogenase OS=Sphingomonas koreensis OX=93064; GN = BDW16_3848 PE=4 SV=1
MKQIKRILIVGGGSAGWMTAALLARLFEGLYEITLVESEEIGTIGVGEATIPAIKKYNELLALDEDDFMRRTQGSFKLGIQFVDWWRNGESYIHGFGLIGQDLGWLRCHHYWLKMRGQGRASDFSNYSINTAAALADKFMRADPRMTESPIGHIAHAFHFDAGLYARYLRDYAEARGVRRREGKVMDVTLRGDDGFVESVTMADGEVIAADFFVDCSGFRGLIIEQAMQTGYETWTHWLPCDRAIAVPCARIEPFTPYTRATARTAGWQWRIPLQHRTGNGHVYSSQYIDDAEAERQLLDNLDGAQLAEPNRIRFTTGKRKQIWNRNCVAIGLASGFLEPLESTSIHLIQSSIIRMVRLLPDAGFDPAGIAEFNRQTDFEYERIRDFIILHYKATERDDTPFWRYCRDMDVPTTLQRKIDLFAANGRIFREDEELFAEESWIQVLLGQGVMPRGYDPLVDVKDEGEIAQYLGDIERVIRKCVDVMPDHAAYVARTCPARAS

SEQ ID NO: 90282 - protein, 509 aa, Stenotrophomonas maltophilia
  REGION 1..509: note = tr|A0A501QKK3|A0A501QKK3_STEMA Tryptophan 7-halogenase OS=Stenotrophomonas maltophilia OX=40324; GN = FJP69_01765 PE=4 SV=1
MNAADTIQGPIRRVVIAGGGTAGWLAGCALAHQFRQQLDITLVESEQIGTVGVGESTVPPIRTFHRFLQIDEQEFLRAVAGTFKLSISFENWRRPGERFIHPFGTIGQGTWATPFHHFWLDSLRRGMPSELGDFCLESAASLADRFSLQTQPQVNYAYHFDAGLYARFLRGKAEANGLRRVEGKIREVRQHPHDGSVASLVLDDGQVIEGDLFIDCTGFRGLLTEQTLHTGYEDWNEWLPSDRAVAVQTDSPAPPVPYTRAIAHEAGWRWHIALQHRVGCGLVFSSRHMSDDEAQAKLLRDVDGQPLRDPWLVPFRSGRRLQAWNRNVVALGLASGFIEPLESTSIHLTISAVVRLIQLFPSDGITPSLVALYNDVSRQEMEHVRDFIILHYHANQRDEPMWKACREMALPESLQVRLRAWRERAHAWQDPGELFRVDSWTSVLMGQGIQPGAPHPLARAIGDADLRTLLHRIRQPVQETVAKMPTQAEFIERYCKAAPDAWQRGRAVA

SEQ ID NO: 90283 - protein, 530 aa, unidentified
  source 1..530: note = Unknown
  REGION 1..530: note = tr|A0A0K0P8P2|A0A0K0P8P2_9BACT Tryptophan-6 halogenase OS=uncultured bacterium OX=77133 GN=lzrH2 PE=4; SV = 1
MEDHRIRKVVVLGGGTAGWMTASYLGKALGPDVALTVLEAPSIPKIGVGEATVPNLHRTFFDFLGLAEDEWMRECNASYKMGVRFINWRTPGAGEAKARELRGKPDHFDHLFGLLPNHANLPLSHYWTAERLAGRTDEAFDYACYRESPVLDAALAPRHADGSRWTNYAWHFDAHLVADFLRRFATERQGALHVEDEMTEPVIDHRGHITALRTKSGRLIEGDLFVDCSGFRGLLINKAMREPFLDMSDHLLNDSAVATAVPHDDEANGVEPYTSAIAMSHGWTWKIPMLGRFGTGYVYSSRFTSPDEATKELCDMWGLDPETQPLNHVKFRVGRNRRTWVRNVVSIGLSSCFLEPLESTGIYFITAALYQLAKHFPDKRFDPVLADSFNREIETMFDDSRDFLQAHFSLAPRQDTVFWRSCKELELAENFKGKLAAYRAGLAVNMPAVDETTYYANFEAEFRNYWTNSSYYCIFAGLDYLPEHPLPLLDQRGDLVAGAEPVFAEMKRKQKELLAGLPTHYDHLRRLHGR

SEQ ID NO: 90284 - protein, 495 aa, Pseudoalteromonas distincta
  REGION 1..495: note = tr|A0A5B0UJC0|A0A5B0UJC0_9GAMM Tryptophan 7-halogenase OS=Pseudoalteromonas distincta OX=77608; GN = EU511_06510 PE=4 SV=1
MTKTNAVKNVVIAGGGTAGWMAAAALAKLVGNNINITLVESDDIGTVGVGEATIPPIRTFHKLLGINEQAFMKATQASFKLGISFENWGDENTHYIHSFGATGKECWAGEFHHFWLQGKTLGINNPFGDYCYELQAAKAGKFAFNQQNPINYAYHMDATRYAQFLREFSEPLGVTRIEGKIQKVVKNTKTGHIESLILNNGEHINGDFFIDCTGFRGLLIEQALHTGYEDWSHLLPCNSAIAVQTKSTSETVLPLTRSIAHKSGWQWRIPLQNRVGNGLVYCSQYMDDEQAKALLLNKIEGEALTKPRIIKFKTGRRLKGWNKNCLALGLASGFVEPLESTSIHLIMSGIIRFMRLFPFNGITNHAIDEYNKQLKSEIENIRDFIVLHYKVTNRDDSEFWQHCSAMEVPKTLQHKIDLFKQTGRVFLDDGDIFRVDSWVQVMLGQGIEPNQHHLIASMMSDEELTRFLHGIKQQIEQRVSQLPSHHEFLKQYCPA

SEQ ID NO: 90285 - protein, 397 aa, Rhizobium leguminosarum
  REGION 1..397: note = tr|A0A2L1CRU2|A0A2L1CRU2_RHILV FAD-binding oxidoreductase OS=Rhizobium leguminosarum bv. viciae; OX = 387 GN=E0H44_01345 PE=4 SV=1
MQASKSSYDVVIVGGAVVGSSTAYFLATNPDFNGSVLVIEKDWTYQRSATALSSSSIRHQFSNAINVKVSQFGTEFIRHFKENVIVDDDTPEIGFHEAGYLFLAEDDRGDQVLRRNHETQVSCGAEVTLLDPDGLGRRFPWLNLEGLTLGSTGERGEGWFDSVGLLQGFRKKARSLGVEYIEDEVVAINREGDRIVSVSTKSGQTIACGTMVNTSGTNGKKVAGMAGLDVPVEPRRRSLFVVDCRTPLEGKVGLTIDPTGVFFRPEGKFYLMGTYPKHDPEVDPNDFDVMHDEFDEEIWPILANRVPAFEAIKVVNSWAGHYDYCTLDHNVVLGPHTEVSNFLFANGFSGHGLQQSPAMGRGLSELIAYGGFKTLDLSPFGYERVAADRPFLEDAVI

SEQ ID NO: 90286 - protein, 504 aa, unidentified
  source 1..504: note = Caulobacter flavus
  REGION 1..504: note = tr|A0A2N5CRG4|A0A2N5CRG4_9CAUL Tryptophan halogenase; OS = Caulobacter flavus OX=1679497 GN=C1707_07875 PE=4 SV=1
MADNRIGRIVIVGGGTAGWMSAAMLARALGPGVAISLVESEAIGTVGVGEASIPQLRNFNAFVGLDEDAFLRATEGTIKLGIEFVDWLRPGHRYMHAFGPVGRPLGTTPFHHYWLDACRRGTAGDDFWAWSANALAARAGRFGRTPPDPAQSGAEPLTWAYHFDAALYAHHLRAHAEARGVTRIEGRIVGVDQDGDTGFLRAVTLEGERRVEGELFVDCSGFRGLLIEEALRSGYEDWRAWLPMDSAWAVPSRDAAPPVPYTRAWARDAGWQWRIPLQHRTGNGHVFSSAWTDKDAAVRTLMDNLEGEALAEPRLLTFVTGRRKQSWNRNVVALGLAAGFMEPLESTSIHLVQSGLARLLALFPDKGFDPLLAGEFNRQTADEYARIRDFLVLHYKATEREDTPFWASRKAMEVPETLAERMALFASSGRVFSRDADLFKESSWVQVLLGQGVTPAAAHPMTAVAADGQVDGWLDDLARIAARTAACLPSHAAFLGRPETRLAG

SEQ ID NO: 90287 - protein, 509 aa, unidentified
  source 1..509: note = Caulobacter flavus
  REGION 1..509: note = tr|A0A2N5CN89|A0A2N5CN89_9CAUL Tryptophan halogenase; OS = Caulobacter flavus OX=1679497 GN=C1707_10585 PE=4 SV=1
MANNLRKIVIVGGGSAGWITAAMLSHYLKDSPCEIELIESEQIGIIGVGESTIPPFLQLIRSLGISEKEFMQETQAAFKLAIRFENWRQKGEVYYHPFGLIGGLVDVHEFYQVWLRGKAEGHPSSLQDFAPASVMADRWKFMSPAMAPRTMLANANYAVHIDAALLAKFLRKFAEARGVKRTEGIVKDVATRPDGFIEKVILQDGREASGDLFIDCSGFRSLLNGKTLGTEFLDWSDVLLNDRAIAVQTANIQDPHPYTLAQAQDFGWRWRIPLQHRAGNGYVYCSQYCSDDEALATLMSQVEGEAVRDPWLVPFKTGMRKQLFNKNCVAIGLAGGFIEPLESTALHLIYRGVDYLLRFFPDRDCDATLAAEYNRRMQIDYEEIRDFIVLHYFTTKRDDTPFWRAYQQVTPPESLRERIELFKSSGVLRDGVDDMFRAPSWQSVMEGMGIRPKRYQQLVDTLPAGVVKGLLDKSAPMLSELVDTLPSHGDFLRQHCPAPMPEALLKRAG

SEQ ID NO: 90288 - protein, 538 aa, Burkholderia pseudomallei; identical to SEQ ID NO: 82926
  REGION 1..538: note = tr|A0A095MVK2|A0A095MVK2_BURPE Tryptophan 7-halogenase OS=Burkholderia pseudomallei OX=28450; GN = BOC42_32895 PE=4 SV=1

SEQ ID NO: 90289 - protein, 605 aa, Streptomyces albogriseolus
  REGION 1..605: note = tr|M1MEQ9|M1MEQ9_STRAO Amido transferase; OS = Streptomyces albogriseolus OX=1887 GN=thdD PE=4 SV=1
MCGIAGWVDFNRDLTGERSTVLAMTDTMALRGPDDTGIWLSPHAALGHRRLAVIDVEGGRQPMAADDVAVLTYSGEVYNFRELRVQLEARGHRFRTHSDTEVVLRGYLEWGEDLVDKLNGIYAFALWDVRREELLLIRDRMGVKPLFYYPLPGGGVLFGSEPKAILAHPQADRAVDADGLREIFTITQTPGLSLYKGMHEVRAGQVVKVRRQGLTKRQYWRLTAQEHTDDLDTTVRTVRELLEDIVERQLVSDVPLCSLLSGGLDSSALTALALKHGDTRSFAVDFAGYADHFQPDEMRGSADGPFVRDAVAHLRPDHTDITLDTTELTDPRLRTSVMDAWEYPQFSGDMNTSLYMLFRAIQGHSTVALSGESADEVFGGYAWFHLPKAVDSGTFPWLVFMMQKQRPEDLFDPELRKKLDVLAYERDRYSDALAEVPYLPMVSARERRMREVSYLHLTRFVNMLLDRKDRLSMAHGLEVRVPFCDHRLVEYVFNTPWAFKTFDGREKSLLRAAVSDLVPASILERRKSPYPATQDPAYGQALRGTLTDLVADGTAPVLPLLDGEAVRTLLKSPAEDTASTVTRISLEMVLDLNSWLESQELRVDV

SEQ ID NO: 90290 - protein, 531 aa, Streptomyces albogriseolus
  REGION 1..531: note = tr|A1E280|A1E280_STRAO Tryptophan 6-halogenase; OS = Streptomyces albogriseolus OX=1887 GN=thal PE=1 SV=1
MDNRIKTVVILGGGTAGWMTAAYLGKALQNTVKIVVLEAPTIPRIGVGEATVPNLQRAFFDYLGIPEEEWMRECNASYKMAVKFINWRTPGEGSPDPRTLDDGHTDTFHHPFGLLPSADQIPLSHYWAAKRLQGETDENFDEACFADTAIMNAKKAPRFLDMRRATNYAWHFDASKVAAFLRNFAVTKQAVEHVEDEMTEVLTDERGFITALRTKSGRILQGDLFVDCSGFRGLLINKAMEEPFIDMSDHLLCNSAVATAVPHDDEKNGVEPYTSSIAMEAGWTWKIPMLGRFGSGHVYSDHFATQDEATLAFSKLWGLDPDNTEFNHVRFRVGRNRRAWVRNCVSVGLASCFVEPLESSGIYFIYAAIHMLAKHFPDKTFDKVLVDRFNREIEEMFDDTRDFLQAHYYFSPRVDTPFWRANKELKLADSIKDKVETYRAGLPVNLPVTDEGTYYGNFEAEFRNFWTNGSYYCIFAGLGLMPRNPLPALAYKPQSIAEAELLFADVKRKGDTLVESLPSTYDLLRQLHGAS

SEQ ID NO: 90291 - protein, 514 aa, unidentified; identical to SEQ ID NO: 83757
  source 1..514: note = Caulobacterales bacterium
  REGION 1..514: note = tr|A0A1F8IG44|A0A1F8IG44_9PROT Tryptophan halogenase; OS = Caulobacterales bacterium RIFCSPHIGHO2_12_FULL_68_13; OX = 1797586 GN=A3E24_04595 PE=4 SV=1

SEQ ID NO: 90292 - protein, 543 aa, Shewanella sp.
  REGION 1..543: note = tr|A0A2M7HNU5|A0A2M7HNU5_9GAMM Tryptophan halogenase; OS = Shewanella sp. CG12_big_fil_rev_8_21_14_0_65_47_15; OX = 1975537 GN=COW15_17040 PE=4 SV=1
MQQATHTAINKIVIVGGGTAGWITAALLAAEHNVDKGQLAHSPRLDITLIESPDVATIGVGEGTWPSMRNTLDKIGISETEFIRQCDASFKQGSRFIHWQHDDTEHTNPFGSNQYIHPFSLPHGHQELDLCPFWLPHSDKVSFAHAVSNQDALTQLGLAPKTIATPEYHFQNNYGYHLDAGKFSQLLMQHCTEKLGIKYIRDHVTQVHSHPNGDIESLATKEHGVILGDMFVDCSGTKSLLLGEHFNVPFLCQKAVLFNDSALAIQVPYAEENSPIASCTLSTAQPNGWIWDIGLPTRKGVGYVYSSAHCSDDEAEQTLRAYLANDTSTKPQSASSNAVDSRKQEYRKLNINPGYHAKCWQNNCIAIGMAAGFIEPLEASALALVEWTANTLATQLPTHRGVMDTIAQRVNERYERHWQQIIDFLKLHYVVSRREVDGYWRDHRDTASIPERLQQQLDLWRYQAPSSHDISYKEPLFPAASFQYVLYGMGFHTALPTHIKPSQQQVAQRLFSENQKKINALSQSLPNNRDLLNKVRQFGFSKI

SEQ ID NO: 90293 - protein, 445 aa, Calothrix sp.
  REGION 1..445: note = tr|A0A1Z4H135|A0A1Z4H135_9CYAN Tryptophan halogenase; OS = Calothrix sp. NIES-2100 OX=1954172 GN=NIES2100_31720; PE = 4 SV=1
MKIAVIGGGTAGYIAASHISKHFPQFDLYHIYDSNIPTIGVGEGTTPYFLEWLERITNLSYAELEKRCHVTRKFGISFENWGVEHEKFFHHFYPIGEQYSYHVSAREIVNLLQEYVCATQIDCQVTDVKSDGISVNIAFANHTNLEVDLAIDARGFPKTLDENYVKLSWIPTNAALIRQIPGANDNIIELKIGSDLLKYQSATRSIARPHGWIFTIPLTNRTSYGYIYNRNINSVSEIEADFDEFFDSEAITYAGQPKHLNFPNFTVRNCFDGALFKIGNSASFLEPLEATAIGCILKQVEAIGYWLLPAFAKLETREKLAEKDLKVFNQYFINYVYKMSLFVGWHYAMGSRFHTKFWEFAKANFYQEIENLENKKLLEEFYEVLESGSKSPHPIENFREFSLTVAKTEKNILSVLIEGIPKLFGQWTKPSFTEVGYGIGYFDHK

SEQ ID NO: 90294 - protein, 501 aa, unidentified
  source 1..501: note = Altererythrobacter xiamenensis
  REGION 1..501: note = tr|A0A1Y6FG44|A0A1Y6FG44_9SPHN Tryptophan halogenase; OS = Altererythrobacter xiamenensis OX=1316679; GN = SAMN06297468_2176 PE=4 SV=1
MAIDKIVIVGGGTAGWMAAAVLSRLKKGRELDVTLIESEAIGTVGVGEATIPPFVEFNQLLEIDEREMLSSVQGTFKLGIQFSNWGDVGESYIHPFGAYGYNMGGISFHHVWHQMREMGDKRPIQAFNVETMAAYFGRFARTEDFNRDDLPPVNYAYHLDASAYARFLRKYAETRGVVRQEGRIEDVQLDAESGFVNAVTLESGERFEGDLFIDCSGFRGLLIEQALETGYEDWTHWLPCNRAVALPCNRDDGSPPPPFTRATAHAAGWQWQVPLQHRNGNGHVYCDAYMSADEAHDILVANIAGKPTAEPNHLRFVTGRRKKFWNKNVVALGLSAGFMEPLESTSIHLINTGLNKLVAVLSLDGITQTQEDAFNRLTGKEYARIRDFLILHYNATRRDDSEFWNYCRTMSVPDTLTEKVELFKRNGQIFREEDELFTETSWAAVMMGQGIQMEGHNPVAETLDRETTLKELHEMEQSIRFAVNQMPGHGEYLTKYCPAPA

SEQ ID NO: 90295 - protein, 496 aa, unidentified
  source 1..496: note = Enterobacillus tribolii
  REGION 1..496: note = tr|A0A370Q3T4|A0A370Q3T4_9ENTR Tryptophan halogenase; OS = Enterobacillus tribolii OX=1487935 GN=C8D90_1208 PE=4; SV = 1
MLSLKGIKRIVVLGGGTAGWYTALSLRKIFSDNVEIRVVESTELGIVGVGEGGLLNFQSALRSIDIDLNEFVRETNATFKWGFCYEGWRTGEKDDKYYHPFASSTGAASQWENLGHYPLFSAMINHSIPLTSYLRGFDLIVNNASQAEAALALSSQSVDIINSFHFDSYKIAKYFKKVALERNIIHQDVIVEHVETDERGHVTALITQENEKIELDFLVDATGLARKVIDKVVPSEWFSFKDHLLLDRAIPFYMPHPLENPYLVSRAIAMKSGWMWQIPLQNRVGAGYVYSSKHISDEDALQEIKDYLGFDIEPQQNVIKFEPGCYRQIWVKNVLTVGLASGFVEPLEATSIGQMIETVRNFIRILVTSQGVVSDNAVREFNESNFTSWMEILDFLRMHYDCPRRDTEFWQDVAKTPLTENYRAFKECMQARAPRLMDVESYLLYGRRGMFHIVNWMFVAVGLGLIPHTAVVGDLMALPPESKQRAQNFLDSLKKD

SEQ ID NO: 90296 - protein, 504 aa, unidentified
  source 1..504: note = Altererythrobacter xiamenensis
  REGION 1..504: note = tr|A0A1Y6ELI6|A0A1Y6ELI6_9SPHN Tryptophan halogenase; OS = Altererythrobacter xiamenensis OX=1316679; GN = SAMN06297468_0861 PE=4 SV=1
MKGDSNSDDRGDRLRKIVIVGGGSAGWMAAAALSSVTSTPIVLVESDEIGTVGVGEATIPQIRTFNRALAIDEREFVRATNATFKLGIRFLGWNGEGSDYIHAFGQVGQPTAVMPFHQLWLRGRALGFAGAFGEYALNDVAARAGKMAMPGRGMPAQGANMPWAYHFDASLYAQFLRKRAEAKGVKRIEGKIVGVTCDHEEPAIESVTLASGQVIEGDFFLDCTGFRGLLISQLEGSDFCDWSHWLPCDSAQAAPCRSDGEISPFTSSTAHSAGWQWRIPLQHRVGNGVVYCSAHMSDDEARAHLLANIDSAPDAEPRQIRFTTGTRRNHWIGNCMAVGLSAGFLEPLESTSIHLIQYSIARLMAMLPRRGTDPAIAASFNHEVSRQWLRVRDFLILHYWANGRVGEPFWDACRTMELPETLVPKIEQFKATGHFIREEEELFTEVGWSQVFLGHGIIPESWHPLADEMPEAELRQFLDRMGAGYREMVSRMPTQAEFIGALLR

SEQ ID NO: 90297 - protein, 415 aa, unidentified
  source 1..415: note = Pseudomonas lactis
  REGION 1..415: note = tr|I4KAJ8|I4KAJ8_9PSED Putative tryptophan halogenase OS=Pseudomonas lactis OX=1615674; GN = PflSS101_0449 PE=4 SV=1
MPTVEMERRQVVVIGAGPSGAIAAALLKRKGHDVLIIEREHFPRFSIGESLLSHCIDFIEEAGMLDAVQAAGFQVKTGAAFAWGERYSAFDFSDTFSNGKPTTFQVQRGEFDKLLADQAALQGVEIRYGQTIVGVDFSAESRYLHVRRQNGSEYHLKARFVLDASGYGRVLPRLLDLEAPSNFPLRQAVFTHVEDRIEHPGFDRSKILVTTHPTQRDIWFWTIPFSNGRCSVGVVAAKEHFEGAGSDLDACLHGFIEQTPSLSGVLQNAVWDTPARTIGGYSANVKTLHGPGFALLGNAAEFLDPVFSSGVTIAMRSASMAAGVLHRQLSGETVDWQAEFAEPLKRGVDTFRCYVEGWYAGTFQDVIFHPGSSPEIRRMISSILAGYAWDERNPFVSEPKRRLRMLSDICASEAV

SEQ ID NO: 90298 - protein, 500 aa, unidentified
  source 1..500: note = Altererythrobacter xiamenensis
  REGION 1..500: note = tr|A0A1Y6F4F8|A0A1Y6F4F8_9SPHN Tryptophan halogenase; OS = Altererythrobacter xiamenensis OX=1316679; GN = SAMN06297468_2022 PE=4 SV=1
MGEQGIRKLVIVGGGTAGWIAAAAFSRLIGPRLSIELVESETIGTVGVGEATIPQIIRLNTILGFDEADFVRQTNGTFKLGIEFVDWSQIGSRYLHTFGDAGINLGNVHFHHYWRRQAMQGGDKSLWHYSLHQLAAQQGKFAHLDRVGKTSMTGLAYAYHFDAGLYARYLRHFSETNGVTRTEGIVQSVERDGESGDIAAITLDRGAKIEGDFFIDCTGFRSLLLGSELGVEYRDWSKWLPCNRAQAVPSERLPDLPPFTRATARTAGWQWRIPLQHRTGNGHVYCSEFLSDDEAATILLDNLDTPATGDPRPIRFTTGRREAFWSHNCVAIGLSSGFLEPLESTSIHLIQSNVGRLIELFPRERIRDADRDEYNRRTVAEFEQIRDFLILHYHQTDREDSEFWRYCKHMDVPEPLRHKMELFAASGRIGRDADDLFRDASWAQVMLGQGIMPQDYNPMADKLSDEQLGSFLGDVRQIIERAVAGLPSHADYIEKHCRAS

SEQ ID NO: 90299 - protein, 519 aa, Novosphingobium sp.
  REGION 1..519: note = tr|A0A0Q4C8I6|A0A0Q4C8I6_9SPHN Tryptophan halogenase; OS = Novosphingobium sp. Leaf2 OX=1735670 GN=ASE49_14085; PE = 4 SV=1
MTTDTPSSCRVVILGGGTAGWLAAAYLSRTLGLSDITLVESSEIGIVGVGEGTFPTIRATLAGLGISEAEFLVRADATFKQGVLFEGWATGTDSYFHPFNLPIGGEDEALLPHWLADTSAQRPAWADAVTVQEQAIRAGRAPKRPEDPDFSGPMNYAYHFDAARFADYLRDISIAAGVVRIEGTVATVQRQADGDIGALDLADGRTVAGDFFLDCSGFRALLIGQTLGADFTSCSDSLFNDRALAMQVPYAQPGAPVRPYTLATAHEAGWTWDIGLTTRRGIGYVYSSRHCSDDEAEATLRRYVGSQGDALSPRQLRFETGYRQRQWIGNCVAVGLSAGFFEPLESTGIMLIEAALRMVGDFLAPNLLAPGNRDARNGAARSFNRLMAARFARIVHFLKLHYCITRRSDTAYWRDNADPATIPEPLRDMLAQWRHRPPSRFDFVVDLETFLPPSYHYILYGMGFETSMPGARHPGAAQAREAFARVRAAHAGARSGLPDHRALLNHYHARTAVPSSKVS

SEQ ID NO: 90300 - protein, 507 aa, Shewanella sp.
  REGION 1..507: note = tr|A0A2M7HT37|A0A2M7HT37_9GAMM Tryptophan 7-halogenase OS=Shewanella sp. CG12_big_fil_rev_8_21_14_0_65_47_15 OX=1975537; GN = COW15_10150 PE=4 SV=1
MTIRKIAIIGGGTSGWLAANHLGRVLKDNPELSITLIESPDIPIIGVGEGTVPAIRRSLQSFGISESEFIRSCDVTFKQSIKFVNWLDKSRHGKGNFYHHLFDMPSSLGEDLTPSWLMDKSEHFAEYVSPQHAVCEANKAPKLITTPEYSGVLGYAYHLNAAKFAKLLAKNAVEKFKVEHISTTVRDVNLTADSAIASLLTDNGVLSFDFYIDCSGFESILLAKKLEVPFINKSHQLFIDTALVAQVPTQQSDIIPPFTLATAHQAGWIWDIALTQRRGTGFVYSSQHMEHAEAEAKFDRYLGGKLADVVHRKIPMTVGYRQQFWAKNCVALGLAQGFLEPIEATSILLTDFSARLLAERFPTDKEDISYLAKRFNDTVSQAWERVVEFAKLHYCLSDRADSAFWRDNRADETIPDLLKQRLTLWKQFSPISEDFPSKFEVFNMDNYLYVLYGMKYPTKQPHTNPASLKNAKLHLNELRNITLRMVDGLPEHRELLEKISLYGLQRI

SEQ ID NO: 90301 - protein, 504 aa, unidentified
  source 1..504: note = Pseudonocardiales bacterium
  REGION 1..504: note = tr|A0A2W6DBG0|A0A2W6DBG0_9PSEU Tryptophan halogenase; OS = Pseudonocardiales bacterium OX=2201155 GN=DLM60_17645; PE = 4 SV=1
MSISQVENVDVVVVGGGPAGATVSTLVARQGHRVLLVEKQKFPRYQIGESLLPSTIHGVCRILGVADELERAGFKRKRGGTFKWGASPEPWEFSFAVSPRLAGPTSFAYQVERSKFDSILLDNARRSGVDVREGHAVSEVLEENGRVVGVRYEDDDGQSREARARYVVDASGNGSRIHRVVGGKRNYSDFFRNIAVFGYFEGGGRLPAPKDGNIFSATFDEGWIWYIPLADNLTSVGAVVGRENAKEIQGDAAGAWRRMLKSCPEIHALLDGVDQVTQGQYAEVRVRKDYSYWKDRFWSPGMILVGDAACFVDPVFSSGVHLATYSALLAARSINSCLDGTLTEDRGFGEFEARYRREYGLFYEFLVSFYDMHHDQQSYFWEAKKITNCRGNELRAFVELVGGIVSGDASLVSSDAAVARLTTASAEFETAVQSLNDSGDLRNPIFEAKSIGAVLREGANLQGRAMFGEPIEPEAPLFTGGLVASKDGMHWTEPVGQRPAHRAR

SEQ ID NO: 90302 - protein, 505 aa, unidentified
  source 1..505: note = Altererythrobacter xiamenensis
  REGION 1..505: note = tr|A0A1Y6F8A9|A0A1Y6F8A9_9SPHN Tryptophan halogenase; OS = Altererythrobacter xiamenensis OX=1316679; GN = SAMN06297468_2025 PE=4 SV=1
MASQFAPIRQICIVGGGSAGWMTAAALSDALGPRVDITLIESEMIGTVGVGEATIPPIRYFNQRLGIDEATFIRETAGSFKLGIEFVDWRRLGHSYFHPFGQHGAEFDQVPFYHYWMRESLAGRIDGPIDDFSMAWAMSKAGKFAPPLPDRRQIQSTYDYAYHFDATLYARFLRGYAEQRGVTRVEGKVVGVTLDSESGAIASVTLEDGRAFEAELFIDCSGFRGLLIEDALKAGYDNWQHWLPCDRAVAVPSARGETISPYTRSTAKAAGWQWRIPLQHRTGNGYVHCTEYVSEDEATETLVSSIVGELLAEPRTLRFVTGKRRAFWAKNCVAIGLSAGFMEPLESTSLHLIQYGILRLLALFPDSEMSPLLAEEYNRQTAAEYERIRDFLILHYKATERDDSELWRYCAAMDIPDSLQYKIDHFRNYGMLVSDERELFNNPSWIAVYLGQGIEPRRAPAIAKLREEVPVADRFAAISKAMQDAVAQMPAHADFLAQHCKSPHA

SEQ ID NO: 90303 - protein, 496 aa, Shewanella sp.
  REGION 1..496: note = tr|A0A2M7HQA1|A0A2M7HQA1_9GAMM Tryptophan halogenase; OS = Shewanella sp. CG12_big_fil_rev_8_21_14_0_65_47_15; OX = 1975537 GN=COW15_15405 PE=4 SV=1
MNYIKNIIIVGGGTSGWMTAAMLAKLFKSTLNITLIESEDIGTIGVGEATIPPLQIFNNVLGINEADFINATQATFKLGIQFENWGKPGEAYMHAFGHVGKDIGFTQFHHYWLSTSPKEVNSFWDYSVNYQAAKHNKFQVLQHIPNSPLAGLTHAYHFDATLYAQFLRRFSEQLGVKRIEGKVISVDLAPCGKIDTVKLQTGQVIAADFFVDCSGFAALLIEKALKVDFDSYQHWLPCDRAYAVPCEKTTTITPYTRSIAHDVGWQWRIPLQHRTGNGLVYCSRYVSDDAAKQLLLDNLDGKPLAEPKKINFTTGRRLKQWHKNCVAIGLSSGFLEPLESTSLHLVQSAIIRLSKLFPHQGIAQANVDEFNHQSKLEFEQIRDFIILHYHLNQRVNSQENSLWQQCQTMEIPDSLQQKIELFRETGAVFRHQEELFTEAAWVQVMLGQGIMPQDFNPLSRTISASDLAAFLQNMRTIIDNAVGKMPTHNQYLAHLG

SEQ ID NO: 90304 - protein, 498 aa, unidentified; identical to SEQ ID NO: 88386
  source 1..498: note = Acinetobacter wuhouensis
  REGION 1..498: note = tr|A0A3G2SZT5|A0A3G2SZT5_9GAMM Tryptophan 7-halogenase OS=Acinetobacter wuhouensis OX=1879050; GN = CDG68_06745 PE=4 SV=1

SEQ ID NO: 90305 - protein, 406 aa, Parvibaculum lavamentivorans
  REGION 1..406: note = tr|A7HT83|A7HT83_PARL1 Tryptophan halogenase; OS = Parvibaculum lavamentivorans (strain DS-1 / DSM 13023 / NCIMB 13966) OX=402881 GN=Plav_1497 PE=4 SV=1
MNPDVVIIGAGPAGSVAAAMLAGAGFSVEVLERAHFPRFSIGESLLPQAMEWLAEADLLRDVVEAGFQHKNGAMFRHGDREESFDFRMKSSDGWGTTYQVRRDKFDDLLAKGAVRKGAKVSFGQTVIAMRPDPVAPSLTVRDEEGNEREITARFVLDASGFGRVLARLLDLESPAGFPDRMSIFTHVEDNIPPQAYDRNKILITVNPRNSEIWYWMIPLADGLCSMGVVGKPEHLAPYGSTREEQLASLVAESGLMGELLVNARRVRDVGEISGYAARVSSLTGPGYALLGNAGEFLDPVFSSGVTIALKSASLATHALVRQLKGETPDWDKEFAQPLARGVETFRAYVSGWYDGSLQKIIFSQPADANQIKKMITSVLAGYAWDEANPFVREPGKYLKMVEELCG

SEQ ID NO: 90306 - protein, 503 aa, Shewanella sp.
  REGION 1..503: note = tr|A0A2K8ZJF7|A0A2K8ZJF7_9GAMM Tryptophan halogenase; OS = Shewanella sp. Pdp11 OX=2059264 GN=AYJ58_08475 PE=4 SV=1
MTTAIKRVVIAGGGTAGWMAAAALTKLMGKHLEIVLVESDEIGTVGVGEATIPTLHIFHRLLGLKEQEVMAATNATFKLGISFENWQDINKNYLHSFGFLGKDCWACGFQHFWLKGKQLGMVSEIGDYCAEHLAARQGRFAVLPNQDYNHAYHMDASLYAKYLRKMAEQHGIHRIEGKIKQVLQHHDSGNIKALVLENDETIEGDLFIDCTGFRALLIEQTLNTGFEDWSHYLPCDSAIAVQTQSVGAPIPYTRSIARESGWQWRIPLQNRTGNGLVFCSKFISDEDATELLLANLEGEPLNKPRIIKFKTGTRRLHWHKNCVAVGLSGGFLEPLESTSIHLIQRSIIRLMQLFPSAGIVQSDIDEFNQQTKLEMDNIRDFIILHYKATEREDSRFWRYCKNMDIPASLKHRIEMFADSGKVYKYGSELFGESSWIQVMMGQGIMPKHYHPIVDVMEEPELEAFLNNIKSTVKRKVESLPAHLDFIQHYCPAEVLTNTKPMAM

SEQ ID NO: 90307 - protein, 503 aa, Shewanella sp.
  REGION 1..503: note = tr|A0A2M7HNV1|A0A2M7HNV1_9GAMM Tryptophan halogenase; OS = Shewanella sp. CG12_big_fil_rev_8_21_14_0_65_47_15; OX = 1975537 GN=COW15_17025 PE=4 SV=1
MTTAIKRVVIAGGGTAGWMAAAALTKLMGKHLEIVLVESDEIGTVGVGEATIPTLHIFHRLLGLKEQEVMAATNATFKLGISFENWQDTNKNYLHSFGFLGKDCWACGFQHFWLKGKQLGIVSDIGDYCAEHLAARQGRFAVLPNQDYNHAYHMDASLYAKYLRKMAEQHGIHRIEGKIKQVLQHHDSGNIKALVLENDETIEGDLFIDCTGFRALLIEQTLNTGFEDWSHYLPCDSAIAVQTQSVGAPIPYTRSIARESGWQWRIPLQNRTGNGLVFCSKFISDEDATELLLANLEGEPLNKPRVIKFKTGTRRLHWHKNCVAVGLSGGFLEPLESTSIHLIQRSIIRLMQLFPSAGIMQSDIDEFNQQTKLEMDNIRDFIILHYKATEREDSRFWRYCKNMDIPASLKHRIEMFADSGKVYKYGSELFGESSWIQVMMGQGIMPKHYHPIVDVMEEPELEAFLNNIKSTVKRKVESLPAHLDFIQHYCPAEVLTNTKPMAM

SEQ ID NO: 90308 - protein, 495 aa, Calothrix sp.
  REGION 1..495: note = tr|A0A1Z4GVL5|A0A1Z4GVL5_9CYAN Tryptophan halogenase; OS = Calothrix sp. NIES-2100 OX=1954172 GN=NIES2100_12410; PE = 4 SV=1
MNLNIKRVAIVGGSSAGLLSAVTLKHFFPQLEILLIYSRKHAAIGVGESTTAWFPQFLHEHLNISQEEFYKSIWPVWKLGIKFEWGVPDISHFNYTFDRQFRYDSKSLSKTPGFYCMHDMRQASRYSILMDRQHSPLLHDGQGNIKILADGFGYHIDVYEFINYLSTKASSLGVDIQEIEVLDAKLDEQGNIQHLCCEDDLKIEADLFIDCSGFKSQLLRGVLKSEYISFSDRLFCDSAIVGNWKRQTPIFPFTTATTMNSGWRWRIDLRERVSFGYVYSSSFCNQDEAIQEYLSLTPYATDDLRKISFKSGRYRRFWVNNVVAIGNASGFVEPLESTGQHMIVETIWRVVLALQDSNLRPSPKLIDATNQYIADLWDEICDFLTLHFKFNRKLDTPFWKYCQEKTDLGSMQNLVDLYQDSGVCRAIAHLIPKSSIFEIDGYLTMLCGQQLPVKHLKPLTERESSEWLQYRQILHKNLEGSLSPQEAFHILENIW

SEQ ID NO: 90309 - protein, 501 aa, Shewanella sp.
  REGION 1..501: note = tr|A0A2K9A833|A0A2K9A833_9GAMM Tryptophan halogenase; OS = Shewanella sp. Pdp11 OX=2059264 GN=AYJ58_09790 PE=4 SV=1
MKVKQAIRKIIILGGGTAGWMAAAALANNPVFAAIELCLVESDNIGTIGVGEGSTPHLKRFMDNLGISEKDWMEPCHASYKTGIDFINWNGDGQQYFHPFYFQMDVKPAEVFFINANARRRGHGSAVRPDAFFSSGVLAKHNLSPKPNKALPYTNEYGYHFDATELANYLKDYACQRGVRQIIADVVEVSTTQHQQIETLILANGERLSADFFIDASGFSAKLIHKALGVPFQSFADELLNDSAVTVPVLMDSIQTQAQQAKYHTRATALSAGWLWQIPLTNRLGNGYVYSSRHLSANAAAKELLHSVNLPESTQVRFLKMRVGVSDKAWHNNVLAIGLAQSFIEPLEATSIMMTQFTLERFMSLFERYQLNKQAETLSRQTLNQAVMQLVLGIKDYIQAHYVTSQRSEPYWLAARKVTISQRLTQLLQAWYQGEDFDLLLYQYDQQLAYFRPSWYALLAGMDYRDPKLKRPFEPISAEITAQAIRYSQTLVEQYFQPKHP

SEQ ID NO: 90310 - protein, 513 aa, Sphingosinicella sp.
  REGION 1..513: note = tr|A0A4V0YI23|A0A4V0YI23_9SPHN Tryptophan 7-halogenase OS=Sphingosinicella sp. BN140058 OX=1892855; GN = ETR14_09525 PE=4 SV=1
MDPIRSIIVVGGGTAGWMAAAALSKQLENSPTSITLVESPEIGTIGVGEATIPPIIQMNQLLGLDEDEFVRETRATFKLGIEFENWGAIGERYMHPFGRYGGDIGTLDFHHYWRRLRALDPAAAGDIGDYSLPIMAARRGKFQRPEPNPRNVLSNIAYAFHFDAGLYAEYLRRQAEARGVVRHARRITDVALAGNGNVASVLLDGGERLAADFFIDCSGFRGLLIEGALGTGYEDWSHWLPCDRAVAVPSERAGPPPPYTRSTAQAGGWQWRIPLQHRTGNGYVYSSRCLSDDEAAAALLAGLDGAPLGDPRPLRFTTGMRRKFWNRNVLALGLAAGFMEPLESTSIHLVQAGLSKLFNLFPDRGFAEADIDFYNRSFREDWERIRDFLILHYHATRRDDSALWNHVRTMEIPGTLKAKLEVFASRGRIFRASDELFAESSWLAVLEGQGLRPTRYDPLADAMPEQVLRSKLSGLRAVIARGADAMPRHSQFIADHCAYAGPKASGTAATMVG

SEQ ID NO: 90311 - protein, 507 aa, Sphingomonas sp.
  REGION 1..507: note = tr|A0A4P6XC77|A0A4P6XC77_9SPHN Tryptophan 7-halogenase OS=Sphingomonas sp. AAP5 OX=1523415; GN = E2E30_05230 PE=4 SV=1
MDTAISKVVIVGGGTAGWLAACRIAAAARPLAAHPITVTLVESPDVATIGVGEGTWPTMRATLERIGIGEAEFLLACDASFKHGSRFHGWATGAADDVYFHPFTPPLEADARALVAAWQAEAAGAAFADVVTPQSQVAGQCLAPRQRSMPDYAGALNYGYHLDAGKLAALLMRHATERLGVRHVRDHVIGVDRTETGEVVAVNTRDTDAVTGDLFLDCTGHAALLVGDVPFIDRSDVLFNDRALAVQVPVAADSPIAAQTDATAHAAGWIWDIGLPTRRGVGCVYSSAHMSDDAALETLSAYLGSAEPITPRRLTFRSGHRDRFWTGNCLAIGLSAGFLEPLEASAIVTIELALDALLDDWPTHATLPLTAARFNTLFRYRWDRIVEFLKLHYVLSRREGRYWQDHRDPASIPPRLAELLALWQHRPPTRADLPMVDELFPAASYQYILYGMGARVPDPGPLRGGPLPSFGSIAQRTRGMVATLPPIRAYLDACRAASQPIAMEHMN

SEQ ID NO: 90312 - protein, 314 aa, Streptomyces sp.; identical to SEQ ID NO: 84962
  REGION 1..314: note = tr|A0A3D9JHU9|A0A3D9JHU9_9ACTN Tryptophan halogenase; OS = Streptomyces sp. 67 OX=1827603 GN=CLW07_7494 PE=4 SV=1

SEQ ID NO: 90313 - protein, 505 aa, Sphingosinicella sp.
  REGION 1..505: note = tr|A0A4P6FMU3|A0A4P6FMU3_9SPHN Tryptophan 7-halogenase OS=Sphingosinicella sp. BN140058 OX=1892855; GN = ETR14_16040 PE=4 SV=1
MNARQPIRDVVIVGGGTAGWMTAAAAARFLAGGGKRRIRLIESEEIGTVGVGEGTIPPMIEFNQLLGIPEADFLAATKATYKLGIDFVGWGAEGERYFHPFGKLGLNLDGIDFHQVWLKYRDHPAIGPISDYSIAALAARDHRFAHPDKSGRSPLANLGYAYHLDAGLYAAMLRRYAERGGVERIEGRITTVDRDPETGNVAAVVLESGLRIEGELFIDCSGFRSLLLGQTLGVEFEDWSHWLPCDRAIAVPSARSEPITPFTRAIAHKAGWQWRIPLQHRTGNGHVYASAHIDDGEAEEILVANLDTQPIGAFNRLRFKAGRRVKSWEGNVVAIGLSSGFLEPLESTSIYLIQYGIQRLFGLFPDSRFSASERTEYNRFMADAYELVRDFIILHYQATRRPEPFWQEVRSVEMPASLRRKIDLFADKGRIFRYSDELFELPSWVAVMLGQGIVPAGHDPLADSLPDDQVIPAIAELRRGYARIAQGLPRHADFISQALAAAKTG

SEQ ID NO: 90314 - protein, 499 aa, Shewanella sp.
  REGION 1..499: note = tr|A0A2K9A9H5|A0A2K9A9H5_9GAMM Tryptophan halogenase; OS = Shewanella sp. Pdp11 OX=2059264 GN=AYJ58_12420 PE=4 SV=1
MNKIRDIVIVGGGSSGWMTAAMLARLFKSILNITLIESEDIGTVGVGEATIPPLQIFNNVLGISEADFINATQATFKLGIQFENWGKPNETYMHAFGNVGKDIGFTQFHHYWLSTSPKEVNSFWDYSVNYQAAKHNKFQVLQQIPNSPLAGLTHAYHFDAALYAQFLRRFSEQLGVKRIEGQITAVELTPNGDIESVTLGSGKTVTADFFIDCSGFAALLIEKALKVGFDSYQHWLPCDSAYAVPCEKTAAITPYTRSIAHDAGWQWRIPLQHRTGNGLVYCSRYISDDAAKQLLLNHLDGKPLAEPKKINFKTGRRIKQWHKNCVAIGLSSGFLEPLESTSLHLVQSVIIRLSKLFPHQGIAQANVDEFNRQSQLEFEQIRDFIILHYHLNQREDAKENGFWYQCRTMLLPESLQQKIALFRATGTVFRHQDELFTEAAWIQVMLGQGIRPQDFNPLAATIQPQALSEFLLNMRTIIDNTVTKLPSHDQYLAHISTHK

SEQ ID NO: 90315 - protein, 500 aa, Sphingosinicella sp.
  REGION 1..500: note = tr|A0A4P6FST0|A0A4P6FST0_9SPHN Tryptophan 7-halogenase OS=Sphingosinicella sp. BN140058 OX=1892855; GN = ETR14_13845 PE=4 SV=1
MASHALRRILIVGGGSAGWMTAALFAKLFRGLYEIRLIESEEIGTIGVGEATIPAIKTYNDLLGIDEREFVRETRGTFKLGIQFNDWLRPGSSYIHGFGVIGQDLGWLRCHQYWLKAQTLGKASDLAAYSINTAAALRNRFLPAQAKMKDSPLGHIAYAYHFDAGLYARFLRARAEAGGVVRTEGKVVDVSLRAGDGFIDTVTLASGERIAADLFIDCSGFRGLLIEQALATGYEDWTHWLPCDRAIAIPCARSEDFTPYTRASVRPAGWQWRIPLQHRTGNGHVYASRYMEEAEAERILLATLDGEPLAEPNRLRFVTGKRRQTWNRNCVALGLAAGFMEPLESTSLYLVQSAAIRLARLFPDSRFDPATIAEFNRQTDFEYQRTRDFIILHYKATERDDTPFWRHVRDMEVPETLRRKIDLFAANGRIFREDDELFAEESWIQVFLGQGLIPRRHDPLVDLQDEADILRYLADVEAVIAKCVNLMPSHAAFVDKFAAA

SEQ ID NO: 90316 - protein, 547 aa, Planctomyces sp.
  REGION 1..547: note = tr|A0A2E8EZM4|A0A2E8EZM4_9PLAN Tryptophan halogenase; OS = Planctomyces sp. OX=37635 GN=CMJ45_06105 PE=4 SV=1
MTSHDQSPDVVVIGGGPAGSTAATMLARQGVSVLLLERETFPREHVGESLLPASIPVLEELGVLPAVEAAGFLTKWGATMVWGSDPSPWSWYFRETNQRNPHSYQVWRPQFDQLLLENSRAHGVDVREGHRVVEVLWDDGKTTGVRYQADSGETGTVQCRYVVDASGQTGLLARGLNLRQWDPFFQNLAVYGYFSGAQPLPEPDETNIFIEAYPHGWLWSIPLHTGWTSVGAVVDSATSQDEISNGNPERFLEAQIIQAPHTSRMLRNAHLEIGPFIVKDWSYVCERVAGDGYVLAGDAACFVDPLFSSGVHLALMSGILSAAYVTSALKDPEIAEPAAAAYHELYLKEYGHFREMARLFYSSNLTSDSYFWEARRLLEDAGNFTPRQAFIQAVAGQPPRGYERAVLEQGQAPLEFASSVRQVESERERRRVRWEAACSGTDTGDPILAAVPKLAPETQIQRKPILGAGEFVWGTVLTTVSQPEGTPCSGLISALVSRIDGTRTVAHLLDEVGSLGEPSQAAQIRQTALAALGILYVDGTVEELGGL

SEQ ID NO: 90317 - protein, 509 aa, unidentified; identical to SEQ ID NO: 85061
  source 1..509: note = Caulobacterales bacterium
  REGION 1..509: note = tr|A0A1F8IGR1|A0A1F8IGR1_9PROT Tryptophan halogenase; OS = Caulobacterales bacterium RIFCSPHIGHO2_12_FULL_68_13; OX = 1797586 GN=A3E24_04590 PE=4 SV=1

SEQ ID NO: 90318 - protein, 509 aa, Shewanella sp.
  REGION 1..509: note = tr|A0A2K9A3N3|A0A2K9A3N3_9GAMM Tryptophan halogenase; OS = Shewanella sp. Pdp11 OX=2059264 GN=AYJ58_08290 PE=4 SV=1
MKIKRVAIIGGGTAGWLAANHLGAELCHDPEIEITLIESLDVPTIGVGEGSVPYLAKGLKRFGISEAELLLACDATFKQGIKFVNWLDKNVHGDNHYYHAFDAPYPAGIDVSSYWVSHASQRPFDDVGIQARICDLGLSPKLKGSGDYDGALSYAYHFNALKFAGLLAKNAQKKFNVKHQFATIVGVEQDQFGLISHLITADNSSLAFDFYVDCSGFSSILIDKALKVPFESKSSELLTDTVLVQQVPLNAKENINPYTTATAHKAGWIWDIPLTTRRGTGFVYSSRHMSDEEALTLYADYLQVEKAQFKPRKIPMEIGYRKEFWHKNCVALGLAQGFVEPLEATSILVSDFSAELLARHFPRTIEDISVSTSYYNSVITYVWERVVDFIKLHYCISDRKDSSFWLDNQKEDTVSFELKQRLARFKLRPPHQSDFFSRFDLFDHKNFLYVLYGMKFKTNHSALSQQEITHCEKLFSDNDLLVGRAETLLLNHRDWLEGLMRAFEAKNLK

SEQ ID NO: 90319 - protein, 507 aa, unidentified
  source 1..507: note = Sphingomonas gei
  REGION 1..507: note = tr|A0A4S1XGA2|A0A4S1XGA2_9SPHN Tryptophan 7-halogenase OS=Sphingomonas gei OX=1395960 GN=E5A73_07870; PE = 4 SV=1
MPRDRGILVVGGGTAGWLAAAYLARFFAGRIPITLLESPDIGIIGVGEGAFPTIRATLQFLGIDEARFIREASATFKQGIRFDDWLHAPRDGTRHQYLHPFEAPFHTESTSLIPYWLLQDEATRASFAEAVTIQNRVAQACCAPKQGREGAYAGPLNYAYHFDARRLAQTLEARAVDLGVRHLKGLLTGVDLAEDGSIARIRTAEHGALEADLYLDCSGFRAELIGKALGVPFKSAKHQLFTDRALACKIPYADPDAPIESLTIATAHEAGWTWDISLESARGIGCVYSSAHMRDEDAAAILRAYIGHDDYKARIIPFEPGYRETQWAKNCVAVGLSGGFLEPLESTGVVLIEAAVAMIADLFPHSGPVDAPAARFNQLMAARYENIINFLKLHYCLSMRDEPFWRDNADPASIPEALQQLLRQWRHRPPSRFDFTLDVESFAFFNYQYILYGMGFRTDLSAARADFPDAEAAAKLFARIRSFGERAVEDLPTHRALIREINAGASL

SEQ ID NO: 90320 - protein, 514 aa, Stenotrophomonas sp.
  REGION 1..514: note = tr|A0A2G7S1V1|A0A2G7S1V1_9GAMM Tryptophan halogenase; OS = Stenotrophomonas sp. LMG 10879 OX=487706 GN=CR919_01320; PE = 4 SV=1
MGSIALNAADTTRGRIRRVVIAGGGTAGWLAGCALAHQFRQQLDITLVESEQIGTVGVGESTVPPIRTFHRFLQIDEQEFMRAVAGTFKLSISFENWRRPGERFIHPFGTIGQGTWATPFHHFWLDSLRRGMPSELGDFCLESVASQADRFSLQTQPQVNYAYHFDAGLYARFLRGKAEANGLRRVEGKIREVRQHADDGSVASLLLEDGQVIEGDLFIDCTGFRGLLTEQTLHTGYEDWNEWLPSDRAVAVQTDAATPPVPYTRAIAHEAGWRWHIALQHRVGCGLVFSSRHMSDDEAQAKLLRDVDGRPLRDPWLVPFRSGRRLQAWNRNVVALGLASGFIEPLESTSIHLTISAVVRLIQLFPSEGITPSLVALYNDVSRQEMEHVRDFIILHYHANQRDEPMWKACREMALPESLQVRLRAWRERAHAWQDPGELFRVDSWTSVLMGQGILPGPPHPLARAISDADLRTLLHRLRQPVQEAVAKMPSQADFIERYCRAAPGAWQTGRAVA

SEQ ID NO: 90321 - protein, 484 aa, unidentified
  source 1..484: note = Caulobacterales bacterium
  REGION 1..484: note = tr|A0A1F8IFI9|A0A1F8IFI9_9PROT Tryptophan halogenase; OS = Caulobacterales bacterium RIFCSPHIGHO2_12_FULL_68_13; OX = 1797586 GN=A3E24_00930 PE=4 SV=1
MTAAALARLVAPSGVQITLVESEAIGTVGVGESTLPHIRAFNERLGIDEAAFMKATRATFKLGIQFENWGQIGGSYIHPFGDYGAPGGEAPFHHYWLRGRELGDVGPIDDYSLPVVAAREGRFAPPSDDPRSLLSTYRYAYQFDATLYARFLRGMAETEGVRRIEGRIQNVAQDGESGAITKVTLDDGRQIEGDLFVDCSGFRALLIEQTLKAGFTDWSHWLPCDRAVALPCESDQPTVPYTRATALEAGWQFRIPLQHRVGNGYVYSSAFIDDAAALDRLVGRLEGKPLKAPNVLKFTAGQRTRNWAANCVSVGLSSGFIEPLESTSIYLIQIAITKLIELWPTAVIDPATEAEFNRQMDLEYVRIRDFIILHYCATARNDTPFWDYVRTMPLPDTLSEKIELFRARGIVQDYREGLFLHPSWVAVYLGQDILPRRHHPLVDAVSATQLMSSLERLRRMVREASYKLPSQDDYIARYCAHLPL

SEQ ID NO: 90322 - protein, 502 aa, Sphingomonas sp.
  REGION 1..502: note = tr|A0A0Q4GBF5|A0A0Q4GBF5_9SPHN Tryptophan halogenase; OS = Sphingomonas sp. Leaf20 OX=1735685 GN=ASE72_16440 PE=4; SV = 1
MKRVQRLVILGGGTAGWMTAAAMSATFGDLVKISILESDAIGTIGVGEATIPTIHWFNQLIGLDEEAFVAATKASFKLGIEFVDWARPGTRYFHPFGRYGVDLGPVPFHQHWLRAKGDGLDRSLSTYSLAAQLAAVGRFAKPVDDPRSILSTLGYAYHFDASLYARHLRQLAEKRGVVRHEGLLRDIKRDPDTGFVTALTSDRGERLEGDLFIDCSGFRALLIGETMGARFEDWSHWLPCDRAVAVPCARIAATTPFTRSTLRPAGWQWRIPLQHRTGNGYVYASSFVSDDEAVATLLSNLDGEALADPRMLRFTAGFRREAWRGNVVAIGLSSGFLEPLESTSIHLIQSGIAKLITLFPDADCDPVLARQFNTLFARDMDGIRDFLILHYHATQGHDAPLWQHTRHMTPPPTLVDKMAQYTRAGRLMLSADELFREASWLAVLEGQGVGALGHAPLADTLDAATNRRQLNQIETVIARATPTLPLHDAAIAALVAPQVAGR

SEQ ID NO: 90323 - protein, 490 aa, Sphingomonas sp.
  REGION 1..490: note = tr|A0A3M0EEM4|A0A3M0EEM4_9SPHN Tryptophan halogenase; OS = Sphingomonas sp. PP-F2F-G114-C0414 OX=2135662; GN = C8J47_1896 PE=4 SV=1
MRQEQLRSVLVAGGGITAWCAAAALKRRAPFLDVAILRCTPSRDALADRIACTLPSLLGFHDDLGIGAADGIARTASGYRLGTLFSGWATGLPDYVHAYGRYGRSLGPTAFHLHWIRSVLEGARAAPFDSHSPAAALARAGRFAPTMPETPFADHEYGLTLDLPRYQTMMRAFALHVGVREIVGEIAGIVRDTGDGIAAVELAGGSCMVADLFVDATGPDAKLRGALDDVRDDWSAWLPCDRVLLAEGSAEPLVLTTAVAHPAGWRWSSGAQSGFAYASGEISDAKAARVLRNAAGTAPGEPIRVRPGTRPHPWLGNCIAIGDAATEVEPLEWCNLHLALSAIDRLIAMLPGRTPTRGEAAEFNRQTLAEAERVRDFLALHYKTAQRDDPLWQAVAAAVPPASLSHTLAQFTERGRLPFYEEETFARDSWAAVLIGQGVLPRRIDPLVAAVPAAAAQTAMARLTTEIAAALPHIPTHAAYRAAQTRHLLP

SEQ ID NO: 90324 - protein, 504 aa, Streptomyces sp.
  REGION 1..504: note = tr|A0A1X1NDB7|A0A1X1NDB7_9ACTN Tryptophan halogenase; OS = Streptomyces sp. CB03238 OX=1907777 GN=BKD26_24360 PE=4; SV = 1
MMSHVVIVGGGTAGWMTATYLKAAFGERIQVTLVESKQVSTIGVGEATFSTVRHFFRFLGLAEHEWMPECHASYKLAIRFEDWRARGHYFYHPFERPRTVNGFSLADWWQHLRPGDRFDRDASVLAALCDARSSPKYLDGTLFDMAGEDSTQFPYAYHFDATLLARFLCGYGTRRGVRHVVDDVLDVRLDERGHIRDVLTKEHGELAGDLFVDCTGFRGMLLNKALGVPFLSYQDSLPNDSAVALRVPVDVARRGMRPCTTATARAAGWIWTIPLLDRLGTGYVYASDYCSPEEAERTLREFVGPEADDVTANHIRMRIGRSARSWAGNCVAIGLSSGFVEPLESTGIFFIQNGIEQLVRHFPDGRDDERLRRAYNRQVGHVMDGVREFLVLHYYAAARDDNQYWRDAKTRPMPDALAERIEQWHTTLPDADSVYPYFHGFEPYSYTAMLLGLGGIRTRPLPVLARLDGTEAVKEFHRIRQQADSLIDRLPSQYAYLAQLRGGA

SEQ ID NO: 90325 - protein, 488 aa, Sphingomonas sp.
  REGION 1..488: note = tr|A0A2R7JJR1|A0A2R7JJR1_9SPHN Tryptophan halogenase; OS = Sphingomonas sp. HMWF008 OX=2056845 GN=DBR17_07670 PE=4; SV = 1
MAAAAFARFLPPGTSIALVESDAIGTVGVGEATIPQIRLFNQGLGIDEDDFVRATQGTFKLGIEFVGWSGAPGGIESRYIHAFGTIGRGLGLVPFHQHWLRHRSLGGTRGLWDFSASALAAQHDRFSRDMGRPDLPSGIAWAFQFDAGLYAAYLRTYAEARGVVRHEGRVVAVAQDSERGDITGVTLDDGVEVAGDFFVDCSGFRGLLIEQTLQAGYDDWSALLPCDRALAVPSANVGSTTPYTRATARDAGWQWRIPLQHRTGNGLVYCGAFLDDARAADLLLGGLDGQALADPRPLAFTTGRRRRAWVQNCVALGLAAGFMEPLESTSIHLIQSGIARLLQLFPQDGESSIEAAEFNRQTEQEWLAVRDFLVLHYHANGRDEPFWRACREAPIPDSLAHRIDLFRSTGRLFREGEELFAEPGWLQVLIGQGVTPRRYDPLADGLPAGHLDEFLSLARRHVEQVVGKMPTHDAFIAAHCAASDRMAA

SEQ ID NO: 90326 - protein, 493 aa, Acinetobacter junii
  REGION 1..493: note = tr|A0A4Q1SMA9|A0A4Q1SMA9_ACIJU Tryptophan 7-halogenase OS=Acinetobacter junii OX=40215; GN = ETZ13_05515 PE=4 SV=1
MLNLRGMDRVVVVGGGTAGWFAALQLRQVFSPSVEIMVISAPEIPIVGVGEGGVLNLLSVLHDLNIDLKDFIEQTGSTLKLGFRYERWRTGKQEDYYYHLFPLPTPDFAWNEFGFNPYLSGLFNHGIDVSRYMASYEFSEERKPFQEVLEILLKGKNNFGASLHFDTFRVGQYLKKIALARGIIHVEQKIENFVFNPTTENVSAIQCVNHEISCDFVIDASGFSRLLIGKKYQSQWCSFSDTLPMNRALPFHLPHKNKIELVTRATAMSSGWVWQIPLQERIGAGYVYHDQFITDQEAQLEVENWLGHSINPVKPIAFEAGYFQQVWIKNVVGIGLASGFIEPLEATSIGQMLSQLQLLVSFIRENHGVISQQNIDFYNQQNAQYWEGIRDFIRMHYDTGRSDTPFWKFMLTVPQSESYQELKKCWVHRTPRDIDFVGHSMDGMYMFSAANWLAVGAAVGVIKPEATVAELYALPPDKKQKLAKFLEQIRKKL

SEQ ID NO: 90327 - protein, 561 aa, unidentified; identical to SEQ ID NO: 84532
  source 1..561: note = Phaeobacter piscinae
  REGION 1..561: note = tr|A0A291FR01|A0A291FR01_9RHOB Putative tryptophan halogenase OS=Phaeobacter piscinae OX=1580596; GN = PhaeoP36_02420 PE=4 SV=1

SEQ ID NO: 90328 - protein, 109 aa, Glaciecola sp.
  REGION 1..109: note = tr|A0A3D1S552|A0A3D1S552_9ALTE Tryptophan halogenase (Fragment) OS=Glaciecola sp. OX=1905676 GN=DER52_10265; PE = 4 SV=1
MTQQSISHVVIIGGGSAGWMTAAALSKNLNPQHTKITLIESSTLGTVSVGEATIPQIRQFNAMLGVNEDEFITRTSGSFKLGIKFFNWGHIGDEYAHPFGPYGVNMHGI

SEQ ID NO: 90329 - protein, 382 aa, Neisseria gonorrhoeae
  REGION 1..382: note = tr|D6H9H1|D6H9H1_NEIGO Tryptophan halogenase; OS = Neisseria gonorrhoeae DGI2 OX=528348 GN=NGMG_00333 PE=4; SV = 1
MRVGKQHFPRFVIGESLLPHCMEMLEEAGFADAVRTGPGFQLKNGAAFSWGSRYTEFDFTDKFSDGPGTVYQVRRAVFDKILIEEAAKQGVEVRFGHGVTAFDNSGDFARLNIETDTGESYELTAKFVLDASGYGRVLPRLLNLETPSHLPPRQTHFTHIDDNITHPKFDRNKILITTHPQHRDVWIWLIPFGDNRCSVGVVGTPDKLAGESETVLKKFVYECPMLSEILDKAVWENDFPFRSIQGYSANVKSLHGRHFALLGNAAEFLDPVFSSGVTIALHSAELAADLLTKQLKGEAADWQTEFAEPLMIGVDAFRTYVDGWYDFRFQNVVYAPDRSPEISRMLSSILAGYAWDTENPFVAKSEQRLTALSEWVGQLESE

SEQ ID NO: 90330 - protein, 513 aa, Sphingomonas sp.
  REGION 1..513: note = tr|A0A3M0E3Z6|A0A3M0E3Z6_9SPHN Tryptophan halogenase; OS = Sphingomonas sp. PP-F2F-G114-C0414 OX=2135662; GN = C8J47_2491 PE=4 SV=1
MHQIRNIVIVGGGTAGWLTAGVIAARHKGQREHGFTVTLVESPNIPTIGVGEGTWPTLRATLRKMGVSETELFRHCNAAFKQGARFNRWTTGAVDDGYYHPLMLPQQFGAVNLAPHWLAEDGADSFCDAVTPQGRICDEGLAPKTMATPEFDGVANYAYHLDAGKFSHFLQRHCCDTLGVRHVLADVTEVILDETGDIARVETAQGVSIEGDLFVDCTGFAARLIGDAMGVSFRSCTDTLFCDTALAVQLPYERPDDPIASHTISTAQSAGWIWDIGLPHRRGVGHVFSSSHIDVDTAEQELRAYLGPAGKDLPVRKLSIRAGHRETFWKGNCVAVGLAAGFLEPLEASAIVLIELSAKMIAEQMPVCREVMGVVANRFNETTTYRWGRIIDFLKLHYTLTKRTDTDFWRDNVRPESIPDRLRGLMELWQYQSPWIHDEFDRAEEVFPSASYQYVLYGMGARTAVMPGTIEADAELARRARRENHVQTQRMMSSLPGHRDLIDRIVKHGLQPI

SEQ ID NO: 90331 - protein, 505 aa, Sphingomonas sp.
  REGION 1..505: note = tr|A0A0Q4G8Q9|A0A0Q4G8Q9_9SPHN Tryptophan halogenase; OS = Sphingomonas sp. Leaf20 OX=1735685 GN=ASE72_17515 PE=4; SV = 1
MTIGAPVRRIVIVGGGTAGWMAAAALARLIPTGASITLIESDAIGTVGVGEATIPPIRGFNAMLGIDEAEFLAATAGSFKLGIEFLDWGAPGERYLHPFGGFGFDIEGVRFHQYWRRRRAAGVVEDIEAYSLCAVAARAGRFMPPSPDPASVLSQMAHAYHFDAGLYARFLRGRAERDGVVRVEGDVVDVALDGETGHVRHVMLAGDRVIEGDLFLDCSGFRGLLIEQTLGAGYEDWTHWLPCDRAVAMPTANAGAAITPYTRSTAREAGWQWRIPLQHRTGNGYVYSSAHCSDDEAAATLRAGVDGTPLAEPRLLRFTAGRRRKQWIGNVVALGLASGFTEPLESTSIHMVQTGISKLLALFPDQGFSPVEIDTYNRLAATQFDQVRDFLILHYHATRREDSPFWREMRARPIPDSLSEKIALWRRRGRLFRWEDDLFAEASWVAVLLGQGIVPEGWDRLADAVDARDVDARFNRLRAMFADAASRMPRHEEYIARTCPTRVRA

SEQ ID NO: 90332 - protein, 503 aa, Sphingomonas sp.
  REGION 1..503: note = tr|A0A3M0EIE6|A0A3M0EIE6_9SPHN Tryptophan halogenase; OS = Sphingomonas sp. PP-F2F-G114-C0414 OX=2135662; GN = C8J47_1895 PE=4 SV=1
MAKPKTRVVVVGGGTAGWMTAAALSRLLPGQCSVHLIESEAIGVVGVGEATLPHIRAFNERLGIDEADFMARTRATFKLGIEFRDWNRLGDSYIHPFGTFGRGTGGVDFQHYWARLLGEGAPLPSLDSVSYACALARAGKFDRPETDPHRLAGTFGYAYQFDALLFAPYLREIAEGMGARRTEGVVVRVERDGDSGDIAAIVLDTGERIEGDLFVDCSGFRALLLGEAMAEPFVDWSHWLPTDRAVAMPCRTRTAVTPYTSAIAMPAGWRWRIPLQHRTGNGYVYASGFVADDDARRALEAAVEGEALAAPRVLRFKAGRRRRSWVGNCVAIGLASGFLEPLESTSIYLVQQAITTLIELFPEPRIAATDRDEFNRVIDLEYDRIRDFLILHYHATTRSDSPFWDYVRTMPIPDTLSEKLDLWRTRARIVKYREGVFLDPSWVAVYLGQGIVPEGWDPRADPVASDALARSLDALRGEIASDVARRPDHRSFIERYCAMAQAA

SEQ ID NO: 90333 - protein, 502 aa, Erythrobacter sp.
  REGION 1..502: note = tr|A0A1A7QL63|A0A1A7QL63_9SPHN Tryptophan halogenase; OS = Erythrobacter sp. QSSC1-22B OX=1860125 GN=A9995_00055; PE = 4 SV=1
MAIEKIVIVGGGTAGWMAAAALSRLKTGNALDIELVESEQIGTVGVGEATIPPFVEFNSLLEIDEQEMLAATQGSFKLGIQFVNWGSIGESYIHPFGSYGYEIGGVSFQHIWHRLYQSGDKRPIQVFSLETMAAYFGKFARTEDYRSDDLPPTNYAYHIDATRYAAFLRGYAERRGVIRREGKVMDVTLDSESGYVASLTMENGETIRGDLFIDCSGFRGLLIEQALETGNEDWRHYLPCDRAVALPCKRVDGSAPPPVTRATAHSAGWQWQVPLQHRNGNGHVYCSEYMSDEEAHDILVRNLAGKPQADPNFLRFVTGRRKKFWNKNVVALGLAAGFMEPLESTSIHLINTGISKLIALLSLDGITQTQEDAYNRLTAKEYARIRDFLVLHYTATSRTDSDFWNYCRTMDVPDTLTEKIELFRTNGQIFREEDELFTETSWAAVMMGQGIAMGGHNPMADTIGETKLLKEVDEIEKSIAFLVKQMPTHADYLAKYCPGKPM

SEQ ID NO: 90334 - protein, 389 aa, unidentified
  source 1..389: note = Streptomyces agglomeratus
  REGION 1..389: note = tr|A0A1E5PJP6|A0A1E5PJP6_9ACTN Tryptophan halogenase; OS = Streptomyces agglomeratus OX=285458 GN=AS594_29410 PE=4; SV = 1
MLDRDRFPRYHVGESLIPAFMRPMQELGITERMDARGFERKYGGTLVWGNAQVPWNFSFIEGGTHEYAYHTRRADMDSLILDRARELGAFIIEEATVKEPIETDGRVTGVRYTLRGTDGVHEARAKLVVDASGQARLLSRRYADITWHEELRNVAVWTYFDNCERLPGDEYTNILIEGLDEGWFWAIPIDKGTISVGYVTRSESANKDGQSLEALFKAEAAKSTKLKKMLAGANQSAGWRTARDWSYTSQSFNGNGWVCVGDSAAFVDPLFSTGVALATLAGSTLSRIIDQIIKHPEIEEQALKRYVTSYRGFFDEIRTFVERFYDRTKYKEFYHSLASEMVDPDRERTPSANFVQLISGLSGKHPMLTITLDDLIEDMDEAEPVVAKN

SEQ ID NO: 90335 - protein, 497 aa, Sphingomonas sp.
  REGION 1..497: note = tr|A0A2R7IUR1|A0A2R7IUR1_9SPHN Tryptophan halogenase; OS = Sphingomonas sp. HMWF008 OX=2056845 GN=DBR17_15035 PE=4; SV = 1
MTQLPAGLRIAILGGGTAGWMAANLFAHAWPSASVTVIESPEIGIIGVGEGSTPQLKAFFDRLGIAEAEWMPACNATYKNGIAFRGWSDRAGFESYFHPFPSPLDLHTAPAFFDATRRRRHGQDVWAHPDRFFLPARLAAERLAPIAAESFPLGPAYGYHFDAHLVGAFLRTHAAKRGVVHLERRIVEAAVAEGAITALIAEGGERIAGDLFVDSSGFRSVIHQAALGVPFVSFGENLFNDSAVVMPTPADPTGTACATRATALKAGWAWDIPLTSRTGNGYVYASAYCSKDEAEAELRAHLGVGDDGTARHLSMKVGRVAESWSGNSLAVGLSQGFIEPLEATALHIVQATVEGFIQAYQAGGFTPENRAAFNARIAARYDGIRDYIVCHYRMNRRSDSAYWRDNAANDRLSESLKAIITCWFTGGDLEAEIARQGIAGYYAATSWHCLFAGYGQFPNGAPHPAGPGAVDMAVIDDFLRRAALNFADHRSVLAALG

SEQ ID NO: 90336 - protein, 415 aa, Glaciecola sp.
  REGION 1..415: note = tr|A0A348MUJ3|A0A348MUJ3_9ALTE Tryptophan halogenase (Fragment) OS=Glaciecola sp. OX=1905676 GN=DCR37_02760; PE = 4 SV=1
MSKAVRKIVIVGGGTAGWLTAAIIASHHKADLPTGISISLVESSDIPTVGVGEGTWPTMKNTLQQIGLKESEVFKRCHAVFKQGGKFVNWVHGTGDFYYHPFTVPMGYGRIDLAPYVSSIENYAVESNFQHHICEAGLAPRTMAESEYTAQCNYAYHLDAGAFADLLKQHCRDNLGVHHIIGTVKETLLSENGDIQAVVLDENVKIDGDIFIDCTGFASLLLGKALDVPFVPQDDVLFNDTALAMHVPYDSESSPIACHTIATAQNAGWIWDIGLTHRRGVGHVYASDYLSDDEAESNLRQYLGESGKGVPTRKISFKSGHRKQFWKNNCVAVGMSAGFVEPLEATAIMLVEISARYIAENLPAEDTLVPIVAKRFNQQMHYRWKRIIDFLKLHYMLTKRPEPYWQDHCKSASIP

SEQ ID NO: 90337 - protein, 534 aa, Streptomyces sp.; identical to SEQ ID NO: 83858
  REGION 1..534: note = tr|A0A286EDX1|A0A286EDX1_9ACTN Tryptophan halogenase; OS = Streptomyces sp. 1222.2 OX=1938833 GN=SAMN06272781_1988; PE = 4 SV=1

SEQ ID NO: 90338 - protein, 501 aa, Sphingomonas sp.
  REGION 1..501: note = tr|A0A3M0EK89|A0A3M0EK89_9SPHN Tryptophan halogenase; OS = Sphingomonas sp. PP-F2F-G114-C0414 OX=2135662; GN = C8J47_1215 PE=4 SV=1
MVEQRIRKVVIAGGGTAGWLAAAALTRQLGQLLDITLVESEEIGTIGVGEATIPTMRAFHTILGLDEREFMRATQATFKLGISFENWARDGDRYIHSFGDIGKSTWMGEFHHFWLAAKAAGDPSEIGDYCLELQAAKAERFALPSEGQINYAYHLDAGLYARFLRARSEANGLKRIEGRIASVDRDGETGFIRALVLDSGERVEGDLFLDCTGFRGLLIEGTYGAGYEDWSHWLPTNSALAVQSAATGPAHPYTRAIAHDAGWRWRIPLQHRVGNGLVYASDHLSDDEAHARLLGAIGGAPLTPPRLIRFRTGRRRQVWIGNCVALSLASGFVEPLESTSIHLVMTGLMRLMQTFPFGGIAPSLVTRFNDQAQAELERVRDFIILHYHLNERPEPFWAARRDMPIPDTLVERIALFTEGAQAYQGGEDLFRVASWVQVMLGQRLTPRDHHRLGSIMGGPQLASVLTNIRSTIADAVAGMPTHQQFLDRYLATPTAAASGIR

SEQ ID NO: 90339 - protein, 515 aa, Sphingomonas sp.
  REGION 1..515: note = tr|A0A0Q4FV03|A0A0Q4FV03_9SPHN Tryptophan halogenase; OS = Sphingomonas sp. Leaf20 OX=1735685 GN=ASE72_17525 PE=4; SV = 1
MNATYREAGLSGRARLRIVIVGGGTAGWMTAATLGLTTGASAAGRLADITLVESEEIGTVGVGEATVPHIRFFNQRLGIDEADFVRRTKATFKLGIEFCDWGRIGDSYIHPFGDFGHDVDGLPFHQHWLHANRGKPDETPGLAACSLPIVAARAGRFTPPLDDPRSVGSTYSYAYQFDAGLYAAYLRDYAETRGVTRIEGRVEDVERGPSGIAALRLADGQRIEGDLFVDCSGFRALLIEGALKAGHEDWAHWLPCDAAWAVPTANTGPLVPYTRATARDAGWQWRIPLQHRTGNGHVFSTRFTDPERARAVLLDNLEGEALAEPRMLRFRTGRRNRQWIDNCVAIGLSAGFLEPLESTSIHLIQLAIGKLIELFPNDAVLDPADAAEFNRAMALEYDRVRDFLVLHYCATERDDTPFWRHMRTMDLPPSLAGKIAAFRDRGIVEQYREGMFLPASWLAVYYGQRIMPERIHPLVAALPAADSRARVAAVADACRRTAEGMPTHADYLAGIGAAA

SEQ ID NO: 90340 - protein, 507 aa, Sphingomonas sp.
  REGION 1..507: note = tr|A0A3M0EG97|A0A3M0EG97_9SPHN Tryptophan halogenase; OS = Sphingomonas sp. PP-F2F-G114-C0414 OX=2135662; GN = C8J47_1124 PE=4 SV=1
MTGTPATRITKVVIVGGGTAGWMTAAALSRLVATGVAVTLVESEGIGTVGVGEATIPSLRDYNRMLGIDEDALVRATGATFKLGIEFRDWRRLGDSYLHPFGTHGRDIEGVSFHQLWLRQANLGGDPGPIGDYCLSAVAARKGRFTRPTSNPQSVLSTLSYAFHFDAALYAKFLRGMAEEAGVVRVEGRVAAVDRDAETGFITGLRLDGDRLIDGELFIDCSGFRSLLLGDALGVPFTSWQHWLPCDRAWAVPSERQGMLTPYTRATADTAGWRWRIPLQHRVGNGHVYASDHVDDDAALRALLAGLDGKPSAEPRQLRFVAGRRERLWERNCVAIGLSGGFLEPLESTSIHLIQSGITRLMTLFPDRGFGGVEIAEYNRVMLREYAQIRDFIILHYHATERSDSTFWNHCRTMTIPDTLQAKLDLWSGKARTFREQGELFTPDGWIAVLLGQGVRPASTDPLVAALPTEESARFMDHVRDMIGKTADAMPTHEQFIAQHCAAAIAA

SEQ ID NO: 90341 - protein, 509 aa, Gordonia sp.
  REGION 1..509: note = tr|A0A1A0X4Q8|A0A1A0X4Q8_9ACTN Tryptophan halogenase; OS = Gordonia sp. 852002-50816_SCH5313054-a OX=1834091; GN = A5786_09315 PE=4 SV=1
MSDATRSGQPVSETADVVVVGGGPGGSTVATLLARSGHRVVQLEKESFPRYQIGESLLPSTIHGVCRLLGVDEKIKNAGFMHKRGGSFRWGKNPVPWNFLFAISPEFAGEGSYAYQVERMKFDQILLENAAEQGVDVRQRSRVNGTITDETGRVTGIRYVDADRVEHQIDAKFVVDASGNTTRLSKYAGGERIYSDFFQNVAVFGYFENGKRFPAPDSGNILCAAFDEGWMWYIPLSDTLTSVGAVISRDKAEHVLNAQEETLLHYVDRCEIVKDMLSDATRVTEGTYGEIRIRKDYSYANTQFWGNGMVLVSDAACFIDPVFSTGVHLATYSGVLAARSINSVLAGAMTEERAFTEFEGRYRREYAVFYEFLSAFYDMEQSEDSYFWKARKVTNFDRNDMTAFVSLVAGAYSGEQALTDPEQIIERFSASTAALTEAAERTGGMDTDSGQRMGHLFGTQVVRDVMEEMNAFQARGAVGTDGSEPPLLDGGLVPSADGLSWAEPAPATV

SEQ ID NO: 90342 - protein, 493 aa, Acinetobacter junii
  REGION 1..493: note = tr|A0A380URA0|A0A380URA0_ACIJU Geranylgeranyl reductase family OS=Acinetobacter junii OX=40215; GN = NCTC12153_03082 PE=4 SV=1
MINLRGMNRVVVVGGGTAGWFAALQLRQLFSPSVEVMVISAPEIPIVGVGEGGVLNLLSVLHDLNIDLKDFIEQTGSTLKLGFRYERWRTGKQEDYYYHLFPLPTPDFAWNEFGFNPYLSGLFNHGIDVSRYMASYEFSEERKPFQEVLEILLKGKNNFGASLHFDTFRVGQYLKKIALARGIIHVEQKIENFVFNPTTENVSAIQCVNHEISCDFVIDASGFSRLLIGKKYQSQWCSFSDTLPMNRALPFHLPHKNKIELVTRATAMSSGWVWQIPLQERIGAGYVYHDQFITDQEAQLEVENWLGHSINPVKPIAFEAGYFQQVWIKNVVGIGLASGFIEPLEATSIGQMLSQLQLLVSFIRENHGVISQQNIDFYNQQNAQYWEGIRDFIRMHYDTGRSDTPFWKYMLNVPRSESYQELKKCWVHRTPRDIDFVEHSMGGMSMFSAASWFAVGAGVGVIKPEATVAELYALPPDKKQKLAKFLEQIRQKV

SEQ ID NO: 90343 - protein, 517 aa, Glaciecola sp.
  REGION 1..517: note = tr|A0A348MXA6|A0A348MXA6_9ALTE Tryptophan halogenase; OS = Glaciecola sp. OX=1905676 GN=DCR37_07715 PE=4 SV=1
MFYPYLGTETMNNQIITVVGGGSAGWMTANLLHNQLHQHGFTIRVIESPSIGIIGVGEGSTPQLKVFFDMLGIAEQTWMPRCDATFKHGIRFNGWTDLVHPQYDHYFHPFPSNQDHNSGRYFLQQVHTMLAGYPAMPHPDLYFLTATLAQQNKTPAHEHPELQTNYGYHFDSAKLGQFLKTHGTQQGIQVITTTIDSIQHQANTIVSVTDEQGQIFNSDWFFDCTGFGGKLIQEALGTDFIHYTDNLFNDRAVAIPTRREEQELPQTTATALPCGWAWRIPLTSRIGNGYVYSSQYCTADEAEHVLRQHLNIDDKIPARHLSMKVGRLAQHWVGNTIAVGLAQGFIEPLEATALHLVQETVTQFIGAFTAGRFTTIYKEQFNDNINARFEGIRDYIVAHYACNQLTHARMSQKYASSNSRFHFDGKAVTIDTPRYWEDCREKVVTSENLQAVLACWERGGDLHQLLVDRKMQTYYPTLSWYTLLAGYRRFTHQQYQDNLQTQQIQAKLVELTQHFTC

SEQ ID NO: 90344 - protein, 493 aa, Psychrosphaera saromensis
  REGION 1..493: note = tr|A0A2S7UX78|A0A2S7UX78_9GAMM Tryptophan halogenase; OS = Psychrosphaera saromensis OX=716813 GN=BTO11_13470 PE=4; SV = 1
MKNITDIVIVGGGTAGWVSAALLVKVLGKTHNIKLIESESISSVGVGEATIPPILQLNNALGIDEAHFLKATKGTIKLGIEFENWSSLGSQYMHAFGSVGKNLPFCDFNHLFLSAQKLENKFSFGDFSLNYQAAKNGKFDKLANIPATNLPGITHAYHFDASLYAQLLREYSEASGVERIEGKVTKVDQAPSCGHVTQVTLETGQVIAGDLFIDCSGMRALLIEQTLNTGFEDWRHWLPCDRAIALPSEPTKPIPPYTRSVAKDAGWCWHIPLQHRMGNGIVYSSKFISDEQAEQTLRASLSGKPLSEPNFIKFKTGRRTKQWNKNVVAIGLSSGFLEPLESTSIHLIQTGIIRLLKCFPHQGIKDVEVAEYNRQSKIEFENIRDFIILHYKVNQREDTDFWQYCQQMDIPKTLERKIELFKQSGKVFREQDDVFSEIAWQQVLLGQEVIPEDYHPMADTLTNEQLLDLMDNLNTLIQATVAKMPSHEGFLNE

SEQ ID NO: 90345 - protein, 514 aa, unidentified
  source 1..514: note = Proteobacteria bacterium
  REGION 1..514: note = tr|A0A1W9IL86|A0A1W9IL86_9PROT Tryptophan halogenase; OS = Proteobacteria bacterium HN_bin10 OX=1827386; GN = A4S17_00675 PE=4 SV=1
MHNKRIDKVVILGGGTAGWMTAAALAKLFSPRIKVALVESDEIGIVGVGEATIPTIHWFNELIELNEAEFMRATQASFKLGIEFVDWTEPNHRYFHPFGQFGATLPGVSFHHRWLRARRDGLKTPLSAYSLATQLALDGRFAKPALDPKSILSTLGYAYHFDAALYARHLRTLSEAQGVVRHEGKVVHVDQHPETGFVTALTTDKGDRLEGDLFIDCSGFRALLIEGVLGAGYDDWSHWLPCDRAAAVPCARGEAITPYTRSTARDAGWQWRIPLRHRTGNGYVYSSNFTSDEAAAELLLANLDGERLADPRFLRFTAGRRRKTWDRNVVAIGLSAGFLEPLESTSIHLIQSGIAKLLALFPDSDCDPGLAGQFNRLFALDMDNIKDFLILHYHATSGRHEPLWEYCRHMPLPDSLVEKESVYRRSGRVLVGTDDLFKEASWIAVLSGQGIDPGDYNPLADMLDTNSNLAQLEHIEQVIARSLPTLPVHEQAILAVIGAGRQGAQDQPAPGHHA

SEQ ID NO: 90346 - protein, 519 aa, Psychrosphaera saromensis
  REGION 1..519: note = tr|A0A2S7UUF6|A0A2S7UUF6_9GAMM Tryptophan halogenase; OS = Psychrosphaera saromensis OX=716813 GN=BTO11_07845 PE=4; SV = 1
MSEAVRRIVIVGGGTAGWLTAGVIAAEHNSKSESGLQVTLIESPDVSAIGVGEGTWPTMRETLDKIGINETDLFRECEASFKQGSKFSKWVTGDVDDNYTHPFVLPHGYLKTDLVFPWQKNREAISFSDAMSYQGHICENGRAPKLISTPEYAGVTNYAYHLNATKLGLFLQKHCIESLGVKHIVDHVTGIISSDDGDIELLNTNVSGKIGGDLFIDCSGLSSILLGKHFDVPFISKKHILFNDTALAVQVPYLDDNAPIASHTISTAQSSGWIWDIGLPSRRGVGYVYSSQHSNDKDAEIELRAYIETSIGKVETDKLNVRKISFNPGHREKFWHRNCVAIGMAAGFLEPLEASALVLVELAAAKISNEMPATRETMDIVAKRYNKQFLYRWDRIIDFLKLHYALTKRTDSAYWLDNRKPESIPESLSELLTLWKYHPPGPQDFNHAEEVFPSASWQYILYGMGFETTESTMTRKFHDEEAAQRFYNENKSLTQKYLSALPSNRDLIDKIKLYGLQKV

SEQ ID NO: 90347 - protein, 409 aa, unidentified
  source 1..409: note = Caballeronia catudaia
  REGION 1..409: note = tr|A0A158AJV8|A0A158AJV8_9BURK Tryptophan halogenase; OS = Caballeronia catudaia OX=1777136 GN=AWB75_02324 PE=4; SV = 1
MNVSVDVAIIGAGPSGAVAAALLRKGGHSVLVLERQHFPRFSIGESLLPQSMAYLEEAGMLQDVVEAGFQYKNGAQFVHRERAAAFDFRDKHSDGWGTTFQVERAVFDDLLIRRAAKQGAEVRFGHAVLDMKTGDAPVLEVADEAGARYQVHARFVLDASGFGRVLPRLLNLEAPTRLPTRAAIFTHVRDGIAPETHDRNKITVAVHPEHGDVWYWMIPLANGRSSVGCVAQAAFLDVPEAEREAKLRALIRCEPTLNRLIGDAPFLMPVRHIGGYSANVERLHGPGYALLGNAGEFLDPVFSSGVTIAFRSAHLAVQTLKRHLNGETVDWHAHYDAPLRRGIDTFRAFVENWYTGKLQDIIFSRDQTPVIRRMISAVLAGYAWDETNPYVVDPVRRLNALHEVCKQQN

SEQ ID NO: 90348 - protein, 395 aa, Glaciecola sp.
  REGION 1..395: note = tr|A0A3D1RZS7|A0A3D1RZS7_9ALTE Tryptophan halogenase (Fragment) OS=Glaciecola sp. OX=1905676 GN=DER52_01380; PE = 4 SV=1
VNMHGISFYHYYLRAKTLQIPHPVSAYNLEYHALNQHKFSRPDENTSSLLKNINYAYHFDATEYAAFLKDYALARGVEWIDDTITKVNQHPNGDIKSVSLTSRPDIEAPLFIDCSGFKGLIIEEACQVGYEDWRHWLPCDSAVAQPSAALDEIYPYTKATARDAGWQWQIPLQHRIGNGHVFASQFMTADKATQILTDNLPSPALAEPRLLNWCNGKRKKAWHKNVIAIGLSAGFIEPLESTGLQLIQSAIMRLLSLFPHQQINALDRNEYNKHTDFEIEKIRDFVILHYKATQREDSEFWRYLKHMPVPESLHYKIDMYQQTGRIIRDSNELFDELSWFSVMHGQGIIPTHYHPLADNMSATELVRHMNNIQDAISHTVNAMPSHQAFINRITQ

SEQ ID NO: 90349 - protein, 493 aa, Acinetobacter junii
  REGION 1..493: note = tr|A0A4T0ZZ02|A0A4T0ZZ02_ACIJU Tryptophan halogenase; OS = Acinetobacter junii OX=40215 GN=DIZ45_03675 PE=4 SV=1
MINLRGMNRVVVVGGGTAGWFAALQLRQLFSPSVEVMVISAPEIPIVGVGEGGVLNLLSVLHDLNIDLKDFIEQTGSTLKLGFRYERWRTGKQEDYYYHLFPLPTPDFAWNEFGFNPYLSGLFNHGIDVSRYMASYEFSEERKPFQEVLQILLEGKNNFGASLHFDTFRVGQYLKKIALARGIIHVEQKIENFVFNPTTENVSAIQCVNHEISCDFVIDASGFSRLLIGKKYQSQWCSFSDTLPMNRALPFHLPHKNKIELVTRATAMSSGWVWQIPLQERIGAGYVYHDQFITDQEAQLEVENWLGHSINPVKPIAFEAGYFQQVWIKNVVGIGLASGFIEPLEATSIGQMLSQLQLLVSFIRENHGVISQQNIDFYNQQNAQYWEGIRDFIRMHYDTGRSDTPFWKYMLNVPRSESYQELKKCWVHRTPRDIDFVEHSMGGMSMFSAASWFAVGAGVGVIKPEATVAELYALPPDKKQKLAKFLEQIRQKL

SEQ ID NO: 90350 - protein, 561 aa, unidentified
  source 1..561: note = Phaeobacter piscinae
  REGION 1..561: note = tr|A0A291G2E1|A0A291G2E1_9RHOB Putative tryptophan halogenase OS=Phaeobacter piscinae OX=1580596; GN = PhaeoP13_02436 PE=4 SV=1
MNNRLRKITIVGGGTAGWMTALILETELSRTSAPKDRPKICLIESPNIATVGVGEATVPRMPKTLRQAGISERTFFRETNASFKLGVKFCNWNTDAKGNRIDYVNPFAHGQLLEGLEPAEYFLRFGNGDRDYTQSISPHDDLGRLCKGARPLGQPEFEQRFGYAYHLDAVKFAGMLTKVCTKHGVEHIQDEVTSVELDEQGNVSHLMLEQCGRHDVEMVIDCTGFRGLIINQALGEPFMDYSDYLPNDRAMALQIDHPDPEKIESLTRSTALGAGWTWRVPLYNRVGTGYVFSSAHRTDDQAADEYLEWLGDSGKGATPRIIPMRIGRVRNAWVKNCVAIGLAGGFIEPLESTAIHMIDHAVRWLTEHMPTRDIAPSLRSRYNRQMDKLYDEVLEFICLHYRLGNRTDDQYWIDARTEMKIPDRLAENLELWQHRLPMPHDIEFATLFDYRVYQTVLLGKQVYDTGYGPGIRDRLRPLKKPIWFQWWKGAKVDLAQILKSMPDHKTLLRDIRGELDQPGFGMAAAMKPTVPMPCAEAVPCMIQNMPSFSEIENGQKDLQLF

SEQ ID NO: 90351 - protein, 510 aa, Sphingomonas sp.
  REGION 1..510: note = tr|A0A2R7JF85|A0A2R7JF85_9SPHN Tryptophan halogenase; OS = Sphingomonas sp. HMWF008 OX=2056845 GN=DBR17_08675 PE=4; SV = 1
MSDTAARTRVVIAGGGTAGWLAAAVLLHQLGPLVDVTLVESDDIGTIGVGEATIPTIRSFHALIGLDEREFMVATGATFKLGISFENWARAGDRYFHSFGDVGHATWMGDFQHFWLEAQARGAAAPFGAYCLEHEAGLNERFAAGPQSPLNYAYHFDAATYARFLRGRCEAQGLTRREGRIGRVELNPANGHIAALHLDNGARIEGDLFLDCTGFRALLIGDALGVGYEDWSQWLPTNRALAMQTTSTGPAKPYTRAIAHDAGWRWQIPLQHRVGNGLVYCADYLSDDAAHDRLMSAIEGEPTTEPRLIRFQTGRRTEAWRANCVALSLASGFVEPLESTSIHLVMIALTRLLQHFPFDGISAAVVARFNAMADREIEAVRDFIVLHYHLNERAEPFWQARRDMTIPDSLANRIALFAEAGQAYQASDELFRVASWLQVMLGQRLMPRSYHHLARLMPTDQLVEALDTLEARIASQVRALPTHQAFLDSYCPSVQPKREALARREAVSAV

SEQ ID NO: 90352 - protein, 507 aa, Sphingomonas sp.
  REGION 1..507: note = tr|A0A3M0EKL3|A0A3M0EKL3_9SPHN Tryptophan halogenase; OS = Sphingomonas sp. PP-F2F-G114-C0414 OX=2135662; GN = C8J47_1349 PE=4 SV=1
MSDRALRSIAIIGGGTAGWMAAAAVARVLGTHNVAVTLVESEEIGTVGVGEATIPPIQAFNALLGIDEDAFVKATMGSFKLGIEFVDWLRPGTRYFHPFGVYGTDIGAVPFEGLWHRLRAQGLADPLEAYSICAQAAKDGRFMRPLTDGGNTPLHRIGYAFHFDASLYARFLRTHAEAAGVVRREGRVVDVALRAVDGFIEAVTLASGERIEADLFVDCSGFRSLLLGETLGTGFEDWSHWLPNDRAIAVPTASNGPPTPFTRSTARAAGWQWRIPLQHRTGNGYVFSSDHLSEDEATATLLASLDGEPLADPRTLRFRTGRRDAFWVKNCVGLGLSSGFLEPLESTSIHLIQAGIARLLEMLPNRDFEAADIRRYNRLMTAEYDSIRDFIILHFHATERADTPYWDHVRTMAVPETLAERIRIYQATGRVFRESDDLFSKTSWLAVMDGQGLRAEGFDPLAASLSIDDAQARLARIAAVTAAAAARMPPHAHFIARHCAGAIASRT

SEQ ID NO: 90353 - protein, 547 aa, Sphingomonas sp.
  REGION 1..547: note = tr|A0A3M0E9R6|A0A3M0E9R6_9SPHN Tryptophan halogenase; OS = Sphingomonas sp. PP-F2F-G114-C0414 OX=2135662; GN = C8J47_1897 PE=4 SV=1
MNEHSIRRVVIVGGGTAGWMAAAAFARFLNNGYTEITLVESEEIGTVGVGEATIPPLINFNQMLGLDENAFLAATSGTFKLGIEFVDWGALGERYFHPFGNYGHDLQGVHFHQLWLREKARRPIADISAWSMSAMAAANGKFGRATGDARSPVRELFYAFHFDASLYARYLRDYAERAGIVRIEGKIAEVNQRPADGYVAAVTLEDGRRIEGDLFIDCSGFRGLLIEETLHTGYESYAQWLPCDRAVAVPCALPNPGEPDAFTRSTAHKAGWRWRIPLQHRMGNGLVYCSKYLGDDEAEAQLLASLEGEQLAEPRRLQFTAGRRRDCWNRNVVALGLSSGFIEPLESTSIHLVQAGIQRLIALFPDKRFDPVERDEFNRQMHDLYEDIRDFIILHYKATRRDDSPFWNRVRTMDIPESLQRKIDLFAGKGRLFREGYDLFSNPSWVAVCLGQGITPQGWEPAADALDEQKVASALEQMRRGYLDTAQRLPTHGEFLRRTAPSPLAAQAAPSSSAPASAPAPTSSDDVPFFAFTAESPFDVGGGGSPL

SEQ ID NO: 90354 - protein, 496 aa, Sphingomonas sp.
  REGION 1..496: note = tr|A0A3M0DYK3|A0A3M0DYK3_9SPHN Tryptophan halogenase; OS = Sphingomonas sp. PP-F2F-G114-C0414 OX=2135662; GN = C8J47_3457 PE=4 SV=1
MTSPTAPVPLQSIVIVGGGTAGWIAAAMLARFVPRTTTIRLVESDAIGTVGVGEATIPQIRLLTAALGIDENAMLAATQGTFKLGIEFVDWTGCGSRYMHAFGAVGRGLGVVPFHHHWLRARSEGQAAPLGDYVASARAAADARFDRHPDLAYAYHFDATLLARWLRGLAEASGVDRIEGRIVTAQRGGETGDLTSVTLDDGRTAEGDFFLDCSGFRSLLLGEALGVAFEDWSHWLPCDRAMAVACEATTPLLPYTRATAQPVGWQWRIPLQHRTGNGLVYAAAHLSDDEATARLLANLDGAAIGEPRPLRFATGKRATFWERNVVALGLASGFMEPLESTSIHMVQSAVARLLSLFPSTGDNAAARTAYNHQTHVEYDTVRDFLILHYHANRRPEPFWQRCRDMALPDRLAEKIAQFRAAAILTQDVADLFTEPAWLQVMIGQGINPVTWSPLAEALSPDQLAGFLADIRDRHAATARALPAHADTVARHCTAKR

SEQ ID NO: 90355 - protein, 513 aa, Glaciecola sp.
  REGION 1..513: note = tr|A0A3D1S1D7|A0A3D1S1D7_9ALTE Tryptophan halogenase; OS = Glaciecola sp. OX=1905676 GN=DER52_03400 PE=4 SV=1
MSGVINRIIVLGGGTAGWITAGILAKKHASNLSNQGIKVTLIESPEISVVGVGEGTWPTMRKTLSQLGISETQFMRECGATFKQASKFVNWVNAKDDVYYHPFTEPQGFNKVDPAPYWQSVVEPTCSFSEAVSFQQYLCEQGLAPKTIANKEYEVIANYGYHLDAAKFIALLRKHCISELGVEHISDTVERIEQAPCGDISCLQTKEHGAQLADLFVDCSGMRSLLLGETLKVPFVPCDDVFLADTAIATQVPYINENDPIACHTISTAQEAGWIWDIGLQERRGVGYVYSSKHCSEEQARKTLANYIGLEEVKTAKKINFKPGHRKIFWKNNCVAVGLAAGFLEPLEASALMLIEASANYIADQLPPNKELMPITAKRFNAIMLKKWRGVIDFLKLHYALSERTEPFWLEHRDTQSIPNSLQELLSIWRYSSPSEYDFTDNVEAFSAASYQYILYGVGFKSDFSQMEHIYNQGELAKKQLQMTKMRIDQLKYNLPTHRDLINKLNSLGFAKL

SEQ ID NO: 90356 - protein, 298 aa, Kitasatospora atroaurantiaca
  REGION 1..298: note = tr|A0A561EJI8|A0A561EJI8_9ACTN Tryptophan halogenase; OS = Kitasatospora atroaurantiaca OX=285545 GN=FB465_0708; PE = 4 SV=1
MDRLATVSTPVYEARSAWAEPTVDHRSSLLNRYGPPLAVDRAALDELLREAAREAGVRLVRAHAKPVAGPDGGWLVPGLENPVPVVVDATGTARAVSRARLRWHGVDRLRYTIWQTRPADRLPQPWSLVEAAPDGWWYSAPTPGSERLTVMQVQDTAGRAPQLPPPRTSERLAHRSLPRPAAQRVAVVGCAGPPWTAGLVAVGDAALSVDPLSSSGLRHALELAGPASEAALGLLHGDERPADDYARAVRHAFLKHLADRQFFHAAATRYQTAAFWSHRSDLEHMRLADAQSGHRSGV

SEQ ID NO: 90357 - protein, 501 aa, unidentified
  source 1..501: note = Halieaceae bacterium
  REGION 1..501: note = tr|F3KZU8|F3KZU8_9GAMM Tryptophan halogenase; OS = Halieaceae bacterium IMCC3088 OX=2518989; GN = IMCC3088_541 PE=4 SV=1
MTDAIKRVVIVGGGTAGWNAAALFARTLGKVISITLVESDEIGIVGVGEATIPPIINFNNALGFDEAEFLRATQGSIKLGIQFENWGNAGDSYMHAFGNIGKDFAFCGFHHFWLRSQQEGIESDYWDFSLNYQTARKNKFAKLNHIPGTQLPGISYAYHFDAGLYAQYLRNYCEHSGVTRVEGMIKRAHQHSETGFIESVELESGQLIEGDLFIDCSGFRGLLIEQVLETGYEDWSHWLPCDRALAVPTESNGTIKPYTRSIAHTAGWQWNIPLQHRTGNGHVYCSAYMSDDEAARTLLQHVEGAPLAEPRSIPFKTGRRRKQWHKNCVAFGLASGFLEPLESTSIHLVQSGLRRLVQHFPHNGIKPAEVDEFNRQSQVEFEKIRDFIIMHYKVNARTDSQFWIDCRNMDIPDSLQHRLELFKTSGKVFKEGDELFQEIAWQQVLIGQGLVPSDYHPLADSISREQLAGLMADLKSLVAGASDNCARHEEFLLSCGVQLDG

SEQ ID NO: 90358 - protein, 500 aa, Sphingomonas sp.
  REGION 1..500: note = tr|A0A0Q4G6R5|A0A0Q4G6R5_9SPHN Tryptophan halogenase; OS = Sphingomonas sp. Leaf20 OX=1735685 GN=ASE72_17510 PE=4; SV = 1
MTAALGSVVIVGGGTAGWMAAVALGRLLGPAGTRVTLVESDEIATVGVGEATIPPIRTFHAMLGIDEDAFLRATGGSYKLGIRFEGWTRPGESYVHPFGQIGTDIAGVPFAAQWLRARQAGAAEALGAYSLEARAAEAGRFSRPIANGDSPLSRIGYAYHFDAGRYAAFLRAQAEAHGVVRREGRVDRVERGPAAIAAVHLADGSRIEGDLFLDCTGFRALLIEGALQAGWTDWSLWLPCDRAVAVPSAADAAPLALTRAIAEPAGWRWRIPLQHRTGNGHVFSSRHCSDDEATATLLAGLQGEALADPRVIRFATGHRTRFWTGNCIALGLAAGFMEPLESTSIHLVQSGLQHLLRMLPTGGPPAPAIVDRYNRTMTGEFVRIRDFLVAHYHLNARTEPFWRERAAAPIPDGLAEKLALFRAGGRIFREADELFNEVSWLALLTGQDAPVTGHDPICDALPIAIAAKRLAQIERVVATSLTHLPPHADALARLGQDRTI

SEQ ID NO: 90359 - protein, 502 aa, unidentified
  source 1..502: note = Rhodanobacteraceae bacterium
  REGION 1..502: note = tr|A0A522QWB3|A0A522QWB3_9GAMM Tryptophan 7-halogenase OS=Rhodanobacteraceae bacterium OX=2052182; GN = EPN40_13320 PE=4 SV=1
MSTPPVHRIVIVGGGTAGWMAAAALAKILGRECAIRLVESEKIGTIGVGESTVPHLKLFNDLLGIDDVAFVRQTRGTFKLGIEFVDWARVGDRYFHGFGKIGHDMGALPFHQFWLKARSLGIADELGAYSLHTQAGPRGKFMPSATDVPQNSPLADIAYAYHFDAGLYARLLRGYAENLGVHRIEGTIIDVRQRGEDGFVEAVVLENGERVEGDLFLDCSGFRGLLIEQTLHAGYEDWSHWLPCNRAVAVSCEPVGPPTPFVRCTAREAGWTWRIPLQHRVGNGYVYSSAYISDDEAAAGLLKWLDGRALGEPRVLRFTAGQRRRAWDRNVVAMGLAAGFLEPLESTTIYMVQSAITRLTNLWPRRDCSATLRDRYNAQTAFEIERIRDFIILHFCATERDDSPFWNYCRTMDIPEPLADNIRLFRDSGRFYRSAEELFALTSWVEVMIGQRVLPRTWHPAVDQLPEADLRKLMDGVQRVIAACVDAMPTHQQFIARCCAAG

SEQ ID NO: 90360 - protein, 509 aa, unidentified
  source 1..509: note = Brevundimonas abyssalis
  REGION 1..509: note = tr|U2Z9S7|U2Z9S7_9CAUL Tryptophan halogenase; OS = Brevundimonas abyssalis TAR-001 OX=1391729; GN = MBEBAB_0052 PE=4 SV=1
MIQPDLIRNVVIVGGGTAGWMAAAALSRLIANGVTSVTLVESDTIGTVGVGEATIPPIRTFNEMLGLDERAFLQATRGSYKLAIEFVDWTRPGHTYQHPFGPFGADINAVKFHQFWLKMHREGRAAEFGDYNLCGVAARLNRFGALPPQHRSPLTPMSWAYHFDAARYARFLRDHAETRGVVRQEGKVVSVEQRPEDGFIDAIVLDDGRRVEGELFIDCTGFRGLLIEQALKAGFEDWSHWLPCDRAVAVQCLNDNAISPFTRSTAREAGWQWRIPLQHRVGTGYVYSSAHISDDQAADTVMANLDGKPVTDPRILSFRAGRRRKAWVKNCVALGLASGFLEPLESTSIHLIQAGITKLLALFPHRGFDPVAIDEYNRLTNVQIEQIRDFIILHYHANERTGLDLWDHVRTMAIPDSLQHKLDLFRGAGRFFRHEDELFAESSWMAVLIGQNVMPQRYDPLVDSIPEADVARAMEELRTTIRAAAESLPDHADFLARHCAAPEPESVPA

SEQ ID NO: 90361 - protein, 460 aa, Streptomyces mobaraensis
  REGION 1..460: note = tr|M3BCI3|M3BCI3_STRMB Tryptophan halogenase; OS = Streptomyces mobaraensis NBRC 13819 = DSM 40847; OX = 1223523 GN=H340_27387 PE=4 SV=1
MSVKLLERETFPRYHIGESIASSCRTIVDLVGALDEVDSRGYTVKNGVLLRWGKEDWAIDWPKIFGPDVRSWQVDRDDFDHVLLKNAVKQGADVTEGVTVKRVLFDGDRAVGAEWTDPDSGELVSEEFDYVIDASGRTGVISRHLKNRQPHEIFRNVAIWGYWQGGSLLPTSPTGGINVIGAPDGWYWVIPLRGDRYSVGFVCHQDRFLERRKEHDDLEAMLASLVQENPTVRDLMAEGEYQPGVRVEQDFSYVADSFHGPGYYLAGDAACFLDPLLSTGVHLALYSGMLAATSVLATVNEDVTEKEAGAFYESLYRNAYQRLFTLVSGVYQQQAGKAAYFGLADAMVPERATEEYEQVDGAVAFAELVAGLADIHDAVTGTHEDHAHQAHTQAVALPEDNSVRQLLAAAENARLMAEAGTPSAPVSEAPGKMDAHDLYDPATGLYLRTTPTLGIGRSRA

SEQ ID NO: 90362 - protein, 504 aa, unidentified
  source 1..504: note = Xanthomonadaceae bacterium
  REGION 1..504: note = tr|A0A2A3LM51|A0A2A3LM51_9GAMM Tryptophan halogenase; OS = Xanthomonadaceae bacterium NML93-0399 OX=2032565; GN = CMZ84_03460 PE=4 SV=1
MDHLQRIVIVGGGTAGWMTAAALSRVLGPAYDIALVESEQIGTVGVGEATVPHIKAFNQLLRIDEADFVRSTQGSFKLGIEFVDWLDVGERYNHGFGTEIGHPLGLLPFHQYWLKARARGRAGPLGDYTLNTLAAQRGRFMVSATDVPAGSPLSNIAYAYHFDAGLYARYLRRYAEQRGARRHEGMIDHVAQHPESGFVSSVRLQDGTVLEGDLFVDCSGFRGLLIEQTLQTGYHDFTQWLPCDRALAVPTANVGPPAPFTRATARPAGWQWRIPLQHRTGNGYVYSSAHVSDDEAAATLLANLEGEALGDPRPLRFVTGRRKQCWNRNVVAIGLSSGFLEPLESTSIHLIQSGISKLLELLPREGFNPVLAERYNAQLAFEFDRIRDFIVLHYNATRRDDTPFWRHCRTMEIPAELRTAIDLFRDSGRFFRNASEMFDTISWVQVMVGQGIVPRGWHPLVDNLPDDEIARFVDSVGRTLNACVDAMPPHQAFIDRHCKATPPV

SEQ ID NO: 90363 - protein, 498 aa, Duganella sp.
  REGION 1..498: note = tr|A0A0Q8RAX3|A0A0Q8RAX3_9BURK Tryptophan halogenase; OS = Duganella sp. Root198D2 OX=1736489 GN=ASE26_05645 PE=4; SV = 1
MAGKPIRNIVIVGGGTAGWMSAAPLALKLGKACRIVLVESPEIGTVGVGEATLPTIRYFNHALGLDNADFVRKTQATYKLGIEFKDWGHVGNRFFHGFGDFGPTIENRSPVTYWLRLAREYKDMPSYEEWSTATAMARSNRFMEPYGDQPAATNAFSYAYHFDASLYAAYLRDYAMERGVQRIEGLISEVEQHPETGFITAVKLNDGRRVEGDLFIDCSGFRGLLIEGVYQAGYDDWSAMLPCNSAQAVPSEKVEPLTPYTTSTARSAGWTWRIPLQHRTGNGHVYCNGFTSDEEAGRVLLAGLDGRALDNPRQLRFTTGRRRKSWVKNCVAIGLSSGFLEPLESTSINIIENSVGWLLQYFPDRDASPELADEFNRLVSQRYEYVRDFIILHYKATRRDDSEFWRYCANMAIPDTLRHQIELFRATGRVAIYDRDGFSVASHVSILMGLGIVPRAYDPLVDLFDLARLHEHFSRLRETISQAVAAMPGHGQYIKQLR

SEQ ID NO: 90364 - protein, 502 aa, Arenicella xantha
  REGION 1..502: note = tr|A0A395JRX8|A0A395JRX8_9GAMM Tryptophan halogenase; OS = Arenicella xantha OX=644221 GN=DFR28_101581 PE=4 SV=1
MDNRIRKIVIVGGGTAGWMTAAALSKVLINNYCEIELVESEAIGTVGVGEATIPQISRFNTLLGIDENEFVRETQGTFKLGIEFRDWGQLGDSYIHPFGVFGVPIESVPFHHYWLKMRQAEKFSRLQDFSLACVAAPKGKFTRPMNIPKSPLSQIAYAFQFDAGLYAKYLRRYSEARGVKRTEGKVSQVHQRSDDGFIASVEMESGERIEGDLFIDCSGFRGLLIEQTLKTGYEEWTHWLPCDRAAAVPCMSAGPPEPYTRSTARDAGWQWRIPLQHRTGNGHVYSSQFTDDDTAIETLLSSLDGEPLADVNKLRFVTGRRKQFWNKNVVAIGLSSGFIEPLESTSIHLIQSGISKLIGLFPSRDFQQPDIDKYNQQSISEIESIRDFIILHYKATQRDDTEFWNYCRTMSLPSSLDERLALYKSNGRLYREGDELFSETSWLAVLVGQGILPASYHPLVDAYDSDGMERYLSGVLDVIDRSVDSMPTHAEFIQKHCAAGPR

SEQ ID NO: 90365 - protein, 514 aa, Streptomyces sp.
  REGION 1..514: note = tr|A0A1C6NF57|A0A1C6NF57_9ACTN Tryptophan halogenase; OS = Streptomyces sp. SceaMP-e96 OX=1100824; GN = YWIDRAFT_01668 PE=4 SV=1
MINSVVIVGGGTAGWMSASYLKAAYGDRINVTLVESDRVATIGVGEATFSTVRHFFDYLGLDEREWMPECSGSYKLGIRFENWREPGHHFYHPFERLRTSDGYTLADWWLQEGDRSQPFDRSCFITPALCEAKRSPRLLDGSLFAGGLDGSLGRSTLEEQRAQFPYAYHFDAALLAKFLTKYGTDRGVRHVVDDVTQVGRDERGWISHVATREHGDLTGDLFIDCTGFKGMLINETLDEPFESFQDVLPNNRAVALRVPQPDQATTGMNPYTTATAMDAGWIWNIPLFGRNGNGYVYSDEFCTPEEAERTLREHVAPGQDDLEANHIRMRIGRNRRSWVNNCVAIGLSSAFVEPLESTGIFFIQHGIEQLVKNFPDENWDPALVDDYNNRVAEVLDGVKEFLVLHYKAAQREDTPYWKEAKTRALPDGLAERLAIGSSHLLDERTIYQPYHGFEQYSWITMMLGLGHEPKRPRPSLAHIDPTNARAELARLKADADELVAALPSCYEYIASINS

SEQ ID NO: 90366 - protein, 561 aa, unidentified
  source 1..561: note = Phaeobacter porticola
  REGION 1..561: note = tr|A0A1L3I7A2|A0A1L3I7A2_9RHOB Putative tryptophan halogenase OS=Phaeobacter porticola OX=1844006; GN = PhaeoP97_02601 PE=4 SV=1
MNNRLRKITIVGGGTAGWMTALILETELSRTSAPKDRPKICLIESPNIATVGVGEATVPRMPKTLRQAGISERAFFRETNASFKLGVKFCNWNKDAEGNRIDYVNPFAHGQLLDGLEPAEYFLRFGNGDRDYTQSIAPHDDLGRLCKGARPLGQPEFEQRFGYAYHLDAVKFAGMLTKVCTKHGVEHIQDEVTSVELDEQGNVSHLMLEQRGRHDIEMVIDCTGFRGLIINQALGEPFMDYSDYLPNDRAMALQIEHPDPEKIESLTRSTALGAGWTWRVPLYNRVGTGYVFSSAHRTDDQAADEYLEWLGDSGKGATPRIIPMRIGRVRNAWVKNCVAIGLSGGFIEPLESTAIHMIDHAVRWLTEHMPTRDIAPSLRTRYNRQMDKLYDEVLEFICLHYRLGNRTDDQYWIDARTEMKIPDRLAENLELWQHRLPMPHDIEFATLFDYRVYQTVLLGKQVYDTGYGSGIRDRLRPLKKPIWFQWWKGAKVDLTRILNTMPDHKTLLRDIRGELGQKSFGMAAAVKPTVPMPDAPQVHWAIQNMPSHNEIQSGEKDLQLF

SEQ ID NO: 90367 - protein, 513 aa, Paucibacter sp.
  REGION 1..513: note = tr|A0A3N7CAB6|A0A3N7CAB6_9BURK Tryptophan halogenase; OS = Paucibacter sp. KBW04 OX=2153361 GN=DBR47_06785 PE=4; SV = 1
MTLKALRRIVIVGGGTAGWMCAAALSKLMQPEQGNQPLWQIRVLESDEIGIIGVGEATIPAIKSFNAVLGIAEDDFLRATQGTFKLGIEFVNWGGLGQRYVHGFGAIGQALDGIAFQHHWLRLQAHGRAGDLFDYSINTVAPLQGKFMRPRADMAGSPLAEIAHAFHFDANLYARFLRQHAEQRQVQRTEGRIVEVLQHAEQGQSSGLISGLRLASGEVVEGDFFIDCSGLRALLIEQTLHAGFEDWSHWLPADRAWAVPCASRQPLLPFTRSTAHSAGWQWRIPLQHRTGNGHVFSSAFMEEGAAADLLLSKLDGEALAEPRLVKFRTGRRKQFWVGNCVALGLASGFMEPLESTSIHLIQTAITRLMDLFPRQGLDAADIASYNRQTQFEYERIRDFIILHYKATRRDDSPFWNYCREMAVPDSLLEKMELYRSNGRIYREANELFWEPSWLQVMHGQGLRPRAYHPLADVRPLAQVQDWADNIREVVQRCVGVMPMQGDFIAANCAAPPL

SEQ ID NO: 90368 - protein, 507 aa, unidentified
  source 1..507: note = Brevundimonas abyssalis
  REGION 1..507: note = tr|U3AJF3|U3AJF3_9CAUL Tryptophan halogenase; OS = Brevundimonas abyssalis TAR-001 OX=1391729; GN = MBEBAB_0049 PE=4 SV=1
MSDKCITKVLIVGGGTAGWMTAAALSETLKGLALDIRLVESEAIGTVGVGESTIPHIRHFNTRLGINEADFLSRTQATFKLGIEFRDWGRLGDSYIHPFGAYGADPAAHEVELFHHLWTRAGAPESLEAWSLPVAMARRERFTHPSTDPASPLSGFSYAYQFDASLYAAYLRRYSEARGVVRTEGRIADVALHGETGFVTHVTLESGERIDADLVIDCSGFRGLVIEQAMKTGYHDWTRWLPCDRAVALPCEHGGLFPPATRATALKAGWAWRIPLQHRVGNGHVYCSAFLDDDAAETALMDQLEGAALAPPNRLRFLTGKRKLQWNRNCVAIGLASGFLEPLESTSIHLIQAAIGYLLDLFPTGDWDPSDAAEFNQTMDMEYERIRDFLVLHYHATTRDDSEFWNHCRTMTIPDSLAWKMELFRERGVVAAYEHGVFLHPSWVAVYVGQHVTPRRWDPRLDDLDPAAVRADLEGQRRRIAGLAERQPRHADVLGAARAAVMAEARA

SEQ ID NO: 90369 - protein, 508 aa, Pseudoalteromonas sp.
  REGION 1..508: note = tr|A0A4Q6J8I4|A0A4Q6J8I4_9GAMM Tryptophan 7-halogenase OS=Pseudoalteromonas sp. MEBiC 03485; OX = 2571103 GN=EVU92_19695 PE=4 SV=1
MSKKINNIVIIGGGAAGWLTAGLLSKEHPDKSITLIESADIGISGVGEGTWPSMRHTLQRIGIKETDFLQQCDASFKQGSKFINWRGKEQADNYYHPFMVPEGYNEYDVHAAWQQLFSEQKYADAMNVQSFVCQATLAPKQLNTPEYAGVTNYGYHLDAHKFAQFLTKHCVNTLNVKRILDNVLHANNNAQGYIESVTTQNNGVINGDLFIDCSGSQGLLIAKHYQIPFLDQSHILFNNTAVAAHLPYESPSQDIASATLSTAQSAGWIWDIGLPTRRGIGYTFSDKYCDVETAVETLKSYAAQSVGIQQANNIETRTLRFTPGYREVFWHKNCVAIGMSQGFIEPLEASALAMVELSISMLSEQMPVDQVHMQLLRKRFNKRFRYRWKQVINFLKLHYVLSSRDDSSYWSDNHHHKSIPSELQSLLKLWQYQAPSRFDFIENEEIFSSASYQYVLYGMGFKTKQTKKLDNHTYQMAQKLYQLNRKKIAQYLQKLPTNRLLLEQLQRE

SEQ ID NO: 90370 - protein, 500 aa, unidentified
  source 1..500: note = Rhodanobacteraceae bacterium
  REGION 1..500: note = tr|A0A522QVA2|A0A522QVA2_9GAMM Tryptophan 7-halogenase OS=Rhodanobacteraceae bacterium OX=2052182; GN = EPN40_13660 PE=4 SV=1
MSDRRIRSIVIVGGGSAGWMAAAALSNALQGSCRIELIESDEIGTIGVGEATLPPLKRFNQMLGIDEHAFVAATRGTFKLGIDFLNWSRLGHRYFHPFGQIGVSFDAVPFHQYWLRERARGDATPLQDYAFAWVAARLGRFELPATDSRYVQSTFDYAYHFDATLYARYLRGYAEQRGVVRVEGKVVDVALRPEDGFIRSLTLAGGKVVEADLYIDCSGFRGVLIEGALEIGYESWNHWLPCDRAVAVPSEHGSEPVPYTRAIAHGAGWQWRIPLQHRMGNGMVYCSRHIGDDEAAALLLANLEGKALDEPRLLRFVTGRRRQFWNRNCVALGLAAGFMEPIESTSIHLVQSSLVRLLALFPDRDFDPLAAREFNRITHTEYERIRDFLILHYHATQRDDAPLWRETGAMSIPETLQYKLDQFRSGGRTVAEPLELFQNPNWLAVLVGQEVWPRRHDPLADMRTAVDATRFLADLRGLMEQAAQAMPTHAQYIQRHCSAA

SEQ ID NO: 90371 - protein, 499 aa, Hyphomonas sp.
  REGION 1..499: note = tr|A0A059E4G8|A0A059E4G8_9RHOB Uncharacterized protein OS=Hyphomonas sp. L-53-1-40 OX=1207058; GN = L53_10845 PE=4 SV=1
METQNIRRVVIAGGGTAGWIAAASLSRLLGPLLDITLVESDAIGTVGVGEATIPTHRTFHHLMGIDERDFMRATKATFKLGIAFEEWGGLGDRYIHSFGQVGKSNWMGEFYNIWMYAQERGIGAELDAYCFELQAAEAGRFFTSDKANINYAYHLDASLYAKFLRTFSEAKGVKRVEGLIEEVEQDGESGFITALKLQSGERIEGDLFIDCTGFRGMLIEQTLKTGYEDWTHWLPTDSALAVQTRSVGPAQPYTRAIAHHAGWRWRIPLQHRVGNGLVFCSENMQPDEAKEYLLGHVDGEPLTEPRLIRYKTGRRKKVWNKNCVALGLSSGFVEPLESTSIHLIQVGATRLVQQFPFAGISEAIANHYNEQAERELEKIRDFIVLHYKLTERDDSDFWRARRDMPVPDSLAQRISLFRENGLAYQATDDLFRVDSWLQVMLGQRLKPKGYHHMGHLMTDDQLTTALGGLAANIKRAVSQMPSHQDFIDQYCAVPESETV

SEQ ID NO: 90372 - protein, 389 aa, Pseudoalteromonas sp.
  REGION 1..389: note = tr|A0A4V2BV13|A0A4V2BV13_9GAMM DUF1864 family protein OS=Pseudoalteromonas sp. MEBiC 03485 OX=2571103; GN = EVU92_03840 PE=4 SV=1
MTENTKAFDSWLRTRFVEINSELEKLYWQQDDKVNVEGVGEDLKRQLEQEGNEHIRALLAEGNTDEGFDNAFDLLGNVGLYMAACRRHEITEPSRETTSPLVEASALAMHIGASIGVTPRFATAHLTTHNKAVDGLYKRFTDLEDEKIFVDYNTKGILAYKRAADALLKIQPLGISHPIAADLLAVAKQALLDVIESNNALYNKLDTDRFFYCVRPYYKPYRVGKEVYRGANAGDFAGINVIDLLLGLCFANEPSYSQMLVDKFLYMMPEDQQILRESMRMTSIMDDFLAAEAERDSEWLQTNLKLFIQVCKLHGDTAIGHHNQLVSKYIAQPSQKMQQQHMDKVTASGPPLHMLLNSLEQLRDRRAAAKRDDIRTRFDDLTKLKQWIK

SEQ ID NO: 90373 - protein, 270 aa, Pseudoalteromonas sp.
  REGION 1..270: note = tr|A0A4Q6JFN1|A0A4Q6JFN1_9GAMM Tryptophan synthase alpha chain OS=Pseudoalteromonas sp. MEBiC 03485; OX = 2571103 GN=trpA PE=3 SV=1
MSQTNRYGQLFATLNETNQGAFVPFVTIGDPNKALSVEIIKSLIDGGADALELGIPFSDPIADGPVIQAANIRALDENINTQDCFDIIKQVREYNADIPIGLLLYSNLVFKRGIEKFYQDAKEAGVDSILVADVPLHESKLFRQTAMKNGIDPIFIATPNADDDTLRECASYGRGYTYLLSRAGVTGTETKAQMPADSLVKKLKDYHAAPALLGFGVSTPEDVKSALESGAAGAISGSAVVKIIEANLDDKAAMLSGLKEFIASMKAATK

SEQ ID NO: 90374 - protein, 498 aa, unidentified
  source 1..498: note = Arsukibacterium ikkense
  REGION 1..498: note = tr|A0A0M2V9S0|A0A0M2V9S0_9GAMM Tryptophan halogenase; OS = Arsukibacterium ikkense OX=336831 GN=WG68_07800 PE=4; SV = 1
MQSQAIKRVVIAGGGTAGWMAAAAIAKLMGKHLQICLVESDDIATVGVGEATIPPLLTLHKLLGINEAEFMAATQATFKLGIQFENWRDQGQDYIHSFGTTGQDCWAAGFQHFWLKGQQVGLASDYGDYCPELLAAQAGKFAHLPNRPLNYAFHFDAGLYAKFLRTMAEQHGATRIEGKIAKVETCEQSGNITALQLVSGECIAGDLFIDCTGFRALLIEQTLHTGFDDWSHWLPCDSAIAVQTRATREPVPYTRSIAHGAGWQWQIPLQHRVGNGLVYCSKYYSDDEAKALLLANLSGDLLTEPRLIKFRTGMRRKHWNKNCIALGLASGFIEPLESTSIHLIQRSIVRLLQMFPLHGISLADVDEFNQQTEHEVLNIRDFIILHYHVTARRDTAFWRYCQSMPIPESLAHRIRLFKETGRVFKVPNELFGENSWTQVMLGQGITPEQYHPIVELMSEQELSHFLSQIKLQNQRLVAQLPSHQAFLQSYCPAMSNRV

SEQ ID NO: 90375 - protein, 510 aa, unidentified
  source 1..510: note = Xanthomonadaceae bacterium
  REGION 1..510: note = tr|A0A2A3LFM2|A0A2A3LFM2_9GAMM Tryptophan halogenase; OS = Xanthomonadaceae bacterium NML93-0399 OX=2032565; GN = CMZ84_15215 PE=4 SV=1
MPDTSHPGPAVRRVVIAGGGTAGWMVAAGLSRALGKLLDIVLVESDEIPTVGVGEATIPTLVTFHRALGLDEREFMAATQATFKLGIRFADWKTRGEEYVHSFGTTGKDHWSAGFQHFWHRGRARGIAGDYGDYCLELRAALEDRFAHLPDNGLNYAFHMDAGLYARYLRRFSEAHGVRRIEGRIAEVQADRASAHIKALMLASGERIDGDLFIDCTGFRGLLIEQALGVGYEDWSHWLLCDSAIAVQTTPVGPAVPYTRSTAREAGWQWRIPLQHRVGNGIVYSSRYVDDAQARDTLLEHLEGERLTEPRTIRFRPGQRLRTWHGNCVAIGLASGFLEPLESTSIHLIQRGIVRLLQMFPAGGIAQTDVDEYNRQSREEIESIRDFVILHYKVTDRDDTPFWRACREMDVPASLAHRIALFADSGRVFREGFELFAENSWVQVMLGQGLVPRSHHPTADLMDDAELSRFLGQIRDRVSHTLAQLPAHETYVRGYCPAATPRGPAAAADR

SEQ ID NO: 90376 - protein, 520 aa, Arenicella xantha
  REGION 1..520: note = tr|A0A395JUH7|A0A395JUH7_9GAMM Tryptophan halogenase; OS = Arenicella xantha OX=644221 GN=DFR28_101583 PE=4 SV=1
MIENANNAINKVVIVGGGTAGWMTAAALSEVLSNTGCEITLIESEQIGTVGVGEATLPHLRFFNQRLGIDEPEFMRAVNATYKLGIEFANWGQKGDSYIHPFGDFGKPQNNIAFHHYWVKSHLHGNKTPIGDFSLPVVASQQAKFDFPAQDLNSLLSTFSFAYHIDAGLYAKYLREYSEQRGVTRKEGKVIGVNQDAETGFITSVEIDDGTQIEGQLFIDCSGFRGLLIEQALETGYEDWQHWLPCDRAVAIPCAANPNQASIPYTRATADEAGWRWRIPLQHRVGNGHVYCSDFMSDEQAERTLRTNLEGEPERDANFLRFTTGRRKKMWNKNCVAIGLSAGFLEPLESTGIHLIQLAIMKLIEFFPDQSIDPAFSDEFNRVMQMEIERIKDFLILHYNATERDDTEFWNYVRTMSLPDELQRKMELFERTGHVVKYQEGLFLEPSWIAVYLGQRKIPRAYDPRLDALSIDQLDAQLEKLKQSIVRAVNGMPSHSQAIKQIGDPANLGWKNTSMNLYGH

SEQ ID NO: 90377 - protein, 522 aa, Pseudoalteromonas sp.
  REGION 1..522: note = tr|A0A4Q6JFT5|A0A4Q6JFT5_9GAMM Anthranilate synthase component 1 OS=Pseudoalteromonas sp. MEBiC 03485; OX = 2571103 GN=EVU92_14180 PE=3 SV=1
MIFSHITTTPGEVTSITQVRDYISSPLALYSLLDKPNSLLLESAEIDSKDSVKSLILVDSALRIVCQGKQVTLTAQSNNGKQLLPYLQSHVQNCSAELVDDTLTLTYNEIASDIDEASKLVADNAFSALRSCINSIKSTTDNPFSVFLGGVFAYDMVANFEALSDVPDGENSCPDYVFYLAETLVVIDHQAKTTELIGNVFNGPEVHANCFEVGQQLERLNTVCDNAQSYQGQKQTGSNPISIDVSDEQYCEHVIRLKKNIVDGDIFQVVPSRTFSLACPDSLHAYSQLKQQNPSPYMFYMRDEEFVLFGASPESALKYCPESKQVEVYPIAGTRPRGKFANGQINPDLDSRIELELRNDQKERAEHLMLVDLARNDVARISVPGTRHAKELLKVDRYSQVMHLVSRVVGTLKPELDALHAYQACMNMGTLVGAPKVRAAELVRQTEQKRRGSYGGAVGYLTGDGAMDSCIVIRSAFVKNGTAFVQAGAGVVFDSEPQSEANETRAKAQAVITAIQSTYEAQ

SEQ ID NO: 90378 - protein, 505 aa, Sphingomonas sp.
  REGION 1..505: note = tr|A0A0Q4G303|A0A0Q4G303_9SPHN Tryptophan halogenase; OS = Sphingomonas sp. Leaf17 OX=1735683 GN=ASE75_01070 PE=4; SV = 1
MTDPQALRDIVIVGGGTAGWMCAAALSRFVANDTTRVTLIESDAIGTVGVGEATIPTINFFNQMLGIDEDVFLAEVGGTFKLGIEFSDWGKIGDRYLHPFGQYGQTMEGLQFHHIWAKLAGMGKAAPLSDYSPCAVASAAGRFARQAGDPRSPFSRPAYAFHIDATLYARYLRGYAEGNGVTRLEGRITQVDRDGESGHVTTLMLDDGRTVAGDLFIDCSGFRSLLLGDTLGVGYEDWSHWLPCNRAVAMPTATVGPPAPYTMAIARDAGWQWRIPLQHRTGNGMVYADAFMDPATAEATLRANLAGPPTGDARHLSFKAGRRDRFWEGNVVALGLAGGFLEPLESTSIHLIQTGISKLLALLPDRRFAAIERAEYNRLMIRSYDGVRDFIILHYAATTRNDTPFWNHVRTMELPDSLSSKIELFRQKGRFFRYDDELFEIASWVAVLYGQGVIPDGYDPIVDALDETRLAAALDHMRGHIRACVGAMPSHADFIRQHCAMGTRV

SEQ ID NO: 90379 - protein, 507 aa, Arenicella xantha
  REGION 1..507: note = tr|A0A395JNY9|A0A395JNY9_9GAMM Flavin-dependent dehydrogenase OS=Arenicella xantha OX=644221; GN = DFR28_101757 PE=4 SV=1
MSKEIKSIAIIGGGTAGWLTAAIIAAHHKSNDPNALKVTLVEASDIPTVGVGEGTWPTMKNTIHRIGLKESELFAKCHAAFKQGGKFVDWVHGNGDFYYHPFTVPLGYGRIDLAPYVSQIEDFAIESNFQHHICEAGLAPRSLSEGEYQGQCNYAYHLDAGAFAQVLKEFCKNELNVAHQIGTVGDVTLGNDGAIESVLLNDGGTVSADLYVDCTGFSSLLLGKHLNVPFVSADQYLFNDSALSAHIPYTDEQDPIVTHTVATAQNAGWIWDIGLTHRRGVGHVYASEYLSDDEAEANLRRYLGPQSDQLSARKISFSSGHRAQFWKKNCVAVGMSAGFVEPLEATAIMLVEVAARYIAENLPPDTSIMRITEKRFNEQMDYRWRRIIDFLKLHYMLTKRTEPYWQAHTESDSIPDSLKEDLEIWGHRGPVNSDFDSAVELFPAASYQYVMYGMGFKPDFSRQAYLYQEQQKAQRIMQQNRQITEQMLKSLPAHRDLIDRWMASTQR

SEQ ID NO: 90380 - protein, 502 aa, Arenicella xantha
  REGION 1..502: note = tr|A0A395JNW5|A0A395JNW5_9GAMM Tryptophan halogenase; OS = Arenicella xantha OX=644221 GN=DFR28_101582 PE=4 SV=1
MADKQSGAILKIAIVGSDLHAWSTAARLAVALRNQGVTITVVAASEINPPPVVAFGTSAHAYHQALGVREVDLIKHLNGAYRYGTRYLAWGSADDDVIHTFSPCGEMLERVHFHHFLSRLRLQGETIDPEHYSLAASASRQNKFTHPQANTPYQLIDYAMQFDGHRYAQFIRSFALDNGVKHVVAGVHQVVRSKDSGDIQRLVLTDQSELEADFLFDASGSIAALISGALHVPWKSWSNCLPYDQQLELMRNTRAATPVVNKLINNAAGWLRTDAVPGVTFAQQVYCSKSTTADQALAAAEQACAGDEPLRVSGSRELQVGIRTHSWQNNCVAVGAAAASLTPLYFDEYHFTHTALDRWLSLYPLCGDSTLSAEEYNRMTRLEYASARDIHTLRLLTERPSSEPTSSPAHEVVWPNSLLHRVALFEQTGQVAFYESDLLEKHQWVSLFMACGIWPQRYDPLAAKISLDDSRRVVGAIADKIVQSAHKMPDHDALLRAIRNTQ

SEQ ID NO: 90381 - protein, 589 aa, Streptomyces mobaraensis
  REGION 1..589: note = tr|M3B5S1|M3B5S1_STRMB Tryptophan halogenase; OS = Streptomyces mobaraensis NBRC 13819 = DSM 40847; OX = 1223523 GN=H340_07071 PE=4 SV=1
MREYYDVVIMGGGPAGSTLGALLAQRSDLRTAIFDKEVFPREHIGESFAHPVVPALQESGALAKVLASPCWVKKYGGVYAWDPDRPSVALFDRALFEKDGVLRWTMHVNRAEFDHILLDHAADVGVEVFQGTAVTAYEPDANGGVVRLADGTSVRAGYFVDASGRQSSVSAARNKRGWLSNFKNIAIWQHFTGGGHTQNLPADWNVFTSDNFSPIGCFAFRDGWCWYIPVPKVIDGRRVLTHSVGIVTNPAVLKEPGRDYTDQATFLAAVREVPYLKDLVTDVVPVADHMITATNYSRVAEEFGDYDERHLLVGDAAFFVDPLFSSGVAVALTQAQAAALLLLKTTGGSLEEADRRQLWRDYNDKWHGTAETFALMIDQWYHAIAKNNPDSVYWNTRGTGADLGIREQTFDALLNTAFQPALLDVMTHNSRRVEDLDAAGPYLSATALAEPAGLTPDAVLTLAPTTAVRDSVTMLVPGFKATNPPANVQLPPAVLAGMAEYWKNPLTHHAAAPAPLRDTVPCKRIHSTEDPHGPSIDADVRRDGVDELWELLSAGPVKYGEIAGRLTPAQVRLVKRMCVGGFLTVTPAA

SEQ ID NO: 90382 - protein, 366 aa, unidentified
  source 1..366: note = Sphingomonadaceae bacterium
  REGION 1..366: note = tr|A0A2D6KSM1|A0A2D6KSM1_9SPHN Tryptophan halogenase (Fragment) OS=Sphingomonadaceae bacterium OX=1930536; GN = CMN66_11265 PE=4 SV=1
WPGGAVAYALHFDAGLVAAFLREHAEAAGVERLDRRIVGATRGEGERIAAVQFDDGETLAADFYIDCSGFRGLLVEETLNAGFEDWKRWLPCDSAIAAPTAAQQQRAPYTVATARSAGWQWRIPLQHRTGNGLVYASDFISDADAHEELLSGLDGEPLADARVLRFTAGLRKRAWVGNCLAIGLSAGFLEPLESTSIHLIHTGLNRLLDLFPDRGFDPALADAYNRDVWREYAHIRDFLLLHYAPNRREGEPFWDHMRGLDLPDTLAEKIELFTRTGRIMSKQRELFSDISWFYVMHGMGLEPAATDPLVDVAPSAEVRKVIDQLSGAMKAFRSAAPTHDAILERLLDPSETRRPQFGTGGGWATR

SEQ ID NO: 90383 - protein, 115 aa, unidentified
  source 1..115: note = Sphingomonadaceae bacterium
  REGION 1..115: note = tr|A0A2D6UK12|A0A2D6UK12_9SPHN Tryptophan halogenase PrnA (Fragment) OS=Sphingomonadaceae bacterium OX=1930536; GN = CMN65_02075 PE=4 SV=1
MTQVQGEGSGADPLRSICIVGGGTAGWSAAALLARVLRGSGCRITLVESSAIPTVGVGEATIPPIFDFLRNIGADEVEFIRRCQATFKLGIQFRDWLHRDHAYWHPFGNLGVTIN

SEQ ID NO: 90384 - protein, 512 aa, Paucibacter sp.
  REGION 1..512: note = tr|A0A3N7CNR9|A0A3N7CNR9_9BURK Tryptophan halogenase; OS = Paucibacter sp. KBW04 OX=2153361 GN=DBR47_06120 PE=4; SV = 1
MQPKPPELLKTVVIVGGGTAGWMTAAALSTALRGRYQIRLVESDEIGIVGVGEATIPMIQVFNRIIGVDENDFLRETQGTFKLGIEFVNWGRLGDRYMHGFGPVGQALWTVPFDQYWHRMNGLGRAQDLGAYSITRMAALANKFMPARDDLENSPLNHIAHAYHFDASLYARYLRKLCEGRGVQRIEGKIVSVSQQEAGEHAGHVQALQLENGQRVEGDLFIDCSGMRALLIEQTLKTGYEDWTHWLPCDRALAVPCESVLPLTPYTRSTAHRAGWQWRIPLQHRIGNGHVFSSQSISEDEAAATLLANLDGKPLAEPRLIKFRTGMRRKSWHKNVVAIGLSSGFLEPLESTSIHLIQAAIQRLIDFFPDRGFNPVDVEEFNRQNRFDYESVRDFIILHYHLNQRQDSDFWKACTSMEVPESLRQKMALYRAHGRIVRFNNELFSEVAWLQVMQGQNLRPEAHHPLADLMPEQEVFDYLEGVRGVIGKCVDVMPDHAAYIKKFCAAKPPAKM

SEQ ID NO: 90385 - protein, 517 aa, unidentified
  source 1..517: note = Sphingomonadaceae bacterium
  REGION 1..517: note = tr|A0A2D4XZS8|A0A2D4XZS8_9SPHN Tryptophan halogenase; OS = Sphingomonadaceae bacterium OX=1930536 GN=CMN67_00495; PE = 4 SV=1
  VARIANT 172..173: note = Xaa can be any naturally occurring amino acid
  VARIANT 185: note = Xaa can be any naturally occurring amino acid
  VARIANT 189: note = Xaa can be any naturally occurring amino acid
  VARIANT 201: note = Xaa can be any naturally occurring amino acid
  VARIANT 210: note = Xaa can be any naturally occurring amino acid
  VARIANT 221: note = Xaa can be any naturally occurring amino acid
  VARIANT 226: note = Xaa can be any naturally occurring amino acid
  VARIANT 234: note = Xaa can be any naturally occurring amino acid
  VARIANT 257: note = Xaa can be any naturally occurring amino acid
  VARIANT 268: note = Xaa can be any naturally occurring amino acid
MSGEFTNLVIVGGGTAGWLSACLLAARRPELAITLIEAPDIPTVGVGEGSWPTLRETLAVIGIDETEFLTECDASFKQGSRFDGWVDGSERDCYYHPFSAPLSGSMPDILTAWKMQNDGQPYAEAVSPQAAICNRDLAPRQRTMPPFAGALNYGYHLDAGKFGALLASHGVXXLGVRHVHGKVTXTERXVDGLFTRLLLDXGSAIEGDFXIDCTGMASKLXGEELXIGWVDRSXVSFNDRALAVQVPVVPDSAIASXTIGTAHRAGWXWDIGLPTRRGVGCVYSSRFLSDDEAQAILMNYVGAKIAGAEQAALTPRGLKFSTGYREKFWAGNCLAIGLSAGFIEPLEASAIVLIELSLKALADGYPQSRAALPRLTDRFNSLFRYRWERIVDFLKLHYVLSTRTEPYWQAHRDPATIPSSLAAHLDLWRDHAPSSGDFPQIDEIFSAASHQYVLYGMRFPQPADISSAPSSEVQRQFAKVAERSRALSAALPSNRAYFDALCSSMDKNSARGVPTRQ

SEQ ID NO: 90386 - protein, 341 aa, Bradyrhizobium sp.
  REGION 1..341: note = tr|A0A1H8JRS8|A0A1H8JRS8_9BRAD Tryptophan halogenase; OS = Bradyrhizobium sp. OK095 OX=1882760; GN = SAMN05443254_11243 PE=4 SV=1
MAVIARIEGRGRGRGEVLSPLVQPVLRQLGLWPAFLAQDFAPSHRTLTSWDGEGLTSSELLLEARGPSWRVDRAAFDGWIATEACSAAERIDAKVSRLAREADGWSVACDDGTSHSARLIIDATGRARALADRQGFRARAQDRLIAAYAEATISGPAAPELLVEAFEDGWWYTLALGEGRRAFACMTDSDLARGLRLNTPDGWRAALAKTQFVAAVASRGVQFEQARLIPAGGRTAATATGFRFLCAGDAASAFDPISGHGVVKAMRSGVFAAYAASDCLARGDTAALGRYDSWVAREAAVYATTLGEHYGSVSRWADRPFWQRRRADVSSRNSLSNLSEQ

SEQ ID NO: 90387 - protein, 496 aa, unidentified
  source 1..496: note = Arsukibacterium ikkense
  REGION 1..496: note = tr|A0A0M2V6B6|A0A0M2V6B6_9GAMM Tryptophan halogenase; OS = Arsukibacterium ikkense OX=336831 GN=WG68_11635 PE=4; SV = 1
MNNAVKKVVVLGGGTAGWMAAALLKKVLAGAIDIELVESEDIGTVGVGEATIPPIRLFNNVMGINEAEFLRETKATIKLAIKFDNWRVPGEGYFHTFGAPGKSLAFCHFHHLWLRARQHGDKTDLWQYDLNYLCAMAGKFAPINAKDSILELPYAYHFDAGLYARYLRKLSEQMGVTRHEGKVQQVFQHPNGDIKCLVLEDGRELSGDLFIDCSGFRGLLIQDKLNAGYDDWSHFLPCDRAVAVPSERFEKTLPYTRSIAHSAGWQWRIPLQHRNGNGLVYSSAHYSDQQAADLLLTNLDSKAVADPKFLRFKTGRRRQQWQRNVVAVGLSSGFLEPLESTSIHLIQSAVVRLIQLFPHNGICQSAINEYNKQSQLEFEQIRDFLILHYHVNERSDSQFWRDMQQLAIPDSLRQKMAIFADNGQLFREQNDLFLESSWLQVMLGQGIEPKDYHPIASNFSIEKLREMLANIQAIKQEPLSKLPDHDTYIQTMISRG

SEQ ID NO: 90388 - protein, 500 aa, unidentified
  source 1..500: note = Sphingomonadaceae bacterium
  REGION 1..500: note = tr|A0A2D4XZV8|A0A2D4XZV8_9SPHN Tryptophan halogenase; OS = Sphingomonadaceae bacterium OX=1930536 GN=CMN67_00510; PE = 4 SV=1
MSSDYKPRRIVVAGGGTAGWMTAAALAKTMGDAIDLTLVESDAIGTVGVGEATIPPLINFNRLLGINEAEFMRETQATFKLGIEFENWKRDGEKYFHSFGSTGRDHWSAGFQHFWGEGLLRGHDYSYDDYCLELCAAYAGKFAHLPDNRLNYAYHLNATAYAAFLRRIAEGAGASRVEGKIAHVELDGESGNIAAIGLENGQRLEGDIFVDCTGFRSLLIEGALHVGYDDWSHHLPCDSAIAVQTELSASPVPYTRAIAHDAGWQWRIPLQHRGGNGIVYCSRYLSKDAAHDRLMSTLEGKAISEPRAIPFTTGARRKQWHRNCIAIGLSSGFLEPLESTSIHLIQRAVIRLLRMMPAGEVSERDIAEFNDQQLTDMIQVRDFLILHYKATDRRDSAFWRQCATMDIPDSLTQKMELFRETGRVFRKNDELFVENSWVQVMLGQGILPQAFHPVAKKMSDEELSKFLEMLRTNVARTVQGLPAHHAYVAQFCGAKEVAAA

SEQ ID NO: 90389 - protein, 495 aa, Pseudoalteromonas sp.
  REGION 1..495: note = tr|A0A2N1BF70|A0A2N1BF70_9GAMM Tryptophan halogenase; OS = Pseudoalteromonas sp. GutCa3 OX=888433 GN=CXF64_06115; PE = 4 SV=1
MTKTNAVKNVVIAGGGTAGWMAAAALAKLVGNNINITLVESDDIGTVGVGEATIPPIRTFHKLLGINEQAFMKATQASFKLGISFENWGDENTHYIHSFGATGKECWAGEFHHFWLQGKTLGINNPFGDYCYELQAAKGGKFAFNQQNPINYAYHMDATRYAQFLREFSEPLGVKRIEGKIQKVVKNTKTGHIESLILNNGEHINGDFFIDCTGFRGLLIEQALHTGYEDWSHLLPCNSAIAVQTKSTSETVLPLTRSIAHKNGWQWRIPLQNRVGNGLVYCSQYMDDEQAKALLLNNIEGEPLTEPRIIKFKTGRRLKGWNKNCLALGLASGFVEPLESTSIHLIMSGIIRFMRLFPFNGITNHAIDEYNKQLKSEIENIRDFIVLHYKVTNRDDSEFWQHCSAMEVPKTLQHKIDLFKQTGRVFLDDGDIFRVDSWVQVMLGQGIEPNQHHLIASMMSDEELTRFLHGIKQQIEQRVSQLPPHHEFLKQYCPA

SEQ ID NO: 90390 - protein, 500 aa, unidentified
  source 1..500: note = Sphingomonadaceae bacterium
  REGION 1..500: note = tr|A0A520X289|A0A520X289_9SPHN Tryptophan 7-halogenase OS=Sphingomonadaceae bacterium OX=1930536; GN = EX262_02445 PE=4 SV=1
MSEEKAPDVVILGGGSAGWITACLLHQQWAAKGGSVTVVESPEIGIIGVGEGSTPQLKAFFDQLGIDEAEWMPACNATYKLGIRFTGWSERPGFESYYHPFPGPVDMHSEPHFVHNCALARHGLDVPAHPDDWYLASLLSEEGKGPHPAETFPFVPSYGYHFDAHALGAFLRDRAVRKGVVHRPLKVTSVERTSGGDIAALQCEGGERVEGELFVDSSGFRAMLAQEELGATFLPFAENLFNDRAVVLPTPHSGKFKPQTEAIAMRAGWRWKIPLTTRVGNGYVYSSNHISDEEAEAELRAALGLEESEQQARVLRMKVGRLEHSWTRNCLAAGLAQGFIEPLEATALHIVIATTLEFAQAYEAGGFSDRHRDTFNASIAARYEGIRDYIVGHYRLAQRSDTPYWRENIANDRLSDNLKKMMTAWFRQADLLAANDEAYGGKRYYANASWHCLFAGYGTFPPTEKLQSPPPQARPADLAQVKTILATCARNFEPYNPLAD

SEQ ID NO: 90391 - protein, 562 aa, Ruegeria sp.
  REGION 1..562: note = tr|A0A366WWA1|A0A366WWA1_9RHOB Tryptophan 7-halogenase OS=Ruegeria sp. A3M17 OX=2267229; GN = DS906_18900 PE=4 SV=1
MNNRLRKITIVGGGTAGWMTALILDMVFSRTSAPKDRPRLCLIESPNIATVGVGEATVPRMPVTLRQAGISERDFFRETNASFKLGVKFCNWNKDAKGNRIDYVNPFAHGQLLEGLEAAEYFLRFGNGDRDFTQSISPHDDLARLCKGGRPLGQPEFEQRFGYAYHLDAVKFAGMLSKVCTKRGVEHIQDEVQAVELDEQGNVSHLMLERKGRHDIEMVIDCTGFRGLIINKALGEPFMDYSEYLPNDRAMALQIEHPDPEKIESVTRSTALGAGWTWRVPLYNRVGTGYVYSSAHRTDDQAAEEYLEWLGDSGKGLTPRVIPMRIGRARNAWVKNCLAIGLSGGFIEPLESTAIHMVDHAVRWFAEHLPTRDIEPSLRARYNRQMNNLYDEVLDFICLHYRLGNRTDDQYWIDARTEMKIPDRLAENLELWQHRLPMEHDIEFATLFNFRVYQAVLLGKQVYDTGYGTGIRDRLRPLKKPIWFQWWKGAKVDLAQILKAMPDHKTLLRDIRGELEQPPAFGKAAAMQPTVAMPGEQLAPVAIQNMPNLAEIQSGRKDLQLF

SEQ ID NO: 90392 - protein, 503 aa, Streptomyces sp.
  REGION 1..503: note = tr|A0A0N0TIU3|A0A0N0TIU3_9ACTN Tryptophan halogenase; OS = Streptomyces sp. NRRL B-3648 OX=1519493 GN=ADL04_06565; PE = 4 SV=1
MTASYLKAAFGDRIDITLVESGKVGTIGVGEATFSDIRHFFEFLGLKESDWMPACNATYKLAVRFENWREKGHYFYHPFEQVRSVNGFPLTDWWLQQGPTERFDKDCFVMASVIDAGLSPRRLDGSLLDSPFDENAEEMRGLTMSEHQGKTQFPYAYHFEAALLAKYLTAYAVERGVRHVVDDVTDVGLDERGWIKGVMTAGHGELTGDLFVDCTGFRGLLLNKALEEPFISYQDTLPNDSAVALQVPMDMERRGIRPCTTATAQDAGWIWTIPLMGRVGTGYVYARDYLSPEEAERTLREFVGPAAADVEANHIRMRIGRSRNSWVRNCVAVGLASGFVEPLESTGIFFIHHAIEQLVKNFPGPDWDPVVRDRYNDGVAHVMDGVREFLALHYQAAKRSDTQYWRDTKTRALPDGLAERIEKWRAQLPDSESIFPYYHGLPPYSYMCILLGMGGIDVKPSAALALSDFSAAQQEFDAIRDKARQLVKTLPEAYTYFSRMHQP

SEQ ID NO: 90393 - protein, 508 aa, Arenicella xantha
  REGION 1..508: note = tr|A0A395JIQ7|A0A395JIQ7_9GAMM Tryptophan halogenase; OS = Arenicella xantha OX=644221 GN=DFR28_103337 PE=4 SV=1
MTNQQSNNPVQNVVIVGGGTAGWITAAAFSRVLVPQGYNVTLIESDAIGTVGVGEATIPPIRDFHRMLGINEADFVKETQATFKLGIEFNGWSNPESRYFHPFGEYGRKLDSVQFHQYWQRASSLTDCGELSDFSLCSVAAYQGKFAPTSQDPESILSGIGYAYHFDASRYARFLRSYSEQRGVRRVEGKVVDVLQNANNGFIEGVQLESSDVIKGDFFIDCTGFAALLISKTLNVEYEDWSDLLPADSAVAVQCKKSSTPIRPYTQTFAQDGGWRWRIPLQHRTGNGFVYSSKFTSDEDAVSTLLAGLDGEPLSEPRKLKFRTGKRQQSWSHNCVAVGLSAGFLEPLESTSIHLIQTAVIRLLSMFPGKEFEPAQIQEYNQQVNDEVAFIRDFIILHYHLNDRPEPLWTYCREMSIPDSLAQKISLFKSRGHVVEAQYDLFKTASWVAVMRGQGVHPSYYDPMAESKPEKQLLGIMQELKAAYQRASEAMPAHDEFIAQHCQAAVPK

SEQ ID NO: 90394 - protein, 394 aa, Pseudoalteromonas sp.
  REGION 1..394: note = tr|A0A4Q6JFN7|A0A4Q6JFN7_9GAMM Tryptophan synthase beta chain OS=Pseudoalteromonas sp. MEBiC 03485 OX=2571103; GN = trpB PE=3 SV=1
MQNPAYFGEFGGMFVPQLLVPALKQLEAEFNKSQKDPAFQAEFEKLLNEYAGRPTPLTLTRNLVKNPKVKLYLKREDLLHGGAHKTNQVLGQALLTKRMGKKEVIAETGAGQHGVATALACALLGLKCRVYMGAKDVERQQPNVFRMKLMGAEVIPVTAGSGTLKDAVNEALRDWSANYKDAHYLLGTAAGPHPFPTMVREFQKMIGEEAKQQVLKAEGRLPDAVLACVGGGSNAIGMFTDFIDEPSVKLIGVEPAGKGLDTHQHGATLCKGTKGILHGTYTYIMQDDDGQIEESYSVSAGLDYPAVGPQHAHLHETGRAQYVGISDTEALEAFQLLAKNEGIIPALESSHALAYALKYAEQQTEDTILVVNLSGRGDKDLAHVHSVLSEGGAL

SEQ ID NO: 90395 - protein, 424 aa, unidentified
  source 1..424: note = Pedosphaera parvula
  REGION 1..424: note = tr|B9XPY2|B9XPY2_PEDPL Tryptophan halogenase; OS = Pedosphaera parvula (strain Ellin514) OX=320771; GN = Cflav_PD1318 PE=4 SV=1
MKTDYDVIVIGGGPAGSSAAAILAEKGHKVLVLEREKFPRYHVGESLLPFTFHPLQRLGLVEKLRASQFVKKFSVQFVSPSGRASQPFYFFNRYDKDVAQTWQVLRSEFDQIVLDHAREKGAHVIEEITVTELLKDGDRVIGARTKDKTGKITDYHAPLTFDCTGKESFAAVRNGWRIKDPMLNKVAVWTYYKGALRDEGIDAGATTVAFVPEKGWFWYIPQHNDIISVGVVAEGKYLSRDGVRDPEKMFLREVTQNKWIEQHLAVGKQFGPYYVTNEFSFHSKYCATEGLVLVGDAFCFLDPVFSSGLMFAMKSGVLAADYADEALKAADFSPARFEGYGKTLREGIENMRKLVYAFYDPNFSFRKLTDKYPDLAGDITDCLSGDINKDFTKLFTAIKEFAEIPESLPYGQPLIKPDAQMQAA

SEQ ID NO: 90396 - protein, 493 aa, unidentified
  source 1..493: note = Alteromonas mediterranea
  REGION 1..493: note = tr|S5AI20|S5AI20_9ALTE Tryptophan halogenase; OS = Alteromonas mediterranea 615 OX=1300253 GN=I633_20735; PE = 4 SV=1
MNKSVKTIVIAGGGTAGWTAAAAIAKQMGPTVNITLVESDEVGTVGVGEATIPPMRVFHKLLGIDEKDFMRATSATFKLGIQFENWGQKGDNYIHSFGVTGRESFVAPFHHFWLYGKEQGVANDFGNYCFELEAAKQDKFATSQNANIQYAYHLDSSLYATLLRNYSETRGVTRKEGKIEQITQNKETGFIESLKLASGDVIHGDFFIDCTGFRGLLIEETLKTGYEDWSHWLPCDSAVAVQTESDSAPRPITKAIAHDSGWQWKIPLQHRTGNGLVYCSKYLSDEHATQRLLDNITGNTITKPRIIKFKTGRRLKAWNKNCLALGLSSGFVEPLESTSIHLIIMGIIRFLKLFPNGGVSELIADEYNRQTLEEVVKIRDFIILHYHATYRKDSPFWQYCHDMEVPDTLKHRMQLFKEFGHAFQEDGELFRVDSWTQVMLGQGIMPESYHASVKGMPAKELQRFLQGIELSVLKGLENMPSHETFLKHYCSSR

SEQ ID NO: 90397 - protein, 500 aa, Arenicella xantha
  REGION 1..500: note = tr|A0A395JL93|A0A395JL93_9GAMM Tryptophan halogenase; OS = Arenicella xantha OX=644221 GN=DFR28_103163 PE=4 SV=1
MTDKIINNVVIVGGGTAGWISAALLVRMLGKTLNVTLVESDQIGTVGVGEATIPPILTLNQALGIDQADFMAKTNATIKLGIEFENWRKPGHKYMHAFGKLGKDFPFCGFEQLWLRGLKAGYSSDFWDYSLNYQAAKQGKFALLDNIPKTDMQGLVYAFHFDAGLYANYLRELSERAGVTRIEGKVKQVDRHTASGDITSLVLDDGRTVDGDLFIDCSGFRALLIGETLGVEYEDWRHWLPCDSALAVQSEASLPVPPYTQSIAHSAGWRWRIPLTKRTGNGIVFSSQHMHEEEARQYLLDSLDGAAITEPRLLRFTAGRRASQWHKNCVAIGLSSGFLEPLESTSIHLIQTAVIRLLKLFPHAGIKATEVAEYNRQAAEEIEHVRDFIILHYHATEREDSEFWRACRSMDIPDGLRHKIELFRQSGKVYNPTEALFSDVAWQQVMLGQGIVPNDYHPLADAMSEAQLAEYHRNVKSIIKQVVEKLPLHQDFLDVVHRKS

SEQ ID NO: 90398 - protein, 584 aa, unidentified
  source 1..584: note = Beauveria bassiana
  REGION 1..584: note = tr|A0A0A2VID2|A0A0A2VID2_BEABA Tryptophan 2-halogenase OS=Beauveria bassiana D1-5 OX=1245745; GN = BBAD15_g7321 PE=4 SV=1
MAVPSSCTVLVVGGGPAGSYAAACLAREGIDTVLLEAEKFPSITIRYHIGESTLPSLRHFFQFIDVYHKINAHGFYHKNGAVFRLAQGQPDAYTDFLEVGGPEGYAWNVLRSEFDDILFRHAGVCGAQIFESTEVKQILFARERENTAAVPDDDEVTVDAPRPESAIWARKNGTSGSISFKYLVDASGRQGILSTKYLKNRRVNDNFKNVANWAYWKSDNIYGPGTHMQGSPYFEALDDASGWAWFMPLHDGTRSVGIVQDQKQAARAKRDLGRPSGLEYYKLALKMAPTTQNLLAGAELASDVRSASDWSYTASTYHLPNARICGDAGSFIDPLFSSGVHLAITGGLSAAATIAASVIGDCDEHTAGAWHSKKTVQSYSRFFLAVSSATKQIREKHLPILQDLNEEGFQRAFDLFRPIIQGTVDNDTRSKVTQAEISKILEFCSKSFTYVAPEQKEALFKKLTKLGVNGEDSDVSWANGLGDLQHHLTADELKVLGILQSRRLTREDPFEIDSFTLDPIDGLAPSLVRGSLGLVNSEQARIDPGCLFSPEFLDGKRPGIREGSIFHSSDGEDRLNKEAVETVA

SEQ ID NO: 90399 - protein, 571 aa, unidentified
  source 1..571: note = Leucoagaricus sp.
  REGION 1..571: note = tr|A0A137QNS0|A0A137QNS0_9AGAR Tryptophan 2-halogenase OS=Leucoagaricus sp. SymC.cos OX=1714833; GN = AN958_06763 PE=4 SV=1
MTIMSLQPSRTTVLVIGGGPAGAYAASALAREGIDTTVIEAAKFPRYHIGESMLPSLNAFVRFIGAEERLRSHGFVIKRGAAVKFNQHKKEGCKCSSNHPSFLSDRNLTIGFLDTDFVLGDIRNASWNVIRSEFDNMLLRHAEESGAHVFEETKVTEIKFAETKGTEMRPTMALYVCKNGETRQIRFDYLVDASGRNGIVSTKVFESTVIFLDRIDMGAQYLKNRKMNQSLHNIACWAYWTGQKQYMPNTDRHNAPWFESLTDESGWGWFIPLHNGTVSVGIVMDSAISSRKKAEGCEASETGEYTLKGHYLDQLKFVPGLSNLLEGATLKEDDEYYYVRSAADFSYAADKYAGDHYRIIGDASAFIDPFFSSGVHLALLGGLTAATTIAASIKKQCTEEMAWKFHDVKVATAYTRFLLVVMSAYKQIRNQSTAVLSDIDEDNFDRAFDILRPVIQGTSDVGKKLTENELQKTMEFCKDVFAPTDPEMVKAVGARLRPELLSAGTPIWTEEEIEKEAGNDEETKIVLHRMNARKPVNQMYQGPENLRVGDVDGYVAHLHHGALGLIRVASV

SEQ ID NO: 90400 - protein, 521 aa, unidentified
  source 1..521: note = Leucoagaricus sp.
  REGION 1..521: note = tr|A0A137QC77|A0A137QC77_9AGAR Tryptophan 2-halogenase (Fragment) OS=Leucoagaricus sp. SymC.cos; OX = 1714833 GN=AN958_12016 PE=4 SV=1
PSFASVLVIGGGPSGSYSAACLAQDGFSVTLLEAETFPRYHVGESMLPSMRHFLRYIDADDKFDSFGFIQKHGAAFKFNPRKREGFTNFISQNPDNYAWNVTRAEADKLILDRARELGAQVFEGHRVTELQFAKAATKANATATQAQSGTLDPAQDIPVSATWKNVATGQTGTINFDYVIDASGRNGLISRALGLRKYNQSLKNVAYWGYWVGTNEYRHPSCTVQPPFFEALHDETGWAWFIPLHNGKVSIGVVIDENVSKSKKANMEKKGDESINVRHYLEELKVNATKIHSLIGEGNLIEYNGGPKIRMASDYSYSGTAYAGLNYRIVGDAGAFIDPFFSSGVHLAISGALSAAATIAAAVRSECTAAQAADWHNQRVGTSYTRFLMIVLSAYRQIRAQELPVLSDIDEDNFDRAFDLFRPVIQGDVDVKKGPSEDSLRKTIDFCTQAFEPTSMERWHGKEGDDSKANSEEMSEESKANIMSVNKSLRADDMYQIKSFVADKFNGLSIRLEKGRLGLEA

SEQ ID NO: 90401 - protein, 462 aa, unidentified
  source 1..462: note = Metarhizium brunneum
  REGION 1..462: note = tr|A0A0B4G862|A0A0B4G862_METBS Tryptophan halogenase (Fragment) OS=Metarhizium brunneum (strain ARSEF 3297); OX = 1276141 GN=MBR_04067 PE=4 SV=1
MPPVDIDFPSTTVRLLVCSLSLLVAIHALPNVLFKDVVIVGGGASGSYAAVRLREDFGKSITLVEKDEILGGHVDSYVDTKTGTPYDFGVKEFIQAGNATGFFDRLGVQRGRSTKTPLNTTYIDFKSGKVLDFAPPPSAAQLDALADFLRVVEPWEHFLQPGYFDFPEPSHIPGELLVPFGDFVSKHGLERAMPFIYQTTGLGVGNMTRAITLFALQAFASGRNQDLYDAVAAVLGSDVLYASKVVNTLRTNLGVIVTVRHLKSRRLTYIAAKALLIAIEPTGDNTGPFSLDPDEKHIFSKFTYTREYTGIIDNAALAAHASYFNLPSDAAPNNYLSYPEPPFTARIDYMGSGHYFRVTVIGDDKLDDKGAKALVDKDFATLVDAHVLRGSAAEKVHWVAFSTHGPMHARVSVGDVQRGFFQKLYALQGRRSTWWTGGAWSVNFQSALWQYDDIIVPMMLWG

SEQ ID NO: 90402 - protein, 575 aa, unidentified
  source 1..575: note = Talaromyces marneffei
  REGION 1..575: note = tr|A0A093X8M4|A0A093X8M4_TALMA Tryptophan 2-halogenase OS=Talaromyces marneffei PM1 OX=1077442; GN = GQ26_0570070 PE=4 SV=1
MAIPEKTTVLVIGGGPAGSYCASALAREGIETVLLEAEKFPRYHVGESMLPSLRHYLRFIEADKKLDAHGFIRKNGALFKLNSKPAAYTDFVGAGGPNGFSFNIIRSQADDLLFRHAGTSGAKIFDGVKVNSIEFVPSGLPRSDDPDCEIPDPGRPVSASWVNKDTGDAGSIKFDYLVDASGRQGLVSTKYWKNRKMNTGAQLQSVATWGYWTGGGIVEKGTSREGCPYFEAIADASGWTWYIPLHNGQWSVGVVMNQKVLADKKRAAGDGKNVYLQTIRETPGLQALLENGELVTELRSASDWSYNATAYSSPYLRVAGDAGCFIDPFFSSGVHLALTGGFSAATTICASIKGQTSEIGAAIWHTKKVSESYTRFLVIVSTALKQINEKDEPVISDFDEKTFERAFKHFRPIIQGTVDVQGKLSQAEVSQALNFCFRAFHQVDSKEKQNLIEKMRSLAISDPDDLSNEKYSAALKELEAVLTPDQLHILQTIRARQMLRPEDMFTVETIGSDVIDGLSVNMVTGQLGLVHPGKAFKVAPSNKDILALLNGEELSESSIGFKTDPGYQNPTAAAH

SEQ ID NO: 90403 - protein, 566 aa, unidentified
  source 1..566: note = Penicillium subrubescens
  REGION 1..566: note = tr|A0A1Q5ULG1|A0A1Q5ULG1_9EURO Tryptophan 2-halogenase OS=Penicillium subrubescens OX=1316194; GN = PENSUB_1014 PE=4 SV=1
MAVPQSCTVLVIGGGPAGSYAAAALAREGIETVLLEADKFPRYHIGESTLPSLRHFFKFIDFYDTFDAHGFYHKNGAVFRLAQAQPDAYTDFLEAGGPNAYAWNLIRSESDDLLFRHAGTCGAHIFDETKVDAIQFESDTNETSPDGVLNPGRPVSVTWVRKDGSSGSTSLKYLVDASGRHGILSTKYLKNRKFNENFKNVANWAYWKSDNVYGPGTHMEGSPYFEALDDASGWAWFMPLHDGTRSVGIVQDQKLATEKKRELGRPSTLDFYKKCLGMAPRTKELLSEAEVVTDVKSASDWSYTASAYHLPNARICGDAGSFIDPLFSSGVHLAVTGGLSAAATIAASIRGDCDEQTAGSWHSKKTVESYTRFFLAVSSATKQIREQYEPIIQDMDEEGFQRAFDLFRPIIQGTVDADTTSKMSQSEISKALEFCFRAFTYVPPELKDALLEKLKKLGAKSGQNDATAAKELDDIQKHLTADELQVLEILRSRRMIREDPFEMDSFTLDTIDGLAPNLVHGKLGLVKSEQAKIDRAHFYSPKFLDGKGPEIREGSVYLPTSKVQLA

SEQ ID NO: 90404 - protein, 526 aa, unidentified
  source 1..526: note = Aspergillus udagawae
  REGION 1..526: note = tr|A0A0K8KZQ9|A0A0K8KZQ9_9EURO Tryptophan 2-halogenase OS=Aspergillus udagawae OX=91492 GN=AUD_0242; PE = 4 SV=1
MCPVMDKVEMEIPAHCTVLVVGGGPGGSYTAAALARENVDVVLLESDRFPRYHIGESMLPSFRHFLRYIDLDSTFLDHGFTQKNGAAFKVVQGKREGYTDFISAGGPNNFTWNVIRSEADYLMFQHARSGGAKVFDGVRVNDIDFDDKTSHPVRASYTQKATGTKGTINFRYLVDASGRAGLVNTKYMKNRTYNKALKNVAHWGYWRGTKPYQEGMERENSPFFEALKDESGWAWYIPLHDGTVSIGVVMDQELATSKRRAMFDTSCKEDHTLESFYRSSLRLAPNLMQLISGGELTSSVKLASDYSYSASTYSSPYVRVVGDAGCFIDPFFSSGVHIALTGALSAAVTICAALKGDCKEATAANWHSTKIQSVYQRFLMVVLSAYHQMRRQDNSIWSQLGEDNVDEAFERIRIIIQGTADIGGSGVSQSHLKETLDFCAQAWNHAEPEKMAKFKQKLGSSSLSSVESNRFSREELQILHHLQARKAMCTESTLGLDCFHTDVIEGLKPVLDRGRLGLVRILPAEL

SEQ ID NO: 90405 - protein, 600 aa, unidentified
  source 1..600: note = Metarhizium anisopliae
  REGION 1..600: note = tr|A0A0B4FEW2|A0A0B4FEW2_METAF Tryptophan halogenase (Fragment) OS=Metarhizium anisopliae (strain ARSEF 549); OX = 1276135 GN=MAN_06560 PE=4 SV=1
MAVPPSCTVLVIGGGPAGSYAAAALAREGIETVVLEADKFPRYHIGESTLPSLRHFFKFIDFYDTVDAYGFYHKVPSSLHFFHLNEELTSPYQAKNGAVFRLAQAQPDACKSPSPAYTDFLEAGGPNGYAWNLIRSEFDDLLFKHAGTCGAQIFSETRVDTIQFEPVANGLKPDMNRNLGDNLNPGRPVSATWVRKDGTSGSITYKYLVDASGRQGILSTKYLKNRKFNNNFKNAAIWAYWKSDNVYGPGTHMEGSPYFEALDDASGWAWFMPLHDGTRSVGIVQDQKMATEKKHELGRPSTLDFYKQCLQMAPGIRELLSEAELIPHVRAACDWSYTASTYHLPNARICGDAGSFIDPLFSSGVHLAITGGLSAAATISASIRGDCSEAAAGSWHSKKTVESYTRFFLAVSSATKQIRTQHEPIIKDMDEDGFQRAFDLFRPIIQGTADADEAGKVSQLEISKILHFCFKAFTYVPPEKKDALFDKLRKLDSKALQDDAKQVQTLDGIEKHLTADELQILEILRSRRMIREDPFEMDSFTLDTIDGMAPRLVRGTLGLVNYEQAKIDKAHFYSQDFLDGNYPGIREGSVHLPTSRVQLG

SEQ ID NO: 90406 - protein, 674 aa, unidentified
  source 1..674: note = Metarhizium album
  REGION 1..674: note = tr|A0A0B2X351|A0A0B2X351_METAS Tryptophan halogenase; OS = Metarhizium album (strain ARSEF 1941) OX=1081103; GN = MAM_02682 PE=4 SV=1
MAVPQSCSVLVVGGGPAGSYAAAALAREGIDTVVLEADKFPRYHIGESTLPSLRHFFKFIDFYDTVDAHGFYRKVLPWACSASPAPRPGSRVNKSMPHHRTVLFSGSLKISPTPASLYQPRPCVDSDSASRANMCQDTDFLEAGGPGGYAWNLIRSEFDDLLFRHAGTCGARVFSETKVDAIRFASETDGTQRPDSTENRNGTSDPGRPVSATWVRKDGTSGSIRFEYLVDASGRHGILSTKYLKNRRFNENFKNAALWAYWRSDNVYGRGTHMHGSPYFEALDDASGWAWFMPLHDGTRSVGIVQDQKMAADRKRELGRPSTVDFYRHCLEMAPRTSQLLSGAELVPDVRSAADWSYTASTYHLPCARICGDAGSFIDPLFSSGVHLAVTGGLSAAATIAASIRGDCGEEAAGAWHSKKTVESYTRFFLAVSSATKQIRARHEPVIQDMDEDGFQRAFDLFKPIIQGTADADTAGKVSRAEISKILAFCFKAFTYVPPEKKDALFDKLRRLDSASARKDAHATAAAETLDHDDMQKHLTADELQVLETLRSRRMVREDPFEMDSFTLDTIDGMAPRLVRGSLGLVRSEQAKIDRAHFYAEDFLDGKHPGIREGSVYMPASRVRLEYFGNGGVSLANAASWQQSVNKVEIRSGSNKRTREKYLGDEHDGLETAD

SEQ ID NO: 90407 - protein, 567 aa, unidentified
  source 1..567: note = Aspergillus parasiticus
  REGION 1..567: note = tr|A0A0F0IFV2|A0A0F0IFV2_ASPPU Tryptophan halogenase; OS = Aspergillus parasiticus (strain ATCC 56775 / NRRL 5862 / SRRC 143 / SU-1) OX=1403190 GN=P875_00128062 PE=4 SV =1
MPPRYLRSISPSSVTIITMSIPNRCTVLVVGGGPAGSYAAAALAREGVDTVLLEADVFPRYHIGESMLPSIRHFLRFIDLDSKFDSYGFVNKNGAAFKLNSKPEAYTDFIAAGGPGSHAWNVVRSEADHLMFKHAGENGAQVFDGVKVNSIEFEQIDGLTVDPSLAELGRPVSATWSCKATGEKGSITFEYLIDATGRAGLVSTKYMKNRRYNQGLKNVASWGYWSNASSYGVGTPREGDPYFEAIEDGSGWVWLIPLHNGTTSIGVVMNQAAATAKKRETGATTKDLYLNTIKNTPGVWQLLDKAELQSDLKSASDWSYNASSYASPYLRIVGDAGCFIDPFFSSGVHLALASGLSAALTIRAAQRGDCDEQAAVSWHSKKVAEGYTRFLLVVMSALKQISDREKPVLTDFDEDSFNRAFDFFRPIIQGTADVDKNLTQAEIAQTIEFCVQAFQTASTDEQDAVMTKVAAINSQNGTEGALRELHASLSADERRTLTTIQARQIIRSEDQMNIDNFTIDVIDGMVPRLERRSLGLARFVPKAQTSREDGLRATLGLPEKQKSIFSY

SEQ ID NO: 90408 - protein, 502 aa, Erythrobacter gangjinensis
  REGION 1..502: note = tr|A0A0G9MMB9|A0A0G9MMB9_9SPHN Tryptophan halogenase; OS = Erythrobacter gangjinensis OX=502682 GN=AAW01_10135; PE = 4 SV=1
MAIDRIVIVGGGTAGWMAAAALSRLKKNRELSITLVESEAIGTVGVGEATIPPFVDFNQLLEIDEREMLAASQGSFKLGIQFANWGALGDSYIHPFGNYGYELGNMSFHHVWHFMQQAGDNRPIQVFNAETMAAYFGKFARTQEMQREDLPPINYAYHLDAGRYAVFLRRYAEGRGVVRKEGRIEDVKLDGESGDVTGVTIDDGTQLDGDFFVDCSGFRGLLIEQALQTGYEEWTHWLPCNRAVALPCNRDDGSPPPPFTKATAHSAGWQWQVPLQHRNGNGHVYCDAYMSADEATDILVANLAGKPTADPNHLRFVTGRRKKFWNRNVVALGLAAGFMEPLESTSIHLINTGLTKLIAVLSLDGPTDAQRDTFNRLTRKEYEKIRDFLILHYHATRRDDSEFWNYCRNMSVPDSLTEKMALFRETGQIFREEDELFTETSWAAVMMGQGISMQGHNAMAETLDKAATKAELDEIEKSIRFLVQHMPAHGDFLAKYCPAPTM

SEQ ID NO: 90409 - protein, 503 aa, Sphingobium yanoikuyae
  REGION 1..503: note = tr|A0A085K432|A0A085K432_SPHYA Tryptophan 7-halogenase OS=Sphingobium yanoikuyae OX=13690; GN = EBF16_20510 PE=4 SV=1
MHADFPTSDRVVKRVVVAGGGTAGWVTATALVRHLGPLIDITLIESDAIGTIGVGESTVPTFRGFHQLMKIREDRFMAEAQATVKLGIEFKNWGHVGDRYIHPFGTIGLQWSWMADFHHFWLHARAQGFGGELGEYCLEWVAGEANRMSLSSSVAPSYAYHIDAARYARFLRSLAEPAGVKRVEGKIRNVELAPESGHIAALVLESGTRIEGDLFIDCTGFRSLLLGEALGVGFEDWGQWIRTDRAVAVQSTSDGPAQPYTSAIAHEAGWRWRIPLQHRDGNGFVFASDFMSDDEAHARLLAEIEGEPIVDPWLVRFKTGTRTRAWHKNCVGLGLAGGFIEPLESTSIHLMMAAVTRLIEDFPFHGFDDALLDHFNRKSRLEFENIRDFIILHYHVTQRDDSPFWDHCRTMEIPDSLKERLALWQENGRAYQLGHELFRVDSWSSVLLGQGMHPRGYHHVAAMMPEPQLREELARMRKDIVGVVAEMPSHREFLRRYCPAELV

SEQ ID NO: 90410 - protein, 505 aa, Xanthomonas citri
  REGION 1..505: note = tr|A0A2H1SEA6|A0A2H1SEA6_XANCI Tryptophan halogenase; OS = Xanthomonas citri pv. fuscans OX=366649 GN=AC612_07810; PE = 4 SV=1
MTQAQIRKVVIAGGGTAGWIAACALSHQFRNLLDITLVESEQIGTVGVGESTVPPIRTFHRFLQIDEQEFLRAVAGTFKLSISFEHWRRQGERYIHPFGITGQSTLVCAFHHLWLESQRRGMPGSFGDYCLETVASRVDRFALHGEPAVNYAYHLDAALYARFLRARSEACGVKRVEGRIQQVTVQPHSGDVASLVLEDGQTIEGDLFIDCSGFRGLLIEQTLHTGYEDWSHWLPCDRAVAVQTEALGPPVPYTRAIAHEAGWRWHIPLQHRVGNGLVFSSKHLSDDEAHAKLLRDVAAPAVKEPWMVPFRTGRRLKAWNKNVVSLGLASGFIEPLESTSIHLTISAVVRLLALFPAAGIAPSQVQLFNDVSRAEMEHVRDFVILHYHATQREEPLWQQCRQMELPESLALRLRAWRERAHAWQGADELFRVDSWTHVLMGQGIAPEQHHPLTRAFSDHDLRRLLDGIAQPIQHAVQQMPSQQDFIERYCKAGEQVWGMRSPVPA

SEQ ID NO: 90411 - protein, 498 aa, Parvularcula sp.
  REGION 1..498: note = tr|A0A355C367|A0A355C367_9PROT Tryptophan halogenase; OS = Parvularcula sp. OX=1979207 GN=DDZ68_13610 PE=4 SV=1
MKHLKKIMIVGGGSAGWMSAALLSRLFQGLYEITLVESEDIGTIGVGEATIPAIKKYNELLGLDENEFIKRTQGSFKLGIQFNDWSQLGSSYIHGFGVIGQNLEWLRAHQYWLRARKSGRASDFANYSINTAAALQNKFMRAAADMPDSPLAHIAHAFHFDAGLYARFLRGYAEDRGVRRREGKIADATLNAEDGFVQSVTMADGETIAADFFIDCSGFHGVIIEKALKTGYEDWTRYLPCDRAIAVGCARSENFTPYTKSTARTAGWQWRIPLQHRTGNGHVFCSSFMEADEAEKILIENLDGAPLTDPLHIRFTTGKRKKIWNKNCVAVGLASGFLEPLESTSLHLIQSAVIRLIRLLPDASFDQATIDEFNRQTDFEYERIRDFIILHYKATSRDDTPFWRHCRAMEIPSTLRRKWDLFASNGRVFREDDELFTEESWIQVFLGQDVIPRGYDPLVDIKSDTQLAQYLGNIENVIGKCVAVMPSHADFVAKTCKA

SEQ ID NO: 90412 - protein, 513 aa, Colwellia sp.
  REGION 1..513: note = tr|A0A2G2EJ40|A0A2G2EJ40_COLSX Tryptophan 7-halogenase OS=Colwellia sp. OX=56799 GN=COA35_10165 PE=4; SV = 1
MSGVINRIIVLGGGTAGWITAGILAKKHASNLSNQGIKVTLIESPEISVVGVGEGTWPTMRKTLSQLGISETQFMRECGATFKQASKFVNWVNAKDDVYYHPFTEPQGFNKVDPAPYWQSVVEPTCSFSEAVSFQQYLCEQGLAPKTIANKEYEVIANYGYHLDAAKFIALLRKHCISELGVEHISDTVDRIEQAPCGDISCLQTKEHGAQLADLFVDCSGMRSLLLGETLKVPFVPCDDVFLADTAIATQVPYINENDPIACHTISTAQEAGWIWDIGLQERRGVGYVYSSKHCSEEQARKTLANYIGLEEVKTAKKINFKPGHRKIFWKNNCVAVGLAAGFLEPLEASALMLIEASANYIADQLPPNKELMPITAKRFNAIMLKKWRGVIDFLKLHYALSERTEPFWLEHRDTQSIPNSLQELLSIWRYSSPSEYDFTDNVEAFSAASYQYILYGVGFKSDFSQMEHIYNQGELAKKQLQMTKIRIDQLKYNLPTHRDLINKVNSLGFAKL

SEQ ID NO: 90413 - protein, 509 aa, Xanthomonas oryzae; identical to SEQ ID NO: 84130
  REGION 1..509: note = tr|A0A0C5UFG5|A0A0C5UFG5_9XANT Tryptophan halogenase; OS = Xanthomonas oryzae pv. oryzicola OX=129394; GN = BE73_00300 PE=4 SV=1

SEQ ID NO: 90414 - protein, 518 aa, Colwellia sp.
  REGION 1..518: note = tr|A0A2G2F1P2|A0A2G2F1P2_COLSX Tryptophan 7-halogenase OS=Colwellia sp. OX=56799 GN=COA35_16225 PE=4; SV = 1
MNQQNKKIKTVVVVGGGIAGWLTAGRLAAHHKSNTPDGLNVVLVESPNVPIIGVGEGTWPTMRSTLIALGISETDFIRECEASFKQGAKFAKWVDGSEDDFYYHPLVLPQGFSKTDMAGHWLNNAAESTSFSNAVCYQEAICEQGLAPKTIRTPEYAAIANYAYHLDSAKFAIFLQKHCTQELGVKHILADVTQVNSAKNGDIASVTTKQQGEISGDLFVDCTGFSSLLLGEHYEVPFKPCDDVLFIDTALAVQVPYDNEDECIASHTISTAQEAGWIWDIGLQHRRGVGYVYSSKYSSEAQARENLKAYVGDKIESLTIRKIPIKSGHRSHFWQNNCVAVGLSAGFLEPLEASALVLVEMSAQMISEQLPQTRDIMDITAKRFNETFTYRWEKIIDFLKLHYILSNRDDNAFWRDNRDPKTIPQSLQDLMKLWQYRAPADHDFTSNNEVFPAASYQYVLYGMGFKSDYSTTAYMLKDTVFAKSQFDKNKSMINQAVTNLPSNRELLNKIKHHGFSVI

SEQ ID NO: 90415 - protein, 506 aa, Xanthomonas citri
  REGION 1..506: note = tr|A0A2H1SA59|A0A2H1SA59_XANCI Tryptophan halogenase; OS = Xanthomonas citri pv. fuscans OX=366649 GN=AC612_21640; PE = 4 SV=1
MIPAPLRNIVIVGGGTAGWMAAAAFARVLGPTFKVQLIESEQLGTVGVGEATVPHIKAFNNLLGIDEAEFVRQTQGSFKLGIEFVDWQRPGSTYMHGFGPQIGHPLGLLPFHQYWIKQHARGKAQPLGAYTLNTVAATRGKFMTSAGDVPANSPLANIAYAYHFDATQYAHFLRRYSQQRGVSRIEGLVERVQLHPESGHVQSLQLASGQVVHGDLFIDCSGFGGLLIEQALHTGYHDFTHWLPCDRALAVPCEKVGPPTPYTRSTARAAGWQWRIPLQHRTGNGYVYCSAHISDDEAAATLLANLDGKPLADPRPLRFTTGRRKQCWNRNVVALGLASGFLEPLESTSIHLIQSGISKLLELFPREGISPVLVQRYNDRLAFEFDRIRDFLLLHYHATERDDSAFWRHCRHMPITPELQATLDLFRDSGRFYRNAEEMFAEISWVQVLVGQGILPQGYHPLVDQVPDRDAEGFLASVAQTISHCVDVMPSHQQFIDRYCKAATLP

SEQ ID NO: 90416 - protein, 494 aa, Sphingomonas sp.
  REGION 1..494: note = tr|A0A031HZZ9|A0A031HZZ9_9SPHN FAD dependent oxidoreductase family protein OS=Sphingomonas sp. RIT328; OX = 1470591 GN=BW41_01841 PE=4 SV=1
MTAPRIRRIVILGGGTAGWMTAAALSRALAGQGVAVTLVESEAIGTIGVGEATIPTIHWFNQIIGLDEARFMAETKATVKLGIEFVGWTGAGSRYFHPFGTFGPAGDGAMFLHRLIRGRAEGDTAATEAYSLTAQIARAGRFARPVADRRSLLSTLGYAYHFDAGLYARYLRGLAERGGTQRIAGTVAHVRRHGDSGFVEALTLDDGRVVAGDLFIDCSGLRALLIGETLGVGYDDWSHWLPCDRAWAAPSAPELRPTPFTRATAAEAGWRWRIPLQHRVGNGYVFASRFQDEEAARASLLAGMDGPATAEPRLIRFTPGLRRQAWRGNVVAIGLASGFLEPLESTSIHLIQSGIAKLLSLFPAADCSPLLARQFNRVFAQDTHDIRDFLILHYRATQGRTEPMWRERQTMAIPDTLAERLDHFRSSGRIVLTSDELFREASWFAVLDGQGERAGDYNPLIGAQSRDDTLAGLAAVRAEIARTAATLPPIGAGR

SEQ ID NO: 90417 - protein, 546 aa, Streptomyces sp.
  REGION 1..546: note = tr|A0A142I756|A0A142I756_9ACTN Tryptophan 6-halogenase OS=Streptomyces sp. FXJ1.172 OX=710705; GN = ThnH PE=4 SV=1
MSTRTDSHLDTHNDTRNDTRIQKVVILGGGTAGWMTAAYLGKALQNTVQITVLEAPSIPRIGVGEATIPNLQRAFFDYLGIAEEEWMRECNASYKMAVKFINWRTPGEGSPSPRTVDGHPDTFHHPFGLLPSADHIPLSHYWAAKTLRGETTEPYDHACFVDTAIMDARKAPRWLDSRRATNYAWHFDAQLVADFLRTFAVTKQAVEHVEDEMTEALTDERGYLTALRTKSGRLLDGDLFIDCSGFRGLLINQAMGEPFLDMSDHLLCDSAVATAVPHDDETHGVEPYTSSIAMPAGWTWKIPTLGRFGSGYVFSSRFADRDQATAEFARLWGLDPEQTPFNHIRFRVGRNRRAWVRNCVGIGLASCFVEPLESSGIYFVYAAIHMLAKHFPDRTFDPVLVDRFNREIQDMFDDTRDFLQAHYYFSPRTDTPFWRANKELELADGIKDKAETYRAGLPVNLPISDEGTYYGNFEAEFRNFWTNGSYYCIFAGLGMLPRHPLPSLAHKPESVARAEQLFADIKRKQHEWVRSLPSTHQLLRHLHGAS

SEQ ID NO: 90418 - protein, 521 aa, unidentified
  source 1..521: note = Planctomycetaceae bacterium
  REGION 1..521: note = tr|A0A2E8B4X4|A0A2E8B4X4_9PLAN Uncharacterized protein OS=Planctomycetaceae bacterium OX=2026779; GN = CMJ62_20425 PE=4 SV=1
MIDSQNGNRDPQGNRRIRRIVVMGGGTAGFLTAITLQRKLPDISVQVVRSTKMGVIGVGEGTIVTIIKFLHRYLGLNSQRFHERAKPSLKLGIKYLWGERPFFHYTFSTQLSNPDSQLSLPRGYYCDDSFDFADLSSALMLHDKVCLKRIDGRPKLGGGFSYHLENRTFVGYLEEVADECGIPKIDDVVTGVEQDEEGIKSLILSSGQRVEGDMFVDASGFSAELVGKALGEKFVDFKQALFCDRAVVGGWERTDESYHPYTVAETMDAGWCWQIEHDDVINRGYVFSSDFISDDQAEAEYRRKNPRVDRANVIRFPAGSRRNPWIKNVVAIGNSSGFVEPLEATAIGTICDSVAHIIRALKASDGFMLPIQRDIYNRVSRKNWEIIRDFLAIHYKFNRRLNTPFWQAARHDVDIGSASNIVEYFKAVGPDFRLLEYDMKRNFFTNEGYFAMLVGQRVPYQRKVSISPMEKKHWQSYKQEISQVAQGGMNMDECLADLRQHGLPADALDMDDSDFGGLRWQ

SEQ ID NO: 90419 - protein, 501 aa, Colwellia sp.
  REGION 1..501: note = tr|A0A2G2EN51|A0A2G2EN51_COLSX Tryptophan halogenase; OS = Colwellia sp. OX=56799 GN=COA35_05180 PE=4 SV=1
MNDANNIRSIVIVGGGSAGWMTASALAKVIGCDNCQITLVESADIGTVSVGEATIPQIQLFNTILDIDESEFIRFTNATFKLGIEFIDWKEKGHRYFHPFGNYGTNMEALPFHHFWLKMQNEPAFSNLSNYSLASVGAYANKFMHPSTQQNSPLAGINYAYHFDATLYAKFLRNYATSRGVCRIEGKVDEVNLNPVSGEIESLVLNDNTVLDGDLFIDCSGFKGLLIEQALKTGYEDWTHLLPCNKAIATPCLSKKALNPYTQSTAQSAGWTWRIPLQNRVGNGYVYSSEFMSDDKAHALLLNTIESEALADINQLQWVTGMRKKSWNKNCIAIGLSAGFVEPLESTGLHLIQSAIAKLMTLFPSKDFTQCDIDLFNQQTETEYHRIRDFIILHYKLTNRDDSEFWRYCKNIEMPDSLKQKIEMFSENGRIFRHDNELFNETSWLAVMHGQGIKPKSYHPLVDRLSRDEIKRRLKNIESVISRSADVMPDHEAYILKNYTR

SEQ ID NO: 90420 - protein, 543 aa, Marinobacter sp.
  REGION 1..543: note = tr|A0A2T4DYL2|A0A2T4DYL2_9ALTE Tryptophan 7-halogenase OS=Marinobacter sp. Z-F4-2 OX=2137199; GN = C9993_05800 PE=4 SV=1
MNKRRKILIVGGGSAGWMAAAYLNAALNQRGENSRVDIELLESPDTPRISVGEATIPSMKHLLAAIGINEFDFMKACDATFKQSIRYTNWVHNDKSFYHHPFSSMRIHPLERAGLDWLASDQSIPFMETCSAQPIICEWGLSPKMLGEWDMGAPLNYAYHMNAQKFADYLRDFSTARGVVHTLENMVEVKKASDDRIGSITTDKGREIEADIFVDSTGFSALLIEKQMGVGFEDCSQYLLCDRAVTMHVPYDTHFPGMVRPYTSATALSNGWVWDIPMSNRRSVGYVHSSAFISKEDAERELRAYQGGNTDNLDARFVPFKVGRRKQIWSGNVIAIGLAGGFIEPLESTGLYLSDLGAVLLAEHFPWDEHGMEVLASRYNRVMSNRFYEILDFINMHYCLTKRTDTEFWRTVQQPEHINDRLKAKFEFWKVKPPTQHDFQDQWFMGMSQQPQAAELTGGDMRPAVDTGGLWNHESYECILYGMEFLKDECDRWFGTNRPPTKVHPAIIQRLQQARQKLPPHHIWLHRVMGMQPYQTAYRPHGW

SEQ ID NO: 90421 - protein, 547 aa, unidentified
  source 1..547: note = Dehalococcoidia bacterium
  REGION 1..547: note = tr|A0A3C0JNB9|A0A3C0JNB9_9CHLR Tryptophan halogenase; OS = Dehalococcoidia bacterium OX=2026734 GN=DCL97_03550; PE = 4 SV=1
MTAHEQSPDVVVIGGGPAGSTAATMLARQGVSVLLLERERFPREHIGESLLPASIPILEELGVLPAVEAAGFLTKWGATMVWGSDPTPWSWYFRETNQRNPHSYQVWRPQFDQLLLENSRAHGVDVREGHRVLEVLWQDGKATGVRYQSDDGETGTIQCRYVVDASGQTGLLARDLNLRQWDPFFQNLAVYGYFRGAHPLPEPDETNIFIEAHPHGWLWSIPLHTGWTSVGAVVDSATSQNEISTGSLDGFLQAQIDQAPHTSKMLRDAHLESGPFIVKDWSYVCERVAGDGYVLAGDAACFVDPLFSSGVHLALMSGIMAAAYVTSALKDPEIVEAAAAAYHELYLKEYGHFREMARLFYSSNLTSDSYFWEARRLLEDAGNFTPRQAFIQAVAGQPPRGYERAVLEQGQAPLEFASSVRQVESERERRRVRWEAALSGTDNGDPIMAAVPRLAPETQIQRKPVLGAGEFVWGTVLTTVSQPEGIPCSGLISAMVSQIDGARTVAQLLDELASLGEPSQADQIRQTALAALGILYVDGTVEELGGL

SEQ ID NO: 90422 - protein, 516 aa, Streptomyces sp.
  REGION 1..516: note = tr|A0A429UFP7|A0A429UFP7_9ACTN Tryptophan 7-halogenase OS=Streptomyces sp. WAC05374 OX=2487420; GN = E2B92_17520 PE=4 SV=1
MLNNVVIVGGGTAGWMTASYLKAAFGDRINITLVESGNIGAVGVGEATFSDIRHFFEFLGLKEKDWMPACNATYKLAVRFENWREKGHYFYHPFEQMRSVNGFPLTDWWLKQGPTDRFDKDCFVMASVIDAGLSPRHRDGTLIDQPFDEGADEMQGLTMSEHQGKTQFPYAYQFEAALLAKYLTTYSVERGVTHIVDDVREVSLDDRGWISKVRTAEHGDLTGDLFIDCTGFRGLLVNQALEEPFISYQDTLPNDSAVALQVPMDMERRGILPCTTATAQDAGWIWTIPLTGRVGTGYVYAKDYLSPEEAERTLREFVGPAAADVEANHIRMRIGRSRNSWVKNCVAIGLSSGFVEPLESTGIFFIHHAIEQLVKNFPAADWNETHRDLYNSAISHVMDGVREFLVLHYVAAKRNDTQYWRDTKTRKIPDSLAERIEKWKVQLPDSETVYPYYHGLPPYSYMCILLGMGGIELKPSPALALADGAAAQREFEQIREKTQRLTQVLPKAYDYFTRLS

SEQ ID NO: 90423 - protein, 521 aa, Xanthomonas citri; identical to SEQ ID NO: 86409
  REGION 1..521: note = tr|A0A2H1S9G0|A0A2H1S9G0_XANCI Tryptophan halogenase; OS = Xanthomonas citri pv. fuscans OX=366649 GN=prnA PE=4; SV = 1

SEQ ID NO: 90424 - protein, 544 aa, unidentified
  source 1..544: note = Dehalococcoidia bacterium
  REGION 1..544: note = tr|A0A2E5LZL3|A0A2E5LZL3_9CHLR Tryptophan halogenase; OS = Dehalococcoidia bacterium OX=2026734 GN=CL897_06810; PE = 4 SV=1
MRDNEYDTDVVVVGGGPAGSAAATMLSRKGWGVRLYERNQFPREHVGESLLPASMPILAELGVLPAIEAAGFLPKYGATMVWGREPDPWSWSFRESSPRYPHAFQVVRAQFDEILLRNASKNGVDVRERHRVLYADAGPSGANLRIEDDALREHTIRARFVIDASGQSGLIAHARSLRKPDPFFHNLAIYGYYTGGARLPEPDANNILIESIKDGWLWVIPLHTGLASVGVVVDSSFGRKQIAKLGVQAFFREQIANGPHTSTLLEDATLTTNPTVVRDWSYTSGELAGEGFVLAGDAACFVDPLFSSGVHLALSSGVLAAAYVTSALTDPKLGRAAAAVYSENYLQQYHHFRELARLFYSSNRTVDSYFWETRRITGADDSTPSRLAFIRAVAGQPPAGYERAVLAHGETPRSFSEAVTAIEGYREARGTSFDKRFGSDFPLLLTSRPSLVPETRLEQKPVAGEGEFTWGQVIITPERAEGVPVSTLVALVVAQIDGKRTVNDLFERLRERIPQETLDQLRPGIAQALRLLHVEGVIANFDDG

SEQ ID NO: 90425 - protein, 501 aa, Brevundimonas sp.
  REGION 1..501: note = tr|A0A2D8FLS4|A0A2D8FLS4_9CAUL Tryptophan halogenase; OS = Brevundimonas sp. OX=1871086 GN=CL682_03000 PE=4 SV=1
MRQLKKILIVGGGSAGWMAAALFSRLFRGLYDITLIESEAIGTVGVGEATIPAIKTFNALINLDEADFMRRTQASFKLGIQFNDWDRIGASYIHGFGVIGRDLEWLRCHQYWLKMRAAGRASDFAAYSINTAAALQNRFMRADPQRNGSPLGHIAHAFHFDAGLYAKYLRGLSEAAGVRRREGKIASVQLRPDDGFVQSVTMEDGAVEAADLFIDCSGFRGLIIEEAMKTGYEDWTHWLPCDRALAVPCARTEPFTPYTRATARPAGWQWRIPLQHRTGNGHVYSSRYMDEAEAERILLSNLDGEQLAEPNRIRFVAGKRRQVWNKNCVAAGLASGFLEPLESTSLHLIQSVLTRLVRLMPDGGFDPTTIAEFNRQMDFEYERIRDFVILHYKATYRDDTPFWRDCRDMAVPDTLQRKMDLFRANGRVFREDDELFTEESWIQVFLGQGVIPAGYDPLVDVTPEAEIERFLNDVETVIGKCVAVMPSHADYVARVCSAVAA

SEQ ID NO: 90426 - protein, 431 aa, Pseudomonas syringae
  REGION 1..431: note = tr|A0A0N0X4J6|A0A0N0X4J6_PSEYM Tryptophan halogenase; OS = Pseudomonas syringae pv. maculicola OX=59511; GN = ALP13_103222 PE=4 SV=1
MKPIVILGAGPAGAAVALGLRRLGYPVTLVSEWRRFAALEGVSVRVLDALRGAGLHQALTDAAQPSQRQVSWNGQQHAQNIEFLLDRPSFDRGLREDLRLAGVELIEGRVLTVQPHASAHRIELQGRDALLADFLVEARGRQAPALGKGLRGPETVSLLNRWQGAPGTNASAVESPADGWAWMARRADGQCYWQWTVDVASAELPGKALLLDYCRQRFQQSALTQAFFGGEPQTDLHLHARSSTAILCPQVCGDHWIRVGDAAMAVDPLSGNGIFQSLSSALQAPAVINTLLRKPERRLLAQRFHQQRVEQLFLRFARIGRDFYADEQRWSNQPFWQARRQWPDAEVAHAGADFSTLRIELAPVLRDGFVDEAEVVITADQPLGIWHVQGVELAPLVRRLRSEPAERVLAGLTVEQGRMVRGWLLAQGFRP

SEQ ID NO: 90427 - protein, 503 aa, unidentified
  source 1..503: note = Gammaproteobacteria bacterium
  REGION 1..503: note = tr|A0A2E6PFY1|A0A2E6PFY1_9GAMM Tryptophan halogenase; OS = Gammaproteobacteria bacterium OX=1913989 GN=CMQ06_02270; PE = 4 SV=1
MKVKSIVILGGGTAGWMTANALQKKWQHLGINITLVESPDIGIVGVGEGSTPKLKHFFDSLGIKESEWMPECNATYKNGISFKNWSTVSGYEEYFHPFGCSLDFVTLKFLYDNATLRRKGVDVIAHPNRFSLMASLAEKKLAPIASKNFPFHFQYGYHFDSVLIGKFLQKKAAEVGGINHIQATVKSVELNSNGDITSLKLNNDQILSGDFFVDCSGFASILLEKTLKVPFISFSDNLFNDSAITIPTEIEPNIPSQTVSTALTNGWVWRIPLTNRIGNGYVYSSQYCTQDEAEKELRAHLGVLESDIEARHLKMKVGRAKESWRNNCVAVGLSQGFIEPLEATALQFVISTIEEFATAFEEGGFTHQFKELFNRRMNMNFEGIRDYIVLHYKTNSRSDSQYWIDNRENKNIPNNVKDMLGCWYNIQSLEDELKRLNIGSYYTKMSWNCMLSGMGLFPPKESLTSADAQTAQADLEFVDKFIGGCSMNFKPHKKMLIGANTST

SEQ ID NO: 90428 - protein, 506 aa, Xanthomonas citri
  REGION 1..506: note = tr|A0A220WBU4|A0A220WBU4_XANCI Tryptophan halogenase; OS = Xanthomonas citri pv. vignicola OX=473426; GN = XcvCFBP7111P_01010 PE=4 SV=1
MIPAPLRNIVIVGGGTAGWMAAAAFARVLGPTFEVQLIESEQLGTVGVGEATVPHIKAFNNLLGIDEAEFVRQTQGSFKLGIEFVDWQRPGSTYMHGFGTQIGHPLGLLPFHQYWIKQHARGKAQPLGAYTLNTVAATRGKFMTSAGDVPANSPLANIAYAYHFDATQYAHFLRRYSQQRGVSRIEGLVEQVQLHPESGHVQSLQLASGQVVHGDLFIDCSGFGGLLIEQALHTGYHDFTHWLPCDRALAVPCEKGGPPTPYTRSTARAAGWQWRIPLQHRTGNGYVYCSAHISDDEAAATLLANLDGKPLADPRPLRFTTGRRKQCWNRNVVALGLASGFLEPLESTSIHLIQSGISKLLELFPREGISPVLVQRYNDRLAFEFDRIRDFLLLHYHATERDDSAFWRHCRHMPITPELQATLDLFRDSGRFYRNAEEMFAEISWVQVLVGQGILPQGYHPLVDQVPDRDAEGFLASVAQTISHCVDVMPSHQQFIDRYCKAATLP

SEQ ID NO: 90429 - protein, 493 aa, Glaciecola sp.
  REGION 1..493: note = tr|A0A2Z6UAX8|A0A2Z6UAX8_GLASK Uncharacterized protein OS=Glaciecola sp. (strain KUL10) OX=2161813; GN = KUL10_05190 PE=4 SV=1
MENIKPIKKIVIAGGGTAGWMAASLFNHHWAKYGVEVSVIESPQIGIIGVGEGSTPSLKRFFYNLGIAENEWMPACHATYKVNIQFEGWSPRSGISRYGHPFISQIDTFSEKHFYTNCYTRRLGLDVNTYPDDFLLCGWLAKLKKSPITPVHFPFVVEYGYHFDSALLGQFLCDRAKKLGVQNIQANIESVELAKNGHIKNLKLDSRQTIEADFFVDCTGFNSLLMQKALNVGFIPYKSNLFNDAAVAMPSKVIKQPLPQTKSTALSNGWVWQIPLQHRTGNGYVYASDYISKDQAETELRSHLGLLESDAEAKHLRMNVGQVKQHWARNCLAVGLSQGFIEPLEATALHLTQEAIECFIDKFESANFTNDNQTDFNSEMSERYERVRDYIVAHYKLNSRDDSAYWRDNRANMNLSESLLSLLTVWYRKGDIGAEIKRQNIQSHFGVTSWHCMLAGYGAFPALAREQPGKGDMYANEGLANFFKSCCLNFESL

SEQ ID NO: 90430 - protein, 496 aa, unidentified
  source 1..496: note = Marinicaulis flavus
  REGION 1..496: note = tr|A0A2S7K0T6|A0A2S7K0T6_9PROT Tryptophan halogenase; OS = Marinicaulis flavus OX=2058213 GN=CW354_17095 PE=4 SV=1
MHDQRVKKVVIAGGGTAGWCAAAALTSQLGPLIDVTLVESEDIGTVGVGEATIPTIRTFHHLLGIDERAFMRATQASFKLAIMFENWARLGDRYLHSFGQIGKPTWMGGFHNVWLQARAEGLAGEIGDYCFEHEAAKAGKFFTSPEAKINYAYHLDAGLYGRFLREFSETKGAKRIEGKIQEVEQRPDDGFISALVMESGERVEGDLFIDCTGFRGLLIEQTLKAGYEDWSHWLPTDSAIALQTASVGPAPPYTRASAHEAGWRWRIPLRHRVGNGAVFCSRYLSDDEARAYLLGAIDGEPITEPRLIRYRTGKRRKAWIKNCVALGLSSGFVEPLESTSIHLIQIGLTRLIQLFPFSGCHNALVRRYNEQADVELERVRDFIILHYKLTERDDSPFWRRCRDMEIPDTLAQRIALFRDDAYAYQGPEDLFRVDSWLQVMLGQRLEPQGRHHLGRLMTREQMQGALDSLKNNIADAVAKMPDHQTFLEQYYPPAEA

SEQ ID NO: 90431 - protein, 525 aa, Aestuariibacter sp.
  REGION 1..525: note = tr|A0A506RLQ3|A0A506RLQ3_9ALTE Tryptophan 7-halogenase OS=Aestuariibacter sp. GS-14 OX=2590670; GN = FJ444_09240 PE=4 SV=1
MNAPIQQVVIVGGGTAGWLCAGMLAAKLGKQGERQRGIEITLIESPDVSTIGVGEGSWPSLRDTLREIGLSESAFITHCQASFKQGSTFVGWRDGSEHDRYHHPFTNPAGYTEIDVHACWQALHSNKPYDRAFSVQPELCEQHKAPKQLATPDYAYVLNYGYHFDATRLAEMVSDHCVNQLGVRHVKAHIEQVVSHQNGDIKAVTTQCGQTLEGELFIDCSGQSALLAGKHYNVPWHSVKDILLNDSAMAVQVPYHEQDNTIASTTLATAHPQGWSWDIGLQHRRGVGMVYSSDFASADDIEQSLKRYLTKRLPHDVVEQATCRQLHFSPGYRTEFWTHNCLSLGMASGFIEPLEASAVAMVELGVRMLCEQFPQNRDHMRILAARYNERFAYRWARVIDFVKLHYAINQRINDAYWNAHRDPATWPDSLKTLLSLWQYQPPSRYDVVQNEEIFPSASYQFVLYGMGFKTQSPTLADASDMLKRADAISQKLQATLLQFSQGLPDNRALLNAIRERYQHLSGAPL

SEQ ID NO: 90432 - protein, 522 aa, Streptomyces sp.
  REGION 1..522: note = tr|A0A1C4SQ52|A0A1C4SQ52_9ACTN Tryptophan halogenase; OS = Streptomyces sp. di188 OX=693491 GN=GA0115245_144118; PE = 4 SV=1
MSKSVVIVGGGTAGWMTASYLKAAFGDRLAVTLVESRNVPTIGVGEASFSTIRHFFAYLGLEESDWMPECHATYKLGIRYDNWRAEGHHFYHPFERPRTVEGVSLADWWLRKKPSADYDRDCSVIAALCEAKSSPRQFEGGLLTLGAGEQDPAAVGRSTMAQQTTQFPYAYQFDATLLAKLLTGYGTDRGVRHVLDDVVDVAVDEHGDISHVRTKESGDLSGDLFVDCTGFRSLLLNKKLGVPFLSYQDTLPNDSAVALRVPMEMADQGMGPYTRASAQAAGWIWTIPLYGRTGTGYVYASDYCTPEEAERTLRAYVGPAAEDLEANHIRMRIGRSENSWVNNCVAIGLSSGFVEPLESTGIFFIQNAIEQLVKHFPGGREDEQLRVSYNRQVAHVMDGVREFLVLHYVAAKRNDNAYWRDAKTRTMPDALAGRIEQWKVKLPDEDTIFPYYHGFEPYSYTAMILGLGGLDVQPLPGLALMDDIAAVKELQLVRDQARSLVETLPSHADYIAHVHRRRTASA

SEQ ID NO: 90433 - protein, 510 aa, Asticcacaulis sp.
  REGION 1..510: note = tr|V4NUA0|V4NUA0_9CAUL Uncharacterized protein; OS = Asticcacaulis sp. YBE204 OX=1282363 GN=AEYBE204_06620; PE = 4 SV=1
MSAAPLSSVVIVGGGTAGWMTAAALARHLSGTSVRIRLIESSAIGTIGVGEATIPTIRHFYRSLGLSDAEVIRDTAATVKLGIGFVDWREKGHDFIHPFAGYGQDFRNGFDGDDIGFHHVLNRLRAEGTPHDLERYSLCVQLARAGKFAFAPDPAPFNGAFYDWALHLDAGLFADLLRRHAEGAGVERIDAKVEQVVLHPETGFIDHLALDTGESVPGELFIDCSGFSALLIEKALGVGYESYADRLFCDRALAVQSESRTIDTPYTKVTARDAGWTWRIPLQHRTGNGFVYSSRHTDDETALRDLKAGIPDPLLFEPRPLRFTPGRRHRAWVKNCVAIGLSSGFLEPLESTSIALIQTGIEKLKQLFPDHGFNPILAEEYNDMSQREFERVRDFLVLHYRSTRRTDTAFWRDCQAVALPDTLRHKIELYKARGHFVRYRWEMFHPQSWLAIYDGFGIVPEGVDPAAQALSRTDIDGALSQMRDYIDRTVARAPRHADFIAWCLLQGKAA

SEQ ID NO: 90434 - protein, 506 aa, Xanthomonas campestris
  REGION 1..506: note = tr|A0A2S4JIW1|A0A2S4JIW1_XANCA Tryptophan halogenase; OS = Xanthomonas campestris OX=339 GN=TR80_17920 PE=4 SV=1
MIPAPLRNIVIVGGGTAGWMAAAAFARVLGPSFNVQLIESEQLGTIGVGEATVPHIKAFNNLLGIDEAEFVRQTQGSFKLGIEFVDWQRPGTSYIHGFGTQIGHPLGLLPFHQYWIKQQLRGKAQPLGAYTLNTVAATRGKFMTSAGDVPANSPLANIAYAYHFDASQYARFLRGYAEQRGVTRLEGLIEQVQLDAHTGHVQSVQLASGQVVSGDLFIDCSGFRGLLIEEALHTGYHDFTHWLPCDRALAVPCEKVGPPTPYTRSTARAAGWQWRIPLQHRTGNGYVYSSAHISDDEAAATLLANLDGTPLADPRPLRFTTGRRKQFWNRNVVALGLASGFLEPLESTSIHLIQSGISKLLELFPREGISPVLVQRYNDRLAFEFDRIRDFLVLHYHATERDDSAFWRHCRTQPITPELQTTLDLFRDSGRFYRNAEEMFAEISWVQVMVGQGILPQGYHPLVDQVPDTDAEGFLASVAQTISHCVDVMPTHQQFIDRYCRADPMR

SEQ ID NO: 90435 - protein, 498 aa, Xanthomonas campestris
  REGION 1..498: note = tr|A0A3R7D009|A0A3R7D009_XANCA Tryptophan halogenase; OS = Xanthomonas campestris OX=339 GN=XcmpCFBP7700_04345; PE = 4 SV=1
MTQARIRKVVIAGGGTAGWVAAAALAHQFRGLLEIVLVESEQIGTIGVGESTVPPIRAFHRFLQIDEQEFLRAVAGTFKLAISFEGWQGQGDRYIHPFGSTGQGTLVCAFHHFWLEAQRRGMHSGFDEYCLEAQAARADRFAVLQQPAVNYAYHLDAGLYARFLRTHAQRYGATRIEGKIQQVRQHADSGFVEALVLEDGQVVEGDLFIDCTGFRGLLIEQTLHTGYEDWSHWLPCDRAVAVQTESVEPPVPYTRAIAHAAGWRWQIPLQHRVGNGLVYARAHLSDDEASAMLLAAVQGTPRRDPMLVPFVTGRRLQTWNKNVVALGLASGFVEPLESTSIHLAIVAVMRLITLFPADGIAQPQVDLFNRISRAEAEHVRDFVILHYHATQREEALWRQCRAMELPESLQLRLRAWREGAHAWQEGDELFRVDSWTHVLLGQGIAPAQHHPLTRALPDQHLQQLLDGIRQPLQHVVTQLPTQQAFIDNYCKVDQSTWG

SEQ ID NO: 90436 - protein, 503 aa, Aestuariibacter sp.
  REGION 1..503: note = tr|A0A506RCM4|A0A506RCM4_9ALTE Tryptophan 7-halogenase OS=Aestuariibacter sp. GS-14 OX=2590670; GN = FJ444_14710 PE=4 SV=1
MNHSQPNHSAQATKPHVVIAGGGTAGWMTAAALVKKLGPLIRITLVESSDIPTIGVGEATIPPLRVFHQLLGINEADFMRATSATFKLGIEFASFGKLNQRYIHSFGQTGQSSWLAEFIHFWREGLDRGIATDYGSYCLELAAAKANKFYTSAQNAPLNYAYHLDAGAYATFLKRLSVQAGVKHVVDTIEQVTLNDTGNIDALKLAQSGNLQGDLFIDCTGFRSRLMGEALNVGYEDWSHWLFCDRALAVQTELAPPLKPYTVASAHRAGWRWEIPLQHRMGNGFVYSSQFLDDHAARDTFSKALSNKPLQEIRALQFTTGRRLKAWHKNCVAIGLSSGFVEPMESTSIHLIVMGITRLMQLFPYSGNTQHLQDEYNAQTQTELERIRDFIVLHYHVTQREDSAFWRACKNMRIPDSLAERIELFTEHGHAFQKASELFRVDSWSQVMLGQGILPQNWHPAAKMMSDEQLAGALKKGQMEISQRVAQLPEHGAFVGQYCGIGM

SEQ ID NO: 90437 - protein, 507 aa, Aestuariibacter sp.
  REGION 1..507: note = tr|A0A506RWJ3|A0A506RWJ3_9ALTE Tryptophan 7-halogenase OS=Aestuariibacter sp. GS-14 OX=2590670; GN = FJ444_00425 PE=4 SV=1
MVTHPQHICIAGGGTAGWMTAAALANRLPRSHYRITLVESAQIGTVGVGESTIPHIRQFNDALGIAEDEFIAATSATCKLGIEFTHWGKQGDSYIHPFGELGKPLAGIEFHHLWQAASLQGLDVPIESFSVAAVAARQRKFSPPHASPEQLLSTYTYAYHLDASAYARFLCEYAEQRQVERVETQIREVKRAHQGGPITALSLDNGQEIIADWYIDCTGFRSLLIGDYPQAEFIDWSEWLKTNRAVVLPCEKDGPSRPYTKAMARDAGWQWQIPLQHRIGNGYVFCSDYISDEEAEHTLRSTLPGEALAEARFLDFKAGCRKQLWVENCVAIGLSAGFLEPLESTSIFLIQMGIAKFLEHLPGAHTHAGRNQYNRELTEQYQVIRDFIILHYYLTQRHDTPFWRDCQAINIPDSLTELIAAFRECGLVDKQQYGLWPAVCIGQHLHPKHVDSRVAAIPPQQLIGMLNQLKSDIAAQVATLPNMDDYLLSLVARTPLQKSGMQAGERV

SEQ ID NO: 90438 - protein, 520 aa, Xanthomonas campestris
  REGION 1..520: note = tr|A0A419NVU0|A0A419NVU0_XANCA Tryptophan halogenase; OS = Xanthomonas campestris OX=339 GN=XcmpCFBP7700_20230; PE = 4 SV=1
MHAPVPSESQRLVRRVVIAGGGTAGWMAAAALSKLLGRQLQITLVESDEIGTVGVGEATIPSLVTFHRLLEIDEAQFMAATQATFKVGIAFEHWRDVDRHYIHSFGHTGTDHWSAGFQHFWLKARARGVARDFGDYCLELRAAQEGRFAHLPNGGMNYAYHLDAGLYARFLRRFSEGFGVQRIEGRIGSVQTDAHSGDIAALVLDDGTRIEGDLFLDCTGFRALLIGQTLGVGSEDWSRWLFADSALAVQTESVGAPVTFTRARADRAGWMWRIPLQHRVGNGIVYSSRYMDQDSAAQVLEHNLQGRALTTPRALRFTPNQRHRVWEKNCVALGLASGFLEPIESTNIHLIQRGIVRLLQTFPQVIDPVDIAEYNRQAAEEIAHIRDFVILHYHATDRRDTPFWRDCAGMDIPDSLRHRMELFRQSGRVFHQGNELFAENSWIQVMLGQGIVPRHHHPVADLMGDAELSQFLEGIRQRVEATLARLPPHAEFLRRYCPAPALPAPLPQPAPGTPLAAPAA

SEQ ID NO: 90439 - protein, 491 aa, Aestuariibacter sp.
  REGION 1..491: note = tr|A0A506RTP8|A0A506RTP8_9ALTE Tryptophan 7-halogenase OS=Aestuariibacter sp. GS-14 OX=2590670; GN = FJ444_02455 PE=4 SV=1
MSEQPLNIVIVGGGTAGWMTANLLAKRWQHKAVKITLVESPDIGIIGVGEGSTPTLKRFFDDMQIAESDWMPACNATYKVSIRFDGWSPESGVNSYAHPFIGQLDTFSERAFYVNCMTRRLGLDVNVKPEDFLFNGWLANYYRSPKTPANFPFRIEYGYHFDSGLLGGFLQRYAQTQGVTHKALKITGVKYHPSGDIKELHTAEGQTIQGDVFIDCSGFRSLLLQQTLKVPFQSFGNNLFNDSAVVCATAPLTPLPVETRSTALSAGWAWQIPLTNRTGNGYVYSSAYLDPEQAEAELCKHLGLNRENTQIRHLKMNVGQVSEHWFKNCVAVGLAQGFIEPLEATALHLVQTSVEIFMDHYEKGGFSDQYRHAYNAVIRERFERVRDYIVAHYKLNTRNDSEYWRANRNNEALSESLLQLLDVWFRRGDLQQEIQRQKLDSHFGATSWHCLLAGYGAFPRLAANQPNTGDLYKEHNLETFFSGCLLNFAAQ

SEQ ID NO: 90440 - protein, 505 aa, Aestuariibacter sp.
  REGION 1..505: note = tr|A0A506RI03|A0A506RI03_9ALTE Tryptophan 7-halogenase OS=Aestuariibacter sp. GS-14 OX=2590670; GN = FJ444_12715 PE=4 SV=1
MSEHSIKKIVIVGGGTAGWMAAAAMSKLLNDNSITIQLIESEEIGTVGVGEATIPHILYFNRLLGINENDFVKFTNGTFKLGIEFVDWGQTGESYIHPFGPYGMDMEGIHFHHMWLRQQKMGQAKPIDEFNLQILAAQANKFQRAQVELQGSPLSTIAYAFQFDAMLYAKHLRGIAEANGVVRTEGKITQVNQHPENGHIASVDTDNGHHIDGDLFIDCSGFKGLLIEQTLNSGYEDWSHYLPCDRAIAVASNKLDELTPFTRATAKSAGWQWRIPLQSRTGNGHVYCSKFMDDDTALQSLYADLNSKPISEPNYLRFKAGIRKKPWNKNVVSLGLASGFLEPLESTSIHLIQTAIARLMTNFPDKLFNQHDIDYYNERTRLEYEQVRDFLILHYKATRRNDSPFWHYCRTMDIPESLHKRIEIYKQNARLYRHDNELFNHVSWFAVMHGQGIQPERYHPIADILSEDELHRRMEEIHTVTGKCLQVMPGHEDFIAKHCKANLPV

SEQ ID NO: 90441 - protein, 521 aa, Aestuariibacter sp.
  REGION 1..521: note = tr|A0A506RGR6|A0A506RGR6_9ALTE Tryptophan 7-halogenase OS=Aestuariibacter sp. GS-14 OX=2590670; GN = FJ444_12725 PE=4 SV=1
MARHQTVSRLCLRWHQQRRGAISMPGIKRIVIAGNGLAANMTALALQQQLPPDITLTLVSSAKHAELDCLYGSISAPHLYPFHLTLGVSEPDLLFNTNSTFCWGNYFDRWAMTPCSWLQGFHLPFPAMRGVGLHHFVTRHGETELATYLINAQADKTGKFAHPPEDNRHPLSRAEYGYQFDASALSALYASKLSSKVTVINASISEVATDTGDISITSLQLDNGQRIEADLYIDCSGPDAKVYSTLEQNNQASKSQVENARTLFAIHSTLQRGETLPTHRHIRAREFGWQADTYLRDSIQRLTVCSPEQKSQAIDAHGAQASIAMAFSAGHRQQAWTGNCVAIGQAASVIEPLTPAPLMMLMRDIQRLLELIPVTNTMLAEATEYNRRFIADIEHTGLFQGALFAFEHRQDSLPEHAYWQQAAQSVQSEKLTRKLTQYNHRGMLVSYDLEPFNEQDWLMLHSGMQRRPQTYDIVADQVPRAEMANQLNGMGNVIQQVVSQMPPHAIYLEKLMAYLSQKRSQ

SEQ ID NO: 90442 - protein, 496 aa, Sphingomonas sp.; identical to SEQ ID NO: 85878
  REGION 1..496: note = tr|A0A0Q4LR11|A0A0Q4LR11_9SPHN Tryptophan halogenase; OS = Sphingomonas sp. Leaf42 OX=1736219 GN=ASE97_11240 PE=4; SV = 1

SEQ ID NO: 90443 - protein, 562 aa, Alteromonas sp.
  REGION 1..562: note = tr|A0A3S5BF41|A0A3S5BF41_9ALTE Tryptophan halogenase; OS = Alteromonas sp. 76-1 OX=2358187 GN=ALT761_04075 PE=4; SV = 1
MSNQPIKHVVIVGGGTAGWLCAGVLAARLGKRISNRTNTNSNNPNHAQNIGEESAIHITLVESPNVPSIGVGEGSWPSLRDTLQEIGIKEADFLTCCHASFKQGSTFAGWRNGHQDDKYQHPFTTPTGYTELDIHRCWQQFFSSESFEQSFCLQPEICDAGLAPKQSTTPEYAYVLNYGYHFDATALATLLTNHCKNNLGVKHTQAHIANVVAQDNGDIESLVTENGDTIKGDLFIDCSGQQGLLIDKHYHVPWHSVSSVLLNNRAVAVQVPYGSSDLSASADTIASTTIATAQTCGWTWDIGLQHRRGVGLVYASDYASEENAESILREHLAKGLPQSEIENLTYRHLQFDPGYRKQFWVNNCIGMGMSAGFIEPLEASAIAMVELGIRMLCDQFPQNRQHMSHVATRYNQRFTYRWERVIDFLKLHYVLSEREEPYWLAQRSESSIPDSLNALLDLWQYQAPSRYDLIENEEIFPSASYQYILYGMGFHTTGRQLDKNSNMVKKAFALKQSLQQGKRQLLAGLPTNRDLLSTISHQLEKDTTANNNDKKEGPRHDVIGFR

SEQ ID NO: 90444 - protein, 503 aa, Glaciecola sp.
  REGION 1..503: note = tr|A0A2Z6UAH1|A0A2Z6UAH1_GLASK Tryptophan halogenase; OS = Glaciecola sp. (strain KUL10) OX=2161813 GN=KUL10_32590; PE = 4 SV=1
MNQYQSNPQSVKRVVIAGGGTAGWMTAACLSKLIGKNIDVTLVESDNIATVGVGEATIPPIRTLHKLLGINEQEFIRETNATFKLGIEFSNWRENEHSYIHSFGMTGKECWAGEFHHFWLRGLEKGITHDFGDYCFELQAAKQNKFGISNQQAINFAYHLDATAYAKYLRKFSEALGAKRVEGKIKYVQKHPQNGFISALALESGAIIEGDLFIDCTGFRGLLIEQALHTGYDDWSHWLPCNTAVTVQTQNTKQPIPYTKSIAHEAGWQWRIPLQHRMGNGLVFCNSFMDIDQATEKLRTSVTGKMINEPRQINFLTGRRRKGWNKNCVAIGLSSGFIEPLESTSIHLIMTAAVRLMRLFPYSGITQSTVDEYNNKLDSELNSIRDFIVMHYKVTNRQDTEFWRHCNAMEIPDTLRHKLDLFKETGRVFLDDGDIFRVDSWTQVLMGQGMYPQQYHHIAAEMDDNELVRFLNAIRTQVMQSVAQLPSHADFVNRYANAIDKAS

SEQ ID NO: 90445 - protein, 495 aa, Pseudoalteromonas sp.
  REGION 1..495: note = tr|A0A4P9J1E7|A0A4P9J1E7_9GAMM Tryptophan 7-halogenase OS=Pseudoalteromonas sp. 16-SW-7 OX=2583375; GN = FFU37_08350 PE=4 SV=1
MTKTNAVKNVVIAGGGTAGWMAAAALAKLVGNNINITLVESDDIGTVGVGEATIPPIRTFHKLLGINEQAFMKATQASFKLGISFENWGDENTHYIHSFGATGKECWAGEFHHFWLQGKTLGINNPFGDYCYELQAAKAGKFAFNQQNPINYAYHMDATRYAQFLREFSEPLGVKRIEGKIQKVVKSTKTGHIESLILNNGEHINGDFFIDCTGFRGLLIEQALHTGYEDWSHLLPCNSAIAVQTKSTSDTVLPLTRSIAHKSGWQWRIPLQNRVGNGLVYCSQYMDDEQAKALLLNKIEGEALTEPRIIKFKTGRRLKGWNKNCLALGLASGFVEPLESTSIHLIMSGIIRFMRLFPFNGITNHAIDEYNKQLKSEIENIRDFIVLHYKVTNRDDSEFWQHCSAMEVPKTLQHKIDLFKQTGRVFLDDGDIFRVDSWVQVMLGQGIEPNQHHLIASIMSAEELTRFLHGIKQQIEQRVSQLPSHHEFLKQYCPA

SEQ ID NO: 90446 - protein, 537 aa, Burkholderia lata
  REGION 1..537: note = tr|Q39P61|Q39P61_BURL3 Tryptophan halogenase; OS = Burkholderia lata (strain ATCC 17760 / DSM 23089 / LMG 22485 / NCIMB 9086 / R18194 / 383) OX=482957; GN = Bcep18194_C670 6 PE=4 SV=1
MSNPIKNIVIVGGGTAGWMSASYLVRALQQQANITLIESEAIPRIGVGEATIPNLQKVFFDFLGIPEREWMPQVNGAFKAAIKFVNWRKAPDRSRDDHFYHLFGSVPNCDGVPLTHYWLRKREQGFQQPMEYACYPQPDALDAKLAPCLPDGTRQMPHAWHFDAHLVADFLKRWAVERGVKRVVDEVVEVRLNERGFISSLSTKEGRTLEADLFIDCSGMRGLLINQALKEPFIDMSDYLLCDSAVASAVPNDDARVGIEPYTSSIAMNSGWTWKIPMLGRFGSGYVFSSKFTSRDQATADFLHLWNLSDKQPLNQIKFRVGRNGRAWVNNCVAIGLSSCFLEPLESTGIYFIYAALYQLVKHFPDTSFDPRLREAFNAEIVYMFDDCRDFVQAHYFTTSREDTPFWRANRHDLRLSDAIKEKVERYKAGLPLTTTSFDDATYYETFDFEFKNFWLNGNYYCIFAGLGMLPDRSLPLLRHRPESIDKAEAMFARIRRESERLRTSLPTNYDYLRSLREGAGRSRSQPGQAVAAPEIQ

SEQ ID NO: 90447 - protein, 513 aa, unidentified
  source 1..513: note = Rubellimicrobium roseum
  REGION 1..513: note = tr|A0A5C4N647|A0A5C4N647_9RHOB Tryptophan 7-halogenase OS=Rubellimicrobium roseum OX=687525; GN = FHG71_17530 PE=4 SV=1
MGPARTAPEGLVMAAAGWPERIVVVGGGTAGWLAAMMLSDVAGKKSPGTSVTVIESSKIGVIGVGEGSTAVFRQMLRRFGLDEEEFLRETGATIKFGIRHRDWRRLGHHYDGPIDDPHLVAPGIPLDCYAVAAGKPVQEAHLFQHLIWKRRGPFAEVDGRRVPAGPFHHAFHFDQALVGQWLRKKARGIRHIDDQVTGVEKGGEGIVALHLEGGLRIEGDLFIDASGFRRRLVSEMPFDWISFSDMLPNNRALPFWLDLKDGEEIDPVTGAWAQGHGWMWQIPTQGRFGCGYVYCDAYITPEEAQAEIERTLGHPIEPRGDIRINPGRQRDVWVGNVVAVGLASSFLEPLEATSIHGTIGQLICLTEWLGQPGGKARYNATAARQVDDFRDFVRLHYVSERRDTAYWRDVTASHPPVVTERLEKWSRKFPSREDFEPFPLGLAHVQEQLYVPVLNGLGLLNQDLARAEMARDPKLRQKARETHASLVAEYFRAAERCLPHRAWLESLHKELAA

SEQ ID NO: 90448 - protein, 495 aa, unidentified
  source 1..495: note = Streptomyces hyalinus
  REGION 1..495: note = tr|A0A401Z635|A0A401Z635_9ACTN Flavin-dependent tryptophan halogenase RebH OS=Streptomyces hyalinus; OX = 516124 GN=rebH_1 PE=4 SV=1
MTATYLKQTFRDEVSVTVVESERVGTVGVGEATFSTIRHFFAYLGLEERDWMPSCAASYKLGIRYANWREVGTYFYHPFERLPVLDGFTLDDWWLHLDGDVENFDTSCLLLSALCEANRSPRLLDGSLFTTLLDREIGNANEQRTQFPYAYHFDADLLAKFLTTFGVERGVRHVVDDVVEVRRDERGWIDHLVTTEHGDIPGDLFVDCTGFRGLLINGVLEEPFESFEDVLPNNRAVALRVPADPGREMAPYTSATAAEAGWIWTIPLYERVGTGYVYSDEFCDPAEAERTLRRFAAPDRPDLEANHIRMRIGRNRNSWVKNCVAIGLSSGFVEPLESTGIFFIQHGIEQLVNYFPDRDWDPALAVRYNRSIAEVIDGVKEFLVMHYCAAGREDTPYWKAAKSRAVPEGLAERLESWRTLLPEPDTIYPRFHGFEAYNWKVMLIGLGKAPARPRPALAGLDPSGAMAEFAAIRRQAERLVAELPGCREYVSRLHG

SEQ ID NO: 90449 - protein, 497 aa, Aestuariibacter sp.
  REGION 1..497: note = tr|A0A506RMA8|A0A506RMA8_9ALTE Tryptophan 7-halogenase OS=Aestuariibacter sp. GS-14 OX=2590670; GN = FJ444_06465 PE=4 SV=1
MTHKKTRVVIAGGGTAGWLSAFSLVTRLGNLLDITLVESDQIGTVGVGEATIPTMCNFHRLMGLDEREFMAATQATFKLGIQFDNWANQGDSYVHSFGEIGQRSWMAEFHEFWMEAIANGQQDKLEDYCLELKAAKQNKFALNVGNRPLNYAYHLDATAYAAYLRNKAESAGVTRREGKIVQVNKHLDSGNLSALVLDNGTHIDGDVFIDCTGFRALLIGEELGVGYHDWSHLLAADRAIAVQSTAIEPPRPYTIATAHKAGWQWRIPLQSRVGNGIVYSSRFSDDESALNTLMSNISGDPVTSPRYLKFATGMRKQAWANNCIAIGLSSGFLEPLESTSIHLVTTALIRLMKLFPFDGECRLLAERYNRETQKEMETIRDFIVLHYHLTQRDDSEFWHFYRTMDIPESLQHRMAMFAEHGYAWPDDVALFRVDSWVQVMMGQGLMPKRHHGASRMLPAQSLTQQLTAFKQSVNQALAQLPAHDTFLKQYCPANQST

SEQ ID NO: 90450 - protein, 506 aa, Xanthomonas campestris
  REGION 1..506: note = tr|A0A3R7GIN8|A0A3R7GIN8_XANCA Tryptophan halogenase; OS = Xanthomonas campestris OX=339 GN=XcmpCFBP7700_19115; PE = 4 SV=1
MIPASLRNIVIVGGGTAGWMAAAAFARVLGPSFNVQLIESEQLGTIGVGEATVPHIKAFNNLLGIDEAEFVRQTQGSFKLGIEFVDWQRPGTSYIHGFGTQIGHPLGLLPFHQYWIKQQLRGKAQPLGAYTLNTVAATRGKFMTSAGDVPANSPLANIAYAYHFDASQYARFLRGYAEQRGVTRLEGLIEQVQLDAHTGHVQSVQLASGQVVSGDLFIDCSGFRGLLIEEALHTGYHDFTHWLPCDRALAVPCEKVGPPTPYTRSTARAAGWQWRIPLQHRTGNGYVYSSAHVSDDEAAATLLANLDGTPLADPRPLRFTTGRRKQFWNRNVVALGLASGFLEPLESTSIHLIQSGISKLLELFPREGISPVLVQRYNDRLAFEFDRIRDFLVLHYHATERDDSAFWRHCRTQPITPELQTTLDLFRDSGRFYRNAEEMFAEISWVQVMVGQGILPQGYHPLVDQVPDTDAESFLASVAQTISHCVDVMPTHQQFIDRYCRADPMR

SEQ ID NO: 90451 - protein, 522 aa, Streptomyces sp.
  REGION 1..522: note = tr|A0A2S2GDI6|A0A2S2GDI6_9ACTN Tryptophan 7-halogenase OS=Streptomyces sp. SM18 OX=1736046; GN = B9S64_25570 PE=4 SV=1
MARSVVIVGGGTAGWMTASYLKATFGDKLAVTLVESKNVPTIGVGEASFSTIRHFFSYLGLAETDWMPECHATYKLGIRYDNWRAEGHHFYHPFERPRIVEGVSLADWWLHKRPSDDYDQDCSVIAALCDAKRSPRQLEGSLLELDAVEHEAEHASRSTMAEQNTQFPYAYQFDATLLAKLLTRYGTDRGVRHVLDDVVHAEVDERGDVTHVRTKESGDLAGDLFIDCTGFRGMLLNKRLEVPFLSYQDSLPNDSAVALRVPMEMSDQGMGPYTRSTAQDAGWIWTIPLSDRIGTGYVYASDYCTPDEAERTLRSFVGPGSEDLTANHIKMRIGRSENSWVNNVVAIGLSSGFVEPLESTGIFFIQNGIEQLVKHFPGGRDDHQLRRSYNRQVANVMDGVREFLVLHYIAAKRNNNAYWQDAKARTVPDALAERIEQWKVKLPDADTVFPYYHGFEPYSYTAMILGLGGLDVRPRPGLALMDDTAASKELRQVRDQAASLVERLPSHWDYLAHVTKLKGKRS

SEQ ID NO: 90452 - protein, 442 aa, unidentified
  source 1..442: note = Caballeronia glebae
  REGION 1..442: note = tr|A0A158DJD2|A0A158DJD2_9BURK Tryptophan halogenase; OS = Caballeronia glebae OX=1777143 GN=AWB82_06832 PE=4 SV=1
MSESTQTWDVVVIGGGPAGSTAATLLADRGYRVRVLEKARHPRFHIGESLLPANLRLFEKLGVADEVRAIGMVKLAAEFVSPQHDNRTQRFLFADAWDKSMPSAYQVRRSALDDILLRNAAKHGAHVSEGCRARDVAFAPDGSGATIDAEHDDGRSEALRARFVVDASGRDTLLANHFKTKRRNERHNSSALYGHFRDARRNEGENEGNITVFWFEHGWFWFIPLADGATSVGAVVWPAYLKQRPKGSSVETFFRDTIALCAPLAERLEHAELISEVHATGNYSYTGDMTHGRNFLLLGDAFAFIDPVFSSGVMLAMQSAFAGAQAIDAALSNPANAQAALAKFDRDVRHGPREFSWFIYRMTSPTMRNLFMGPKNPLRMKEALLSLLAGDIFGTTPIWHSLRAFKGIYYIAAALDWRNSLRAYRQRRRNLRDAQRAELSAN

SEQ ID NO: 90453 - protein, 513 aa, Devosia sp.
  REGION 1..513: note = tr|A0A087LTP0|A0A087LTP0_9RHIZ Uncharacterized protein OS=Devosia sp. 17-2-E-8 OX=1535287 GN=JP74_04080; PE = 4 SV=1
MAQPSHFVIVGGGTAGWLAAFIIQDSARRMKLDAKISVVESSRIRTVGVGEATTAAFRVFLQHFKIDEFEFFRETEATFKLGIRHQDWRRKGYTYYGPIDDPHQVVAPPPGAPSDYLNVYAVSAGKKVQDMHLFGPLLERRKAPYARKADGSLLRLGPFHHAFHFDQSLVGQFLKRKSRGVEIVDAVVEGVERDGQTGDIRALKLDSGELLAADFFIDATGFRKRLIVQELQAPWISYARELPVNRALPFWLDIKEGDEINNYTLAWAQENGWMWQIPTQTRYGCGYVYSDEFTTPEQAKLEVERAIGREIEVRDDIRFTIGRLEKAWIGNCVAVGLSSSFLEPLESTSIHGTIVQMMLFAGHYLKEPGEMTQVERDDYNRRVGRQVDDFRTFVNTHYVTERDDTPFWRNVRAERLHPETKERLARWRQEMPRTEHFPNYLAGLPHIETQLHYPVLDGLGLLDPAVAKAEMARDPKLRAFAKKTHDALVKEYKQAATQAMGHAEFLEAVREMG

SEQ ID NO: 90454 - protein, 529 aa, unidentified
  source 1..529: note = Streptomyces hyalinus
  REGION 1..529: note = tr|A0A401Z618|A0A401Z618_9ACTN Flavin-dependent tryptophan halogenase RebH OS=Streptomyces hyalinus; OX = 516124 GN=rebH_2 PE=4 SV=1
MDHRIKRLVVLGGGTAGWMTASYLGKALQGAVDITVLEAPTIPRIGVGEATVPNLQSAFFDYLGIPEDEWMRECNASFKAGIRFVNWRTPGNGAAQPRALHGGVDHFYHHFANLPEHDGIPLSHYWHLRTLRGETDVPFDYACFAEAEVLDAKKGPRYGDGSQATGYAWHFDANLVADFLRRFATEKQGVRHVRDEMTEAVLDERGHITALRTKEGRLLEGDLFVDCSGFRGLLINQAMEEPFLDMSDQLLCDSAVATAIPHDDAANGVEPFTSAIAMSSGWTWKIPMLTRFGTGYVYSSKFTGQDEATREFCDLWGLNPDRTPFNHVRFRVGRNRRAWVRNVVSIGLASCFVEPLESTGIYFIYSAVHQLAKHFPDKRFDPTLVDHFNREVESMFDFTRDFIQTHFYFSPRTDTEFWRANKELPLGDDVREKISLYRAGFPVNTSQAGERVYYGNSEVDNKNFWNNTNYWCIFAGLGHLPDRVLPALEYKPASIESVENLFAEVESRRRHLLAELPTTHEFLRQLHGK

SEQ ID NO: 90455 - protein, 520 aa, Xanthomonas campestris
  REGION 1..520: note = tr|A0A3E1KZ03|A0A3E1KZ03_XANCA Tryptophan 7-halogenase OS=Xanthomonas campestris OX=339; GN = D0A35_18630 PE=4 SV=1
MHAPVPSESQRLVRRVVIAGGGTAGWMAAAALSKLLGRQLQITLVESDEIGTVGVGEATIPSLVTFHRLLEIDEAQFMAATQATFKMGIAFEHWRDVDRHYIHSFGHTGTDHWSAGFQHFWLKARARGMARDFGDYCLELRAAQEGRFAHLPNGGMNYAYHLDAGLYARFLRRFSEGFGVQRIEGRIGSVQTDAHSGDIAALVLDDGTRIEGDLFLDCTGFRALLIGQTLGVGSEDWSRWLFADSALAVQTESVGAPVTFTRARADRAGWMWRIPLQHRVGNGIVYSSRYMDQDSAAQVLEHNLQGRALTTPRALRFTPNQRHRVWEKNCVALGLASGFLEPIESTNIHLIQRGIVRLLQTFPQVIDPVDIAEYNRQAAEEIAHIRDFVILHYHATDRRDTPFWRDCASMDIPDSLRHRMELFRQSGRVFHQGNELFAENSWIQVMLGQGIVPRHHHPVADLMGDAELSQFLEGIRQRVEATLARLPPHVEFLRRYCPAPALPAPMPQPAPGTPLAAPAA

SEQ ID NO: 90456 - protein, 495 aa, Aestuariibacter sp.
  REGION 1..495: note = tr|A0A506RUC8|A0A506RUC8_9ALTE Tryptophan 7-halogenase OS=Aestuariibacter sp. GS-14 OX=2590670; GN = FJ444_02450 PE=4 SV=1
MPQPIQNVVIAGGGTAGWMTAALLRKVLSPAVRIELVESEQIGIVGVGEATIPPIQVFNNFLGIDEREFLRDTHATIKLAIKFENWKTHGDSYYHTFGAPGTTMGFCSFHHYWLKAQQTGLSQSLWDFDLNYLSCEQGRFNKINTPNPLYEMQYAYHFDSALYGQFLRKKAEQAGVVRTEGIIEHVQQDPATGYITALQLTSGKQVQGDLFIDCTGLRGLLIQQALGVGYDDYSHWLPADSAQAVPSERFTSTLPYTRSIAHKVGWQWRIPLTHRNGNGIVYSSQYLSDDQATETLLNNLDTKALDTPRTIRFKTGRTAQQWCKNVVAIGLSSGFLEPLESTSIHLIQSGIIRLMKMFPNNGISQAMTDLYNTESKDEFETIRDFIILHYHVNQRDDSDFWRDMRTMSIPDRLAQKIAAFEETAAIFNEKNDIFRDASWVQVMMGQGLSPRDYHPAADAMDNAQLMAAMSQIYQAKQQPLDKLLSHDEFLQRYTA

SEQ ID NO: 90457 - protein, 515 aa, Alteromonas sp.
  REGION 1..515: note = tr|A0A448XU12|A0A448XU12_9ALTE Tryptophan halogenase; OS = Alteromonas sp. 76-1 OX=2358187 GN=ALT761_00255 PE=4; SV = 1
MTPVNSVVIVGGGTAGWLTAGLLAATHSKQGSTGARLSVKVIESDSIHPIGVGEGTWPTMRSTLAKIGIEEAALVQQASATFKQASKFVHWHTEGQRTGYYHPFSAPQGSASVDITPYWLHNNALNEYASDVCFQPSLCEQGLAPKLTADSKQNFSANYGYHLDAGKFISVLRDHCKKELGVEHIIDDVTDVATDDAGIKHVVTKNNDQIHGDIFVDCTGFTARLIEKALDVPMEDASSVLFSDSALVHQIAYSDEHQPIACHTLSTAQEAGWIWDIGLQNRRGTGYVYSSKFQSDDEATKTFAAYLKSINPDEELPSIFRKINYKTGYRKRFWEKNCVAIGLSSGFLEPLEASSLMLIEQSAIQLAEQLPAYTQVMPHVANRFNRALTNKWQSTIEFLKLHYVLSNRNEDFWLANRAPQSIPKRLTSLLEEWQYRPILDSDFTDRDDVFSAQSYRYILYGMSHKTDLSQYERSMSQYEGADKHLQLNKALIAQLTARLPSHRGLIDTMLNKHSA

SEQ ID NO: 90458 - protein, 500 aa, unidentified
  source 1..500: note = Rhodanobacter denitrificans
  REGION 1..500: note = tr|A0A368KG60|A0A368KG60_9GAMM Tryptophan 7-halogenase OS=Rhodanobacter denitrificans OX=666685; GN = DEO45_03830 PE=4 SV=1
MTDRRIRRIVIVGGGTAGWMAAAALARGLQGNCRIDVVESDEIGTIGVGEATLPPIKLFNQTLGIDENAFVAATQGTFKLGIEFVDWSSLGHRYFHPFGQIGMPFDAVPLHQYWLRERARGDTTPLQDYAYAWVAARKGRFERPSGGRQHVQSTFDYAYHFDAALYARFLRGYAEQRGVVRTEGKVVDVTLRGDDGFIESVTLAGGAVLEADLFIDCSGFRGLLIEGSLKTGYESWEQWLPCDRAVAVPSAHGEAPVPYTRATAHAAGWQWRIPLQHRMGNGLVYGSRYIGDDEATALLLSKLEGEALAEPRLLRFVTGRRRLAWNRNCVALGLAAGFMEPLESTSIHLVQSSLSRLLALFPDRDFDPLAAREFNRLTHAEHERIRDFLILHYHATTRDDAPLWRDCRAMAIPDTLQYKLDQFRSCGRTVAEPLELFQNPNWLAVMIGQEVWPARYDPLVDLRTAVDAPSRLAELRQVMEQVALAMPTQAEYIDRHCRAR

SEQ ID NO: 90459 - protein, 384 aa, unidentified
  source 1..384: note = Bacteroidetes bacterium
  REGION 1..384: note = tr|A0A136NDB0|A0A136NDB0_9BACT Tryptophan halogenase; OS = Bacteroidetes bacterium OLB11 OX=1617422; GN = UZ11_BCD004000292 PE=4 SV=1
MVIVEKTTFPRFVIGESLLPRCMEALEEAGFLNALKDAKFQEKSGAKFVMSDKTICDFNFNEKHSSGYEWTWQVPRADFDKILADECGKMNIPIYYESEVVHIQFHDDESSDIDIKLKDGTIHKISAKFIIDGSGYGRVIPRMFGLEKESNLAPRRALFTHYIDKNRNKIKAEEPDRITIYVYDTTTWVWCIPFSNGNTSVGFVGFPDFFEKFNSTPTENLKAMIASHEELNEQFGDCEMIFEPRELKSWSATTDKFYGKGFVLTGNVTEFLDPMFSSGVTLASVSAQKAAHLVIDKLNNKPVDWEKDYMEPCMQGVNVFRTFVNEWYSGDLHTIFFSKNQNEEIRRQISSVLAGYVWDKSNPFVNNHEKQVKSLAKYIRDTQA

SEQ ID NO: 90460 - protein, 516 aa, Novosphingobium sp.
  REGION 1..516: note = tr|A0A1W7M383|A0A1W7M383_9SPHN Uncharacterized protein OS=Novosphingobium sp. MD-1 OX=1630648; GN = NMD1_00047 PE=4 SV=1
MRDVVIVGGGTAGWLTAAIIAAKHRPRIGHDFSVTLVESPNVPIIGVGEGTWPTLRSTLKSVGISETDFFRECDAAFKQGALFAKWTTGAEDDAYYHPLVLPQRFGQLNLAPHWLAGTLVEDEDADETFCDAVCPQGRICDENLAPKTMADAEFEGQANYAYHLDAGKFAPFMQRHCTEKLGVRHVLADMRQVLQDESGDIRAIVTEQAGEIAGDLFIDCTGMRSLLLGETMGVGFRDCNDVLFCDTALAVQVPYPDPDAPIATHTISTAQSAGWIWDIGLPTRRGVGHVYSSRHISREQAEAELRAYIGPAADSLAVRKIDIRSGHRELFWKGNCVAVGLAAGFLEPLEASAIVLIELSAKMIAEQMPPAREVMDIVARRYNEKTLYRWGRIIDFLKLHYVLSQRRDTAFWRDNMDPATIPERLRELLALWRWQPPYLHEEFDRVDEVFPSASYQYVLYGMGFRSEVSARALEPEVRDARRARGQNADITTRMLTALPRHRDLINRIVEYGLQPV

SEQ ID NO: 90461 - protein, 508 aa, Novosphingobium sp.
  REGION 1..508: note = tr|A0A4R7DP75|A0A4R7DP75_9SPHN Tryptophan halogenase; OS = Novosphingobium sp. GV013 OX=2135688 GN=C8K09_1177 PE=4; SV = 1
MSMSENERRIRSILIVGGGTAGWMTAAALARSLPRGCAITLIESEEIGTVGVGEATIPPIQRFNEMLGIDERAFMKATMGSFKLGIEFVDWGKLNHRYFHPFGPFGRPFDTVDLHHYWLRARAAGDTARLDDHSMAWAIAREGRFSPPSPDPRNVLSTFDYAYHFDAGLYARFLRSYAEERGVTRIEGRIASVRQDGETGFVAGVTMEDGRSADADLFVDCSGFRGLLIEGALKAGYEDWTHWLPCDRAVAMPCANVGPLTPYTRSTAREAGWQWRIPLQHRTGNGYVYCSQFLTDDAAVDTLTCNLDGKALGDPRPLRFVTGRRKSFWTKNVVAIGLSSGFMEPLESTSIHLIQAGISKLLALFPDRTFDPLVIEEYNRIAVNEFERIRDFIILHYKLTQREDSALWRYCAAMDVPDTLHTKIEHFRRYGRLVQRDADLFGPPSWLAVHIGQGNFPERTDPLADYRGIDGREWLAKLRSAMHAAAVRLPTHEQYLASHCAASILPDA

SEQ ID NO: 90462 - protein, 521 aa, Xanthomonas citri
  REGION 1..521: note = tr|A0A220WCD5|A0A220WCD5_XANCI Tryptophan halogenase; OS = Xanthomonas citri pv. vignicola OX=473426; GN = XcvCFBP7111P_02170 PE=4 SV=1
MPDTTPSDPHQRPVRRVVIAGGGTAGWMAAAALSKLLGRHLHITLVESDEIGTVGVGEATIPSLVTFHRLLEIDEAAFMAATQATIKLGIAFEHWRDVDQHYIHSFGHAGTDHWSAGFQHFWLKGRQRGVARDFGDYCLELRAAQEGRFAHLPNGGMNYAYHLDAGLYARFLRRFSEGFGVTRVEGRIGQVETDAQSGFLTALTLQDGTRVEGDLFLDCTGFAGLLIGKTLGVGSDDWSRWLFADSALAVQTESVGPPVTYTRSRADQAGWMWRIPLQHRVGNGIVYSSRYMDQDGARAVLERNLTGRALTEPRPLRFTPNQRHRVWEKNCVALGLASGFLEPLESTNIHLIQRGIIRLLQTFPQVINAVDIAEYNRQAAQEITHIRDFVILHYHATDRRDTPFWRDCAAMDIPDSLRHRVELFRQSGRVFHQANELFAENSWVQVMLGQGVVPQQHHPVADLMGDAELGRFLETIRTRVEAALVRLPAHADFLQRYCPAPPLPEPAACVPAPPVMATPAG

SEQ ID NO: 90463 - protein, 505 aa, Xanthomonas citri
  REGION 1..505: note = tr|A0A220WF80|A0A220WF80_XANCI Tryptophan halogenase; OS = Xanthomonas citri pv. vignicola OX=473426; GN = XcvCFBP7111P_08235 PE=4 SV=1
MTQAQIRKVVIAGGGTAGWIAACALSHQFRNLLDITLVESEQIGTVGVGESTVPPIRTFHRFLQIDEQEFLRAVAGTFKLSISFEHWRRQGERYIHPFGITGQSTLVCAFHHLWLESQRRGMPGSFGDYCLETVASRVDRFALHGEPAVNYAYHLDAALYARFLRARSEACGVKRVEGRIQQVTVQPHSGDVASLVLEDGQTIEGDLFIDCSGFRGLLIEQTLHTGYEDWSHWLPCDRAVAVQTEALGPPVPYTRAIAHEAGWRWHIPLQHRVGNGLVFSSKHLSDDEAHAKLLRDVAAPAVKEPWMVPFRTGRRLKAWNKNVVSLGLASGFIEPLESTSIHLTISAVVRLLALFPAGGIAPSQVQLFNDISRAEMEHVRDFVILHYHATQREEPLWQQCRQMELPESLALRLRAWRERAHAWQGADELFRVDSWTHVLMGQGIAPEQHHPLTRAFSDHDLRRLLDGIAQPIQHAVQQMPSQQDFIERYCKAGEQVWGMRSPVPA

SEQ ID NO: 90464 - protein, 543 aa, Antarctobacter heliothermus
  REGION 1..543: note = tr|A0A239EYZ7|A0A239EYZ7_9RHOB Tryptophan halogenase; OS = Antarctobacter heliothermus OX=74033; GN = SAMN04488078_101765 PE=4 SV=1
MTAPIRKITIVGGGTAGWLAASLLNSLLREKRPPEDAIQITLIESPDIPTVGVGEATVPNMPRTLADCGISEAEFFRCCNASFKLGVLFDHWNVDADGQPISYVNPFDAPPPLNGAPLAAYYLKYGAGDLDFVHLFSPCLDLRDGLRGPRPFRAGEFAQGAGFAYHLDAGKFSALLRDTCIARGVVHVFDNLQDVELDETGKVAALHLEKGGRHDVELVLDCTGFRGLIINKALGSEFISYSKYLANDRAMAVQVPHLSDDIEPMTRSTAMGAGWTWRVPLFNRVGTGYVFSSAHRTDEQARDELMAWVGSAGEGLEPRVIPMRIGRNRENWVKNCVAVGLSGGFIEPLESTAIHMIDMAVRALITYFPDTSYAAPLRHRYNRQMERLYDEVRDFICLHYALGNRTDSPYWIDAREELEVSDALAENLALWRHALPQPGDLDSAVLFSAQVYQAVLLGKRVYEMGYKADNFAAGYALDEDRWWEFVAQRRARYAEFADRAANHRHLLREIRGELMGRERRAVERGEAVNVPRAAPDLAESSML

SEQ ID NO: 90465 - protein, 499 aa, Alteromonas sp.
  REGION 1..499: note = tr|A0A3S5BB85|A0A3S5BB85_9ALTE Tryptophan halogenase; OS = Alteromonas sp. 76-1 OX=2358187 GN=ALT761_00806 PE=4; SV = 1
MSQSMSIKSIVIVGGGSAGWMTAATLSKVLDLSKCNVTLIESEDIRGVSVGEATIPQITLFNRILGIDETDFIRATNATYKLGIEFKDWKHQGHAYFHPFGSFGINMEALPFHHFWLKRFNEGAGGDLCSYSIEAMAAKSGRFGKVKAQSNSPLANMSYAYHFDSTLYANFLRDFAVKRGVRHVNGKVEAVSKHLNGHINTLTLQDGQCIDGEFYIDCSGFRSLLLEKEMGATFNDWSDLLPCDSAIAIPCKSADSMLKPYTQSSAKAAGWTWRIPLQHRIGNGYVYSSKFTEKDVVLDELMAQLEGEPLAEPNFLAWKTGMRPQSWINNCLGIGLSAGFIEPLESTGLHLIQSAIARLMTLFPDNRFCQSDIDMYNRQTEKEFEQIRDFIVLHYVLTERNDSEFWRYCRNIPLSESLTQKMQLYKDSGRIFRIDNELFNETSWLAVMHGQGLRSEGYHPLVDRMSTSLIDERLTHIASVIDKSASVLPEHAQFIAQLG

SEQ ID NO: 90466 - protein, 533 aa, Nostoc sp.
  REGION 1..533: note = tr|K9QN72|K9QN72_NOSS7 Tryptophan halogenase; OS = Nostoc sp. (strain ATCC 29411 / PCC 7524) OX=28072; GN = Nos7524_0715 PE=4 SV=1
MKLQNPQQIQNIVILGGGSAGWLSATYLNQILNSGQGSPCQITLIESADIGIIGVGEATIHTFPGTLQLLGIPESEWMVKCNATFKNAIKFVNWSGLPGKDEYWHPLTRLPETPGSSIPLFHYWLQSKLQGNSAAFDASCFAAVELCAAQKSPKSVNNRNPHTTVGDYGYHLDAGLLATYLKQKGKSEGIRQIVDHVLDVAFDENGFIRHLVTENHGEVAGDLFIDCSGFSGRLINQALQEPFISYSDSLLCDRAVALPVLYESGDKYNEKRGGINPYTTSTALSTGWAWNTPLVERSGNGYVYASAFISPEQAEMELRQHLQEYTTPARHLQIRVGKTRNTWVKNCVSIGLSSGFIEPLESTGIYLIEAGLYHLLQNFPDQKFDPMLRENYNRTMQNLYEDIRDFIVLHYCLTQREDTPFWQANKYNLKIPDSLQQRLEQWRFMWPSQNFSAVSQPLFGDYSYVCILAGMGYLPEKVLPIVTYQQGLSTQLFTQLSNYSQQLKKCLPNHVDYLRDIHQRDILTNLFVKGNRQ

SEQ ID NO: 90467 - protein, 497 aa, Pseudoalteromonas sp.
  REGION 1..497: note = tr|A0A4P9IZZ3|A0A4P9IZZ3_9GAMM Tryptophan 7-halogenase OS=Pseudoalteromonas sp. 16-SW-7 OX=2583375; GN = FFU37_05885 PE=4 SV=1
MKPIKHVVIAGGGTAGWITAALLNKVLGKVIKVTLIESSTIGTIGVGEATIPPIIQLNNALGINEQDFINATNASIKLGIEFENWKTPSHSYMHSFGSFGKDFPFCDFYNFWIKGKITGCEDSLWDFSLNYQAAKQHKFAPLNTIPNTQLPGLSYAYHFDASLYAEFLKKLATSRGVEHIDAKIEQAEQCPLSGNIKSLTLGNTQQINGDLFIDATGQRALLIEQTLNTGFVDWSHYLPCDSAVAVQTQGTSELKPYTRSIAHSAGWQWQIPLQSRIGNGLVYCSRYLSDDAATQLLLNNLPAEPMTEPRVIKFKTGRRLKQWHRNVVSVGLASGFLEPLESTSIHLIQSAVTRLIKLFPHNGISEALVTEFNKQSVTEIEHIRDFIILHYKLTEREDSAFWRQCKQMDIPDSLAHKLKLFKQTGKVVRENDELFAEVAWQQVFIGQGLIPEDYNSIVDSLSSEQLNDLFSTLKTLITSTVDQLPTHKDFLAKIKKA

SEQ ID NO: 90468 - protein, 503 aa, Brevundimonas sp.
  REGION 1..503: note = tr|A0A0Q7SWG4|A0A0Q7SWG4_9CAUL Tryptophan halogenase; OS = Brevundimonas sp. Root1423 OX=1736462 GN=ASD25_18430; PE = 4 SV=1
MSEPIRSILIVGGGTAGWMAAAALQRTLGPHAKVSLVESDDIGIVGVGEATVPPIRDFNALIGLDEAEFMRETRATLKVAIVFKDWGHIGNRYVHPFGTFGRGPTLADFQQTYFSLKARGLAGDLGDYSVCWRAADAGKVGDRDPDPRSPRNSLFSAYHFDAGLYARYLRKVCEGRGVERIEGKIVDVVQRGEDGFIDGVTLEDGRVLKADLFIDCTGFRALLIEGALKAGYEDWSHWLPVDRAVAVPCAGVKPLTPYTLSTAREAGWQWRIALQHRTGNGYVYCSDHLSDDAARETLLANLDGEPLAEPRLLRFATGRRRKYWDRNVVSLGLSSGFIEPLESTSIHLVQAGIYRLLQHFPDMDFSPVNIDGYNRRLGREVELIRDFVILHYHASRRDDSPFWRQVAVMPIPDSLSERVEAFRDRALLYQVWADEYFSQGSWLAVMYGQGITPRGPSPLYAYQDADKAAAGLRNISEVLARTVDGLPEHEAYLRANAMWAEDA

SEQ ID NO: 90469 - protein, 493 aa, Sphingomonas sp.; identical to SEQ ID NO: 85826
  REGION 1..493: note = tr|A0A0Q4LNX5|A0A0Q4LNX5_9SPHN Tryptophan halogenase; OS = Sphingomonas sp. Leaf42 OX=1736219 GN=ASE97_03640 PE=4; SV = 1

SEQ ID NO: 90470 - protein, 518 aa, Sphingobium sp.
  REGION 1..518: note = tr|A0A197C164|A0A197C164_9SPHN Tryptophan halogenase; OS = Sphingobium sp. 20006FA OX=2056888 GN=A8O16_03840 PE=4; SV = 1
MTADIPSPGRIVIVGGGTAGWLSAATFSRTLGMRDVTLVESSEIGIIGVGEGTFPTIRSTLAGLGVGEGEFLRSADATFKQGVLFDGWATGADSYFHPFNMPIGGEDEALLPHWLAMEGQRASWADSVTVQERVIRAGRAPKRVQDPDFSGPMNYAYHFDAARFADYLRTISLAAGVRRIEGMVAHVEQREDGDIAALTLSDGRRVEGDIFIDCSGFRALLIGQTLGSGFVGCGDTLFNDRALAMQVPHDRPDAPIRPYTLATAHEAGWTWDIGLPERRGIGYVYSSRHCSDDEAEAVLRRYVGPGGEALTPRQLRFATGYRERQWIGNCIAIGLSAGFFEPLESTGIMLIEAALRMVGDFLLPAGSASDTAARNAAARRFNRLMTARFERIVRFLKLHYCITRRTDTAYWRDNADPASIPADLQDLLAQWRHRPPSRFDFTVDLETFLPPSYHYILYGMGFETRLAGGIGRYPGGQEARAAFARVAGASGAAVSHLPDHRALLDHLRGRQPSARVSR

SEQ ID NO: 90471 - protein, 522 aa, Streptomyces pharetrae
  REGION 1..522: note = tr|A0A1Y2PPG0|A0A1Y2PPG0_9ACTN Tryptophan halogenase; OS = Streptomyces pharetrae CZA14 OX=1144883 GN=OQI_27735; PE = 4 SV=1
MAKSVVIVGGGTAGWMTASYLKAAFGERLAVTLVESRNVPTIGVGEASFSTIRHFFSYLGLQETDWMPDCHATYKLAIRYDNWRAEGHHFYHPFERPRVVEGVSLADWWLHKRPSEDYDRDCSVIAALCDAKRSPRRLGGALLAPELGAQDPVSMSRSTMAEQNTQFPYAYQFDATLLARLLTGYGTDRGVRHVLDDVVDTAVDERGHITHVRTKESGDLAGDLFIDCTGFRGMLLNKTLGVPFISYQDTLPNDSAVALRVPMEMADQGMGPYTRASAQAAGWIWTIPLHGRVGTGYVYASDYCTPEEAERTLRGYWGPAADDLTANHIRMRIGRSENSWVNNCVAIGLSSGFVEPLESTGIFFIQNAIEQLVKHFPGGPNDEQLRRSYNRQVANVMDGVREFLVLHYVAAKRNDNDYWRDAKTRTMPDALGARIEQWQAKLPDQDTIFPYYHGFEPYSYTAMILGLGGLDVRPLPGLAMMDDVAAEKELRLVRDQAKSLVETLPSHWDYIAHLNDRKGARA

SEQ ID NO: 90472 - protein, 516 aa, Pseudoalteromonas sp.
  REGION 1..516: note = tr|A0A4V1HDE3|A0A4V1HDE3_9GAMM Tryptophan 7-halogenase OS=Pseudoalteromonas sp. 16-SW-7 OX=2583375; GN = FFU37_08345 PE=4 SV=1
MTKPITKIVVLGGGTAGWLSAGLLAAEHPHLNVTLVESENVPILGVGEGTWPSMRNTLQRIGIKEIDFITQCDASFKQGSKFINWRNLSEGENYYHPFMNPQGYEHTNLHASWQRIAPNQKFADVVNMQSFVCQAALAPKQLQTPEYAAVTNYGYHLDAGKFAEFLKNHCVKNLNVTHIIDDVTEVINDVHGYIASLKTNNNGDITGDLFIDCSGSRARLIGDHFNSEFIAQDHILFNNSAVAAQIPNAHINQPIASATLSTAQSNGWIWDIALPTRRGTGYVFSSKYQSDESATNTLKSYIAKSTSEQQAEQLTYRVLKFSPGYRQKFWIKNCVAVGMSAGFLEPLEASALAMVELSISMISEQLPQNRTHMSQLETRFNERFSTRWQRVIEFLKLHYVLSERDDTPYWQDISNLNTAPERLQNLLKLWQFQPPSRFDFIENEEVFSSSSYQYVLYGMGFNTQTVSAQNTFNDPRAGDYYYQQNREKIAQCLNGLPSNRALLNHLLSNNGQPHND

SEQ ID NO: 90473 - protein, 508 aa, Pseudoalteromonas sp.
  REGION 1..508: note = tr|A0A4P9J4P7|A0A4P9J4P7_9GAMM Tryptophan 7-halogenase OS=Pseudoalteromonas sp. 16-SW-7 OX=2583375; GN = FFU37_16425 PE=4 SV=1
MNKAIKTIAVIGGGTAGWLSAAIIASYHQGKNGDGLKVMLVESSDIPTIGVGEGTWPTMKNTLQQIGLREVDVFKACNATFKQGGKFVNWTHGNNDFYYHPFTVPLGYGRIDLAPYLDNVEDFAQQTNFQHDICEASLAPRGIAQGEYQGNCNYAYHLDAGAFAEMLKQHCKSKLGVEHIIGTVDQVKLDDDGAINELTLKDQTRIISADLFIDCTGFSSLLLGQALNVPFKKMDHVLFNDSALAMQVPYDENDDSLASHTIATAQNAGWIWDIGLTHRRGVGHVYSSKFLSDDEAEQNLRNYLGDAANGLTARKISFESGYREKFWHKNCVAVGMSAGFVEPLEATAIMLVEISARFVAEHMPADTQVMPIVAKRFNEQMDYRWQRIIDFLKLHYMLTKRPEPYWQAHVHPDTIPQTLQEDLLLWGSRGPLIQDFHGALELFPAASYQYVLYGMGFKPDFTKQAYLYSQDAQAKQIIERNSQLTQQMLQTLPPHRAYIEQWLAANPV

SEQ ID NO: 90474 - protein, 501 aa, Glaciecola sp.
  REGION 1..501: note = tr|A0A2Z6U456|A0A2Z6U456_GLASK FADH2 O2-dependent halogenase I OS=Glaciecola sp. (strain KUL10) OX=2161813; GN = prnA PE=4 SV=1
MLQHVNKVVILGGGSAGWMTAAAISKVFGNKLDLTLIESEAVGTVSVGEATIPQISLFNNLLGLDENEFVKKTKGTFKLGIEFANWKEKGHSYMHPFGTFGTNMDAIQFHHYWLKMFLKGDAPDLTKYSLLCQAAYKGKFCRPQAIKNSPLSSIPYAFHFDATLYAKYLREFAEARGAKRIEGKVQDVFTRSSDGFIDSLLLEDGQRINADLFIDCSGFKGLLIEQTLKTGYEDWGHWLPCDRAVAMPCKAAKENYPYTVSTAQDAGWTWRIPLQHRVGNGYVYPSRFVSDEQALETLKGQMENEPLNKPNFLKWQTGRRKQMWNKNCIAIGLSAGFIEPLESTGLHLIQTAISRLMGFFPHQGFNQVDIDVFNKQTQLEMEQIRDFIILHYKLTDREDTEFWRYVKNMDVPKGLEEKLALYATNGRIFRQDNELFDETSWLAVMHGQGLRPEGYHPLVDTFEEAEVERRLKHIESVIAKSVDTMPTQQSFIDQYCAAMAD

SEQ ID NO: 90475 - protein, 520 aa, Glaciecola sp.
  REGION 1..520: note = tr|A0A2Z6U4D7|A0A2Z6U4D7_GLASK Tryptophan halogenase; OS = Glaciecola sp. (strain KUL10) OX=2161813 GN=KUL10_11460; PE = 4 SV=1
MNSRKKEIEDIVILGGGTAGWMTAAALSKLLPSQHFKVTLIESDAIGTVGVGEATLPHLGAFNRRLGIDEAEFMRVTQATFKVGIEFQNWGQKGDAYIHPFGDYGYKIAGVPFHHFWTKEKLNGDTTKIDDYSLPVKACQANKFTFPSKDETSVDSTYSYAYHIDAGLYAKFLREFSEKRGARRIEGKVVEVITRSSDNHIDSLIMEDGQRIEADFFVDCTGFRAQLIEQVYQSGYVDWSHWLPCNSAIAIATAQQEVPIPYTKAIAREAGWQWRIPLQHRHGNGYVYCDKFIDREQALDTLQSNLVGPAITEPNYLKFQTGRRKKSWINNCLAIGLSSGFLEPLESTSIYLIQSAIMKLVELIPQQSNLQIKATEYNRSLDMEMERIRDFLILHYHATERDDTPFWDYIRTMQIPDSLQDKMDMFKATGHVQNYRYGLFLEPSWVAVYLGQRFIPNSYDQRVNTLDRSAYIEGMQQFKQEVADAVKRMPSHNDTIHQYCTIGGIENDGLLQSGLYGKRL

SEQ ID NO: 90476 - protein, 505 aa, Sphingomonas sp.; identical to SEQ ID NO: 85900
  REGION 1..505: note = tr|A0A0Q4M5T2|A0A0Q4M5T2_9SPHN Tryptophan halogenase; OS = Sphingomonas sp. Leaf42 OX=1736219 GN=ASE97_03655 PE=4; SV = 1

SEQ ID NO: 90477 - protein, 507 aa, Glaciecola sp.
  REGION 1..507: note = tr|A0A2Z6UBJ5|A0A2Z6UBJ5_GLASK Tryptophan halogenase; OS = Glaciecola sp. (strain KUL10) OX=2161813 GN=KUL10_16610; PE = 4 SV=1
MTSIVIVGGGTAGWLTAAIIAAKNSHLKHGQNAVQISLIESPDVKNLGVGEGTWPTMRETLRSIGISERELLKKCNASFKQASKFVNWHTQNNHYYHPFTLPSSYGAFNLAEHWQPSNEQDFADFVCAQSAACEQALAPKLSTMKDYAFALNYGYHLDANKFVALLQSHCETVFGVNYIQDHVQGVVNDKDGYISHLNLKDRGTVEGDMFIDCSGFTSILIDKHYGIPFKTCSDVLFNDRAIAAQVEHADDKTEIASSTIATAQSNGWIWDIALQNRRGIGYVYSSRFETDSNAEVSLKRYIEQDPKLARSDVSTRTIKFTPGYRQKFWHKNCVAIGVSAGFVEPLEATAMVLIEKSAQWVSEQITNDHKAMNVLAKRFNSVTTERWIEIVDFLKLHYVLSDRKDSEYWCAHREANSIPETLKESLILWRTQSPWLYESMNRFELFSSASKQFVLYGMQFKTSHQQLLNQQTDTTKRLNRIRDENYLLKQQLIKQLPTNREYLANLS

SEQ ID NO: 90478 - protein, 505 aa, Sphingomonas sp.; identical to SEQ ID NO: 85890
  REGION 1..505: note = tr|A0A0Q4LSW4|A0A0Q4LSW4_9SPHN Tryptophan halogenase; OS = Sphingomonas sp. Leaf42 OX=1736219 GN=ASE97_11175 PE=4; SV = 1

SEQ ID NO: 90479 - protein, 507 aa, Glaciecola sp.
  REGION 1..507: note = tr|A0A2Z6URF9|A0A2Z6URF9_GLASK Tryptophan halogenase; OS = Glaciecola sp. (strain KUL10) OX=2161813 GN=KUL10_18580; PE = 4 SV=1
MNNISNILIVGGGTAGWMAACLMAHRWQNKSLTITLIESANIGTVGVGEGSTPFLRDFFDQLGIAETTWMAACDATYKCGIEFPGWCSHTGPSSYFHPFYGEADTHCVGEFFASCQQRREGFDTPTHPNDYFVNSYLAEQGKGPYKQAGLASNIEYGYHFDAAKLGLFLAEHARSLGVIHLQDEVEKVNASNEKIASIATKSYGLLKADFYVDATGLKGLLIQQTLGEKLISYQDYLPNNSAVAISTDYSTDETSDKRFQDMKTQTLSEALEHGWMWSIPLQTRCGNGYVYSDRFITKTDAEQRLRRRLGNNDKPALHLSWTPGRIEQHWKNNCLAVGLSQGFLEPLEAPMLNLIQQTCESFVEHFESQDQSNAAKQFNQTINSLIDGTRDYLQAHYLLNTRDDSEYWIKARENQHISAVLSDIIFAWDNPGSFEQALIKNANHLAYAKTSWYCIFAGKGRFTDAHKHSLRLTEKKHKKAVDICQKTSQDFMYQTDLLNTVSTRRAL

SEQ ID NO: 90480 - protein, 498 aa, Glaciecola sp.
  REGION 1..498: note = tr|A0A2Z6UHB3|A0A2Z6UHB3_GLASK Tryptophan halogenase; OS = Glaciecola sp. (strain KUL10) OX=2161813 GN=KUL10_19810; PE = 4 SV=1
MQTQVKKVAVLGGGTSGWISAALLKKVLGTTVDVELVESEQIGTVGVGEATIPPIQKVNQVLGINEAEFLRETKATIKLAIKFENWRVNGESYFHTFGAPGRSMAFCHFHHFWKRAKTLGLKESLWEYDLNYLCCKENKFAQINAKDPVLDLSYAYHFDAGLYARYLRKLSEQMGVVRTEGRVEKILQDEQSGNITRLKLENGKEVQADLFIDCSGFRGLLIQQTLNAGFEDWSHWLPCDSAVAIASERHEQTAPFTRSIAREAGWQWRIPLQHRNGNGLVYSSAHLNKEQAEDFLLKHLDAKALSEPNHIRFKTGRRRKQWHKNVVAVGLSSGFLEPLESTSIHLIQSAVTRLIQLFPHDGMSQSNINEYNAQSKLEYEQIRDFIILHYTLNERTDAPFWRDVREMEIPSLLQHKMDLFRESGKIVREFNDLFHESSWLQVMLGQGIEPQDYHPLANSMSEADLFEFLRRLKEIKNEPLPKLPSHDLFLEKFAGFAG

SEQ ID NO: 90481 - protein, 515 aa, unidentified
  source 1..515: note = Flavimaricola marinus
  REGION 1..515: note = tr|A0A238LKR9|A0A238LKR9_9RHOB Flavin-dependent tryptophan halogenase RebH OS=Flavimaricola marinus; OX = 1819565 GN=rebH_2 PE=4 SV=1
MTKSDPTHLVIVGGGTAGWLAAHLFKTESERQGIPMRITLVESSKVPTIGVGEGTTSVFGGVLQSLGFDEEDFLAHTDATIKYGIRHRDWRRLGHVYDGPIDDAYALTDRIPGAGSWIDTFCVAAGRSVSAPHIFAKLMETGKAPVAEMGGRRVPVSRFHHAYHFDQAKVGAYLRRKATDISKIDALVESAERDGKSGCVTKLRLDTGETIAGDFFIDCTGFRRTLIQGTMGASWVSYSDALPVNRAMPFWLDLAEDEEIPTFTHAWAQASGWMWQIPTQGRIGCGYVYSDRHSSPDIALAEIEGVLGRKIEPRADIPVDAGRISEVWRGNVLALGLASSFLEPLEATSIHGTIVAILLFCRRHLLQISAPLQKNQQRYNAAIAKQVDDFRDFINLHYVSERDDSPFWRDVETDFILPQVRQKLINWQERMPGPEDFTNDLDGLPHVEELLHYPVLDGLGLLNRSVARERMAQDRKLRDFARATVDHLEKQAGNVASHAISHRAWLSSLSSNPIA

SEQ ID NO: 90482 - protein, 487 aa, Glaciecola sp.
  REGION 1..487: note = tr|A0A2Z6UB41|A0A2Z6UB41_GLASK Tryptophan halogenase; OS = Glaciecola sp. (strain KUL10) OX=2161813 GN=KUL10_27000; PE = 4 SV=1
MKKIVILGGGTAGWMAANILNKALAAEGFEIHLIESEQIGIIGVGEGSTPQLKQFFAYLDIDESQWMPACNATYKNGISFNDWTNSEGHNHYFHPFPSPFDQQTLGAFLYYCKLRHQGMDIDCLPNQFFLTAKLAEYAYTPITKEGIAPIKLNYAYHFDSVLLGQFLAKIAKEKGVKHTIATLKSSELDEPIGIKSISLDNGDIVEADLFVDASGFNSELLQKALGVKFHSYSDNLFNDSAIAFPSEITEKYNTQTEASALSAGWAWKIPLTNRYGNGYVFSSRYTDFEQAESELKAHLGIASELEVNARRLKMKVGQVEKHWHKNVLAIGLSQGFIEPLEATALHLVQESLMQFIKHFNKGKFIDENKTAFNQTINERFEGIRDYIVCHYKVNTRTDSQYWQDNRDNPCISENLQAVLEAWDNSEDIASVLQSRNMTQYYPVVSWYCLLAGYQRFPEATAPNKMPASQIEGLRKMLAARTELFIPV

SEQ ID NO: 90483 - protein, 495 aa, Glaciecola sp.
  REGION 1..495: note = tr|A0A2Z6U6E1|A0A2Z6U6E1_GLASK Tryptophan halogenase; OS = Glaciecola sp. (strain KUL10) OX=2161813 GN=KUL10_18550; PE = 4 SV=1
MSVHTPKSIVIVGGGTAGWMAANLIIHAWPTTQVTLVESADVGIIGVGEGATPYLKTFFARLGINEEEWMPACDATYKVGINFENWSGRQGFKDYFHPFFCALDKPTADMFFHNCQVKRHGGQSHTNPGDFFISGELARQKINPALSAKALSEGIQEIDYAYHFDSAKLGHFLKLKACQKGLTHIIDNVTDVISHLSGDIEKVVTENHGDLGAELFIDCTGFRARLIHQTLKRNYVSYADSLLNNAAVAIQTPNDSNLKLEVQTRSIALSNGWMWKIPLTSRQGNGYVYSDHHISPNDAEQELRQQLNIDENADVRVKHLSMRIGRLGEHWHKNCLAVGLSQGFIEPLEATALMLTQLTVDQFIQQFDNAAQPLDNKRNTFNKQLNTTFDGVRDYIAAHYQLSKRDDTQYWRDNQFNKATPAIFAELKQAWLSRQDFEQSLSKHAQGLVYLRPSWYCIFAGMGAFPENLKPVNNIAPVEQALNYAQKIAQSYFKN

SEQ ID NO: 90484 - protein, 561 aa, unidentified
  source 1..561: note = Ruegeria denitrificans
  REGION 1..561: note = tr|A0A0P1IH62|A0A0P1IH62_9RHOB Flavin-dependent tryptophan halogenase RebH OS=Ruegeria denitrificans; OX = 1715692 GN=rebH PE=4 SV=1
MNNRLSQITIVGGGTAGWMTALILDMVFSRTSASKDRPRICLIESPNIATVGVGEATVPRMPVTLRQAGISERDFFRETNASFKLGVKFCNWNKDRKGNRIDYVNPFAHGQMVQGLEAAEFFLRFGNGDRDFTQSISPHDHLGRLCKGARQLGQPEFEQRFGYAYHLDAVKFAGMLTKVCTKRGVEHIRDEVQSVELDEQGNVSHLMLERKGRHDIEMVIDCTGFRGLIINQALGEPFLDYSDYLPNDRAMALQIEHPKPEKIESLTRSTALGAGWTWRVPLYNRVGTGYVFSSAHRTDDQAADEYLKWLGDSGKGATPRVIPMRVGRVRNAWVKNCVAIGLSGGFIEPLESTAIHMVDHAVRWFAEHLPTKDVEPSLRDRYNRQMDKLYNEVLEFICLHYRLGNRKDDQYWIDARTEMKVPDRLAENLELWQHRLPMDHDVEFATLFDHRVYQTVLLGKQSYDTGYGTGIRDRIRPLKKQIWLQGMQRAKADLAQIIKSMPDHKTLLREIRGELERPAFGKTAGMKPTVPMPGTTPAPVTIQNMPNFAEIQSGAKDLQLF

SEQ ID NO: 90485 - protein, 528 aa, Alteromonas sp.
  REGION 1..528: note = tr|A0A3S5B6C0|A0A3S5B6C0_9ALTE Tryptophan halogenase; OS = Alteromonas sp. 76-1 OX=2358187 GN=ALT761_02145 PE=4; SV = 1
MAVANKTPASQQATDQQTTVHHEAKQAPVKRVVVAGGGTAGWLTAALLKKVIGDAVNITLVESEAIGTVGVGEATIPPIRLVNQVLGIDEATFLRDTKATIKLAIRFENWKQQGQQYYHTFGAPGKSMAFCHFHHFWLKARQQGLKHDLWEYDLNYLAAEAGKFARINAKDPVLELPFAYHFDASLYAKYLRKLSEGLRVKRVEGKISYVSRHKHSGNVKALHLENGHAIEGDLFIDCTGFRGLLINETLGAGYDDWSHLLPCDSAIAVPSERHENTAPFTRSIAHSAGWQWRIPLQHRNGNGHVYSSRYISDSQAHDTLMANLDTKPLGDPKLIKFTTGRRRQQWCKNVVAVGLSSGFLEPLESTSIHLIQSAIVRLIKLFPHQGISDSAVEEYNAQSKVEFEQIRDFLVLHYCLNEREDSDFWRDMRHLTLPDSLTHKMALFKQNGNLVREQNDLFLESSWLQVMYGQGLVPDDYHGLANSFSDEKTQAMLSSLYNIKREPIASLPTHDAYIQSMIDSANKTSVSF

SEQ ID NO: 90486 - protein, 499 aa, Pseudoalteromonas sp.
  REGION 1..499: note = tr|A0A4Z0SLE8|A0A4Z0SLE8_9GAMM Tryptophan halogenase; OS = Pseudoalteromonas sp. KS88 OX=2109918 GN=C7Y70_10775; PE = 4 SV=1
MKNKQIKEVVIAGGGTAGWITAALLNKVLGKVVNITLVESDQIGTVGVGEASIPPILHLNAALGIRENEFIKATQATIKLGIEFENWRSQKHSYMHAFGDIGKDFPFCEFYHFWLRAKQQGTASDFWDFSLNYQAAKQHKFTHLQHIPNTQLTGLNYAYHFDATLYGEYLKSLSISRGVNRIEGKIAQVEQCQNTGFITALALEDGQTVTGDLFIDCTGLSALLIEQTLNTGFEDWSHWLPCDSAIAVQTKSAAEPVPYTRSIAHDAGWQWQIPLQHRVGNGLVFSSRHITDEQAKQQLLENLPGEPITEPRVIRFKTGRRRKQWHKNVVSVGLSSGFLEPLESTSIHLIQTAAIRLIKLFPHNGIDDSLVETFNQQSQTEIERIRDFIILHYKLTERTDSAFWRQCKQMSIPDSLQKKIDLFKATGKIIREDDELFAQIAWQQVMIGQGLEANDYSALASALNDDQLSELFSSLKTLINGTVEQLPSHSDFLLRMKNN

SEQ ID NO: 90487 - protein, 514 aa, Sphingobium sp.; identical to SEQ ID NO: 82987
  REGION 1..514: note = tr|A0A197C218|A0A197C218_9SPHN Tryptophan halogenase; OS = Sphingobium sp. 20006FA OX=2056888 GN=A8O16_04020 PE=4; SV = 1

SEQ ID NO: 90488 - protein, 529 aa, Glaciecola sp.
  REGION 1..529: note = tr|A0A2Z6UCD0|A0A2Z6UCD0_GLASK Tryptophan halogenase; OS = Glaciecola sp. (strain KUL10) OX=2161813 GN=KUL10_11470; PE = 4 SV=1
MTSPNIELSTHSENENQAIRTIIVNSLNNPDLSNDSVKPCHQQLDDLICGLFTAISLKVNLAACDMSITHVCPEVESFKQIISVISLNIHQLAFLRSLGIDEKRLMNTCDAQHTLGTRYLNWSSDQQDFVLVEGEYGVPFDKVKFHHFIERLDKFSYDEFAIAAQMARQGRFVHPNNDPSSLLSSFTYGLNVDAYSFAKLLSQCAAAFKIEAITADSLEATMSDNGLASINASCHSGKQRSLSADFFIDCASKSSAIYQCFLPDKMKLESSPIKQQNKLRLCAVTQSSNRLLNILQPHAFGWSKTINTASKTMIECQFDDTVTLEQVLSDLAQKGIECQECDEHAVERVEQIMLKQPWQQNCLFIGRKICDIDTLTHDLLDILDEQLRLLFQVFPSRKAQQNLVNFYNRNIHEQCLSLLDMVICHYQLNQTQTSQCWLDNRQTKGSENLSHLTALFEQTGIFPEFENQFIAERKWINFLIGFGVIPQSTHPLSLNISDAEQKVMSFQHHLKALLVQLPTYEAYVATARN

SEQ ID NO: 90489 - protein, 507 aa, Alteromonas sp.
  REGION 1..507: note = tr|A0A448Y4R2|A0A448Y4R2_9ALTE Tryptophan halogenase; OS = Alteromonas sp. 76-1 OX=2358187 GN=ALT761_04074 PE=4; SV = 1
MMSSVSGNLNAMGTGAKNSPVKRVVIAGGGTAGWMAAAALSKLLGKSLSITLVESKDIGIVGVGEATIPPIRTFHKLLGIDEKAFMRATNATFKLGIEFENWREQDHSYIHSFGVTGRECWAGEFHHFWLRAKALGFGGDFGDYCTELKAAQEGKFAYGERMPMNFAYHFDAVAYGRFLKGLAVEAGVTHIEGDIYHVSKCSHTGCISSIRLSDGQEVAGDLFIDCTGFKGLLIEKTLHTGYENWSHWLPCDSALAVQTESTGAPIPYTKSVAHDAGWRWKIPLQNRVGNGLVYCSNYMSDDEAKDTLLSAIEGETLNEPRIIRFTPGKRRLGWNKNCVALGLASGFIEPLESTSIHLIMTGIVRLMRLFPFDGITQSTVNEYNNKYNSEMAAILDFIVMHYKVTNREDSPFWEHCKSMDIPPSLTHKINLFKQTGRVFLDDGDIFRVDSWTQVMMGQGVVPEQYHRVADEMSETELERFLAGLKQQVDNQVSALPSHEQFLKQYLG

SEQ ID NO: 90490 - protein, 533 aa, Streptomyces sp.; identical to SEQ ID NO: 83428
  REGION 1..533: note = tr|A0A2N3TWY0|A0A2N3TWY0_9ACTN Tryptophan halogenase; OS = Streptomyces sp. 73 OX=2035222 GN=CLW15_6080 PE=4 SV=1

SEQ ID NO: 90491 - protein, 506 aa, Sphingomonas sp.; identical to SEQ ID NO: 87184
  REGION 1..506: note = tr|A0A0Q4M5R6|A0A0Q4M5R6_9SPHN Tryptophan halogenase; OS = Sphingomonas sp. Leaf42 OX=1736219 GN=ASE97_03575 PE=4; SV = 1

SEQ ID NO: 90492 - protein, 496 aa, Glaciecola sp.
  REGION 1..496: note = tr|A0A2Z6U2I0|A0A2Z6U2I0_GLASK Tryptophan halogenase; OS = Glaciecola sp. (strain KUL10) OX=2161813 GN=KUL10_05200; PE = 4 SV=1
MQNAINKVVIAGGGTAGWMTAALMKKILGQQVQIELVESEDIGIVGVGEATIPPIQTFNQVLGIDEKEFLRETNGTIKLAIKFENWRVDGESYFHTFGAPGANMGFCNFQHYWLRAIREGHRASLWDYDLNYLCCLEESFNKVNSQNPMFDMPYAYHFDSALYGRYLRKLAEQSGVVRTEGIIEHIQQDSENGYITGLQLKNGAQVQGDLFVDCTGIRALLLQKTLDIEYVDWSKWLPADSALAVQTERFEKTLPYTRSIAHKVGWQWRIPLTHRNGNGIVYSSRYTNDENAERILLSNLESEPVNDVKKVSFKTGRTVKQWDKNVIAVGLSSGFLEPLESTSIHLIQSAVVRLLKLFPQNGITQSVIDLYNQESEVEYETIRDFIVLHYHVNQRNDSDFWIDMRNMDIPDRLRNKIEVFSSVGNMFNDQHDIFRDASWLQVMLGQGIQPKDYHPAANVPTSEQLRETLNRVFEAKRQPLSKMLPHDEFLKRYLSS

SEQ ID NO: 90493 - protein, 504 aa, Sphingomonas sp.; identical to SEQ ID NO: 85828
  REGION 1..504: note = tr|A0A0Q4L7G2|A0A0Q4L7G2_9SPHN Tryptophan halogenase; OS = Sphingomonas sp. Leaf42 OX=1736219 GN=ASE97_15360 PE=4; SV = 1

SEQ ID NO: 90494 - protein, 501 aa, Glaciecola sp.
  REGION 1..501: note = tr|A0A2Z6UGU9|A0A2Z6UGU9_GLASK Tryptophan halogenase; OS = Glaciecola sp. (strain KUL10) OX=2161813 GN=KUL10_16600; PE = 4 SV=1
MNKKTKVVIAGGGTSGWLSAYSLIARLGAVLDITLIESDHIGTVGVGEATIPTMRNYHQLIGIDEQEFMRATQATFKLGIEFENWGQQQQSYMHSFGEIGQRSWMVEFHEFWMEAKANGFGGSLDDYCLELKAAKANKFATKLGNRSINYAYHLNATAYAQYLRGKSEALGVKRVEGKITHISNHANGNISCLYLDNGLQIDGDFFIDCTGFKSLLLGESLGVVFEDWGHYLAADSAFAVQTESVEDPKPFTVATAHSAGWQWRIPLQHRTGNGLVFSNQFLGDQAALDLLTQNLKGKMISEPRKLKFRTGRRQKAWYKNCVAIGLANGFIEPLESTSIHLVTTALVRLMKLFPISESTSFQAERFNQETNKELESIRDFIILHYHLTEREDSEFWRHYKNMQIPETLNHRMQIFKENAYAWPDEVGLFRVDSWVQVMMGQGIFPKQHHLGAKVIETKGLHQQLSSYKQMVEKAVAQLPTHVDFLKQYCDSHLQQMEKEQA

SEQ ID NO: 90495 - protein, 508 aa, Sphingomonas sp.; identical to SEQ ID NO: 87196
  REGION 1..508: note = tr|A0A0Q4M0J0|A0A0Q4M0J0_9SPHN Tryptophan halogenase; OS = Sphingomonas sp. Leaf42 OX=1736219 GN=ASE97_01160 PE=4; SV = 1

SEQ ID NO: 90496 - protein, 489 aa, Sphingomonas sp.; identical to SEQ ID NO: 85786
  REGION 1..489: note = tr|A0A0Q4L7L0|A0A0Q4L7L0_9SPHN Tryptophan halogenase; OS = Sphingomonas sp. Leaf42 OX=1736219 GN=ASE97_15370 PE=4; SV = 1

SEQ ID NO: 90497 - protein, 275 aa, Streptomyces sp.
  REGION 1..275: note = tr|A0A2N3TH76|A0A2N3TH76_9ACTN Tryptophan halogenase; OS = Streptomyces sp. 73 OX=2035222 GN=CLW15_0748 PE=4 SV=1
MRATLDIDPYVKVNPTLPTSGPWHGFQVDRQRLDALLLDRARQAGAEVRLGCRALEPVVAGGAVTGVRFSGGAWPPLRTRTVIDATERACWLSRALDLTAPPCSPRLLIWYGYASGACAQRDAAPAIVADDTGWTWTARVGPARYQWMRLDFVPRRGRKYGPPREFAGLESEAPARAADVSWRLCPEPAGPGWFVTGDAGVLLDPASSHGVLRAPLSGWTAGSLTAAAAARALDPGRAAGIYRQWLHEGAERDMIHLSARYATLGARGFGRAEGA

SEQ ID NO: 90498 - protein, 505 aa, Novosphingobium sp.
  REGION 1..505: note = tr|A0A258V9L4|A0A258V9L4_9SPHN Tryptophan halogenase; OS = Novosphingobium sp. 28-62-57 OX=1970409 GN=B7Y36_03700; PE = 4 SV=1
MTELRSILIIGGGTAGWLTACYLARYLDIARRRDVTITLVESPAIGTIGVGEGGFPTMRTTLQFLGIDEHTFIRKTAATFKQGIRFDHWLSAPREGRTSNFFHPFEAPLYAQDESLVARWLAQDPAKRPPFAEAVTIQQRVAAGARGPKAPGDGDYDAPLSYAYHFDAERLAAVLAARGIELGVERIDDRLLAAEAGPEGIAHLRFERTGTREADLYIDCTGLHAELIGGALAEPFVSVRRYLFTDRALACRVPYDQPSAELPSHTVAAAHEAGWLWDIALRDRRGVGCVYSSDHLDDARAHAILAAHPGVGAAGADDARLICYDPGYRARHWVGNCVAVGLAAGFVEPLEATGIVMIEAAAAMIAEFWTPNGPSDASAARFNALMIARYENLLNFLKLHYCLSRRDEPFWRTNTDLQSIPPALQELLERWRWRAPSRFDFALDSETFAFFSYQYILYGMGFKTRLPGPQAAKMTDPFAKVRAYGEQALRDLPLHRDLIDRINAT

SEQ ID NO: 90499 - protein, 494 aa, Pseudoalteromonas sp.
  REGION 1..494: note = tr|A0A4P9J0M8|A0A4P9J0M8_9GAMM Tryptophan 7-halogenase OS=Pseudoalteromonas sp. 16-SW-7 OX=2583375; GN = FFU37_07935 PE=4 SV=1
MNQNAIKKIVIAGGGTAGWMCSAAMAKLLGKNIEVCLVESDLIPTVGVGESTIPTLHIFHDLLKISESEFMAATNATFKLGISFEGWKQNQQSYFHSFGYVGQGCWAAGFQHFWLKGMQQGVAADIGDYCTEHVASRLGKFAVVPNQDRNHAYQLDAGLYAKFLRNFAQQNGAKRIEGMISKVNLEPTNGFIKSLTLGDGQIIEGDLFIDCTGFKGLLIEQALHTGYEDWSHWLPCDSAVAVQTELVSPIVPYTRAMAHKCGWQWQIPLQSRRGNGLVFCSKYMSDDEAKTALLNNVEGKPINEPRVIKYRTGTRRKHWNKNCVAIGLASGFIEPLESTSIHLIQQSIIRLMQNMPTKAIESCYQDDFNDKMRFEAENIRDFIVLHYYVTQRTDSDFWRYCKNMPIPESLAKRIELFKQSGHVYKAEQELFGEASWLQVMLGQGLMPQNYHPIVDSMSDDELKRFLESIKNHVAKKADSLPSHIDFINHYCKAK

SEQ ID NO: 90500 - protein, 515 aa, Ferrimonas balearica
  REGION 1..515: note = tr|E1ST93|E1ST93_FERBD Tryptophan halogenase; OS = Ferrimonas balearica (strain DSM 9799 / CCM 4581 / PAT); OX = 550540 GN=Fbal_2925 PE=4 SV=1
MAQQGIRRLIVVGGGTAGWLAASHLARKFRVNQHPTISVTLVESPNIPTIGVGEGTVPTMRQTLHWLGIRETDFIRQCDVTFKQSIKFIDWLRPPAGGQSHAYHHLFDYPAIQGLDPTPYWCQDPGGTPYADAVSVQAHLCEQGLGPKTLMHPEFGGATAYAYHLDAAKFSALLTDHAVNQLGVHHVLAEVTEVVADGNGGIAAIVTDRAGTLEGDLFVDCTGFSALLAEQTLKVPFIDKSDVLFVDSALAIQVPYERADAPIPCHTLSTATHSGWIWDIGLTERRGVGHVYSSRHCSDEEAERVLRAYLGPVAEGLSCRKIAMKVGYRERAWQGNCVAIGLSGGFVEPLEATGLLVFDLTARMLAEMLPGQREAMPAVAERFNQRVRHSWDRVIDFIKLHYVLSQREDSAFWRDNRAPESIPQSLKDNLAYWQQQQPSGYDFASNLSIFNLENYLYVLYGMEFDTEVCAERLDQGEAARQKMAQLAQQAERLASQLLPHRQLLERIRQHGLQKV

SEQ ID NO: 90501 - protein, 414 aa, unidentified
  source 1..414: note = Paraburkholderia phytofirmans
  REGION 1..414: note = tr|B2T674|B2T674_PARPJ Tryptophan halogenase; OS = Paraburkholderia phytofirmans (strain DSM 17436 / LMG 22146 / PsJN) OX=398527 GN=Bphyt_3046 PE=4 SV=1
MSTHSSKRTTVDVVIIGAGPAGAVAAALLRKAGRSVLVLERQHFPRFSIGESLLPQSMAYLEEAGMLRAVVEAGFQYKNGAHFVYRDQSSAFDFRDKHSPGWGTTYQVERAVFDDILIRCAAEQGADVRFGHTVRAVHTGATPLVDVIDEADHAYQIEARFVFDASGFGRVLPRLLNLEAPTRMPTRAAIFTHVQDGIPAGMTDRNKICVATHPEHRDVWFWMIPLAGGRSSVGCVAEASFLDVPDAERDAKLRALIQQEPTLNRLIGNAPFLMPVRHIGGYAANVERLHGPGYALLGNAGEFLDPVFSSGVTIALRSAHLAVQTLNRHLDGEQVDWSAAYDVPLRKGIDTFRAFVERWYSGALQDIIFYPEQTPSIRRMISAVLAGYAWDETNPYVADPVRRLNALHEVCMQR

SEQ ID NO: 90502 - protein, 507 aa, Massilia lutea
  REGION 1..507: note = tr|A0A4V0Z3L1|A0A4V0Z3L1_9BURK Tryptophan 7-halogenase OS=Massilia lutea OX=321985 GN=EWM63_13210; PE = 4 SV=1
MSSLINHVVVVGGGSAGWLTAGVLAADHPALRVTLVESPDVAPIGVGEGTWPSMRDTLHRIGVSESAFFRECDAAFKQGSRFNGWRHGGGADDYYFHPFVLPQGFGEADLVASWQRDFPDVPFADLASFQPHLCTNGRAPKQPATPEFAAVANYGYHLDAGKFGVFLRKHCLEKLGVRYVPDHVMAINSHGNGDIASLQTKEHGALDGDLFIDCTGMQSLLLGRHYGVPLLHRKDVLFNDCALAVQVPYEREDSPIASQTTSTAQRAGWIWDIGLPTRRGIGHVYSSAHTSDEQAEADLRAYVGTDMPAPRKLTFQPGYREQFWHRNVVAIGLSAGFIEPLEASALALVEMSAAMVSDDLPATRDAMDIVARRFNDAFTYRWERVIEFLKLHYVLSGRNDSSYWHDNRRAETIPARLQELLVLWRHRPPSRLDFNRIEEVFPSASWQYVLYGMGFRPDRERITRRGSTGNADGYFREAAELTRKMLRALPSNRELIDHIRLHGLQKI

SEQ ID NO: 90503 - protein, 523 aa, Burkholderia metallica
  REGION 1..523: note = tr|A0A1B4HZ21|A0A1B4HZ21_9BURK Tryptophan halogenase; OS = Burkholderia metallica OX=488729 GN=WJ16_17180 PE=4 SV=1
MRNLMKSILIVGGGSAGWMTAAYLSKAYGHQVKISLIESPTIPKIGVGEATIPNLQKVFFDFLGLKEQDWMPHCNASFKSAIKFIGWNTKSDPADYFYHMFGQLKEVNGIPLSHYWAHLKNTGQTSEPFAYACYNKSTLLDAKLSPKDRDGNSRMSHAWHFDAHLVANYLRDLSVSWGVEHIQGEVVETRLNEDGGIRSVRLQSGAEIAADFFVDCSGFKGLLINQALKEPFIDMSRYLLCDSAVAASITHDDEANGVEPYTSAIAMSNGWTWKIPLLGRFGSGYVYSSSFSSKDTATEDFLKLWGVREDQVKLNHIKFRTGRNRRAWVKNCVSIGLASCFLEPLESTGLYFIYAAIYQFAQHFPDATLDPRLADAFNKKIEVMFDDCRDFIQTHYFTTQRNDSDFWRANKHDLTISDSLREKLDAYHAGLVVCPPVTVDERNYYGNFDLEFANFWTNSNYYCMFTGLNWMPQKSHPKLVYHDAWMKQALAEFQNLKREEAALSATLPTNYDYLRNIRGTRSS

SEQ ID NO: 90504 - protein, 496 aa, Shewanella xiamenensis
  REGION 1..496: note = tr|A0A1E3V1J0|A0A1E3V1J0_9GAMM Tryptophan halogenase; OS = Shewanella xiamenensis OX=332186 GN=ABT47_20245 PE=4; SV = 1
MSQIKDIVIVGGGTSGWMTAALLAKLFKHTLNITLVESEDIGTIGVGEATIPPLQLFNSVLGIPENEFIQATHATFKLGIQFEHWGKQGDSYMHAFGSIGKDIGYTQFHQYWLSTQPEMMASFWDYSLNYQAALNNKFQSIEQIPHSPLSGLTHAYHFDAARYAWLLRQYSEKSGVKRIEGKIESVNCAANGHITNLTLVSGNSVQGDFFIDCSGFAALLIGKTLNVGYESYQDWLLCDSAYAVPSEKACEIKPYTRAIAHEAGWQWRIPLQHRTGNGIVYSSRYMKDEEAKAKLLSTLEGKPLAEPKKISFIPGRRLKQWQHNCVAIGLSSGFLEPLESTSIHLVQSAIIRLTKLFPHQGVVQATVDEFNRQSQLEFEQIRDFIILHYCLNQRSDSDTDTLWSACQQMQIPESLQQKISLFSETGAIFRHKDELFTEAAWVQVMLGQGIIPTDYNPLANTVAPEALTEFLSNIKVIIKNTVSNMPTHEQYLAQLV

SEQ ID NO: 90505 - protein, 515 aa, Sphingomonas melonis
  REGION 1..515: note = tr|A0A154NBM6|A0A154NBM6_9SPHN Tryptophan halogenase; OS = Sphingomonas melonis TY OX=621456 GN=AVM11_02210 PE=4; SV = 1
MTLPVPDHAIRSIVIVGGGTAGWMAAAAFSRLLNTGYTRVTLIESEEIGTVGVGEATIPPLLNFNRMLGIDENEFLAATAGTFKLGIEFRDWGAIGDRYIHPFGTFGQDLQGISFHQLWLRERSRRAIPDITAWSMSAQAAARGRFGRAREDARSPVRELFYAYHFDASLYARYLRGYAERGGVTRIEGRIADVRLRGEDGYVEALTLVDGRQVAGDLFIDCSGFRGLLIEEALHTGYESYAQWLPCDRAVAVPCALPSAREPDPYTRATARAAGWQWRIPLQHRMGNGYVYCSEFLSDEAAEFDLLASLEGEPLGDPRRLRFTAGRRRQSWNRNVIALGLSSGFIEPLESTSIHLVQAGIQRIVAMFPDTRFDPAERDEFNRQLHDLYEDIRDFIILHYAQTRRTDTPFWDRVRTMPLPDSLTRKLELWRGKGRLFREGYDLFSVPSWVAVCLGQGLVPSTWEPAADALDETLVAEAMETMRRGYADTAERLPTHGDFLRMVAPSPLANWGQTR

SEQ ID NO: 90506 - protein, 667 aa, unidentified
  source 1..667: note = Paraglaciecola arctica
  REGION 1..667: note = tr|K6YVW2|K6YVW2_9ALTE Tryptophan halogenase, putative OS=Paraglaciecola arctica BSs20135 OX=493475; GN = GARC_5357 PE=4 SV=1
MLKSIVIVGGGSAGWITAGLLAAEHATKDNQRITITLVESKNIGTIGVGEGTWPTMVGTLKKIGIAETDFLQCCNASFKQASKFKQWVSGEESDQYYHPFSMPQDFDKVNLAPYWLAQKERIPFAQAVSLQATLCDKKLAPKQVESPDYATVENHGYHLDAVKFAALLTQHCTTKLNVKHIVDDVIAVQATDNNDISAVVTKNHGAIAGDLFIDCSGLAALLIDKHYKVPFISKKDILFIDKALAVQVPYSSENAPIESATVSTAQTAGWIWDIGLPTRRGVGHVYSSKYISKDEACAQLKNYLSNDVADVEKLTFRELNISPGYREKFWVNNCVAVGMSAGFIEPLEASALVMVELAALMISKHLPASRKAMDVVAKNYNEIFVFRWERIIDFLKLHYVLSKRTDSQFWIDNKKPETIPDTLKDLLTLWQEQAPGNNGYLSPYDLFPAASYQYILYGMGFTSQPNLIDSSSEAFALAKKSLEKVQDRKNNIPKLLPSNRDLLNEIAKIKPKQVIQQNWVKVDLLTSNELAKNFPLFLKKIDTQYVCIALLGFEQAENLYALQDDAQLLEQSNILQTSHQHSAHQQSYIEQLVQHDLIEPVQLDITFNNNQSVVVSELFTINQPHLKKITASEINETLSERALSLASNLIESLNNIPMLIAMKNKLI

SEQ ID NO: 90507 - protein, 534 aa, Sphingomonas sp.
  REGION 1..534: note = tr|A0A430DU86|A0A430DU86_9SPHN Tryptophan 7-halogenase OS=Sphingomonas sp. ABOLF OX=1985879; GN = CA235_02390 PE=4 SV=1
MNEHTIRNVVIVGGGTAGWMAAAAFSRFLNNGATRITLVESEEIGTVGVGEATIPPLLTFNRMLGINENDFIRETGGTYKLGIEFDGWGDVGERYFHPFGAHGHDLGGIHFHQLYLRERKRRVMQDISAWSMSAVAAQAGKFARPAEGAQSAVKELLYAFHFDASLYARFLRRYAEAGGVQRIEGKIVEVALRPEDGHVAAVKLENGQAVEGDLFIDCSGFRGLLIEEALETGYEDWSQWLPCNRAVAVPSSYSGDPDPFTRATARGAGWQWRIPLQQRMGNGLVYCSDFMTAEAAERELLANLEGEPLAEPRHLSFVTGRRKLGWNRNVVALGLSSGFVEPLESTSIHLVQAGITRLIALFPDRRFNPVERDEYNRQMRDLYEDVRDFVILHYKATRRRDTPFWDRCRTMDVPETLQRKIDLFRAKGRVFRDGAELFATTSWVAVCLGQHIVPEEHEPAADALDEDKVAAALEEMRQGYLRVAAQLPTHAEFLRHIGAALANTPAPPQPAEVPGEPNFSFASETPFNFSANPL

SEQ ID NO: 90508 - protein, 499 aa, Sphingopyxis bauzanensis
  REGION 1..499: note = tr|A0A246JVS1|A0A246JVS1_9SPHN Tryptophan halogenase; OS = Sphingopyxis bauzanensis OX=651663 GN=CDQ92_08860 PE=4; SV = 1
MSDKKPVQRIVIAGGGTAGWMMASAIARTMGQTVDLTLVESEQIGTIGVGESTIPPLVNFNRILGIPEPEFMRATQATFKLGILFDNWKHDGDSYFHSFGLSGKDHWSAGFQHFWLNARERGHEQPYADYCLELVAAMQGKFAHLPEERMNYAYHVDATLYGRYLRKLAEADGCKRVEGKIARVELNDENGDIAALHLDGDRRIEGDMFVDCTGFRGLLIDGALHAGFEDWSHWLPNDSAIAVQAKHVGLPQPYTQAIAHDAGWQWRIPLQHRMGAGIVYTSGYLSRDEAYDRLMRSVGEPLIEPFDIKFKGGVRRRQWYRNCVAVGLSGGFVEPLEATTVHLIQRAVLRFIRLMPNGRVSERDAQEFNDQQRLDIEQIRDFVVLHYKATNRRDSPFWRHVANMPVPDSLQQKIELFRETGRVFRKYEELFAENSWVQVMMGQGIEPQSYHPIADKLRDDEVERLFQTIRDNIAQTVATLPEHHAYVARYCGAEAPKAA

SEQ ID NO: 90509 - protein, 506 aa, Luteibacter sp.
  REGION 1..506: note = tr|A0A1I0Q9D0|A0A1I0Q9D0_9GAMM Tryptophan halogenase; OS = Luteibacter sp. 329MFSha OX=1798239; GN = SAMN04515660_3211 PE=4 SV=1
MSHAITNIVVVGGGTAGWMAASALSRVLNRQATVRLVESDEIGIVGVGEATVPHIKAFNNLLGINEADFVARTQGTFKLGIQFRDWGSLGDSYIHGFGVMGHDIGLTPFHQYWLKGRLAGCATDLIDYSVNTVAAIRGKFMPAPVDVPASNPLGGIAYAYHFDAALYARYLRAYSEARGVRRTEGRIRDVELDPATGHVRAVLLDDGERVEGDLFIDCSGFRGLLIEGALKTGYEEWTRWLPCDRALAVPCERVEAPTPYTRCTAREAGWQWRIPLQHRTGNGYVYSSQYIGDDAATAKLLARLDGKALADPRPLRFVTGMRKKSWNRNVVALGLASGFMEPLESTSIHMIQAGISKLLQLFPSNGVMDPVLADRFNEQTRFECERIRDFLVLHYKATTRDDSPFWNHCRTMEIPDSLQANIDLFRHSGRFFRNGEEMFGAVSWIQVMIGQGIMPTGYNPLVDQMPDDDLPKFLNSVREIVSKNVDLMPTHQQFIDRECRAAAEAV

SEQ ID NO: 90510 - protein, 513 aa, Devosia sp.
  REGION 1..513: note = tr|A0A2U0T5S7|A0A2U0T5S7_9RHIZ Tryptophan halogenase; OS = Devosia sp. PTEAB7WZ OX=2135613 GN=C7966_10598 PE=4 SV=1
MDEPSHYVIVGGGTAGWIAAFIIQDEARRRGLDFRLSVVESSKIPTVGVGEATTAAFRVLLRHFCIDELEFMRKTDASFKLGIRHEDWRRKGYTYYGPIDDPHQVVQPPAGAPSDYLNVYAVAAGRPVQDMHMFQPLLEQWKAPFARKPDGSLIPLGPFHHAYHFDQALVGKFFASKSKGVEKVDAIVEGIERHPETGDIMALVLADNQRLEGDFFIDATGFRKQLIVKELQAPWVSYAHELPVNRALPFWIDVKEGEELPTYTRAWAQNSGWMWQIPTRTRFGCGYVYSDEFSTPEQAKAEVEAALGHEIEVRGDIRFQIGRLEKAWIGNCLAVGLSSSFLEPLESTSIHGTIVQMMLFAQRYMDRPDRVEQGARDDYNARVGRQVDDFRTFVNTHYVTERDDTPFWREVRANRIHPETKERLARWRERMPRAEHFPNYLGGLPHIETQLHYPVLDGLGLLDQSLARREMEAAPKLRQFARETFESLVREYRGAAQQALGHAEFLQIVQDMG

SEQ ID NO: 90511 - protein, 516 aa, unidentified
  source 1..516: note = Streptomyces toyocaensis
  REGION 1..516: note = tr|A0A081XRD9|A0A081XRD9_STRTO Tryptophan halogenase; OS = Streptomyces toyocaensis OX=55952 GN=BU52_16995 PE=4; SV = 1
MIGHVVIVGGGTAGWMAATYLKATFQDRLDVTLVESANVATIGVGEATFSTVRHFFDYLGLAEEEWMPSCNATYKLAIRFENWRGRGEYFYHPFERLRTADGFTLADWWLKLGPHDRRLDEACYVLPALCDAKRAPKRLDGTLFHNSLHDGGDRPRRTTMFQQDTQFPYAYHFDAALLAEFLAGHGTRQGVRRVLDDVVDVRRDERGGISEIVTREHGPLAGDLFVDCTGFRGLLINKTLEEPFESYENVLPNDRAVALRVPVDTEPDGLAPYTTASARDAGWIWTIPLFGRIGTGYVYSSQFCTPEEAEAELRSFVGPQAADAEANHIRMRIGRNRRSWVHNCVAIGLSSGFVEPLESTGIFFIQHGIEQLVRHWPDQGHDQVLAQGYNESVARCLDGVREFLVLHYKAAARSDTPYWKAADERELPEGLAERLRLWEARLPSGSSVYPYYHGFESYSYNVMLTGLGRAPQRSHPALDLLDPTAARDQFADVRRQAERLAGELPSQYEYLAQLHG

SEQ ID NO: 90512 - protein, 515 aa, unidentified
  source 1..515: note = Paraglaciecola arctica
  REGION 1..515: note = tr|K6YD38|K6YD38_9ALTE Uncharacterized protein; OS = Paraglaciecola arctica BSs20135 OX=493475 GN=GARC_4889; PE = 4 SV=1
MKTTVVIVGGGTAGWLTAGIIAAKHCSVDNSASPSTQQTEVILVESPDVKNLGVGEGTWPTMRDTLRQIGISERVFLSCCDASFKQGSKFVGWLDEGDEYYYHPFMAPAGYGSVSLAEHWSATPKDIDFESWVSAQGTICEQNLAPKTPQMSEYAFALNYGYHLNAGKFVKMLHTHCVEKLGVQYIQGHVEHVLEDKNGDISEIVLASGQHVAGNLFIDCSGFAAILIGKHYQIPFQSKQHVLFNDTALALQVDHGSEDVPIASCTVATAQKNGWIWDISLQSRRGIGHVFSSDFSDVGQAEDALFNYVKNDPFLAAQDITPRKIKFTPGHRDTFWHKNCVAIGVSAGFVEPLEATALVLIEKSAEWISEQLPRDRSAMTVLANRFNLLTLQRWQEIIDFLKLHYVLTNRTDSEYWRAHQQADSIPESLQDALALWRSQAPGVYETNQRFELFSSASKQYVLYGMGFHTTREQCGLAHQEISMAKRFRNETIHATEKLLSVLPSNRHFLSRLKKV

SEQ ID NO: 90513 - protein, 523 aa, unidentified
  source 1..523: note = Bradyrhizobium genosp.
  REGION 1..523: note = tr|A0A4Q7FDU5|A0A4Q7FDU5_9BRAD Tryptophan halogenase; OS = Bradyrhizobium genosp. SA-3 OX=508868 GN=CWO91_23215; PE = 4 SV=1
MTSESIVILGGGSAGWMTAAYLKKALRGVDIALIESANVGTIGVGEASFSTMKLFFDYLGLDESEWMPPCNATYKLAIKFTNWTAGGGHFYHPFQRYEVIDGNNLGEWWLHLKPNEAPFDSACFSTPSLCENNRSPRYLNGEVFDHKVKTTFNFASEAPPNTFLSDHRLQYPYGYHFEASLLASFLKNYATALGVRCIKDDVEDVLLSSDGSIDCLRTRRNGAVKGSLYVDCTGFRGLLINQALKEPFVSFQDVLLNDRAIALQVPYQADTSNIQPFTSATALPSGWVWNIPLYNRVGTGYVYCSQFISSEQAESDLRAHLGPRAKDCIANHIKMRIGRCRNSWVKNCVAIGLSSGFVEPLESTGIFFIQFGIEELLRHYSGSTTDPDVVADYNRIIADCIDGVRDFLVLHYRASDRADTPFWKATKEISVPSSVDQRLALWKKRLPNERSINSCYHGFEFYSYSVMLLGLHYRPVNSLLTLRHSNVSAAVAAFQAVRDRTAELVRTLPSHLEYLQHLRRARN

SEQ ID NO: 90514 - protein, 500 aa, Sphingobium sp.
  REGION 1..500: note = tr|A0A013WZL1|A0A013WZL1_9SPHN Tryptophan halogenase; OS = Sphingobium sp. Ant17 OX=1461752 GN=BF95_05560 PE=4 SV=1
MSTLPPPRRIVVAGGGTAGWMTAAALARTLGPVAQVTLVESEQIGTIGVGESTIPPLVAYNRILGINEADFMRATQATFKLGINFENWRVPGESYFHSFGGTGKDHWSAGFQHFWMHGQAQGHDAPYGDYCLELKAAEAGRFAHLPDDRMNYAYQLDSGLYARFLRRMAEADGAQRIEGRITQVELDSESGDIAALLLDGDRRIEGDLFIDCTGFRALLIEGALHVGYDDWTHWLPCDGAVAIQTSSVRPPVPYTRAIAHEAGWQWRIPLQHRQGNGIVYCSSFLDPDAALEKLLASVEGDKLVQPNPIRFRTGARRRQWHRNCVAVGLSGGFMEPLESTSIHLIQRAVLRILRMLPAGTVSPLDIAEFNDQQMTDMEQIRDFLILHYKATDRRDTPFWRHCAAMAVPDSLAHRMELFRQTGRVFRKNEELFAENSWVQVMMGQGITPQSHHPIASKLRPDELTHLLASLKDQVSRTVANLPDHAAYIARYCSAQEPVAA

SEQ ID NO: 90515 - protein, 536 aa, Sphingopyxis bauzanensis
  REGION 1..536: note = tr|A0A246JS34|A0A246JS34_9SPHN Tryptophan halogenase; OS = Sphingopyxis bauzanensis OX=651663 GN=CDQ92_13745 PE=4; SV = 1
MVATSWPVSPISSDGTSGPAHKSGPLPDKRELNRVGDSRITKVVIVGGGTAGWMAAAALSRTMDNLSIRLVESDEIGTVGVGEATIPAIRLFNALIGIDENEFIRETGGTFKLGIQFHDWGRIGDVYMHAFGQIGRSLGMLQFPQYWLRGRNEGIAGRLGDYSLNETAGRQNRFARLPQIPNTSLDGIAYAFHFDAALYAAYLRKIAEQAGAERTEGKIFGVRRNGETGHVEAVVLEDGTAIDGEIFIDCSGFRALLIEEALGTGFEDWTHWLPCDRAIAVPSENAGPARPYTQAIAHKAGWQWRIPLQHRTGNGHVFCSDFISEDEATATLLANVEGRPLAEPRMLRFRTGMRRKAWNGNVVALGLASGFLEPLESTSIHLIQNGIAKLLAHFPDRDFDAANIDAYNRRVRFDYERIRDFVILHYHANQRTDSPFWIRCREMGIPETLAHKIELFRSQGQIVREGDELFIEIGWFQVLTGQNIMPDGYHPMADQLTHDELASFFADIETIVARTASHLPGHDEFIAQHCAAGVPA

SEQ ID NO: 90516 - protein, 519 aa, Sphingobium sp.
  REGION 1..519: note = tr|T0GYM2|T0GYM2_9SPHN Tryptophan halogenase; OS = Sphingobium sp. HDIP04 OX=428994 GN=L286_07470 PE=4 SV=1
MGNFDMIHPVRNIVIVGGGTAGWLTAGVIAARHRSRIGNGFTVTLVESPNTPIIGVGEGTWPTLRTTLSRMGISETDLFRECDAAFKQGARFARWTTGTPDDGYYHPLMLPQNFGQVNLAPHWLAGDGDESFCDSVCSQGRICDDGLAPKTIATAEYDALANYAYHLDAGKFAPFLQRHCTEKLGVRHVQADVEQVLMKEDGDIRAIRTTQAGEIEGDLFVDCTGFKALLIEGAMKVPFRDCNDVLFCDTALAMQVPYDRPDSPMASHTISTAQSAGWIWDIGLPTRRGIGHVYSSNHISDEEAERELRAYIGPPAEGLSARKIPIRSGHRETFWKGNCVAVGLAAGFLEPLEASAIVLIELSAKIIAEQMPACREVMDIVASRFNATTHYRWGRIIDFLKLHYVLTKRTDSDFWRDNVREETIPDRLQELMLLWRYQSPWFLDEFDRVEEVFPAASYQYVLYGMGFRTEVDRPALARDAHLADRARRENAAMTAKLRAGLPRHRDLIDKIVTHGLQPV

SEQ ID NO: 90517 - protein, 518 aa, Sphingomonas sp.
  REGION 1..518: note = tr|A0A430DG31|A0A430DG31_9SPHN Tryptophan 7-halogenase OS=Sphingomonas sp. ABOLF OX=1985879; GN = CA235_18110 PE=4 SV=1
MRKRLLIVGGGTAGWLTAGYLAKRLSTDLPGGVAITLVESPEIGILGVGEGTFPTIRRTLKTIGISEVDLVRKCGASFKQGARFAHWRFTPGAPGPDHYTHPFQLAQADNGLDLLPYWLLGHGGEANWDEVCSPQKKAADAHRAPKLPSHPDYVAPLNYAFHFDAVALAGLLRDKAVENGVTHLTDRVTQVHVGEDGAIAGVDTEANGRLDADLYIDCTGFRAELIDKALGQPYRSCRDVLFCDSALAIQVPYRDEREPIVSYTLATAQEAGWMWDIGLDRRRGIGHVFSSAHTDDTRAEELLRAYVGDVGGDQEVRKIRFEAGYRETNWHKNCVAIGLSSGFFEPLEATGIVFSEVAAGLVANLFPWGGDHETSARQFNANMLQRYERARDFIKLHYCISERRDSEFWRDNVAASSIPDSLHDLLDRWRFRPPTEIDIDANVDIFTEASWQYVLYGMGWKTDLSARAGAYRYVEDARRAFAEVERQAAFAIANLPSNRQLIDYARTRSFGPPQGVAR

SEQ ID NO: 90518 - protein, 518 aa, Aestuariibacter sp.
  REGION 1..518: note = tr|A0A2D6XXX9|A0A2D6XXX9_9ALTE Tryptophan halogenase; OS = Aestuariibacter sp. OX=1872400 GN=CL531_05855 PE=4 SV=1
MTSASQPVRKVVIVGGGTAGWLTAGRIAAEHATKAHHPVEVVLVESPNIPTIGVGEGTWPTMRNTLIKLGIRETDFIRECDASFKQGAKFAGWVTGDADDFYYHPLMLPQGFSQGNLGPYWQQHQDTIEQSFSNAVCFQEALCEHNRAPKSIRHAEFGAVANYAYHLDAGKFTAFLTRHCTEKLNVRHVLADVTGVTAHDNGDIRAIQTQQAGEIDGDLFVDCTGFQSLLLGKHYKVPFVPCDDVLFIDRALAVHVPYDSPDAPVATHTISTAQQAGWIWDIGLQSRRGVGHVYASRYQSEQQALDQLAQYVGPQFNDLSVKQIQIQSGHRAHFWHNNCVAVGLSAGFLEPLEASALVLVELSATMLAEQLPVNHATMPIIAKRFNQTFQYRWQRIIDFLKLHYMLTKRTDTAFWRDNCDPATIPDSLQELLDLWRYHPPYDHDFTSNNEVFPAASYQYVMYGMGFESDLSFGQQQVAKAFAQQQLQMNQQARQKVLSALPTHRDLLNKINQYGLQPV

SEQ ID NO: 90519 - protein, 504 aa, unidentified
  source 1..504: note = Paraglaciecola arctica
  REGION 1..504: note = tr|K6XE85|K6XE85_9ALTE Tryptophan halogenase; OS = Paraglaciecola arctica BSs20135 OX=493475 GN=GARC_1977; PE = 4 SV=1
MKPTQDPIKKIVIVGGGTAGWIAAATLGNIFKQKDVQIELVESDEIGIIGVGEATIPPLLATIRSLGIDEVEFIKATQASFKWGIQFEDWRIKGGSYFHPFGSIGSIIDGHDFYQLWLKSQAEGDTPPLMAHSPEAVLSEQGRFFLPFKAAGTPLAGAQYALHLDSALVGKFLRKFSEKLGVVRSEGKVETVEQNANGEIHSVVLNSGRQIQGDFFIDCSGFRGLLIEQSLNCGYDDWSAYLPCNRAVAVQTENVGATPPYTVSKARDAGWTWRIPLQHRTGNGYVFCDKYCSDQQAIDTLLDSVEGKVIGEPRVIPFVTGIRKKTWHKNCLALGLAQGFLEPLESTAIHLVSKTLAFFVRMFPDRQTNQVQIDEFNRRVRADYQEIRDFLVLHYCTTERDDSEFWRYCANMPIPESLQQKIDFFSVAGGLIPGVEELFQPTSWYAVFDGMGVKPQRYNPTADALDYVKLKTSLHSGQQAITNIARQQPSHDAFIQEYCRAPKP

SEQ ID NO: 90520 - protein, 505 aa, Xanthomonas translucens
  REGION 1..505: note = tr|A0A514EGP0|A0A514EGP0_XANCT Tryptophan 7-halogenase OS=Xanthomonas translucens pv. cerealis; OX = 152263 GN=E4A48_17335 PE=4 SV=1
MVQIRKVVIAGGGTAGWIAACALAHQFRDLLDITLIESEQIGTVGVGESTVPPIRSFHRFLQIDEQEFLRAVAGTFKLSISFENWRRPGERYIHPFGLTGQSTLACAFHHFWLEAQRRGMLSELGDYCLETVASRLDRFALQQSLPVNYAYHLDAGLYARLLRRHAERYGLKRVEGRIQQVRQHAESGCVEALLLEDGTLIEGDLFIDCTGFRGLLIEQTLHTGYEDWKQWLPCDRAVAVQTEAVAAPVPYTRAIAHAAGWRWHIPLQHRVGCGLVFSSAHLSDDEARAKLLHDAAAPPIKDPWLVPFRTGRRRKAWNKNVVALGLASGFIEPLESTSIHLTIAAVMRLIMLFPSEGIAPSMVDLYNDVSRAEMEHVRDFIILHYHANQRDEPMWRACREMALPDSLQQRLRAWRERAHAWQGADELFRVDSWIHVLLGQGIVPAQHHPLARALPDQQLQQFLDAIRQPIDRAVAQMPSQQDFIARYCKAGPEVWVGPASVAAPA

SEQ ID NO: 90521 - protein, 495 aa, Sphingomonas sp.
  REGION 1..495: note = tr|A0A430DUF7|A0A430DUF7_9SPHN Tryptophan 7-halogenase OS=Sphingomonas sp. ABOLF OX=1985879; GN = CA235_02395 PE=4 SV=1
MLDEPVRSVAVFGGGIVGWSAAVALKRRVPGISVTIVPVPPPANALADQMPQTLPSAIGFHDDVGLREEDAVLRAGGGWRLGTLFEDWASGQPAYVHAYGSYGQSFGTASFHHHWTRAAHAGLAAPYDAHSPAAMLARAGRMLPPDPEPGSPFADIQAGLALDIGRYRAMLEAFARHVGVVVRTGEVAEVRLRGGDGFIERVALADGGSVEADLFVDASGPEGVVRGAIDTAWEDWRPWLACDRLMQASATTATPSMLDHVVALPAGWRWQSALPGATSHGLCYASGLLGDEDARRLLADASGVEPLPAIGFRQGTRPEPWARNCVAIGDAAVVIEPLEWTNLHLAHSAIDRIISAMPGRACHPLEIADYNRQAVAEVTRVRDFVLCHYATARRPEPFWQPRAALPESLARTLRLFAERGRLPFFEEETFTRDSWLAILLGQGLIPRRIDPLIGTTPAHQSDAAMAGYRAAIARALPQFPTAAQHHAAQHARITR

SEQ ID NO: 90522 - protein, 507 aa, Aestuariibacter sp.
  REGION 1..507: note = tr|A0A2D6XYL2|A0A2D6XYL2_9ALTE Tryptophan halogenase; OS = Aestuariibacter sp. OX=1872400 GN=CL531_07125 PE=4 SV=1
  VARIANT 194: note = Xaa can be any naturally occurring amino acid
  VARIANT 255..256: note = Xaa can be any naturally occurring amino acid
  VARIANT 315: note = Xaa can be any naturally occurring amino acid
  VARIANT 317: note = Xaa can be any naturally occurring amino acid
  VARIANT 320: note = Xaa can be any naturally occurring amino acid
  VARIANT 327..328: note = Xaa can be any naturally occurring amino acid
  VARIANT 344: note = Xaa can be any naturally occurring amino acid
  VARIANT 390: note = Xaa can be any naturally occurring amino acid
  VARIANT 420: note = Xaa can be any naturally occurring amino acid
  VARIANT 433: note = Xaa can be any naturally occurring amino acid
  VARIANT 465: note = Xaa can be any naturally occurring amino acid
MVTTPQHICIAGGGTAGWMTAAALANRLPHSHYRITLVESAQIGTVGVGESTIPHIRQFNSALGITEDEFIAATSATCKLGIEFTDWGKVGESYIHPFGELGKPLAGIEFHHLWQAASLQGLDVPIESFSVAAVAARQRKFSPPHASREHLLSTYTYAYHLDASAYARFLRDYAEQRQVIRVEAQIREVKRDHXGGPITALSLDNGQEISADWFIDCTGFRSLLIGDYSQAEFIDWSEWLKTNRAVVLPCEKDGXXRPYTKAMARDAGWQWQIPLQHRIGNGYVYCSDYISDEEAEHTLRSTLPGEALADVRFLXFXAGXRKQLWVXXCVAIGLSAGFLEPLEXTSIFLIQMGIAKFLEHLPGTHNDAARNQYNRELTEQYQVIRDFIIXHYYLTQRHDTPFWRDCQAMTLPDSLTELIXAFRDSGLVDKKQXGLWPAVCIGQHLHPKQVDSRVAAIPPQQLIGXLNQLKSDIAAQVATLPNMDDYLSSLVAQTPLQKSGMRAGGQV

SEQ ID NO: 90523 - protein, 505 aa, Xanthomonas translucens
  REGION 1..505: note = tr|A0A0K2ZZG5|A0A0K2ZZG5_XANCT Tryptophan halogenase; OS = Xanthomonas translucens pv. phlei OX=487906; GN = XTPLMG730_3026 PE=4 SV=1
MIAAPLRNLVIVGGGTAGWMAAAALARVLGPDYRITLIESEQIGIVGVGEATVPHIKAFNNLLGINEAEFVRQTQGSFKLGIEFVDWQRQGTSYIHGFGTEIGHSLGLLPFQQYWFKQALAGKAKPLGAYTLNTVAARRGKFMTSASDAPPNSPLGNIAYAYHFDASLYAAFLRRFSEQRGVTRREGIVEQVQLDPESGDVLSVRLASGDTIAGDLFIDCSGFRGLLIEQALHTGYHDFTHWLPCDRALAVPCAKVGPPTPYTRATARTAGWQWRIPLQHRTGNGYVYSSAHISDDEAAATLLANLDGAALADPRPLRFVTGRRKQVWNRNVVALGLASGFMEPLESTSIHLIQSGISKLLELFPREGISPVLVQRYNDRIAFEFDRIRDFLVLHYTATERDDSDFWRQCRAMAITPELQATLDLFGDSGRFYRNGDEMFAEISWVQVMVGQGILPRAYHPLVDQVPAADIERFVASIEQTIGHCVDAMPPHQAFIDRYCAAAPR

SEQ ID NO: 90524 - protein, 519 aa, unidentified
  source 1..519: note = Paraglaciecola arctica
  REGION 1..519: note = tr|K6Z8P1|K6Z8P1_9ALTE Tryptophan halogenase; OS = Paraglaciecola arctica BSs20135 OX=493475 GN=GARC_2825; PE = 4 SV=1
MNQSEFKKIVIVGGGTAGWLTACIIAAEHQCKHSQTVKLTLVESPQVSTIGVGEGTWPTMRSTLQNIGISEAEFFRCCDASFKQGSQFIGWLDGTKKDSYFHPFTVPHGLGQADLAKHWRKFNTDSSFADCVSFQPELCRLGLAPKQISTPEYAAVANYGYHLNAGKFADLLKTHGTQNLGIEHLSAHVEKIQSLPSGHIQAIETDKGTIEGDLFVDCTGMNALLIGKHFNVPWIPKHDILFNDSALATQLEYEPNNTQIASHTLSTAQSNGWIWDIGLTTRRGIGYVYSSRHCSDDEAELVLHKYLSDKTAGNYQQNTNIRKISFKPGYRQQFWIKNCVAVGMSAGFIEPLEASALALVELSAKMISQELPENFQMMAICAKRFNQRFTYRWERIIEFLKLHYVLSKRTDSDYWKENRDLNSIPERLQELITLWQYQPPSTNDFYDVEEVFPSSSYQYILYGMGFKPPTHVTSRRNSDFSKAAHFYQESKMLTQRYVAGLTSNRDLIKHIVSQGLPKH

SEQ ID NO: 90525 - protein, 529 aa, unidentified
  source 1..529: note = Rippkaea orientalis
  REGION 1..529: note = tr|B7K4G1|B7K4G1_RIPO1 Tryptophan halogenase; OS = Rippkaea orientalis (strain PCC 8801) OX=41431; GN = PCC8801_1365 PE=4 SV=1
MQTTTSRSPQAIENVLIVGGGTAGWMTATYLNKAFGPQVKVTLMESPSVPRIGVGEATVPNLQRTFWDFLGIPEREWMKEVNGAFKTAVRFVNWRKPKSGEGVNHFYHPFGILPNLEGVLLPHYWYHLTRGTDPVDYSCFREPPLMDAKKAPVYRDGTSAVPHAWHFDAHLVAKFLSNWGKERGVVHILDYLENATLDEQGNIASIQTRNGLTLEADLFIDCTGFRGLLINKALNEPFIDMNDHLLCDSAVAAAIPSNDERDDIEPFTSAFAQEAGWIWKIPMMGRFGSGYVYCSQFLSEDEAATNFCKFWNVDESKTNLNRIRFRTGRNRRAWVKNCVSIGLSSCFLEPLESTGIYFITGAIYQLAKYFPSKQMEPALRDKFNEEIEYMYDDCRDFIQAHYLITTRDDSPFWLANKHELTMSDSIKNKLELYKAGLPVSPLPSSEKDYYASLDNEFHNFWTDGSYYCILSGLGCFPEQSHPYLRDHPETVRESVEVFTKIKEQQQELLEELPSNYEYLRQLHKVDHLV

SEQ ID NO: 90526 - protein, 495 aa, unidentified
  source 1..495: note = Paraglaciecola arctica
  REGION 1..495: note = tr|K6YUK0|K6YUK0_9ALTE Uncharacterized protein; OS = Paraglaciecola arctica BSs20135 OX=493475 GN=GARC_4890; PE = 4 SV=1
MNAKTKVVVAGGGTAGWLTAFSLVTRLGTLLDITLVESDQIGTVGVGEATIPTMRAFHSLIGIDEKEFMAATQATFKLGIQFDNWGQQGDSYFHSFGEIGQRSWMAEFHEFWMEAKAQGFGGNLQDYCLELKAAKANKFSTFVGKKPVNFAYHMNATDYAAYLRKKSESAGVKRVEGRIEQIQNDETGNISSLTLKGGEQVFGDVFIDCTGFRGLLIGDNLDVEYEDWSHWLAADSAIAVQTQAVEAPRPYTQSIAHSAGWQWRIPLQNRVGNGIVYSSQFLSEDEARQTLLANLTGQTITEPRTLRFKTGRRKKAWHKNCIAIGLASGFLEPLESTSIHLVTTAILRLMKLFPFGGNTTMLAEQFNRETQLELETIRDFVILHYHQTQRNDSPFWDHYRTMQVPDSLVHRMAMFRENGYAWPDDVSLFRVDSWVQVMMGQGLMPKQHHGAGRVLPVEGLKQQMMALRNMIDKSVAQMSEHGDFIQTYCPAQNGR

SEQ ID NO: 90527 - protein, 510 aa, Sphingomonas sp.
  REGION 1..510: note = tr|A0A430DU68|A0A430DU68_9SPHN Tryptophan 7-halogenase OS=Sphingomonas sp. ABOLF OX=1985879; GN = CA235_02385 PE=4 SV=1
MRPDAIRRVVIVGGGTAGWMAAAAITRVLGEMPGLSIELVESEEIGTVGVGEATIPQIVLFNKMLGIDEAEFVRETRATYKLGIEFVDWLRPGHRYVHPFGFYGLDMKGIEFHHFWLKGRDLGDPTPLDAYSLGIVGGLQGRFAHPRPDQPSSPLSKLGYAFQFDAGLYARFLRRLAEANGATRIEGRIVDVEHDGETGHVAAVVLQSGTRIEGDLFLDCSGFRGLLIEGAMTAGFEDWTQWLPCDRAVAVPCANGGDRQPLTRSTARGAGWQWRIPLQHRIGNGYVYSSAHLSDDEAAATLLANLDGAPLADPRLLRFTAGHRRRAWVGNVVALGLAGGFLEPLESTSIHLVQSAIARLLTYWPSRRFDQLEIDRFNAAHVSDYLEIRDFLVLHYKATERADTPFWDYCRTLEPPPGLASKLAVFGANGRIFREGNELFTETSWLSVMVGQGVEAGGYHPAADLLSDAETLTRLEHIRQVIADTASLLPHQDDHLRQIGCDPRPSLVVA

SEQ ID NO: 90528 - protein, 492 aa, unidentified
  source 1..492: note = Paraglaciecola arctica
  REGION 1..492: note = tr|K6YNQ5|K6YNQ5_9ALTE FADH2 O2-dependent halogenase I OS=Paraglaciecola arctica BSs20135 OX=493475 GN=prnA; PE = 4 SV=1
MNNQIKRVVIVGGGTAGWMAAAALSKLITSIEVTLIESDEIGTVGVGEATIPTLIYFSQLLKIDEAEFLRETQATFKLGINFENWRNEGEDYFHGFGITGQSCWAAGFQHFWRKGRELGIASDFSDYCLESVAAKANKFAQLPNNGLNYAYHFDATLYGKYLRKIAEQHKTKRVEGMISKVNLNPSNGDIQSLTLKDGQLIEGDLFLDCSGQRALLIEGALHTGFIDWSHWLPNDSAIALQTESVGEPVPYTRSIAHKAGWQWQIPLQHRVGNGVVYCSQYITDDKAQEHLLANVEGEHLTQPRVIKFKTGTRRKHWNKNCIAVGLSSGFLEPLESTSIHLIQQAIVRLMRIFPVNGIQKCDVDEFNQQTDTDIESIRDFIILHYKVTQRTDSDYWLHCRNMTVPDSLAHRLELFEETGRVFRKNNELFDDSWMQVMIGQGLIPKSHHPIVDNMSNDELKRFLQTIKDTEQQKVAGLPTHQQFIQHFCATPK

SEQ ID NO: 90529 - protein, 513 aa, unidentified
  source 1..513: note = Paraglaciecola arctica
  REGION 1..513: note = tr|K6Y2S1|K6Y2S1_9ALTE Tryptophan halogenase; OS = Paraglaciecola arctica BSs20135 OX=493475 GN=GARC_1261; PE = 4 SV=1
MQNTLKSICIVGGGTSGWMAATLLTTALRGSNIQITVIESPDIATIGVGESTVPSMMDFLQASQINLKEFIQATSATFKLGIRFDDWLTQGESYFHPFGRVGKDINGFDFYQAWLKSLADGQTSRWVDHSPSAIMAEHERFMLRPHQSNQTQPENWVLSHFAHSLHLDAIQVARYLRDLCHKRGVTRIEATVKNVNVDKKDFIRSLELDNGSIVESNFFIDCTGFKGLLIENSLKVGYQDWSHYLPCNRAVTVQTENVANPVPYTIATAREAGWTWKIPLQHRTGNGYVFSSEHCSDEQATETLLNSVNGKLINNPKIIPFVTGKREKIWHNNCLALGLAAGFLEPLESTAIHLVYKTLVHFIKYFPDMDFDTCNELAFNQKIDVDYTEIRDFIILHYCTSGRDDSDFWRWCQTMPVPDSLSEKIRLFRQRGQIEHSTEPFFTSDSWYSILEGMKIRPQKYHPLLDGFDSQGLANTLHKNIENIRSTVLKMPSHHDYIQANCQATHQNAKATI

SEQ ID NO: 90530 - protein, 509 aa, Gordonia sp.
  REGION 1..509: note = tr|A0A1A0LG17|A0A1A0LG17_9ACTN Tryptophan halogenase; OS = Gordonia sp. 852002-10350_SCH5691597 OX=1834085; GN = A5777_11750 PE=4 SV=1
MSDVTHGGEPISETADVVVVGGGPGGSTVATLLARSGHRVVQLEKESFPRYQIGESLLPSTIHGVCRLLGVDEKIKNAGFMHKRGGSFRWGKNPVPWNFLFAISPEFAGEGSYAYQVERMKFDQILLENAAEQGVDVRQRSRVNGTITDESGRVTGIRYVDADRVEHRIDAKFVVDASGNTTRLSKHAGGERIYSDFFQNVAVFGYFENGKRFPAPDSGNILCAAFDEGWMWYIPLSDTLTSVGAVISRDKAEHVLNAQEETLLHYVDRCEIVKDMLSDATRVTEGTYGEIRIRKDYSYANTRFWGNGMVLVGDAACFIDPVFSTGVHLATYSGVLAARSINSVLAGAMTEERAFTEFEGRYRREYAVFYEFLSAFYDMEQSEDSYFWKARKVTNFDRNDMTAFVSLVAGAYSGEQALTDPEQIIERFSASTAALTEAAERTGGMDTDSGQRMGHLFGTQVVRDVMEEMNAFQARGAVGTDGTEPPLLDGGLVPSADGLSWAEPAPATV

SEQ ID NO: 90531 - protein, 500 aa, Pseudoalteromonas atlantica
  REGION 1..500: note = tr|Q15XQ8|Q15XQ8_PSEA6 Tryptophan halogenase; OS = Pseudoalteromonas atlantica (strain T6c / ATCC BAA-1087) OX=342610 GN=Patl_0802 PE=4 SV=1
MLPIPQNITIVGLNVHGLLTALMLRKAYNPAVTKITLVGQIEENQPPKVMLAGSALNTLLAHFGQSEAHWMQQTDATFKLSNRYVGFSETPFSVANTSEVDILHQPLMLELTKLKRQHYQLDLSLDDFFFSAALAKRNLSPKAQDFPFETHYQYQVDTDSLLILLQKIAATNSIDMLQKSLETLQLDPQGRLKHVECEGQILSGDYFFDCTGSAKLLIGNMPEFREETLPEVRINDRVLTFTASARTCASEVITTALDCGFVQQYSLRGSVHFQYHYSSKFIQDEQAVQVLGRHMYLQGYDNVLQRNLSANQACLVFQPWSKNCIAIGPACGLTQGTEDHELAHTFAMLERFVSSIQSPDDVSAVVQDYNDRIKSRFIYIHSFHSTLLLLNARRNSPYWQTPQDPNALTPIGKTLFSQWLNGQDLEVEPIWDINGANAWYALFSGLGHYPKDDTKPHPQAASIQDNIQDMGRKLNGCCLNFQSHESQLDEGQCHANVTAV

SEQ ID NO: 90532 - protein, 571 aa, unidentified
  source 1..571: note = Tolypocladium ophioglossoides
  REGION 1..571: note = tr|A0A0L0MZK9|A0A0L0MZK9_9HYPO Tryptophan 2-halogenase OS=Tolypocladium ophioglossoides CBS 100239; OX = 1163406 GN=TOPH_08017 PE=4 SV=1
MSIPESCSVLVVGGGPAGSYTASALAREGVDVVVLEADYFPRYHIGESMLASMRHFLRFIDLEKTFDSYGFRRKASICFYETSNGAAFKLNNKRAGYTDFIAANGPNGYSWNVIRSESDKLMFDHAEKSGAHTFQGVKVESIQFVPDQDFPEDERICNPGRAVSASWSRKADGATGSITFDYIVDASGRNGIISTKYLHNRKFNQALKNVANWGYWKGAKTYAPGTEKEGAPLFEALTDHSGWCWAIPLHDDTLSVGIVMRQDLSLARKKALGSPSMVGFYKDCLTMAPEIHARLADAELVSPSIKAASDWSYSASAYAGHNFRLVGDAGCFIDPYFSSGVHLALAGALSAAMTIRASRQGDCSEFEAAKWHSTKIAESYSRFLLVVMTALRQIRKGDEPVLSDFDEDGFDRAFGFFRPIIQGLADADVGGTLTQGLISKSVEFCFHAFEDISPEARQAVLDKLDRVRADPDTETKQDLEKLNEDELAILRTIRARQMLRTEDSMNIESFSHDVVDGFVPRLIHGKLGLNKVHSRAAALTYSESLFESGLNDMDANASGDLKARSEGTVQV

SEQ ID NO: 90533 - protein, 303 aa, unidentified
  source 1..303: note = Grifola frondosa
  REGION 1..303: note = tr|A0A1C7LYY2|A0A1C7LYY2_GRIFR Tryptophan 2-halogenase OS=Grifola frondosa OX=5627 GN=cmdE_1 PE=4; SV = 1
MPSIPTCAQILIIGGGPSGSYAASALAREGFSVVLLEADKFPRYHIGESLLPSVRPFLKFIDAENLVATHGFTTKPGAAVKLNQYKHEGYTDFIALDSNNNSWNVIRSEFDELLLQHASKSGALVFEETKVIDIEFGAKPGSQERPVAATWKTSTGEEGCIRFDYLVDASGRNGIMSTKYLNNRRHNKSLKNIACWGYWEGTDKYIRAPLERTPYGSRHFKVERTYSFESGDSRGLYGSRHEYRQEESCQAMCRRRYRHIEEHYLEELDRAPGLIRLLGDAKLRTSYGTDYDQERRVITATQQ

SEQ ID NO: 90534 - protein, 542 aa, unidentified
  source 1..542: note = Moelleriella libera
  REGION 1..542: note = tr|A0A167YK81|A0A167YK81_9HYPO Tryptophan halogenase; OS = Moelleriella libera RCEF 2490 OX=1081109 GN=AAL_06692; PE = 4 SV=1
MTVPQNCTVLVIGGGPAGSYAASALAREGIDTVVLEAQKFPRQVATNGAVFRLAQDQPSAYTDFLEAGGPNGYAWNLVRSESDDLLFRHAGNCGAHIFDEIKVDAIEFEDGPPGDGRRVNGNGRADQRRPVSATWLGKDGASGSIAFKYLVDASGRNGLVSTRYLKNRTFNENFKNIANWAYWKSDNIYGVGTHMEGSPYFEALDDASGWAWFMPLHDGTRSVGVVQDQKMAAAKKKELGRPSTVEYYKTCVDMAPGIKELLSGAELADDVKSASDWSYTASTYHLANTRICGDAGCFIDPLFSSGYHLAITGGLSAAATIAASIRGHCDEETAGSWHSKKTVESYTRFFLAVSSATKQIRQQHVPIIQDMNEDGFQRAFDLFQPIIQGTVDTDTAGNLSQQEIGRILEFCFRAFTYVPPEKKEGLLSKLKSLGVTSEREASNGRRALGDIEKDLTPDELKVLEILRSRRMIREDPFEMDSFTLDTIDGWAPNLVRGQLGLARSEQAKIDKAHFLSPDFLAGNAPGIRDGSVHLPTSRIQLA

SEQ ID NO: 90535 - protein, 549 aa, unidentified
  source 1..549: note = Aspergillus oryzae
  REGION 1..549: note = tr|A0A1S9DKD6|A0A1S9DKD6_ASPOZ Tryptophan halogenase; OS = Aspergillus oryzae OX=5062 GN=OAory_01108180 PE=4 SV=1
MSIPNRCTVLVVGGGPAGSYAAAALAREGVDTVLLEADVFPRYHIGESMLPSIRHFLRFIDLDSKFDSYGFVNKNGAAFKLNSKPEAYTDFIAAGGPGSHAWNVVRSEADQLMFKHAGENGAQVFDGVKVNSIEFEQIDGLTVDPSLSELGRPVSATWSCKATGEKGSITFEYLIDATGRAGLVSTKYMKNRRYNQGLKNVASWGYWSNAGSYGVGTPREGDPYFEAIEDGSGWVWLIPLHNGTTSIGVVMNQEAATAKKRETGATTKDLYLNTIKNTPGVWQLLDKAKLQSDLKSASDWSYNASSYASPYLRIVGDAGCFIDPFFSSGVHLALASGLSAALTIRAAQRGDCDEQAAVSWHSKKVAEGYTRFLLVVMSALKQISDREKPVLTDFDEDSFNRAFDFFRPIIQGTADVDKNLTQAEIAQTIEFCVQAFQTASTDEQDAVMTKVAAINSQNGTEGALRELHASLSADERRTLTTIQARQIIRSEDQMNIDNFTIDVIDGMVPRLERSSLGLARFVPKAQTSREDGLRATLGLPEKQKSIFSY

SEQ ID NO: 90536 - protein, 597 aa, unidentified
  source 1..597: note = Aspergillus awamori
  REGION 1..597: note = tr|A0A401KPZ1|A0A401KPZ1_ASPAW Tryptophan 2-halogenase OS=Aspergillus awamori OX=105351; GN = AAWM_04248 PE=4 SV=1
MAVPQSCTVLVIGGGPAGSYAAAALAREGFETVLLEADKFPRYHIGESTLPSLRHFFKFIDFYDTFDAHGFYHKNGAVFRLAQAQPDAYTDFLEAGGPDAYAWNLIRSESDDLLFRHAGTCGAHIFDETKVDTIQFESHIGESSPEPDRASNGELNPGRPVSVTWVRKDGSSGSIALKYLVDASGRNGILSTKYLKNRKFNDKFKNVANWAYWKTDNLYGLGTHMEGSPYFEALDDASGWAWFMPLHDGTRSVGVVQDQKIATEQKRQLGRPSTLDFYKQCVEKAPRTRKLLSGAEIVTNVRAASDWSYTASTYHIPNARICGDAGSFIDPLFSSGVHLAVTGGLSAAATIAASIRGDCDEQTAGLWHTKKTVESYTRFFLAVSSATKQIREQYEPIIQDMEEEGFQRAFDLLRPSTDLLKHFILAPVLVLQLTKILCVLVIQGTVDVDNTGKISYTEISKALEFCFRAFTYVPPEKKDALFEKLKNLGVESGQSDTKEAKALDDIEKHLTRDELQVLEILRSRRMIREDPFEMDSFTLDTIDGLAPNLVRGKLGLVKANQAKIDKAHFFSPRFLDGKAPGIRDESIFLPTSRVRLG

SEQ ID NO: 90537 - protein, 1050 aa, unidentified
  source 1..1050: note = Colletotrichum tanaceti
  REGION 1..1050: note = tr|A0A4U6XNX5|A0A4U6XNX5_9PEZI Tryptophan 2-halogenase OS=Colletotrichum tanaceti OX=1306861 GN=cmdE; PE = 4 SV=1
MATITQQEHALTESYELADASKQGPSRDDVPEPATRLPEAGEEEGLDKRTLLKLVAAGFSFFISGVNDGSVGPLLPYMIRDYDISTAVVSIVYGANFLGWFLAALTNTYLGQKFNLGGLLTFGAFFQLLAHALRVWRAPFPLFVVTFWLVCLGQAYQDAGANAYVASVKAAHRWLAFIHALYMAGCLVAPFVATPIASAGGGGGEASSRWYLFYIFPLAIGAVNLALTFYAFRDTIKLGREPGSPEQGGPQSQTDAGEEKKKKTKSASQLVKLTLMTKSLWMISLFFFFLLGATITASGWIVEYLVEIRHGNLGQMGYVPAGFNGGAMLGRLLLAEPTYRLGERRMVLVYVVLCIAFQLVFWLYAFPPTRSRDRSSPWVVPPADEVFHSVPNIIAASVAVSFVGFFSGPFFATGISVGSKLFSPEIQPTALSFVFVFGQVGGSIFPVITGILASRNGAGILQPVLVALIAGTGISWLLVPKPKQSGFIAPRIMSPAIPERCTVLVIGGGPGGSYAASALAREGIDVVVLEGDKFPRYHIGESMLASMRHMLRFIDLEAKFDSYGFIKKARETMDDGPPPFSPPGAAFKLNKEKRPGYTDFLAAGGPGNYAWNVVRSEADQLMFQHAGECGARVFDAVKVKSIRFEDATTVPEGEPNLRPGRPVAAVYEVTETKETGEIAFDYVVDASGRAGLLSTKYMKNRRYNQGLKNVANWGYWEGCNQYAPGTPRENSPFFEALTDESGWAWFIPLHNGKASVGVVMNQKLAAHKKQQQGGPGGSTAFYHESLKLAPELRSVLVGDGRLVSDVKSASDYSYSASSYAFPHARVVGDAGCFIDPFFSSGVHIALTGALSAATTIAASIRGDSDEAAAAEWHSKKVAAAYTRFLLVVLSAYKQMRFQGDPVLSDFDEDNFDRAFSFFRPIIQGTADAANGNLSQDELNKTLEFCAHAFEPVSPEADKEKVMKAVSGLSAAAAAAAATAPAGSEFNPDLSVEEQNAVKHIRARTMMRTEDTFNINTFGTDAIVGYVPNLVRGSLGLKKAEETNGVVVVAA

SEQ ID NO: 90538 - protein, 455 aa, unidentified
  source 1..455: note = Beauveria bassiana
  REGION 1..455: note = tr|A0A2N6NWF2|A0A2N6NWF2_BEABA Tryptophan 2-halogenase OS=Beauveria bassiana OX=176275 GN=cmdE PE=4; SV = 1
MFESTEVKQILFARERENTAAVPDDDEVTVDAPRPESAIWARKNGTSGSISFKYLVDASGRQGILSTKYLKNRRVNDNFKNVANWAYWKSDNIYGPGTHMQGSPYFEALDDASGWAWFMPLHDGTRSVGIVQDQKQAARAKRDLGRPSGLEYYKLALKMAPTTQNLLAGAELASDVRSASDWSYTASTYHLPNARICGDAGSFIDPLFSSGVHLAITGGLSAAATIAASVRGDCDENTAGAWHSKKTVQSYSRFFLAVSSATKQIREKHLPILQDLNEEGFQRAFDLFRPIIQGTVDNDTRSKVTQAEILKILEFCSKSFTYVAPEQKEALFKKLTKLGVNGEDSDVSWANGLGDLQHHLTADELKVLGILQSRRLTREDPFEIDSFTLDPIDGLAPSLVRGSLGLVKSEQARIDPGCLFSPEFLDGKMPGIREGSIFHSSDEDRLNKGAVETVA

SEQ ID NO: 90539 - protein, 478 aa, unidentified
  source 1..478: note = Aspergillus oryzae
  REGION 1..478: note = tr|A0A1S9DT09|A0A1S9DT09_ASPOZ Tryptophan halogenase; OS = Aspergillus oryzae OX=5062 GN=OAory_01086040 PE=4 SV=1
MSIPEQCTVLVVGGGPAGSYAAAALAREGIDTVLLEADVHPRYHIGESMLPSMRHLLRFIDYTDFIAAGGPNHFSWNVIRSEADELLFRHAAHSGAKTFEAVKVNSVTFTPSPTLDTGPGRPVSASYTQKSDGATGVVGFKYIIDASGRAGLLNTKYLKNRKYNQGPKNVAVWAYWKATGKYGEGTPRENSPYFEALTDESGWAWFIPLHDGTHSVGVVMDQGMMSQKKAVSELSTNARYLSWLKLAPRLNGYLTGGKMVADLKTASDFSYDSSSYAFPYARVAGDAGCFIDPFFSSGVHLAITGGLSAATTICAAIRGDCDEVAAARWHSTKVKEGYSHWLVIVLSAYKQMSNQAEPVLSDVGEDNFVRAFNFFKPIIQGTSDVSTKLTQAEFSHTLNFVLKAFDRKIGGDLTSEEEEKIYEDIRKTQSQNMSNIESFTMDIIDGRLPRLLRGKLGLESVAGMDEDTKHCPTATQQH

SEQ ID NO: 90540 - protein, 468 aa, unidentified
  source 1..468: note = Metarhizium anisopliae
  REGION 1..468: note = tr|A0A0B4GTC8|A0A0B4GTC8_METAF Tryptophan halogenase (Fragment) OS=Metarhizium anisopliae (strain ARSEF 549); OX = 1276135 GN=MAN_00908 PE=4 SV=1
MVRLLVCSLSLVAAIHALPDVLFKDVVIVGGGASGSYAAVRLREDFGKSITLVEKDEILGGHVDSYVDTKTGTPYDFGVKAFIQAGNATGFFDRLGVPRGRSPKTPVNTTYIDFKSGKVLDFAPPPSAAQLDALADFLRVVEPWEHLLQPGYFDFPEPSHIPGELLVPFGDFVSRHGLERAMPFIYQTTGLGLGNMTKAITLFALQAFGASMARSALGLQDSFVPASGRNQDLYDSVAAVLGSDVLYASKVVNTIRTNLGVIVTVRHLKSRRLTYIAAKALLIAIEPTGDNTGPFSLDQDEKHILSRFTYTREYTGIIDNTALAAHASYFNLPSDAAPNNYLLYPEPPFTARIDYMGSGHYFRVTVIGDDKLDDKGAKALVDKDFATLVDAHVLRGSAAEKVHWVAFSTHGPMHARVSVEDVQRGFFQKLYALQGRRSTWWTGGAWSVNFQSALWQYDDIIVPMMLRG

SEQ ID NO: 90541 - protein, 540 aa, unidentified
  source 1..540: note = Unknown
  REGION 1..540: note = tr|A0A1D7SEI2|A0A1D7SEI2_9CAUD Tryptophan halogenase; OS = Cyanophage S-RIM44 OX=1278485 GN=ES420910_102 PE=4 SV=1
MKVEKIVIVGGGSSGWMTAALLAKQLPHIDLTVIEPEDIPTVGVGESTLGHINRYMKMIGILDREKEWMPYCAATYKVSIQFTDFTHIGDRYQYPFGQMDYSNDISLQDYAYIKAKHPEFEVPYANFYNPIAYLADNNKMTADSRVIRNFDFNYDTSYHFDAARFGEWLKMNICEPEGVTVIRDSVEDINVNDDGIESLVLKKDKSKITADLFIDCTGFKSLLLEQTMGSEFVSFSDVLPNDKAIATKIPYVDKKKEIHNVTDCHALSAGWVWDIPLWHRRGTGYVYSSKYISREDAETEFRAHLAKTLDPKRAEEAEFFEIDIRHGKRKRAWVKNVVGIGLSYGFLEPLESTGLFTTHENAIMLVNTLERRSGFVSKVDVDGYNYAADHIIECFKSFIQFHYSLSQREDSQYWKDQIYNTPLYYNDDPTDITLTSPRLYKEYLHAVNVANVSEDLQGLNYIAGGMGYNHVGPSETNFRLSKQYADPSRINKGMVVSRQTRDYVMRQIVNMQSTYEFLQNNVYFEYISTERKYTPKEYNF

SEQ ID NO: 90542 - protein, 359 aa, unidentified
  source 1..359: note = Unknown
  REGION 1..359: note = tr|A0A1D7SL01|A0A1D7SL01_9CAUD Tryptophan halogenase; OS = Cyanophage S-RIM14 OX=1278423 GN=LIS021110_025 PE=4 SV=1
MKVAVLGKGLAGVLTALYWRHYSPKTEVELYYDEEIDTEPVGSGSFPGLTGFLADTFGWSLNWHDNPWKATPKFGIKYEGWGDKNEWFHPFNFDEVGMHLDPHLFQDFICDTGIFKVTQKHIETYDECDADYVYDCRGFPTDYTDYNIITNPLNRVMLSNMPNPDNVPWTRTVTTPDGWTFVIHLQDRVQYGYLYNGDITSDTEAEINFKEQFGVDNITATFPFRNYYAKSPIIDNRVFLNGNRYFFIEPMEATSVAGYMKWIELTMEAIWGEKPIQKIEYDMQRSIKENANFILYHYKFGSKYDTPFWDYAKSLELSDSFIQNIIDGDIRTNMVTYGFHTSQSVMNMYDNLGRIYKPV

SEQ ID NO: 90543 - protein, 379 aa, unidentified
  source 1..379: note = Unknown
  REGION 1..379: note = tr|A0A0C5AMY9|A0A0C5AMY9_9CAUD Tryptophan halogenase; OS = Cyanophage P-TIM40 OX=1589733 GN=PTIM40_228 PE=4 SV=1
MIGRGSGGLITASGLITAMNLLTYNLKVDVYYDPKTSQLPVGESTTPQFASLIECTLGLTIDDLISLGLASYKKGIEFVDWGNTPHFFHKFIHADAIHFYTKTLNPFLQENLEKYKGVKFIGRRIQDLQTICNEYDFVINCSGALNNYRKEIDIPCVNSVLYFDDHKIHGHPEYTYHKAHEYGWKFSLPFPNQRISRTGYLYHREYQSHVDAEVVYSHGDLYEWTPSYAPDMIVNNRLALNGNALLFFEPLQALSLLHYDMVAKRICDYLVNGQTSEEKLLGNLWYRRMVEAYIDALAFHYQYGSAYNSGYWEKVSKKSVTRVAHKWWNDGRLIKSVAEKSMGDLSQHPDFYYAPDHTHIFGITCMEQLYAGLSGDRDL

SEQ ID NO: 90544 - protein, 409 aa, unidentified
  source 1..409: note = Prochlorococcus phage
  REGION 1..409: note = tr|R9S6K5|R9S6K5_9CAUD Tryptophan halogenase; OS = Prochlorococcus phage P-SSM5 OX=536454 GN=PRTG_00224; PE = 4 SV=1
MSDSDFIVVGGGNAGCISALLLQCSFPNKKVSIIKSENIGTVGVGESSTEHFAQFCNTCGISILNVLLATKATFKGGVYFENWSDEDFMHVVNLDNVNQPIGHFFPYLQRVVAYNKPNREMNIYGAWDRKVPLKFFNDMNNSPTNQFHFDTLALNKFLIDKCLERNINIIEDELMGAIVHPESGDIVSVNGETDKYSADFFIDCSGFSRLLLEKTLGVKWKSYSEYLPLNSAISFATDEMEEYNMYTKSTARDYGWSWQIPTQGRTGNGYVFSEKFINETQAHEEMEKSYGHEIDVAKTFKFDPGRLEKAWCKNCYAVGLSQSFVEPLEATSIGSVIQQMVAFIHYYPSNSIDECNEIVNGIFDNIFDYVQAHYLVKKEDTPFWREVKNDLKITPSLQNLLDKWKKDFL

SEQ ID NO: 90545 - protein, 526 aa, unidentified
  source 1..526: note = Unknown
  REGION 1..526: note = tr|M4SQD7|M4SQD7_9CAUD Tryptophan halogenase; OS = Cyanophage P-RSM6 OX=929832 GN=CPXG_00183 PE=4 SV=1
MQVKDIVIVGGGSSGWMTAAALDVLCPHVNVTLIEDPNQGVIGVGESSLQQIRRFISLLGLKDSDWMKDIGATYKTAISFNDFWKKGESWLYPFGSPDEMESKVPWMAWFVLNATKPEKYTNDTFATTFNPVASFTKYNKLTYDTTYWKPWVDTAYHIDAIKFGQWLKNNVCKRVKHITGTVTGVIKKENGDIDCVVYNGKTLSADLFVDCSGFKSLLLGEAMDVPFESFHYNDGGCLLNDKAISISVPHENPEKEVTNTTNCTALDNGWVWDVPLWERGGLGYVYSSNFISEDEAQVELHNYLVKTRGKYRADQVSYRTIPFKMGKHKKSFVGNVIAVGLSNCFVEPLESTGLLVTHEQVIRLCNALSGRNGFIPKVEKEMINQVADHEIEGHKNFVAAHYAFSERKTDFWRTASEVVDYDFCGTDNLFMRYGSHKYINFDFLTNLGSIEYNDGPRYCAAGMGFNPINKVTLPLSRMCNEIIPEEDEQALTNAEKIIDEWHQHMLEYCETLPSSYEFLNQTIYKE

SEQ ID NO: 90546 - protein, 530 aa, unidentified
  source 1..530: note = Synechococcus phage
  REGION 1..530: note = tr|Q0QZI6|Q0QZI6_BPSYS Putative tryptophan halogenase OS=Synechococcus phage syn9 OX=382359 PE=4 SV=1
MKIESVAIVGGGSSGWMTAAALSKLCPQLEIALIEDPNIKTVGVGESTLGHFNKFLHLLDLKDEDWMPACNATYKNSIRFTNFREGKGEVFEYPFGPSLDVSFFSQTDGINTWGKLANKYPEDFPPETFARFVNSNTYLAEHNRLTRNKDNKIPNFNFDWDTAYHIDAELFGQYLKEKIALPNGVKHIQGKVTGYQKESPNNHNFKYIILDQETAIFADLYIDCTGFKSLLLGEFMGEAFSPFSKKLANDKAMATRIPYENREEEMHNVTDCHAMKNGWVWNIPLWNRIGTGYCYSSRFVSKDDAEAEFREHLGERGKDAKIFHIDIGHGKRTRAWVNNCVGIGLSYGFIEPLESTGLLTTHENIENLVYLINQRDGYVTQAERDGFNYTCDHQIDSFSDFVAMHYAYSMRTDTPYWKWCTQMCNYMPESMGPHRQKQSTWQDLSTDTIGLNTWHINHNGISFIIAGHGLRPQSYDKLSEVLLKRNNESDYYYEDIRKDWLKHYESMVEYVKTLPTHYEFLRDEIYGSAE

SEQ ID NO: 90547 - protein, 480 aa, unidentified
  source 1..480: note = Synechococcus phage
  REGION 1..480: note = tr|H8ZMV7|H8ZMV7_9CAUD Tryptophan halogenase; OS = Synechococcus phage ACG-2014c OX=1079998; GN = Syn7803C43_193 PE=4 SV=1
MKIVIVGGGTSGWMSAAALCKTFPKWNITMISNGESIGVGESTTPHFDQYLKYMDISDEEFIAASRATFKSSSRFEDFASVGSVFHYPNGQFQPENDYNEWMIAKEYFPENLPSFAEVFMPFVTVAEQGKLPLKDPILGEYCLSKDRSFHIDAFSFVNYLKNRFCKDVKCIKGKVKKVNRSTGIDNIVVDGTKVSADLFIDCSGQNSILTNSEYIKYNTILTDTALVTRTEYTDKDKEMVSYTNAKGMTAGWQWTIPTWDFISRGYVFSSQFQSQDAAAYEFGYDDFKVVNFKNGRRVDAWVDNCISIGLSYGFIEPLESTGLFNTHHGILALLDILREGTLPARFARDRYNFNMAEHMDGWREFVEAHYYYSSRRDTRFWRAVSEVEYPIKGAHADIQQIMLSGDGFPPEHMPIVYILAGSGYTNVNKRLVEYFKPSFPIGQRKVDAWIQKYGRILRHSENLPTMHQHLSKYFYSNLGA

SEQ ID NO: 90548 - protein, 489 aa, unidentified
  source 1..489: note = Unknown
  REGION 1..489: note = tr|A0A0C5AIN6|A0A0C5AIN6_9CAUD Tryptophan halogenase; OS = Cyanophage P-TIM40 OX=1589733 GN=PTIM40_46 PE=4 SV=1
MKIYIIGGGSSGWMTATTMLTKFPDADITVVESPSKPPVGVGESTTQYFRIWADYVGLKDEDWMVACDATYKISVRFSNFHDVDDTPWQYPFGAPNINLAHPDVWFWNQYKRGWSNDKFARDYWIAAECAEHNLLPIKDPNFKIKKNTGFHFDAVKFAEWLRDNKCQSVKRIIGTVDDFERVGDDIKYLWIDEKQHEADLYFDCTGFTSLLNKSEWLDYSDWLPNDTAWVTRLEYKDKQEELKSYTQCTALSSGWVWTVPTFARIGTGYVFSSKYQDHQSALKEFASFLKYDTEEFRKIHFKTGRKKEIWCGNVVSIGLSAGFIEPLESNGLLSVHEFLLKFCRMWKPRTTQMMRDTYNKAVAFAFDGFASFVALHYALTQRQDSDYWKAVSQIRYPDESMIEAAKITMMEESHNFASKLDWRNAAGDSLFCVMAGHGWNPFTDVIESEILFHGGIPEDSHLNSWTHKWNHARLGVNPLDYYNRTLYAV

SEQ ID NO: 90549 - protein, 485 aa, unidentified
  source 1..485: note = Prochlorococcus phage
  REGION 1..485: note = tr|Q58MD8|Q58MD8_BPPRM Bacterial tryptophan halogenase OS=Prochlorococcus phage P-SSM2 OX=268746; GN = PCMG_00220 PE=4 SV=1
MSDSDFIVVGGGNAGCISALLLQCSFPNKKVSIIKSENIGTVGVGESSTEHFAQFCNTCGISILNVLLATKATFKGGVYFENWSDEDFMHVVNLDNVNQPIGHFFPYLQRVVAYNKPNREMNIYGAWDRKVPLKFFNDMNNSPTNQFHFDTLALNKFLIDKCLERNINIIEDELMGAIVHPESGDIVSVNGETDKYSADFFIDCSGFSRLLLEKTLGVKWKSYSEYLPLNSAISFATDEMEEYNMYTKSTARDYGWSWQIPTQGRTGNGYVFSEKFINETQAHEEMEKSYGHEIDVAKTFKFDPGRLEKAWCKNCYAVGLSQSFVEPLEATSIGSVIQQMVAFIHYYPSNSIDECNEIVNGIFDNIFDYVQAHYLVKKEDTPFWREVKNDLKITPSLQNLLDKWKKRFPLVGDVFCRWGMFSEVNYIIILQGLKWFDSEKVMQEYKNIEHIPLIDWKDTSDRCLSMGHKNFIKELVRIHNLNKEN

SEQ ID NO: 90550 - protein, 388 aa, unidentified
  source 1..388: note = Synechococcus phage
  REGION 1..388: note = tr|E3SKR8|E3SKR8_9CAUD Tryptophan halogenase; OS = Synechococcus phage S-SSM5 OX=445685 GN=SSSM5_229 PE=4; SV = 1
MKFAVVGTGTAGILSLSFLLAYAPEPIEVYSIHNPKKPILGVGESTSTQIPSVLYDAIKFSLLEDSHELDATLKLGVKFADWREKDFYGHITPVSYGMHFDNQALKGFAFRRFEEMYENFHVIHGHVDKIESRENEAAVFIDGDEYKFDYVVDCGGYPEDYSEYNICKYISLNSCLVHNTKPEEYNHTLHRATPNGWMFGIPLQSRQSFGYLYNDTITSKDEAVTNFKTYCDDIEESQLREFKFKSYSAKQFFDGRVLKNGNRAFFYEPIEAFSGFFYQSALKFLGEYLWCDVSLEKTNEHMGFIANNIELATCFIYHGGSIYDTPYWDYAKKISKEKLDTDIRWSYQVEALKGINAQTNRQLRREGIGAYPAQIWFDFDKNLNYNLF

SEQ ID NO: 90551 - protein, 540 aa, unidentified
  source 1..540: note = Unknown
  REGION 1..540: note = tr|A0A1D7SF58|A0A1D7SF58_9CAUD Tryptophan halogenase; OS = Cyanophage S-RIM44 OX=1278485 GN=Np420711_102 PE=4 SV=1
MKVEKIVIVGGGSSGWMTAALLAKQLPHINVTVIEPEDIPTVGVGESTLGHINRYMKMIGILDREKEWMPYCAATYKVSIQFTDFTHIGDRYQYPFGQMDYSNDISLQDYAYIKARHPEFEVPYANFYNPIAYLADNNKMTADSRVIRNFDFNYDTSYHFDAARFGEWLKINICEPEGVTVIRDSVENINVNNDGIESLVLKKDKSKITADLFIDCTGFKSLLLEQTMGSEFVSFSDVLPNDKAIATKIPYVDKKKEIHNVTDCHALSAGWVWDIPLWHRRGTGYVYSSKYISREDAETEFRAHLAKTLDPKRAEEAEFFEIDIRHGKRKRAWVKNVVGIGLSYGFLEPLESTGLFTTHENAIMLVNTLERRSGFVSKVDVDGYNYAADHIIECFKSFIQFHYSLSQREDSQYWKDQIHNTPLYYNDNPTDITLTSPRLYKEYLHAVNVANVSEDLQGLNYIAGGMGYNHVGPSETNFRLSKQYADPSRINKGMVVSRQTRDYVMRQIVNMQSTYEFLQNNVYFEYISTERKYTPKEYNF

SEQ ID NO: 90552 - protein, 507 aa, unidentified
  source 1..507: note = Synechococcus phage
  REGION 1..507: note = tr|Q0QZI7|Q0QZI7_BPSYS Putative tryptophan halogenase OS=Synechococcus phage syn9 OX=382359 PE=4 SV=1
MKVDSICIVGGGTAGWMAAATFTRLFPHKHITLLESDDIPTIGVGESTTQFFRGWLDFIELYDVQWMDDCDATYKYSVRFENFNRPNCPFHYPFISNPDSVKDPKDIPTWFIHQTLTGESVDGFASWIAPHMKAIEEGRIITEDFDRFVHQRDTGFHMDASKFARWLKDNICYPAGINHMSDVHITKHMKRMDGTLEWIQDKNGRKFYADLFVDCTGFKSLLINDYMKTEWEDFNEMLPNDRAWTVRLPYTNKREQMKTYTNCTALDNGWVWNVPLQNRIGTGYNYSSKFTSDAAALEEFKKHLGYPEETLCDYRNIKFKTGLSKKPWNKNVLAIGLSGGFIEPLESNGLLSVHEWLIWACQIIGDGAVRAIDINAFNYKARKNFKSFAHFVFYHYAFSKRNDTPYWKYMTEDYDALSDLHEEFLYDIRNTTTPLDKIDIHKFILHNYGGESYIAAGHDWNPFNHATLRLLESRKEIDLDSYIEISDYSHYNELIETFPYASDYYEN

SEQ ID NO: 90553 - protein, 545 aa, unidentified
  source 1..545: note = Unknown
  REGION 1..545: note = tr|A0A0C5AE39|A0A0C5AE39_9CAUD Tryptophan halogenase; OS = Cyanophage P-TIM40 OX=1589733 GN=PTIM40_47 PE=4 SV=1
MQYKSFCIVGGGSSGWMAAATMKKAFPECDVSLIQPKGRDIIGVGESTLGHINRFFRFLGLKDKEWMSYCNATYKTSIAFKNFREGKGERFQYPFGRIDHNDYRSDYMTFFELQVKYPHLYPPEEFARFFNPNTILAEENRLTDGYICSEHNTWNMEQDTAYHMDSEKFGEFLAKRFPDVKTYEGIVGSCSKDATGHITSVNITEGWDEGLMIEADLYIDCTGFKSLILEGMMGSKFISFNDVLFNDTAMTARVDYSDRKNQMDSYTDCVAMSNGWCYNIPLWNRVGAGYVFSKKYIDPDIAHEEFVGYLAKRYSPKVADNADYRLINIRHGKREKAWVKNVVGIGLAYGFLEPLESTGLMTTHENLLYLVDSLKRRKKVTKIDIDSYNYTVDHAIESMKYFIGMHYVLSQRDDTKYWRDATQNTALFSNHDLTQYMNDCLGWHSMLESRREYFQLYEGLRKNFWSPDKFDGLVYIAAGQAFRPINEHSVKEAHYIFPRRKGEVEQVHKDWQRDRQAIYNAVKKLPTQYEYLRGYIYGNDFVEEN

SEQ ID NO: 90554 - protein, 480 aa, unidentified; identical to SEQ ID NO: 90547
  source 1..480: note = Synechococcus phage
  REGION 1..480: note = tr|V5UTF5|V5UTF5_9CAUD Tryptophan halogenase; OS = Synechococcus phage S-MbCM25 OX=1340811 GN=S-MbCM25_192; PE = 4 SV=1

SEQ ID NO: 90555 - protein, 367 aa, unidentified
  source 1..367: note = Synechococcus phage
  REGION 1..367: note = tr|E3SLC6|E3SLC6_9CAUD Tryptophan halogenase; OS = Synechococcus phage S-SSM7 OX=445686 GN=SSSM7_209 PE=4; SV = 1
MKVAIVGAGTAGLYCAVSLLESLPKFIKVDLIHSRVINPIEVGESSLVSFPHALSCGVDYVHHFDAAELGSTIKFGVQFKNWNGDPFIPFASGAYGIQFDTTKLPRFILPRLNKMYQNFSEKLKTVKEIKSLGKKVSIDGQIYDYVIDCRGYPEDYSDYIISDKVYLDSGIVVKSYTPGDWEYTYHIAHEHGWMFGIPLQERTAWGYLWNSEVTSELEAQSNLVNLLGEYQIEYFSEDCRQFKFKNYYAKSIVNEDGNIFVNGNRALFLEPIQATSLGCYGIINGMIIDKILDDKYDNDMYHHIMDEVIKFINLHYLNGSNFDTPFWQMASKGAKELYEGIDPTKCNWNYILDWNPQFRQKMFDSFL

SEQ ID NO: 90556 - protein, 499 aa, unidentified
  source 1..499: note = Unknown
  REGION 1..499: note = tr|A0A1D7SD53|A0A1D7SD53_9CAUD Tryptophan halogenase; OS = Cyanophage S-RIM44 OX=1278485 GN=ES420910_101 PE=4 SV=1
MKVNSICIVGGGTAGWMSAATFSRVFPDKKITLVESPSIATIGVGESTTQFFRKWLNFIDLDDSWMEECDATYKFSVRFENFNEEDPFHYPFTTKDSRKDPTAWFIHKAITPGLSVSDYADWYAPQMKAVNEGRIPTQDFDRFVLKRDTGFHFDATKFATWLKNNLCQNVEHIEADVISADLDESGNIESLHLDNDSLLKADLFIDCTGFRSYLINDIMKTPWETFDDMLPNDSAWTVRLPYTDKKSQMKTYTNCTALNNGWVWNVPLRNRIGTGYNYSSKFISDEDALEEFKEHLGYPKETLCEYRNIKFKTGISKKPWNKNVLAIGLSGGFIEPLESNGLLSVHEWLIYASQIIGDNAVRALDINAFNFTVTKEFKTFAYFVYYHYALSSRTDSPYWKYMTEQYDGHGDLHDEYLYKTRKATTPLNKLEYEKFTYTNYSGESFIMAGHGYNPFNLVTLRLLETENIIDKGSYISIDNYKHYESLVNTFPFAHEYYES

SEQ ID NO: 90557 - protein, 499 aa, unidentified
  source 1..499: note = Unknown
  REGION 1..499: note = tr|A0A1D7SF89|A0A1D7SF89_9CAUD Tryptophan halogenase; OS = Cyanophage S-RIM44 OX=1278485 GN=Np420711_101 PE=4 SV=1
MKVNSICIVGGGTAGWMSAATFSRVFPDKKITLVESPSIATIGVGESTTQFFRKWLNFIDLDDSWMEECDATYKFSVRFENFNEEDPFHYPFTTKDSRKDPTAWFIHKAITPGLSVSDYADWYAPQMKAVNEGRIPTQDFDRFVLKRDTGFHFDATKFATWLKNNLCQNVEHIEADVISADLDESGNIESLHLDNDSLLKADLFIDCTGFRSYLINDIMKTPWETFDDMLPNDSAWTVRLPYTDKKSQMRTYTNCTALNNGWVWNVPLRNRIGTGYNYSSKFISDEDALEEFKEHLGYPKKTLCEYRNIKFKTGISKKPWNKNVLAIGLSGGFIEPLESNGLLSVHEWLIYASQIIGDNAVRALDINAFNFTVTKEFKTFAYFVYYHYALSSRTDSPYWKYMTEQYDGHGDLHDEYLYKTRKATTPLNKLEYEKFTYTNYSGESFIMAGHGYNPFNLVTLRLLETENIIDKGSYISLDNYKHYDGLVNTFPFAHEYYES

SEQ ID NO: 90558 - protein, 478 aa, unidentified
  source 1..478: note = Unknown
  REGION 1..478: note = tr|A0A140IER1|A0A140IER1_9CAUD Tryptophan halogenase; OS = Cyanophage S-RIM44 OX=1278485 GN=Np050604_203 PE=4 SV=1
MKIVVVGGGTSGWIVTHYLSGTHHCINISTKEIPTIGVGEGTTGKFPAMIGGDKTELMIELDALPKLGIKFNGWSKTSDYFWSPIDGSGTANYYIDYSTFSQYFTGYKPLTCSQYTVLMEDGLTNYSYEKDFLVGNWDHHALHIDAYKTAEYFKKISLDSGAVHVEAKVVKVNREKNAITSLELDDGSTVTGDVFIDCSGFSRVLNSHLDWIDYSEYLPVNSAVVYSAPETEKKPYTVAQAMKYGWTWEIPTRNKTGRGYVYSDKYASEDDILDELGDVEKIKSIKFTSGRIKQFIDSNCVSIGLSSGFLEPLQATSIHCALMQLELFFYSFPTKQSLLCEDNTSRYNNLIAALYDDMRDFVSLHYSGGKTDSDFWKDITCTERVHEILNICKARLTRSFDFTHVPGTVKQESWNPILAGLGHFDKSLVMDVFASDGATMNWWMGKTDTFIQEVSGTSQNFLTPDQLNAIITQVTDGL

SEQ ID NO: 90559 - protein, 523 aa, unidentified
  source 1..523: note = Synechococcus phage
  REGION 1..523: note = tr|A0A1Z1LWL6|A0A1Z1LWL6_9CAUD Putative tryptophan halogenase OS=Synechococcus phage S-H35 OX=1983572 PE=4; SV = 1
MMKTEKIVIVGGGTAGWMTAATIVATHPYKQITVVESPDVPRIGVGESTLQLLRSWMHVVGIQDSDFMAACDATYKLSVKFTGFSNENDKTGFHYPFGSPHFFPDSYSGLNDWRMKKALYPNTPVQDFAKSYYPQMALIDAGKLDYNEEGKFGNFDVKQDSAFHVDAVKFANWLRDEYCIPRGVNHIPATVTSVDVGEEGIERIYLDDAGRFITSDVYIDCTGFKSLLIGDALGEEFVSFNDQLPNNRAWAARVPYSDKETEMKPYTDCVALSNGWVWNTPTWTRIGMGYVYSDNYVSKEDALQEFKDHLVSLGKEIDDLEFRDLSFRVGIHKRTWVKNCIAIGLSAGFMEPLEGNGLLTIHEFALKLVRILGREYITQYDRDIYNTAVFKYFSEFADFVSAHYVFSQRRDTPYWKDTAKIPLNHRGMACDGARFMGLSVLKDNPEEYYDGMNFVAIGLGYDRITPSMLKEIEFYNNINAESIVGKIDYQWNQMKAKLHEFARECPSHYQFLKDGIYANVPEE

SEQ ID NO: 90560 - protein, 359 aa, unidentified
  source 1..359: note = Unknown
  REGION 1..359: note = tr|A0A1D7SIP3|A0A1D7SIP3_9CAUD Tryptophan halogenase; OS = Cyanophage S-RIM14 OX=1278423 GN=Np111211_025 PE=4 SV=1
MKVAVLGKGLAGVLTALYWRHYSPKTEVELYYDEEIDTEPVGSGSFPGLTGFLADTFGWSLNWHDNPWKATPKFGIKYEGWGDKNEWFHPFNFDEVGMHLDPHLFQDFICDTGIFKVTQKHIETYDECDADYVYDCRGFPTDYTDYNIIANPLNRVMLSNMPNPDNVPWTRTVTTPDGWTFVIHLQDRVQYGYLYNGDITSDTEAEINFKEQFGVDNITATFPFRNYYAKSPIIDNRVFLNGNRYFFIEPMEATSVAGYMKWIELTMEAIWGEKPIQKIEYDMQRSIKENANFILYHYKFGSKYDTPFWDYAKSLELSDSFIQNIIDGDIRTNMVTYGFHTSQSVMNMYDNLGRIYKPV

SEQ ID NO: 90561 - protein, 495 aa, unidentified
  source 1..495: note = Synechococcus phage
  REGION 1..495: note = tr|E3SL43|E3SL43_9CAUD Tryptophan halogenase; OS = Synechococcus phage S-SSM7 OX=445686 GN=SSSM7_125 PE=4; SV = 1
MKRIKRLVIVGGGTAGWITASWFARRWSKHFEVVIIDKSQPERIGVGEATLLSFPNVMKMMGYKPSDWMREVDATFKSGILFPGWGHEDAEIWHPFSFTSVGDTKVPLYDLWQSFQEKYDLKNISPMYNSSLKNKIETNYVHDSYAFQLDCGKLVQFLMRHTTPYCKYIQSDVVDIIRDGQSDDITKSNIKELVLDDGSRIDADIFVDCTGWKQLLVGKDNVDLSDRLYINAALAGRVKYEDYRKEQHPYTACPAQEHGWIWKIPTRSRIGTGYCFNRDINDPDEVRQAFSDHWNGRIKPDEMRLLDWKPQYVKNFWVGNVVPIGLSAGFIEPLESTGLALMIRGVEYLEESLYGGYFNSKVEAPFYDAKMKCSYESAVDYVNMHYSYCRRKGRFWDYVRSKYQKSATQKLFEEYIQDPNVRTPQTGKVGSFFDGTNYQVWLLQLMTDKINSKEYWKTDTTVIPRLDNFVENTLVQNQLNSIDQSQYITHLDTLE

SEQ ID NO: 90562 - protein, 507 aa, unidentified; identical to SEQ ID NO: 90552
  source 1..507: note = Unknown
  REGION 1..507: note = tr|M4T1E3|M4T1E3_9CAUD Tryptophan halogenase; OS = Cyanophage Syn10 OX=536472 GN=CPUG_00132 PE=4 SV=1

SEQ ID NO: 90563 - protein, 464 aa, unidentified
  source 1..464: note = Pelagibacter phage
  REGION 1..464: note = tr|M1HLT6|M1HLT6_9CAUD Tryptophan halogenase; OS = Pelagibacter phage HTVC008M OX=1283076 PE=4 SV=1
MDTTAKKILVMGGGTAGWLTALYLTKTFPQHHITLMESKPIGILGAGEGSTPHLVAFLNMLGVDLNELLKECKGTIKQGISFENWNGDGEKYFHPFAVQNKYKHFSIDNLFGYDSYDYYLKHLIHRKMPLKEHTYASIQSYKNVVDTDNIDNSIHFDAHLLADYLKKITKVDKHIYDEIKTTQQDEHGNITKINNVECDLVFDCTGFRRELIGKLYKSEWKSYQDCLPIKRAIPFFLPPEDKPYTQAIAMKYGWVWKIPLQHRCGAGYIFDSDYITDEEAFAEAKEMFPDIEYTRTIKFDAGRFKQTWIKNCIAVGLSSGFTEPLEATSIWMATEQLKLLETFIDIMFTNDEDTKQDYNEVIANNNDMVMEFLHYHYMTKRDDSPFWKEFRNKNNLPDFNVKLSKIQKGNLRWYHTTGEKITSTFNLMSWLHVGEGLGLIKDISIKGYENLNPTVEEYGRHLPR

SEQ ID NO: 90564 - protein, 527 aa, unidentified
  source 1..527: note = Synechococcus phage
  REGION 1..527: note = tr|A0A1D8KSE7|A0A1D8KSE7_9CAUD Putative tryptophan halogenase OS=Synechococcus phage S-WAM1 OX=1815521; GN = P090810_034 PE=4 SV=1
MQVRNVLIVGGGTAGWMTAAALLKLCPHIKTSLIESPNYPTIGVGESTLGQINDFFQILGLKDEMWMKDTGSTYKVNIRFNDFYKKGETWDYPFGSAQERLELCPHGWMSWFALNLLQPEKYPRRSFARLHNLVGQLAHYNKLTDQQPFQFEQDTAYHMDAIKFGQWLKNNWCLPMGLEYIQGDVEVCHKDERGWVQSLQTSDGRKLEYDLYVDCTGFKSLLLEKFMGEEFVSFHANDGGCLLNDTAVTCHMPHEDKEKEITNSTNCTAIDNGWVWDVPLWERSGVGYVHSKDFTDDPELELYNYLCKTRGSKRAGQASFKKVPFKNGKHKRSWVKNVCAVGLSNCFVEPLEATGLLTTHEQIVRLCNVLAGREGIVPRVEVDMLNLVCDLEIEGFKNFVAAHYAFSARQTKYWEEVSDHIQYDFSTGALDNLFMRYASEKHVIYEFAGDPAHNDGLRYIAAGMGYNPINKHTLHLKRLQNGLIPEVDEQEITTADLRFDEWEEEMYDWCSKLPSSYEFLKQTIYKE

SEQ ID NO: 90565 - protein, 478 aa, unidentified
  source 1..478: note = Unknown
  REGION 1..478: note = tr|A0A1D7SDE5|A0A1D7SDE5_9CAUD Tryptophan halogenase; OS = Cyanophage S-RIM44 OX=1278485 GN=ES420910_208 PE=4 SV=1
MKIVVVGGGTSGWIVTNYLSGTHHCINISTKEIPTIGVGEGTTGKFPDMLGVDKTELMIELDALPKLGIKFNGWSKTSDHFWSPIDGSATANYYIDYSTFSQYFTGALPTSCSKYSVLMEDGLTNYSYEKDFLVGNWDHHALHIDAYKTAEYFKKISLDSGAVHVEAQVVKVNREKNAITSLELDNGSIITGDVFIDCSGFSRVLNSHLDWIDYSEYLPVNSAVVYSAPETEKKPYTVAQAMKYGWTWEIPTRNKTGRGYVYCDKYASEDDILDELGDVEKIKSIKFTSGRINQFKDSNCVSIGLSSGFLEPLQATSIHCALIQLELFFYSFPTKQSLLCEDSTSRYNNLIAILYDDMRDFVSLHYSGGKTDSDFWKDITCTDRVHEILNICKARLTRSFDFPHVPGTVKQESWNPILAGLGHFDKSLVMDVFTSDGATMKWWMSKTDEFIREVADKSQNFLTPDQLNAIISSVSGRL

SEQ ID NO: 90566 - protein, 523 aa, unidentified; identical to SEQ ID NO: 90559
  source 1..523: note = Synechococcus phage
  REGION 1..523: note = tr|A0A2S1GL10|A0A2S1GL10_9CAUD Putative tryptophan halogenase OS=Synechococcus phage S-B64 OX=2163901 PE=4; SV = 1

SEQ ID NO: 90567 - protein, 491 aa, unidentified
  source 1..491: note = Synechococcus phage
  REGION 1..491: note = tr|A0A0M6VY55|A0A0M6VY55_BPSYP Tryptophan Halognenase OS=Synechococcus phage S-PM2 OX=238854; GN = S-PM2d167 PE=4 SV=1
MKIVIVGGGTAGWIASYYLSKTHQCINISSEEIPIIGVGEGTTGKFLDILAEDRIKLMIELDALPKLGIKFEGWSKTKPYFWSPIDGTLTQKYYIDYSTFASSFADLSPCHCSDYGFLLENGKTNFYIEENNLICNWDHHALHLDAYKTAEYFKKESIDNGVEYYDAKVLTTNREYGNITSIELDNGLKIDADLYVDCSGFSRVLNNHQEWIDYTYYLPVNRAVVFSIEELTPRKEYTLAKAMKYGWVWEIPTRHKVGRGYVYCDKYASEDDILFELREVYGSIEKLKSIEFSAGRINNFMDGNCLSVGLSSGFLEPLQATSIHCALIQIELFSYSFTTKDHLLDCNSVKRYNQLIARLYDDMRDFVSLHYTGGKTDTEFWSSFVHPERVQTILDLSNSRLTRSFDFEHTPGTVKQESWNPILSGLGHFPKCLISQVFAADNATIHWWLREIYNHQQSINMISPKYLSANDLNEILIKYSLGMTLKAPWSV

SEQ ID NO: 90568 - protein, 359 aa, unidentified; identical to SEQ ID NO: 90542
  source 1..359: note = Synechococcus phage
  REGION 1..359: note = tr|E3SJS9|E3SJS9_9CAUD Tryptophan halogenase; OS = Synechococcus phage S-ShM2 OX=445683 GN=SShM2_028 PE=4; SV = 1

SEQ ID NO: 90569 - protein, 478 aa, unidentified
  source 1..478: note = Unknown
  REGION 1..478: note = tr|A0A1D7SHM0|A0A1D7SHM0_9CAUD Tryptophan halogenase; OS = Cyanophage S-RIM44 OX=1278485 GN=W2100709_204 PE=4 SV=1
MKIVVVGGGTSGWIVTHYLSGTHHCINISTKEIPTIGVGEGTTGKFPAMIGGDKTELMIELDALPKLGIKFNGWSKTSDYFWSPIDGSGTANYYIDYSTFSQYFTGYKPLTCSQYTVLMEDGLTNYSYEKDFLVGNWDHHALHIDAYKTAEYFKKISLDSGAVHVEAKVVKVNREKNAITSLELDDGSTVTGDVFIDCSGFSRVLNSHLDWIDYSEYLPVNSAVVYSAPETEKKPYTVAQAMKYGWTWEIPTRNKTGRGYVYSDKYASEDDILDELGDVEKIKSIKFTSGRIKQFIDSNCVSIGLSSGFLEPLQATSIHCALMQLELFFYSFPTKQSLLCEDNTSRYNNLIAALYDDMRDFVSLHYSGGKTDSDFWKDISCTERVHEILNICKARLTRSFDFTHVPGTVKQESWNPILAGLGHFDKSLVMDVFASDGATMNWWMGKTDTFIQEVSGTSQNFLTPDQLNAIITQVTDGL

SEQ ID NO: 90570 - protein, 478 aa, unidentified; identical to SEQ ID NO: 90558
  source 1..478: note = Prochlorococcus phage
  REGION 1..478: note = tr|E3SPT6|E3SPT6_9CAUD Tryptophan halogenase; OS = Prochlorococcus phage Syn1 OX=444861 GN=Syn1_205 PE=4; SV = 1

SEQ ID NO: 90571 - protein, 377 aa, unidentified
  source 1..377: note = Unknown
  REGION 1..377: note = tr|A0A1B1IU55|A0A1B1IU55_9VIRU Tryptophan halogenase; OS = uncultured Mediterranean phage OX=1868660 PE=4 SV=1
MPKIAVVGGGNAGCFTALYCAWRGKQTNSEVELIYNPNIPPEKVGQATVLEPPGLLWATTGFNWYNNNINATMKSGILYEGWGKVNKKVFAPFPSDSMAMHYCPWEMQKSILQSGHFKVTEGNVDPEDVDADFVFDCRGKPKDFLEYEELKNPTNACILGEPNWNTAKNPWSRHVATPDGWAFVIPTRKKSPSHQYSVGYCYNSTITPKEEAEYNFLEMFNVEVTNHIDYKNYVAKNPIKDGRIFLNGNRLFFLEPLESSSTQTYIEMARAVFDYYLQEKCSAEFVANDIKNYINQLKNFVLWHYQFGSKYDTPFWDYAKAFRFEDPTFDKFLGYSQISDCIPTSKYGGATRDKFYGQWPAYYFKVWNEGMNIKLNT

SEQ ID NO: 90572 - protein, 495 aa, unidentified
  source 1..495: note = Unknown
  REGION 1..495: note = tr|M4PSJ0|M4PSJ0_9CAUD Tryptophan halogenase; OS = Cyanophage S-SSM6a OX=682650 GN=CYVG_00298 PE=4 SV=1
MKRIKRLVIVGGGTAGWITASWFARRWSKHFEVVIIDKSQPERIGVGEATLLSFPNVMKMMGYKPSDWMREVDATFKSGILFPGWGHEDAEIWHPFSFTSVGDTKVPLYDLWQSFQEKYDLKNISPMYNSSLKNKIETNYVHDSYAFQLDCGKLVQFLMRHTTPYCKYIQSDVVDIIRDGQSDDITKSNIKELVLDDGSRIDADIFVDCTGWKQLLVGKDNVDLSDRLYINAALAGRVKYEDYRKEQHPYTACPAQEHGWIWKIPTRSRIGTGYCFNRDINDPDEVRQAFSDHWNGRIKPDEMRLLDWKPQYVKNFWVGNVVPIGLSAGFIEPLESTGLALMIRGVEYLEESLYGGYFNSKVEAPFYDAKMKCSYESAVDYVNMHYSYCRRKGRFWDYVRSKYQKSSTQKLFEEYIQDPNVRTPQTGKVGSFFDGTNYQVWLLQLMTDKINSKEYWKTDTTVIPRLDNFVENTLVQNQLNSIDQSQYITHLDTLE

SEQ ID NO: 90573 - protein, 506 aa, unidentified
  source 1..506: note = Halobacteriales archaeon
  REGION 1..506: note = tr|A0A2R6IMD8|A0A2R6IMD8_9EURY Tryptophan halogenase; OS = Halobacteriales archaeon QS_4_69_31 OX=1919176; GN = BRC92_02380 PE=4 SV=1
MSERIDSVTVLGGGDVGLLTALALRQYNPGLDVKVIDDFSRDIPQVGKSTYKKITDILHQHLGIDEREFVTEVKPVWKASVYFRDWCDSESFHYPFDEAVKYPDEDRPDAIEWLYYHYSELYDSPDHRTANEERVEQRKSPWFYSPQQGGHDIYPHAAYHLNTERFNGYLRELCRDRGVSLVNDEVTGVDVSGARVERVRSKSQTYESDLFVDATGFNRVIRGEIDAEFREFPLPLDTAFNVRVDRDLSEVIPATVVDSGEYGWFWTIDTYDNRDRGYVFASEYVDDDAALAEFLDEVDDSVTGDDVAKYEFNSGYYPQAWEDNLVALGNAEGFVEPLQSTGLTANAHAAVRLSQFLSEHGRVNDAAVREDYNTFVRQGWESIYDFVAVHYRYGDGDTAFWEDVTTMDVSRRVELLEEAFDRRGFVGNIEAAKRRGEIDRLRVFLPRNFFLIMRQQDATSEFYEEHDFEVSHETKQQLDEYYRQMREDVETYLTTEEMYRGPLAGM

SEQ ID NO: 90574 - protein, 540 aa, unidentified
  source 1..540: note = Leucoagaricus sp.
  REGION 1..540: note = tr|A0A137QPR6|A0A137QPR6_9AGAR Tryptophan 2-halogenase OS=Leucoagaricus sp. SymC.cos OX=1714833; GN = AN958_05927 PE=4 SV=1
MSSTVPAETTVLIVGGGPAGSYAASVLARHQINVVILEAAKFPRYHIGESLLASTNYFLEYIGAREKVLSYGFVRKPGGAFKLRKDFPPAYTDFTDYNTGNHALNVNRAEYDDLLFRHAGEQGANIFDQHRVTELEFSEQDGTRPVAAKWESNVNGTKGTIQFDYLIDAAGRQGLLSTKYHKDREITKSLKNSAIWAYWKGAKRYGERTERYGAPFIEALPDNTGWCWYIPINDGTISVGFVIHEEFVQEKRTGKTLEEFYLSQFDILTEVPELKGNATMAPNKKGEGGPVYMARDYSYASEDIGRLNYRLVGDSAAFIDPFFSSGVHLAFVGALSAAVSIIAVIGGDADEESAAGFHNAELKVAYTRHAFPMYRYLHLFTHITPFHRFFMVVMAGYKQMRGGLNVDVLNDVDEQTFDRAFDIIRPVIQGTSDVGIDKRSTGDADLNEKEVQATMDFIFRLFSHPPPGQQVVPHEDDGLDGNVDDLDRDARARLKSFSLYVPLLHGHDGVMHILESAQEKMRFSMKGAAATQVKTTPAQA

SEQ ID NO: 90575 - protein, 534 aa, unidentified
  source 1..534: note = Leucoagaricus sp.
  REGION 1..534: note = tr|A0A137QI92|A0A137QI92_9AGAR Tryptophan 2-halogenase OS=Leucoagaricus sp. SymC.cos OX=1714833; GN = AN958_09430 PE=4 SV=1
MVSIPSQTKILVIGGGPSGSLAACALAREGFEVTLLEADSFPRYHIGESLLPSVRPFLQFVDAEKKVIEHGFCPKPGAAIKFNQHKREGYTDFIARGPEFGSWNVVRSEFDNIIFRHAEASGAKVFEKVKVSAIEFEKQGDPKSRPIAATYQTVDGKDGRIAFEYLVDASGRNGVMSTKYLKNRHTNESLKNIAIWGYWENFGRYKPGTNRENAIWIEALTDESGWAWFIPLADNLVSVGLVINHAQSITKRNAFREKSGNPDSTLQDFYLDQVKLSPGLWNDFIPKAKMVEKEGGPMVRQASDYSYSANGYAGIGYRLIGDAACFIDPFFSSGVHLAFTGGLSAAGTIASSIRGITSEEECAKWHDAKVSVSYTRFMLVVLGAYKQMRNQKFDILSDVGADNFDRAFDLLRPIIQGTADVNKKVTEDEVQDTMDFVKNVFAPTDPELEAAVKQRVDPKFFEGEESDIILPSQTQEMFEDEDVRHVMDVINARKPVHKMYDTQRDFGSEPINGYTLNLVRGELNLIKPEGITGA

SEQ ID NO: 90576 - protein, 355 aa, unidentified
  source 1..355: note = Leucoagaricus sp.
  REGION 1..355: note = tr|A0A137Q1J7|A0A137Q1J7_9AGAR Tryptophan 2-halogenase OS=Leucoagaricus sp. SymC.cos OX=1714833; GN = AN958_06178 PE=4 SV=1
MRHFLRYIDADDKFNSFGFSQKHGAAFKFNPRKREGFTNFVSENPNNYAWNVTRADADALLLDRARELGVQIYENHRVTEIQFSKPSAAKVNATQAQNESQEPQNLPVSVTWKNVATGQIGTIAFDWVVDASGRNGIISRALGLRKYNQSLKNIAYWGYWTGTQEYRHPACEIQLPFFEALHDESGWAWFIPLHDGKVSVGIVMDENVSKSKKASMEKKGDESLTLRHYLQELSANATKIKSFISQGTLMEYSGTKIRTASDYSYSGSSYAGLNYRIVGDAGAFIDPFFSSGVHLAISGGLSAAATIAAAMHSECTAAQAADWHNQRVATSYMRYTMRPKLCVSSAELELVRQVL

SEQ ID NO: 90577 - protein, 499 aa, unidentified
  source 1..499: note = Madurella mycetomatis
  REGION 1..499: note = tr|A0A175W668|A0A175W668_9PEZI Tryptophan 2-halogenase OS=Madurella mycetomatis OX=100816; GN = MMYC01_203701 PE=4 SV=1
MLASIRYFLRFIGLESKFDNHGFVKKLGASFKLNDKREAFTNFVAVNGPNGYAWNVVRSESDLLMLQHASESSAHTFDGTKVESIEFESTSSSQHPKQPVAAKWSRKDGLSGTISFDYLVDASGRAGIMSTKYLKNRKFNEGLKNVATWGYWKGARTYALGTEREGQPFFEALDDLSGWCWAIPLHNDSLSVGIVMRQDESSRRKKALGSPNTVDFYKQCLNLSPIILDLLSEAELSSPIRAASDWSYSASCYAGPNLRIVGDAGCFIDPFFSSGLHLAIAAGLSAAMTIQAARRGDCDKATAAKWHSSKVTEGYTRFLLVVMMALKQIHSGSVPVLSDFDQEGFDRAFGFFTPSLADADVGGKLTQARVSETVAFCLNAYNQITPQDRNAVLDKLARVRADSYRETREDLEKLTEDELKILRTIRARQMIRTEDTLNIDHFSEDAIDGYAPRLKRGELGLDKVEQWDEIPRYTESLLDVIKEAEDGTERVVHRAEPEQ

SEQ ID NO: 90578 - protein, 456 aa, unidentified
  source 1..456: note = Ophiocordyceps sinensis
  REGION 1..456: note = tr|T5AB59|T5AB59_OPHSC Tryptophan halogenase; OS = Ophiocordyceps sinensis (strain Co18 / CGMCC 3.14243); OX = 911162 GN=OCS_01618 PE=4 SV=1
MSARSRCTVLVVGGGPAGSFAAAALARDDIDVVLLEADSFPRYHVGESMLPSMRYFLNIIGLYDTFDAHGFTRKNGAAFRFNRSQPEAYTDFIAADKSGYAWNVIRSQADELLFRHAGKSGALTFDATKVDSVQFDSDYRDEGIIGHGGHLGRPVSAKWSRKDGSSGAISFQYMVDASGRSGLLSTKYLKNRTINPNLKNIAHWGYWKRGATFAPGTRMQGAPYFEALTDASGWCWFIPLHDGTTSVGVVQNLETAVAQKRQKGSPSTKDFYLQSLDLAPGIKELLCAATMGGDVKSASDWSYHASSYAFPHARICGDAGCFIDPLFSSGVHIALVGGLSAAVTIAASVKGHCSEARAVSWHTKKVTESYMRFFLVAPPMLMALALCLVLVKVKAIKEFEKNLTEDESREIKYILGFVEEMVNIDNFAVNSVDGLVPNLERRHLGLEAEKVKCVRL

SEQ ID NO: 90579 - protein, 567 aa, unidentified
  source 1..567: note = Leucoagaricus sp.
  REGION 1..567: note = tr|A0A137QV64|A0A137QV64_9AGAR Tryptophan 2-halogenase (Fragment) OS=Leucoagaricus sp. SymC.cos; OX = 1714833 GN=AN958_03150 PE=4 SV=1
HTQVLVIGGGPAGSYAASALAREGINVTLLEASKFPRYHVGESLIPSVRHYLRFIGAEDKLANYGFVRKPGSAIKFNQFKREGYTDFVALGHNNNAWNVTRSEFDQLLLNHARSSGAAVYEQTKVDSIHFDPSNPERPVSVSWTHTPPPEPSNGVGPIQGTTAFTHVIDASGRAGLMSTRYLHNRRFNASLKNIAVWGYWTGVGSYGEGTKRSGAPWFEALTHFCCYSSHLSFLDESGWAWFIPLHNGSTSVGIVVNHKVCNAKADNLPPAPFNGKQTPNAAASALAARYIANLSFAPGVVSLIGEGKLIEGSVKIASDFSYSAPFYAGSNYRIIGDAGAFIDPFFSSGVHLAMTSALSAAATICASIRGDCSEALAASWHTQRVATSYTRFQVVVLSAYKQIRSQTDGILSDIDEDNYDRAFAYLRPVIQGASEMGARLSESELQKSLDFCVKLFDPTTPEDHERASFMNGLSRDLLDVNTPIIDPDVLEKTLGVEYFTPLSEEDSGSDTEKAVETKMVLHKVNARRLIHSEYTINNMELENLEGYVVRLERGKLGLVKTSSATDN

SEQ ID NO: 90580 - protein, 529 aa, unidentified
  source 1..529: note = Leucoagaricus sp.
  REGION 1..529: note = tr|A0A137Q2Z6|A0A137Q2Z6_9AGAR Tryptophan 2-halogenase (Fragment) OS=Leucoagaricus sp. SymC.cos; OX = 1714833 GN=AN958_04232 PE=4 SV=1
PTQTKILVIGGGPSGSFTASALAREGFDVTLLEADSFPRYHIGESLLPSVRPFLQFIDAEKKVIEQGFCSKPGAAIKFNQHKREGYTDFIARGPEFGSWNVVRSEFDNIVFRHAAASGAKVFDKVKVSTIEFEKQGDPKSRPIAANYQTADGKEGRIAFDYLVDSSGRNGVMSTKYLKNRHTNESLKNIAIWGYWENFGRYKPGTDRENAIWIEALTDETGWAWFIPLAENLVSVGLVINHAQSITKRNAFREKAGADSTLQDFYLDQVKLSPGLYNDFIPNAKMVQKEDGPMVRQASDYSYSANGYAGIGYRLAGDAACFIDPFFSSGVHLAFTGGLSAAGTIASSIRGVASEEECAKWHDAKISISYTRFMLVVLGAYKQMRSQQIDILSDVGADNFDRAFDLLRPIIQGTADVNKKVTEDEVQDTMDFVKNVFAPTDPELEAAVKQRVDPKFFAGGESDIILPSQTQAMFEDEDVRNVMDAINARKPVHRMYDTQRDFGSEPINGYTLRLVRGELQLVKTEGIVGA

SEQ ID NO: 90581 - protein, 540 aa, unidentified
  source 1..540: note = Leucoagaricus sp.
  REGION 1..540: note = tr|A0A137Q7F2|A0A137Q7F2_9AGAR Tryptophan 2-halogenase (Fragment) OS=Leucoagaricus sp. SymC.cos; OX = 1714833 GN=AN958_01765 PE=4 SV=1
LTKTLQPSFSSVLVIGGGPAGSYSAACLVQEGFSVTLLEAETFPRYHVGESMLPSMRHFLRYIDADDKFVSFGFVPKHGAAFKFNAHKREGFTNFVSDSPDNYTWNVTRAEADALILDRARELGVQIYENHRVTEIQFSQPITKTSKHDDALPATATQAQNESSDPSQSLPVSATWKNVTTGQVGKITFDWIIDASGRNGLISRALGLRKYNQSLKNVAYWGYWTGTQEYRHPGCEVQPPFFEALHDESGWAWFIPLQNGKVSVGVVMDENVSKRKKTSLEKKGDESPILRHYLQEISANAPKIKSFVSEGALIEHSGGPKVRAASDYSYSGSSYAGPNYRIVGDAGVFIDPFFSSGVHLALSSGLSAAATIAATVSSECTASQAADWHNRRVGTSYTRFLMIVLSAYRQMRAQELPVLSDIDEDNFDRAFDLFRPVIQGDVDVKKGLSEDSIRKTIDFCTQAFEPASLEDWHKEGDNSKTEEDEISEETKARAAQRMADVIAAKKTLRAEDMFHIGKFVADKFNGFSIRLEKGRLGLEA

SEQ ID NO: 90582 - protein, 141 aa, unidentified
  source 1..141: note = Aspergillus sclerotialis
  REGION 1..141: note = tr|A0A3A2ZBX7|A0A3A2ZBX7_9EURO Tryptophan halogenase; OS = Aspergillus sclerotialis OX=2070753 GN=PHISCL_08851; PE = 4 SV=1
MAPRTKELLSEAEVVTDVKSASDWSYTASAYHLPNARICGDAGSFIDPLFSSGVQLAVTGGLSAAATIAASIRGDCDEQTAGSMHSKKTIENYTRFSLAATSATKQIREQYQPIIQDMDEEGFQRAFDSQLSLLSVASFRS

SEQ ID NO: 90583 - protein, 580 aa, unidentified
  source 1..580: note = Madurella mycetomatis
  REGION 1..580: note = tr|A0A175WGW2|A0A175WGW2_9PEZI Tryptophan 2-halogenase OS=Madurella mycetomatis OX=100816; GN = MMYC01_200772 PE=4 SV=1
MRPSAIPEKCTVLVIGGGPGGSYAASALAREGIDVVILEGDTFPRYHIGESMLASMRHLLRFVELDSKFDAYGFTKKPGAAFKLNRHKREGYTDFLAAGGPNNYAWNVVRSESDNLMFQHAAENGARVFDGVQVKSIQFEDPTQAPEGEPNLNPGRPVAATYTVKNTGVTGTIAFDYVVDASGRVGILSTKYMKNRRYNQGLKNVANWGYWEGCGRYAPGTSRENSPYFEALQDESGWAWFIPLHDGTASVGVVMNQKLATEKKKNSPGGSMDSATFYHESLKLAPNLLAIMGEGANFRTETKVKSAADYSYSASSYAFPYARIVGDAGCFIDPYFSSGVHLALVSGLSAATTICASIRGDTDESAAADWHSKKVSDAYTRFLLVVLSAYKQIRHQEEPVLSDFDEDNFDRAFSFFRPIIQGTADAAGDRLSQEELNKTLEFCAYAFEPVNGLGDEGEEAVRKAVGKDKDVYNGTDYHPDLSPEQLKSVNHIRARKMMRTEDTMNMDSFGTDVIAGYVPRLVRGGLGLRKQPVNGTVNGNGTMSGNGVGNGNGIVNKNEMMNGNGVVNGNGKVNGNGHAA

SEQ ID NO: 90584 - protein, 908 aa, unidentified
  source 1..908: note = Leucoagaricus sp.
  REGION 1..908: note = tr|A0A137QAN7|A0A137QAN7_9AGAR Tryptophan 2-halogenase OS=Leucoagaricus sp. SymC.cos OX=1714833; GN = AN958_12776 PE=4 SV=1
MRLTVLSQNWTGSVSIFHNNVTFILQHKIDKAPNFLDDITLLGPRTCYKKPDSTYETIPKNPNIQHFILKEKEKEVMEIRKFLEIMRSPEGLTNKTKQTFLCYAGKFFVQDRKIFGPMLVGVFLNTILYGVLTVQSFIYYQTYKNDKAWIRYLVLYLFFVETLNTGFDIALIYEPLVLRFGTMEAVTNIPVMLMSVGAYSAAIGTSVTGSLTYPSLQRMSPAIITWLVSSAMADVIITASLVYHLVYSNCHLQQYRRKTGVRATDDIINRIMRLTIQTGMITALFAALDVISFLALPNTSMNFLWDFPLSKLYTNSLLSTLNARAGWNNLVVDDQHNVLFGTDNSRTMVRTMATGKSSSRTSTNPQKIITGVYELGTPSISAQAKDSADLEQGPKRTTVLVIGGGPAGSYASTLLAREGLDVVLLEALKHPREHVGESMLPSMRHYLRFIDLESEYDRRGFLHKPGAIFKFVHGARECYSDFGLLGPDKRTWHVYRAEADQVMLWHAAQQGVKVFEEVRVESIDFEGGNTNSPRPVSAAWKSKLGESGTISFDWLIDASGRQGLITTKYLKNRIYREGLRNVAAYGYWNNVPIFEEGGPRQNATWIECLTDKRGWAWFIPLHNGMTSIGVVMHQETSNQKKAAGPSGLEAHYLEQLKLAPGVLGRIGDKGIYIPGSLQSTADYSYHATSYSGDHYRIIGDAAAFVDPLFSSGVHIGMTGALSAACTILGSMKGQVTEDEARAWHDAKIGISQTRFLLVVLSAYRQMQHQGNYAALGDFNPNDFEPAFELFRPVYQGEHDVEKKLSNEELERMINFTRNFFLPITYEQYEDVNARFGHLTAINGPVMGPEDLAKVLDEDDSDAKAVLQRINALKVLSNEVGSSGFTSEAVNGYVMTMERGRLGLAKAKC

SEQ ID NO: 90585 - protein, 521 aa, unidentified
  source 1..521: note = Aspergillus sclerotialis
  REGION 1..521: note = tr|A0A3A2ZBE3|A0A3A2ZBE3_9EURO Tryptophan halogenase; OS = Aspergillus sclerotialis OX=2070753 GN=PHISCL_08084; PE = 4 SV=1
MPIPDKCTVLVVGAGPGGSYAASVLAREGIDTVLLEADVFPRYHIGESMLPSMRHYLDFIDLYPKFNSHGFVRKNGGAFKLNSGPPSYTDFIAAGGTENHAWNVIRSESDDLLFRYAGESGAKIFDGVKVNSIQFMRYNSGNKTKDSAAVDLGRPVSASWISKDGSSGAVRFDYLIDASGRAGLVSTKYMKNRKYNSGLRNIATWGYWENVGTYGIGTTAEDAPFFEAFQDGIGWAWTIPLHNQTSSVGVVMKQTHYATKKKQGRLSNRDIYLESIKEAPGVAKLLEAATLKSDLKSTSDWSYSASTYASPYLRIVGDAGCFIDPLFSSGVHLALTSGLSAALTVCAARRGDCTEDAALNWHTRKVAEAYTLFLLVVASALKQIGGRDEHILNNWDEYGFDRAFELFKPIIQGTVELAGKLTKPEIDKSVDFCISVLKKVGNGLPTNTANSSSASLQANALGEEAVQNIVQMRRVPDLNAFRVDVINGMAPNLKRGSLGLIPVMKRNAGRSTTTKENRHKL

SEQ ID NO: 90586 - protein, 533 aa, unidentified
  source 1..533: note = Leucoagaricus sp.
  REGION 1..533: note = tr|A0A137Q2V9|A0A137Q2V9_9AGAR Tryptophan 2-halogenase OS=Leucoagaricus sp. SymC.cos OX=1714833; GN = AN958_04392 PE=4 SV=1
MASIPTQTKILVIGGGPSGSFTASALAREGFDVTLLEADSFPRYHIGESLLPSVRPFLQFIDAEKKVIEQGFCSKPGAAIKFNQHKREGYTDFIARGPEFGSWNVVRSEFDNIVFRHAAASGAKVFDKVKVSTIEFEKQGDPKSRPIAANYQTADGKEGRIAFDYLVDSSGRNGVMSTKYLKNRHTNESLKNIAIWGYWENFGRYKPGTDRENAIWIEALTDETGWAWFIPLAENLVSVGLVINHAQSITKRNAFREKAGADSTLQDFYLDQVKLSPGLYNDFIPNAKMVQKEDGPMVRQASDYSYSANGYAGIGYRLAGDAACFIDPFFSSGVHLAFTGGLSAAGTIASSIRGVASEEECAKWHDAKISISYTRFMLVVLGAYKQMRSQQIDILSDVGADNFDRAFDLLRPIIQGTADVNKKVTEDEVQDTMDFVKNVFAPTDPELEAAVKQRVDPKFFAGGESDIILPSQTQAMFEDEDVRNVMDAINARKPVHRMYDTQRDFGSEPINGYTLRLVRGELQLVKTEGIVGA

SEQ ID NO: 90587 - protein, 603 aa, unidentified
  source 1..603: note = Metarhizium brunneum
  REGION 1..603: note = tr|A0A0B4FSQ5|A0A0B4FSQ5_METBS Tryptophan halogenase (Fragment) OS=Metarhizium brunneum (strain ARSEF 3297); OX = 1276141 GN=MBR_07199 PE=4 SV=1
MAVPPSCTVLVIGGGTAGSYAAAALAREGIETVVLEADKFPRYHIGESTLPSLRHFFKFIDFYDTVDAYGFYHKNGAVFRLAQAQPDACKSPSPAYTDFLEAGGPDGYAWNLIRSEFDDLLFKHAGTCGAQIFSETRVDTIQFEPVANGLKPDNRNLEDHLNPGRPVSATWVREDGTSGSITYKYLVDASGRQGILSTKYLKNRKFNNNFKNAAIWAYWKSDNVYGPGTHMEGSPYFEALDGEFLTTGFAYILRHSLSSAGTNQQTDASGWAWFMPLHDGTRSVGIVQDQKMVTEKKHELGRPSTLDFYKQCLDMAPRIRELLSEAELIPHVRAACDWSYTASTYHLPNARICGDAGSFIDPLFSSGVHLAITGGLSAAATISASIRGDCSEAAAGSWHSKKTVESYTRFFLAVSSATKQIRTQYEPIIKDMDEKGFQRAFDLFRPIIQGTADADEAGKVSQLEISKILQFCFKAFTYVPPERKDALFDKLRKLDSKALQDDAKQVQTLNGIEKYLTADELQILEILRSRRMIREDPFEMDSFSLDTIDGMAPKLVRGSLGLVNYEQVKIDKAHFYSQDFLDGNCPGIREGSVHLPTSRVQLG

SEQ ID NO: 90588 - protein, 518 aa, unidentified
  source 1..518: note = Halobacteriales archaeon
  REGION 1..518: note = tr|A0A2R6DXU3|A0A2R6DXU3_9EURY Tryptophan halogenase; OS = Halobacteriales archaeon QH_1_68_42 OX=1919146; GN = BRC60_08250 PE=4 SV=1
MPQENMGDEVSSVTVVGGGDAGLLAALAVRSVNPGLDVRVVDDFAESPTRVGKSTFQAVVPLLHDVLDIDEGRFLQTVRPVWKGSVCFRDWCGNDPFHYAFDVRSVKPDLDDPKSVESLYHYYETGDMSTPAEGIVDERKTPLVYSAAANAYVMYPNMAYHLSIGRFNELLRELCGERDVALVDDRVTDVRTNADDTYVERVAGEDAVYDADLYVDATGFKRLLMDRLDADYRSFDIPLDAAFHATADHDIEDTVPATVVESGEYGWFWQIDTYDHRDLGYVYSSEHVSDDEALAEFEAHREEVFADLERYEFDSGFYEDAWVGNCVATGNALGFIEPLQSTALTTHLNTSVRLSRQLAAHGHINDAGLRESFNRYVTGTWNSVYDFISVHYLFADAVNDFWADMQEIPTSDRVEQYLAYYDANGFELYDSEVVTEEGTQLGMLTFPTSSLYFLIRNMGAESTFYEEHDFSVSDEIKERWRQRNGYVTDLADQCLSYEQVYKSGVVDSYVRNDLCPTV

SEQ ID NO: 90589 - protein, 351 aa, unidentified
  source 1..351: note = Halobacteriales archaeon
  REGION 1..351: note = tr|A0A2R6H3X5|A0A2R6H3X5_9EURY Tryptophan halogenase (Fragment) OS=Halobacteriales archaeon QH_8_68_33; OX = 1919165 GN=BRC78_07100 PE=4 SV=1
MGDEVSGVTVVGGGDAGLLAALAIRRVNPGLDIRVVDDFAESPTRVGKSTFQAVVPLLHDVLGIDEGRFLQTVKPVWKGSVYFRDWCGNDPFHYAFDVRSVKPDLDDPRSVESLYHYYETGDMSTPAEGIVDERKTPLVYSAAADSYVMYPNMAYHLSIGRFNELLRELCGERDIALVDDRITDVETNAEGTYVERVAGADAVYDADLYVDATGFKRQLMDRLDADYRSFDIPLDAAFHATADHDIGDTVPATVVESGEYGWLWQIDTYDHRDLGYVYSSEHVSEDDALAEFEAHRDGEFTDLERYEFDTGFYEDAWVGNCLATGNALGFIEPLQSTALTTHLNTSVRLSR

SEQ ID NO: 90590 - protein, 513 aa, Haloferax sp.
  REGION 1..513: note = tr|A0A371LTZ2|A0A371LTZ2_9EURY Tryptophan halogenase; OS = Haloferax sp. Atlit-4N OX=2077206 GN=C5C07_17540 PE=4; SV = 1
MSDYDRTINEILVVGGGDIGLLTSLCIKKLNPDIDVAVVDDFSEDPPEVGKSTYQEIIDIFHEFLEIDEMRFLKEVKPIWKSSVFFRNWTEYGPFHYSFDDIQKYPDPNTSHFLDKAYLYYHELYSDPECQTINEWLVELGKSPINFEMTGEWSRYGPRAYHLDLNRFNEFLQTICGERGINLIDDIIETVETGDGRVTRVQSDQETYEADLYVDATGFRRVLLDEFDVPFRNFDLPLDAALSTKFERPLSEVEPATVIESGDNGWFWQIDTYEFRDVGYVYATDFVDAVSAKAEFVEYVDGDISADELECHEFQSGYYEQTWTGNLVAIGNAGGFIEPLQSTGLTSNTKNAVQLAHLLSAYGSADYPAARETYNGWVTRQWETVYDFISVHYKYANGDTPFWKQVQSMPVSERVTRIKDHFESCGYAVKIDPIQTPKTGQTPLIDSAVFPTVSYLTILRNLEVQSDFYETLDLDVSEEARTFLEEYYRGEKKDAEAFLTHEEFYKGVLFDPW

SEQ ID NO: 90591 - protein, 569 aa, unidentified
  source 1..569: note = Haloferax massiliensis
  REGION 1..569: note = tr|A0A0D6JMC9|A0A0D6JMC9_9EURY Tryptophan halogenase; OS = Haloferax massiliensis OX=1476858 GN=BN996_00206 PE=4; SV = 1
MERTGQTDAGNGNRQHGRRGDRGDGESPPPNSYDVVGGGSGMSASLTAMILGKHGLDVVMLEAGSHPRFAVGEAMLPQSSMWMWILGEYHGIPEIQYLSDTNEIVDNVTSSCGIKHSIGFAYHEPDRGVTADHSHQLIPPSLPFYSESHLLRSEVDQYLVAAAQRYGVEYVDETEITGVDIGRDEVSVTTERGVIEAAFYVDGTGGNSILAEKRGYRENAPELETDSRAIFTHVGGLAPFDELLDEAARPGQSNRLHDGTLHHVFDGGWMWIIPFDNFERSEANKVSVGLVLDRAQYPTDESVSAEREARRIIAEFPDIERHLESATPVRPWVRTGRLQRTASQSAGHRHYLTNNTYGFVDPLYAVGLVNTLESVFVSTNVLLDAFENGEFSATRFAPIDEMHRHQLATNDRVISNAYKSMGDFRLWNAWTQMWLGQVLFHDLYIQRHCFNYLATGRPDEFDSLLAEPSPGDGAPFVPQKSEMHRRMAEILDVYRAGDASADEAAGLLFAELRQADWLPKHIYDWGDERARHVDFSDPELVGKLIQWGKTESPDQLREGLFDFPVPEMA

SEQ ID NO: 90592 - protein, 526 aa, unidentified
  source 1..526: note = Halobacteriales archaeon
  REGION 1..526: note = tr|A0A2R6IBB8|A0A2R6IBB8_9EURY Tryptophan halogenase; OS = Halobacteriales archaeon QS_5_68_33 OX=1919179; GN = BRC95_12065 PE=4 SV=1
MPQENMGDEVSSVTVVGGGDAGLLAALAVRSVNPGLDVRVVDDFAESPTRVGKSTFQAVVPLLHDVLDIDEGRFLQTVRPVWKGSVCFRDWCGNDPFHYAFDVRSVKPDLDDPKSVESLYHYYETGDMSTPAEGIVNERKTPLVYSAAANAYVMYPNMAYHLSIGRFNELLRELCGERDVALVDDRVTDVRTNADDTYVERVAGEDAVYDADLYVDATGFKRLLMDRLDADYRSFDIPLDAAFHATADHDIEDTVPATVVESGEYGWFWQIDTYDHRDLGYVYSSEHVSDDEALAEFEAHREEVFADLERYEFDSGFHEDAWVGNCVATGNALGFIEPLQSTALTTHLNTSVRLSRQLAAHGHINDAGLRESFNRYVTGTWNSVYDFISVHYLFADAVNDFWADMRDIPTSDRIDQYLAYYDANGFELYDSEVVTEEGTQLGMLTFPTSSLYFLIRNMGAESTFYEEHDFSVSDEIKERWRQRNGYVKDLADQCLSYEQVYKSGVVDAYVRNESAFAQAAAPDPGS

SEQ ID NO: 90593 - protein, 548 aa, unidentified
  source 1..548: note = Sporothrix insectorum
  REGION 1..548: note = tr|A0A167P1C5|A0A167P1C5_9PEZI Tryptophan halogenase; OS = Sporothrix insectorum RCEF 264 OX=1081102 GN=SPI_07794; PE = 4 SV=1
MSIPERTKVLVIGGGPAGSFAASALAREGIDTVVLEGDKFPRFVDLDDAFVAHGFYKKIGAAFVLNKKDPAYTDFIAAGGPNAYSWNVIRSESDDLIFRHAGKSGAQIFDGVKVSAIEFVPHDGPSTADDKTLDPGRPVSATWTRKADGVSGVIKFDYVIDASGRAGLMSTKYLKNRHFNQGLKNVASWGYWKGAGRYGVGTPQEGVPYFEALSDGSGWAWFIPLHNGTTSVGVVVNQEIATRKKKEMGSPGGKAFYLEMLKAVPRILGPMLKDATLVSDEIKSASDWSYSASSYASYNARIVGDAGCFIDPFFSSGVHLAVASGLSAAATICASVKGQCTEHEAFEWHSKKVAEGYTRFLLIVLSALKQIREHDDPVLSDWDEAGFERAFAHFRPIIQGTADVHGKLTQEEVSKTVDFCLNAFSRPVDAAMRDAVLKRVEDLKISGAARSHKELEAYLTPDELNILNTVHAREMVRSEDTLNIDTFTSDVIDGRALNMVRGSLGLISAEEAAKKVVKKSADVLAQLMGENKKFAHGDQQAVASISST

SEQ ID NO: 90594 - protein, 376 aa, unidentified
  source 1..376: note = Leucoagaricus sp.
  REGION 1..376: note = tr|A0A137Q1C6|A0A137Q1C6_9AGAR Tryptophan 2-halogenase OS=Leucoagaricus sp. SymC.cos OX=1714833; GN = AN958_06177 PE=4 SV=1
MSTVQTSTVPPSFTSVLVIGGGPSGSYTAACLAQEGISVTLLEAETFPRYHVGESMLPSMRHFLRYIDADDKFNSFGFSQKHGAAFKFNPRKREGFTNFVSENPNNYAWNVTRADADALLLDRARELGVQIYENHRVTEIQFSKPSAAKVNATQAQNESQEPQNLPVSVTWKNVATGQIGTIAFDWVVDASGRNGIISRALGLRKYNQSLKNIAYWGYWTGTQEYRHPACEIQLPFFEALHDESGWACAYRQIRAQELPVLSDIDEDNFDKAFDLFRIVIQGDIDVKKGLSENSLRQTIDFCTQAFEPESMERWHGKEGDDSEVKDSEISEEKKKEIMTVNESLRAEDMYHIGKFVADKFNGFSIRFEKGRLGLQA

SEQ ID NO: 90595 - protein, 534 aa, unidentified
  source 1..534: note = Leucoagaricus sp.
  REGION 1..534: note = tr|A0A137QID4|A0A137QID4_9AGAR Tryptophan 2-halogenase OS=Leucoagaricus sp. SymC.cos OX=1714833; GN = AN958_09344 PE=4 SV=1
MLPPFATVLVVGGGPAGSYASAVLAQEGVDVVCCEAAHFPRYHIGESLLASVKAYLQMVDVVEKIDQHGFHPKVGSAIKFRPDRPEAYTGFIAVNPNNGAWNVDRSQFDHLLLNHAVEKGAKVFQGARISNVQFSNDNCHSAQWTRDDKTGVISFNYIIDCSGRQGILSTKLFRNRHFNQSLKNIATWTYWKGETGVYGRGTRREGAIFIEGLVNGLKGWVWYIPLADKVSVGVVMHESDNTALRRDSNDLKDHYMRALSHSPDVMEMLKGAAICDEIHMASDYSYSATKYAGPGWRLAGDAGAFIDPFFSSGVHLALNGGLSSAISVLASIRKDVSEEAAAAYHDKKVSMAYTRFLLVVLSAYKQLRHQDADVLSDVASGDFDTAFDIMRPVIQGLGDVEASHDRTLTEEALEKTMDFVASVLTTPFDEVASARESGYVPAHLFDRNGDLLGPEQIAKLVTDTGADEKTERALRSINARKTLKLYDPKSNFENEEVLGMVAHLQRGSFGLRTVDLKPVVASISGVWVGHIQNI

SEQ ID NO: 90596 - protein, 549 aa, unidentified
  source 1..549: note = Leucoagaricus sp.
  REGION 1..549: note = tr|A0A137QIJ3|A0A137QIJ3_9AGAR Tryptophan 2-halogenase OS=Leucoagaricus sp. SymC.cos OX=1714833; GN = AN958_09342 PE=4 SV=1
MLPPFATVLVVGGGPAGSYASAVLAQEGVDVVCCEAAHFPRYHIGESLLASVKAYLQMVDVVEKIDQHGFHPKVGSAIKFRPDRPEAYTGFIAVNPNNGAWNVDRSQFDHLLLNHAVEKGAKVFQGARISNVQFSNDNCHSAQWTRDDKTGVISFNYIIDCSGRQGILSTKLFRNRHFNQSLKNIATWTYWKGETGVYGRGTRREGAIFIEGLVNGLKGWVWYIPLADKVSVGVVMHESDNTALRRDSNDLKDHYMRALSHSPDVMEMLKGAAICDEIHMASDYSYSATKYAGPGWRLAGDAGAFIDPFFSSGVHLALNGGLSSAISVLASIRKDVSEEAAAAYHDKKVSMAYTRFLLVVLSAYKQLRHQDADVLSDVASGDFDTAFDIMRPVIQGLGDVEASHDRTLTEEALEKTMDFVASVLTTPFDEVASARESGYVPAHLFDRNGDLLGPEQIAKLVTDTGADEKTERALRSINARKTLKLYDPKSNFENEEVLGMVAHLQRGSFGLRTVDLKPVVASISGVWVGHKSSTPSPSSSSSGGSLNEG

SEQ ID NO: 90597 - protein, 574 aa, unidentified
  source 1..574: note = Trametes pubescens
  REGION 1..574: note = tr|A0A1M2V4W8|A0A1M2V4W8_TRAPU Tryptophan 2-halogenase OS=Trametes pubescens OX=154538; GN = TRAPUB_6825 PE=4 SV=1
MVLLVNAWNVVRSEFDHLLLQHAAACGAHVYEQTRVTDIHFEETPPSSPIHSHFDSPLSRQCQDEHTSRPLPRRRTSAVEFALNDGPNADGLGRPKSVSYETAFGGTGEITFDYLVDASGRAGLMSTKYLKNRKFNASLKNVAVWGYWKNTGMYGQGTDRENAPFFEALSDESGWAWFIPLHKGLTSVGIVMDQKQLGIRSRASSSASGSPSLGSSVRRDTLSARTSSTLAERYLSFLELAPGVLDLIGDGELVSLKTDEDQDDDADIPVARSASDYSYSASHYAGPGWRLVGDAGSFIDPFFSSGVHLAMTGALSAAASIAASIRGDCPEADAAAWYSSRVSVSYTRFLIVVLSAYKQIRCQSEGILADVDEDNFDAAFAFLRPGQCGVARFSAGLTNPHPAVIQGGADMGARLSEDEVQRALDFCVHLFDPTTPEQHESARRKIELASGLVGAAHDAAVPDADPLRLLDVRAPVVDPVHLEQLLRRQLHLQENLPTSPSGTHGGLPRPPDIATQELSMVLNKVNARRVIHSEHGNGLNSLEEEELAGYALRLHCGELGLRRVGGEKGTGVQP

SEQ ID NO: 90598 - protein, 641 aa, unidentified
  source 1..641: note = Pyronema omphalodes
  REGION 1..641: note = tr|U4LV70|U4LV70_PYROM Similar to Tryptophan 2-halogenase acc. no. Q0VZ69 OS=Pyronema omphalodes (strain CBS 100304) OX=1076935 GN=PCON_03510 PE=4 SV=1
MFMWATSFLSLVLLFPRHAAFSISKFFRFLDFPINRRLITRHARNDGETAFLNAANQTPLNDTDVLVVGGGIHSLIYAIHTAKLSPGRTINVVEKAGSPSYKIGESTLTTFGLWLKTIGIESPMLWRLFGPKDGLAFYYMPQNGDPENYTGFCANGPPGDFVPTLQIERKISELMLTLIAQRMGVNVWHGHSVDIDNTVLADGGSKVPVAGKQVNAKLVVDATGRFRRFASKEARLQRFDGWNTDAFWGYFECPVDESEIPLDHYESVNTNHICLPEGWAWVIRLPTWEGSSIKNLTKMINYLLDLNYAGVPADEIPSSLELARMFGLKFRWVVSIGFALRTDTEYPADLSSYGSCEAEQRFNWITAKYPKMAGLMSKHKLVRDLYGPGTTWYIRKNLTYVSPKVTGNGFIAIGDATGFTNPLYSPGINANMGTSVAAAELTASYLDSEDAKGRAESMQKYEEYCNGRVDGLHRMNVFNYVLMRSPQLGPLGPLWQYLSGTGMPGWQKMRTYDFNTAGDILKNWDWGAREPEYAEFADSVIKMLPGKPSEPVDPEIEQLILNMSDAKVKELVAGGKFKNRWAGLLRWYNDSLIRSETKIDKDILARRCSKCTNWRLLTGDRKCATCGAMNKQELSQKVMYN

SEQ ID NO: 90599 - protein, 590 aa, unidentified
  source 1..590: note = Aspergillus niger
  REGION 1..590: note = tr|A0A254UHP3|A0A254UHP3_ASPNG Tryptophan halogenase family protein OS=Aspergillus niger OX=5061; GN = ATCC64974_42670 PE=4 SV=1
MSPPPLCHGDPHVQGTASGRLIASHVELSFWGGVDPQTGQVIDQHHPLSGHSLEGCILAIPGGRGSCSGSGVMLELLLNNRGPKAILFERREEILTLGVMVAEEMFDRAIPVITLSSDDFRRVLKLHDTYITVSDGYIFDQELPGTLHELPGCHSKGPSVLTTKIQLSDVDRALIQGEYGEAARVAMQIVLRMSELLEVRELIPVTQVHVDGCIYTGPGSLLFAEKLRDLGGHVLVPTTLNSISVDQKRWRAQGVDVAFGEAADRLAKAYMDMGARPTFTCSPYQLDSAPKLGDQVAWAESNAVVYANSVLGARTMKYPDFLDIAIALTGRAPKGGPHVDTNRRASLIIRLHDVERLHDLDDSFYPVLGYHVGTLATTQIPVIVGLESLAPNRDDLKAFGAAFATVSSAPMFHMVGITPEAETIEAAIRPGTYPACVDVQIEDLIPCWDTLNTASECQTVDLISLGNPHFSLREIRRLATLCQGHTKCEGVAVMVTCSRATYSLAGQAGLIQELERFGVRFITDTCWCMITEPIIPRSPNAIMTNSGKYAHYGPGLTGRKFYLGSLARCVDTACQGRPVDHHPSWMVEKM

SEQ ID NO: 90600 - protein, 529 aa, unidentified
  source 1..529: note = Penicillium sp.
  REGION 1..529: note = tr|A0A2H3IGH1|A0A2H3IGH1_9EURO Tryptophan halogenase; OS = Penicillium sp. 'occitanis' OX=290292 GN=PENO1_041690; PE = 4 SV=1
MSIPTKTTVLVIGGGPGGSYTASALAREGIDTVLLEADIFPRYHVGESMVASIRHFLRFIDLDTTFNNHGFIKKTGAAFKLNNQKTAYTDFIVAAGPDSYAWNVIRSEADDLIFRHAGKSGAKIFDGVKVTSLEFVPNKEADLPTDGTADPGRPVSATWTAKDGRTGSISFDYLVDASGRVGIVTTKYLKTRSYNQDLKNVASWGYWRGAISYGVGTPKEGQPFFEALQDGSGWVWFIPLHDGTVSVGVVMNQEMSTQKKKESTTDNGRDFYIESIKDAHGVTHLLQNAKLDTEVKHASDWSYSASEYGSPYVRVVGDAGCFIDPYFSSGVHLAFSGALSAAVSISASIRGHCDETQAWKWHSTGVRDRFTRFLLVVMSATKQIRARDAPIMNNQGEDGFDDAFTIIRPVIQGISDVTGKTTHDEVSRAVDFTTEAVAKTKPDDSANSSSQAGPQFTDTIQQGSLTKDEAKVLHMVKNVFKDFFVADVYNGYRAKLERGSLGLEKVNTEALLVGEKLSGTKTEVKEVEV

SEQ ID NO: 90601 - protein, 594 aa, unidentified
  source 1..594: note = Metarhizium rileyi
  REGION 1..594: note = tr|A0A166S0T3|A0A166S0T3_9HYPO Tryptophan halogenase; OS = Metarhizium rileyi RCEF 4871 OX=1081105 GN=NOR_07920; PE = 4 SV=1
MGIPQSCTVLVVGGGPAGSYAAAALAREGIDTVLLEADKFPRFVRKVCLLRFAISQSSLYFRYHIGESTLPSLRHFFQFIGFYATFDAHGFYHKNGAVFRLAKDQPEAYTDFLEAGGPDAYAWNLTRSESDDLLFRHAGTCGAYITDKTRVTDIQFEPAALGEPVDSDSNGDKTRIKNVGRPVSATWVSKDGVSGPIAFRYLVDASGRSGILSTKYLKNRRFNENFKNVASWAYWKSENIYGRGTHMEGSPYFEALDDASGWAWFMPLSDGTRSVGVVQDQKMAHGKKRELGNPSTLQFYKECLAMAPKISGLLSEAELVTEVRSASDWSYTASTYHLPYARICGDAGSFIDPLFSSGVHLAVTGGLSAAATIAASLRGDCDEQTAGSWHSKKTVESYTRFFLAVSSATKQIRNQHDPVMHEVDEEGFQRAFDLLRPIIQGTVDTDSSGKTSQSEISKILEFCFRAFSYISQEQKDLLFEKLKKLRAESGRDKGQAGNALGEIRNLLTADELQVLETLRSRRMIREDPFEMDSFSLDTIDGLAPNLVRGKLGLVPSKPAEIKENHFYSPEFLDGKAPGIREGSIHLVTSRVKLG

SEQ ID NO: 90602 - protein, 525 aa, Natrialba sp.
  REGION 1..525: note = tr|A0A5D5AW63|A0A5D5AW63_9EURY Tryptophan 7-halogenase OS=Natrialba sp. ESP3B_9 OX=2448032; GN = FYC77_01130 PE=4 SV=1
MANDYDGTQIGSIGVVGGGDAGLMTALALEKGLDGVDIFVVDDFDETVPEVGKSTLQFLQTFLHDRLEITPTRLVEEVKLGFKTTVYLKDWCGQEFHSPLGKPLPTVRQEEAGNWVDPTVQDEGLSAENEPVFDEFYYRYQEDEYTTVYNELAETVGKSPMVIDQQDVFNIQKGLPDASYHFNSNSFNRFLRTICGERGVELINDRIDEVTATDGWIERVAGSDGSYDADLYIDASGFRRMLMDELEVPMREFDLPVDSAVVATTDLPLSDIESATIVTSGEAGWFWQIDTVDVRDLGYVYSSDHVSDDDAVAEFLETRPEEIDPDEIRRYRFESGVLESPWKGNCLAVGNAVGFVEPLQSTALTTSARLADRLATFLGMHGRVNHQGLRELFNETTLATWEEIYDFVSLYYKYNSGMTAFWEDAREVNPGPIQQVDTYRASGFCAPQTRATLTRTGTDLNNYYLYYLVLKGLGVESVFYENLEYDPDPAVVEQVEEYTDSVHDRVDEFLSYEEFYQAFHPGFDD

SEQ ID NO: 90603 - protein, 514 aa, Halomicrobium zhouii
  REGION 1..514: note = tr|A0A1I6LDC3|A0A1I6LDC3_9EURY Tryptophan halogenase; OS = Halomicrobium zhouii OX=767519 GN=SAMN05216559_2508; PE = 4 SV=1
MDDEIGDVVVVGGGDIGLLTALSINKLNPEMDVTVVDDLQRDAPAVGKSTFKKIQDILHGTLDIDERRFIGEVRPVWKGALYFRDWCDRTAFHYPFDPEDKYPDPKNPNAVEHYYHQYADLYDSPDHLTKGEAIVEKGKSPWFFGPDGNLDRYEKVAYHLNTKRFASFLRTVCRERGISIVDDAITGVETTGAHIDGVLSEEARYEGDLYVDATGFGRVLRREQDAEFRDFGFPLDSAYTVRIDRDLSEVLPATAVDTGDHGWFWQIDTYDERDLGYVFSSEHVDDETALEEFLGHIPDVAPDSAGGDPDVDRDDVAKYEFSSGYYDRAWIENCVAIGNSQGFVEPLQSTGLTGNATAAEKLATMLSIRGGIADDRFREEYNTWVRWVWESIYDFIAIHYRYATGETAFWRDVATREYSPRVDAIVEQFDRNGLTREVVPLSEDDDLLKLSIFSLPDFYTMMRNLGAESVFYETNDFDVSEEVVRKHDEYYERIDAEVEEHLTTRELYEGLLQF

SEQ ID NO: 90604 - protein, 521 aa, Halomicrobium zhouii
  REGION 1..521: note = tr|A0A1I6KZX8|A0A1I6KZX8_9EURY Tryptophan halogenase; OS = Halomicrobium zhouii OX=767519 GN=SAMN05216559_1702; PE = 4 SV=1
MGTDVSSITVVGGGDAGLLAALTLRRVNPDVDIAVVDDFGEPPTEVGQGTFQSIIPLLHDVLGIDEGRFLREVKPVWKASSYFRDWCGYEPFHYAFDIRSVKPDVDDPNSVESLYHYYETGDMSTPAEGIAERGKTPLVYAPSQDTYAMYPNMAYHLSVGRFNEFLRTLCEERDVPLVDDRITDVETDADGTRIAAVHGASGATYEADLYVDSTGFKRLLMDELDAAYRSFDVPLDTAVRAAADRPLSEIVPATVLETGEHGWFWQIDTYDSRSLGYVFSSDHVSDEDALAEFRAHREEDLGEVDYYRFDSGFYEEPWVGNCVATGNAQGFIEPLQATSLTTHLNTALRLSRRLAARGRIVDDGFRESYNRYVRGSWNSVYDFISIHYRFADGDTAFWEEMQSIPISDRVRDYIDYYDANGFELFDSELVTEEGAPRGMLAFPTSSLYFVMRHMGAESSFYEDNDFTVSDEVRERWRQRNGYVDDLADTCLSYEQVYKSGVVDSFVRNERAFAQAAAPSGR

SEQ ID NO: 90605 - protein, 337 aa, unidentified
  source 1..337: note = Nitrosopelagicus brevis
  REGION 1..337: note = tr|A0A0A7V6I2|A0A0A7V6I2_9ARCH Dehydrogenase; OS = Candidatus Nitrosopelagicus brevis OX=1410606; GN = A7X95_03530 PE=4 SV=1
MKIAVMGMGVAGSYLMARLKNSEHEVVGYERMPTERHDSICAWGTIKEELTNFCKKTGRNFDDFLIHDGKEMHVKMNDNVKFDIGLKGLCTYNKLGLIKDFIKDCNVIYGKAPRLEELEKEYDMIVDCTGFNRSYLPKMEQDFYLPTYEYKVEYENGVPYDDFYIEPFPGMSGYFWYFPLGENYAHIGAGDYNKNHIKATDEFLKKHGGKVVATKGRPIRLATPDRCKPYYSGKVVGVGESIGTVYALLGEGIIPSMQCVNIFMENMHDFKAYEKAIEKHYSVYAKVFNFVRAKIHNDFNFLKALPDFIAIFRYMKKNEDRFGMHIKIGDLLKVAKA

SEQ ID NO: 90606 - protein, 336 aa, unidentified
  source 1..336: note = Malbranchea aurantiaca
  REGION 1..336: note = sp|L0E2T7|MALD_MALAU NmrA-like family domain-containing oxidoreductase malD OS=Malbranchea aurantiaca OX=78605 GN=malD PE=1 SV=1
MDTGKRLVTVFGGTGNQGSSVVRSLLAHKDKLFHVRVITRDPTSEKAQACAKLGAELVKADGFNKSETVSAFMGSWGAFVNTNSDEEIYKIPGGRSDYDLGSTVLDATKEAGVKHVVYSSGLNLCKYTNGRVHSEGFESKYYVEQYGRRKGFQTFTPIVPASFMEAFLAESFCQSLGGFPWFKRDTGEYLLATPPYGGDERMPWVSVEDDFGDIVHGIFLDPDSYHLKTIQGSSELISFEKMVEDFMEVTGEKARYVRLKSWVDIPLDGTSCREEMRAIFHSMYSNGGKWFVPDESEIDTATTLKKEAKLAQGVTDGSLTAFKDWIHKQWERRLPN

SEQ ID NO: 90607 - protein, 590 aa, unidentified
  source 1..590: note = Malbranchea aurantiaca
  REGION 1..590: note = sp|L0E159|MALF_MALAU FAD-linked oxidoreductase malF; OS = Malbranchea aurantiaca OX=78605 GN=malF PE=1 SV=1
MKYTATFALLILAIGIQTQRRSTICRCRQEDACWPTTAEWSSLNQSIDGKLRHLRPVGLPCQQSAYHKEKCDEVLAMTHNSSWRVDHPESLQLVSWESWPEKNQSCQIVREAVDGCAQGRIPLYSAAVESTKQVQQAVSFAKHRNLRLVVRNTGHDMAGRSSAPGSLQILTSGLKGINYTENFVPFITQGSAEPMGPAVTIGAGILTGELYATGSEKGFVVLGGACSTVGIAGGFIQSGGMGILSPSKGLGSDHVLQVEIVTADGSHIIANQYQNEDLFWAVRGGGGGTFGVITSVTLRAFADLPATVTGIQINTPSADAIFWAGVKTVLSILPELTDAGNSARMIVLPASSTGGASASFEGYTFNKKGAVSLLALQRALDDFGIPFKLSHDFQGNLSRFLAAPKGVDLAGISVIPGSVFLSYDLVASKDGPAKVTSALSDLRLGPGSSFSVDAFGGGQVVNNKNRINSAVHPDWRSALLSLTVGRGVPPGYTLETLKSIESELENDQLPRLRSLEGGRKGAYLAVAYPNEVYFQDSFWGKNYDRLLKVKRAWDPEDLFITRVGVGSERWDDEGMCTRADSGLWHALARF

SEQ ID NO: 90608 - protein, 500 aa, unidentified
  source 1..500: note = Halobacteriales archaeon
  REGION 1..500: note = tr|A0A2R6J2L0|A0A2R6J2L0_9EURY Tryptophan halogenase; OS = Halobacteriales archaeon QS_5_70_15 OX=1919180; GN = BRC93_08470 PE=4 SV=1
MNGQRIETVTVVGGGDAGLISALTLDSVVPDLAVTVVDDFDEGIPEVGKSTISYIQNTFHNVLDIEKARFVSEVRPVWKASVYFTDWCGRGPFHVPFDDLTLPPSEPGRRRFEELYHRYETGNYRTLGVEIAERGTSPFVEIRPNGFFRSYDHVAYQFSTGRLNEFLRTVCRERGIDLVDDEVVEVGVEDGRIERVAGEERAYDADLYLDATGFERLLMRNLDNPFESFDLPLDAALVAKADLDLSEVVPATVVDSGEYGWFWQIDTWDWRDMGYVYSSEHASREAALAEFAETREADIAEEDVVQYRFDSGHYGKAWVGNCVAVGNALGFVEPLQSTALTLNAILTEKLSELVADHDGIDHRGVRRLYNDYARSKWENVYDFISVHYRYADGESEFWEDVRRVNDRDRLSKYVGPYRENGFNSHDELDNKHGANPRIFNQYIFYRLLRSLGVESEFYEGIDVEVSPEVQAAVERETEQIRSDAERHLSYEEVYGSGVFD

SEQ ID NO: 90609 - protein, 505 aa, Halosimplex carlsbadense
  REGION 1..505: note = tr|M0D5W0|M0D5W0_9EURY Tryptophan halogenase; OS = Halosimplex carlsbadense 2-9-1 OX=797114 GN=C475_00897; PE = 4 SV=1
MGERIEDVTVVGGGDSGLLAALALQRTNPGLDVSVVDDFDRPIPQVGKSTFLAIQQILHDSLGIDEQRFVEAVQPVWKASVYFRDWCGCDPFHYPFDQRRKFPNPEERDTGEAYYFYYAELADSDDHLSKCEQLVAQGKSPWSFEPREGGARKYENVAYHLDTERFNGFLRELCLERDISLVDDEVVTVDTAGDRIRRLRGRDRAYEADLYVDASGFSRVLRGEQDAAFREFDLPLDAALNARSEIDLSEVVPATVIDTGEAGWFWQIDTSDSRDRGYVYASEYVSESEARAEFVDHCEGIDAEDVVNYEFSSGYHDRAWIENCVAVGNAEGFVEPLQSTGLTANAKASVTLATLLSGHGRVATDAVRERYNAWVERTWESIYDFVSVHYAFADGETAFWESARGLDLSPRVELLLEDFDRNGFDAHVDPTMGHSDVDEPLFFQPLDFYALIHNMGATSEFYEAHDFEIDDETRRAVERNYGSIRDDVADHYDHREFYHGALGQH

SEQ ID NO: 90610 - protein, 505 aa, Halosimplex carlsbadense
  REGION 1..505: note = tr|M0CMY6|M0CMY6_9EURY Tryptophan halogenase; OS = Halosimplex carlsbadense 2-9-1 OX=797114 GN=C475_14188; PE = 4 SV=1
MIAGGGDVGLLTALSLRKLAPGTTVRVVDDFQREVPQVGKSTYLDIQRVLHGALDIDEIRFVSEVKPVWKASVYFRDWCESPPFQYTFDSADSFTGPQAGDLAGRSQFYYEALAGNADYESRAGELVEQAKSPWYYGRNGDLAKYDKFAYHLTTKRFNPFLRELCRERGVRLVDDEIVAVETTGSHIDAVRGEREGYEADLYVDATGFNRVLRSEQDAAFRTFDFPLDRAFNARIERPLSEVVPATVIESGDHGWFWQIDTYDNRDLGYVYASEFADEAAAREEFREFVADVAPDGVDPSVSADEMDTYEFTSGYHDRAWVDNCIAIGNAEGFVEPLQSTALTANASLGLALGEQLGGNDRVVDDGVRSAYNERVRETWESIYDFVATHYVYASGETPFWRRASSIDVSDRLERIIDLFDERGFDPAVVENPGEDLSDLAVFQPWDFFVVMRKLGASSQVHENGSRRDDGTFRRGAERYYREMREEVEASHLTTEEFYVGVLQGR

SEQ ID NO: 90611 - protein, 463 aa, Methanotorris igneus
  REGION 1..463: note = tr|F6BC72|F6BC72_METIK Tryptophan halogenase; OS = Methanotorris igneus (strain DSM 5666 / JCM 11834 / Kol 5) OX=880724 GN=Metig_1746 PE=4 SV=1
MKIIIVGGGTSGLLSALALEKEGHDVVVLEKDEIGGLCRSEKINGYTMDIGVHAITMLNNGPLIRLLNKYARFIPNFKEYGDYYVRENNELYKIPVSMQEWMTTPLIPHKDKILITTKIMDLMTTGFTKDTSVYDVVSEMGLSDVSIKFFDTICYFLSGEDMKNTPLWRLFTGAGYIPEDDILPFIYNDLKINPMKSILVRKFSPEKIKKILSDGFLTTIKNSSKKYLNKFVNRSRYWTQGYPVGGVQSICDCILYSLNNTTIKNEEVISIEEEKNGYVVGTKEDNYYADVVIYSAPSRYLPDIAKIDEIQKLKDKLRNIKFTKSLTIWIGHDENPFSYLGSEVWINPPCWATCVTNYDKFLAPKGKHLMGFSFVNMKKEHALSAIENKLGIDVDKVDMIHVQKAIPEQASCCIGQFFVYPKIKDNFYVVGTDADPRSMGITRAAYSVEVMLSEFKCVFKNRN

SEQ ID NO: 90612 - protein, 264 aa, unidentified
  source 1..264: note = Malbranchea aurantiaca
  REGION 1..264: note = sp|L0E4F8|MALC_MALAU Short-chain dehydrogenase/reductase malC OS=Malbranchea aurantiaca; OX = 78605 GN=malC PE=1 SV=1
MAPTRRSRDLLRGKNVLIIGGTSGIGFAVAQLVIEHGAMACIAGSNPTKLGKALDALKQHPDRDPIAIVQSATCDLFDVPNLEQNLDNLLKLAAGDSKIHHIVFTAADMVQPPPLASVTIEQIQRVGTIRFTAPMLVAKLLPKYMELCPENSYTLTSGSHAKQPDPGWSLVTGYCGGVEGLMRGLAVDMMPLRVNVVSPGAVLTPVLRDILGDSLEIALDAARKKSTTGRIARPEDVAEAYLYIMKDQNITGTVLETSAGMLLR

SEQ ID NO: 90613 - protein, 2345 aa, unidentified
  source 1..2345: note = Malbranchea aurantiaca
  REGION 1..2345: note = sp|L0E2Z1|MALG_MALAU Nonribisomal peptide synthase malG OS=Malbranchea aurantiaca OX=78605 PE=1 SV=1
MSDDPLLSSPTEAICLNHSVTDLRLAAALKLSWTFLLAHYSGSSEIPLDIRLEYRYIDGSETNFEPFDATFEVDKKSLIEDSIGMIQNMLTPSTRPHSLSNGINSSQSDKHVPEAQVSFTFSSGSRPVLEKGATTRYAATVLELECLQGLKKEYLCRINFNRMMWNVEEATGILRQFRHIAQQIVSADVCATLSQINLMCESDIEQLKRWNSTVPDPVLACIHELFSEQAKKNPTATAVQTSEGSFDYGRLDELSSALACHLSSNGLTRGTPVPLLFDKSMWMVVATLAVLKAGATCVSICTGLPTKAIEDILEQTAAQLVLVSESQGLRLSETRTQVVSDKTMQIWHTMSGKPELPQSDPTDLACIIFTSGSTGKPKGIMLDHIALVTSIRNHGPSLGISSSSRALQFSSYAFDMSFYETYTTLLSGGCICIPSETERLNSLPQFICDHNVNWAFLTPSVLRDFHPSEFPSLRTLATGGEPVGADIANEWAGRLQLFNLWGPAEATICATGPILPGVWIPGTFGKAVGCIAWITQAENPDELVPIGAVGEVLIEGPVLAQGYSGDVEKTKASFIPFPKWRERFELTPRGRVLFRTGDLAQYNPDGTIRYVGRMGTVVKVGGQRVDIDAVEYALRRIDRSSHIAVEAVELEKETGQGPTLIAFLSSDMNGVSGSEKKRCCSIDPGSRSWEAWANIAIRLQDTLAGVLPRYMIPHLFIPVSTIPTTPSGKANKRQLQALVLGQSKAHLLQLCRQRSPDASYPEQHLTENETLLRLLVSDVLGIDRDHVAMNSRFFHLGGDSLAAVKLVALARQQGIQLKVEAILQSCSLREAAGTMISAGEKQKLQSKTSFAINKCDDKLGLLEEATVQCGISESDIEEIYPSTPLQEGLITVTSTFSASKPYVDKILFTLSATADLDRVRDAWNHVVAANDILRSRIILSPAGKAFNVVVRSEPSWQYYKTVQQYLENDNAQDMTFGKELITFNLIASHDQSASARSIGITIHHALYDNWTVSLLHKQAEDAYRGELVEPCSFSTFSHYVLQQSPDINKEFWRKQFLDLRAGTFPELPSSDYVPRANSSSQHLYKGQHQRRDFSMATNIQLAWALLLSLYTNSPDVVYGLVVNGRMAPMPGVGGLVGPTIATVPFRTTVERSMSVQAALEAIQKRVLSIVPFEQTGLQNIARMGEGPKTACNFQNLLVIQQDLEFKGEGIFCRRQNLVGAVNNFPGYGIILLCSATEHGWAFEILYSNSLIPETRARRILLQLDHLLRQLEVDPYRQLAQLELLCPSDKSKLTSWNTQLPIRVNACIPEVFGAQCLVRSERTAVSAWDGSLSYRELDRFSSIVARHLQAVGVGKGTITPILFEKSRWVVVAMLAVLKTGAAFVMLDTNQPLQRKQGICRAVRATTIATSASCAHESKVLANSIYVLDEASITKTDTNQFLPLVEVSPNDLAYVVFTSGSTGEPKGVLIEHASSCSASRAQAAKLGISPDSRVLQLSSYTFDSFAVEILASLLAGCCICIPSESESSNDIAGAVRRFSATWLCITPSVLGLTNPDEVPSLKTVVAVGESARPSQIRLWSTRVNFICGYGPSECSTGASAQLIRSAGSDPRIIGSGMGSCLWVAHTDDHNVLVPIGAIGELLIQGPIVGRGYMNSPEKTRAAFLESTAWIPEFRQVATERFYKTGDLVRQNEDGSIVYLGRKNREVKLRGQRLDLEEVENQLSAALEMDINIVAEVVKPKGVDSQPVLIAFFQVVADVELRSDNITFLELNPDIGLRLLDAEEKLRKILPPVMIPSVYLQVQRMPLTMSGKMNRQALRNKASTRTLSQLFSSGSVRHEDDYLTLQPHESTALFVCQAICGIMRDKIDDTKTLIAGKNVNLSRTGMDSIDAMMLARTISRHFGITLSIRAFLGSSVTVRDIARLIEGVKSEDNLSQFDLYAKYESIWEELRGVVRGLTPSDKPQLCDKTPAGMSVFLTGGTGFLGTHILRQILQDPRVELVTVLTRAESPAHALSKIVESAKIAQWWQESYRNRIDAWVGDLARPRLGLSDDHWARLCGYGEHKFTSIIHNGAAVHWGYDFEKLKPVNVMSTFWLLVSLFIAGPLVNFTYVSALLPECDGLTDREIALKTSDDGYSQTKYVSELLVKNFKEQLCNNPIAIVRPGLLIGSAEHGVANVGDYLWRVVSSAFSVGAYISEKGDAWIYIAAVDWVANQVIREALYESTTDLRIINVTDGLTVKEFWRAIQIASPRQLNALQSEDWLSLIRQQLDVTGKSHPLWPVISFLESSKGCLGFSHNLPPQAHSLSSMIITALIKNVRYLASLGLVSWTTTGSNCDHSVQQRIFRRVL

SEQ ID NO: 90614 - protein, 369 aa, unidentified
  source 1..369: note = Malbranchea aurantiaca
  REGION 1..369: note = sp|L0E2Y5|MALB_MALAU Prenyltransferase malB; OS = Malbranchea aurantiaca OX=78605 GN=malB PE=1 SV=1
MPSQSPYHALSRYFSFPNRDHQAWWTGKGPLLGNMLADAGYPEQQQYQYLTLFNLHLIPALGPSESHGAGIDGAEWKSLLSGSGKLEFSMTYRKSAVSLRIAFEPTSLLAGTKKDVFNKRRTQQLLGDLERLDIDIDTVLYHPLFDTLVVSDEEEAALQNAGTVIPDSSRTQQLLALNLIEGNVRADLYVYPYVKALATGTASSTLLWAAVKKIDRYNRFRDALSILKGYFETYPSSTTNPMFLSSDLAAPRNAFCRLFFSETNFSWERVQHLWTLGGTLSDKPTLKGLELAKILWDILGISTAPASPDSFPLLFTFELRPEQPYLRQKLGIPVSGLTESAIANACVAFFERLGWDDHAASYRTNLSAY

SEQ ID NO: 90615 - protein, 438 aa, unidentified
  source 1..438: note = Malbranchea aurantiaca
  REGION 1..438: note = sp|L0E2P7|MALE_MALAU Prenyltransferase malE; OS = Malbranchea aurantiaca OX=78605 GN=malE PE=1 SV=1
MTAGPMGNKSTSDIDSVLVYKSLSRYLKFSENEEGWWHKTAPLLNKILAAAKYDVHLQYRYLVFYYAACVSALGPYPQRFSSSITRSGLPVEFSVNYQNNSKPIVRIGYEPISHLSGTERDPYNHKTASEIVATLSKIQPDFDPRLFNYFVHQLSVNKAESDVLNGANVEGSEMKSQTAFGFDLVNGEISVKGYAFPAMKCQVSQQSLSQLLKAAINGLKGEFDCAFGLVDEYMERCGGYNQFSFVSWDCVVPAKSRFKVYGVHNDVTWKKIEDIWTLGGQATSGNVTKGLELLKELWTLIDLDEGERGYTGRFDDANDNGSNIQSPMVWNYELRPNNPWPLAKFYFPVHGENDMKIVKGLARFFENRGWTELARSYVQTVSSFFPDRDLNQTQRLVSWISFAYTEKTGVYLSVYYHSSADYLWISESGEKRGQGDGA

SEQ ID NO: 90616 - protein, 506 aa, Marinimicrobium koreense
  REGION 1..506: note = tr|A0A3N1NH11|A0A3N1NH11_9GAMM Tryptophan halogenase; OS = Marinimicrobium koreense OX=306545 GN=EDC38_2964 PE=4; SV = 1
MTESIGHVVIVGGGTAGWLSAAMIAAHHNGHRPDGLKVTLVESSDIPTVGVGEGTWPTMKNTLQKIGIDEKTFFASCHSTFKQGGKFIDWHTGNNDAYYHPFTVPIAYERLDLAPYINDLTHFAPETNFQHHICEAGLGPRSLTDPDFQGPCNYAYHLDAGEFAELLKQHATEKLGVHHLVDTVSNVSLSSDGFIDAITLEQTGKLEGDFFVDCTGFASRLLGQALGVPFKPMDSILFNDRAIAVQAPYPDERSPIPCHTLATAKAAGWIWDIGLTHRRGTGHVFSSDFISEDEAEFTLRQYLDLSESEADSRVIKFSSGHRACWWKKNCVAVGMSAGFVEPLEATAIMLVELSARFISENLPADRHTMAIMEKRFNQAMSYRWQRIIDFLKLHYMLNDRPEPYWRAHRDPASIPESLKEDLAVWATRGPQTADFDSALELFPAASYQYVLYGMGFRPDFSSQAWLYDQQRLAQQVFTRNQQLTRQLLDSLPSHRDLIDRWLGQAA

SEQ ID NO: 90617 - protein, 518 aa, unidentified
  source 1..518: note = Tahibacter aquaticus
  REGION 1..518: note = tr|A0A4R6Z4V5|A0A4R6Z4V5_9GAMM Tryptophan halogenase; OS = Tahibacter aquaticus OX=520092 GN=DFR29_103249 PE=4 SV=1
MLRSVLIAGGGTAGWLCACYLAKTLNIRTPGAVRIQLVESPDIGILGVGEGTFPSIRGALSQIGISEARFIRETQATFKQGIRFVDWARPAGSPGRNHYFHPFNLPSSRVDGLDLVPYWLLGEAGEGMAFADAVTLQAAVADAGRAPKRRQDPDYEGPMNYAYHFDAMKVAALLAAEGRALGVDHRLATICDVTLDANGGIAGVVTREIGTLQADLYVDCTGMRAALIGKALGQPLVPVSDVLFADRAVAIQVPNAGPDTPIASHTISTAHEAGWTWDIGLQERRGVGYVYSSRHTSDDRAEAVLREHIGPAAQGLNARRLPFETGYRRVQWQHNCVAIGLSAGFLEPLEATGIGLIEMGTYLLAHLLPMDACFDRAAAHFNRMMSERYTRIVDFLKLHYCLTQRRDSAFWIDNADTASVPPSLRDRLAEWRQRAPHRLDFVTDLEMFMPASWQFILYGMEFRTDLRDQRGRYPRAEEARREFAMLRAVSQHAIRDLPAHRDLVESLAGSRTAQRATA

SEQ ID NO: 90618 - protein, 525 aa, Shewanella frigidimarina
  REGION 1..525: note = tr|Q085A0|Q085A0_SHEFN Tryptophan halogenase; OS = Shewanella frigidimarina (strain NCIMB 400) OX=318167; GN = Sfri_1312 PE=1 SV=1
MMQKPITEIIIVGGGTAGWITAGLLAAEHNVDKGVLAHSPKLNITLIESPDVATIGVGEGTWPSMRSTLSKIGIDENDFIRQCDASFKQGSRFINWCKDPQSNVADSYLHPFSLPHGHQELDLCPYWLPHAEQVSFAEAVCSQQVLTQLGLAPKSIVTAQYHFQNNYGYHLNAAKFSQLLTEHCTQKLGVTHIRDHVSQIINNQHGDIEKLITKQNGEISGQLFIDCTGAKSLLLGEHLQVPFLSQKSVLFNDRALAIQVPYSDANSPIASCTHSTAQPNGWIWDIGLPTRKGVGYVYSSSHTNDIDAQKTLFNYLGVDGAAADKLEPRQLAINPGYRAKCWQNNCIAIGMAAGFIEPLEASALALIEWTASTLAQQLPPNRMVMDTISARVNERYQQHWQQIIDFLKLHYVISQRQEDRYWRDHRESNSIPDSLQAMLELWRYQTPSQQDISYKEALFPAASFQYVLYGMSFNTQLPTHVKPSMQQLAQRLFNDNQQRTQALSKNLPTNRELLDKVAQYGFPKL

SEQ ID NO: 90619 - protein, 504 aa, Cellvibrio mixtus
  REGION 1..504: note = tr|A0A266Q9G0|A0A266Q9G0_9GAMM Tryptophan halogenase; OS = Cellvibrio mixtus OX=39650 GN=CBP51_05795 PE=4 SV=1
MNKSIKKIVIAGGGTAGWMSAALLTKVLKQRVDIELVESEEIGIIGVGEATIPPIQTFNSVLGVDEAEFLRETKATIKMAIRFDNWKQQGHSYYHTFGAPGATIGFSAFQHHWLRARQQGLNTTIWDYDLNYLCCEAGVFGKFDGKDPMYQMPYAYHFDSALYGRYLRKRSEQAGVVRTEGKIRAAHLNPDTGFVQSLLMEDGREIHGDLFVDCSGMRGLLIQGALHTGYEDWNHWLPCDRALAVPSERFEKTLPYTRSIAHKAGWQWRIPLTHRNGNGLVYSSQYVSDDEATNTLLDNLDSAALADPKPIKFRTGRTLQQWNKNVIAVGLSSGFLEPLESTSIHLIQSAVVRLLKNFPNSGISQAQVDEYNRESKLEYETVRDFIILHYHANERDDSDFWRNLRTMDIPDRLAHKLALFRETGTLFNDHGDIFLDSSWLQVMLGQGIMPRDYHPSADILDAAQLQSMLARIAAAKRQPLTQLPTHDAFLQHYTGVVSAGVHRG

SEQ ID NO: 90620 - protein, 521 aa, Alteromonas sp.
  REGION 1..521: note = tr|A0A3N5Y0N1|A0A3N5Y0N1_9ALTE Tryptophan 7-halogenase OS=Alteromonas sp. U0105 OX=2259342; GN = DRW07_05665 PE=4 SV=1
MTSQIHPFRHLVIVGGGTAGWMAASLFQHAWARFGVEITVVESEKIGIIGVGEGSTPSLRHFFRTLGIAETEWMAQCHATYKCGIHFPNWSSHLSQNAYFHPFYSELDWKSGSAFIYNANLRRKGYDVEAHPDYFWLQTKLAQGKRSPVSKQASGKELDYGYHFDSAKLGAYLKCRAIKLGIRHINDTVVAVKRAKEGHVTQIQLARTGALCGDMYLDCTGFQGLLIRQALNADYVDFSSQLLNDKAIAIPSSVPLKDKVASQTTSTAMSNGWAWSIPLSNRVGNGYVYSSQHISDDSAEAELRRHIGSNVSQGEARLINMQLGRVEQHWYHNVLAVGLSQGFIEPLEATAISCIQYTIERFIDIVDEARTSGKEIASTHLQDKYNADINRIFDAVKDYITAHYRLNTRTDSQYWIDNRENQDHSSTLQALLSGWDDPDTHFEKLVHDLDAQTMYLAPSWYCLFAGKGRFPRTLRSVPLDTNYANAIDASKYCQHQSTFFNDHKKQLLKTYGQHYPEPVTF

SEQ ID NO: 90621 - protein, 515 aa, Streptomyces sp.
  REGION 1..515: note = tr|A0A552QUZ0|A0A552QUZ0_9ACTN Tryptophan 7-halogenase OS=Streptomyces sp. 130 OX=2591006; GN = FKN01_28370 PE=4 SV=1
MLSKVVIVGGGTSGWMTAAYLRTALGDSIDVTVVESKRIKTIGVGEATFSTVRHFFEYLGLSENEWMPKCNATYKLGIRFENWRAKGHYFYHPFERLRVVDGFPLTDWWLQQKPSDRFDQDVFLMSAICDAQRSPRYLDGKLFEQDFVERTEGSPERSTLSEQDTQFPYAYQFDASLLADFLTEFSTERGARHIEDDVLDVVRDERGWISHLRTREHGDVHGDLFIDCTGFRGLLLNQALDEPFISYQDTLPNDRAVALRVPADMEARGLRPCTTATAQDAGWIWTIPLFGRIGTGYVYSGDYTTPEEAERTLREFVGPGAEDAEANHIRMRIGRSRNSWVNNCVAIGLSSGFVEPLESTGIFFIQHGIEELVKHFPDATWDPRLRDTYNRAVADVKDGVREFLVLHYRCAARNDNAYWRDAKTRELPDGLAARLEEWQAKLPTENTIYPRYHGFESYSYLSMLLGLGGVDLKPSGAVALMDGARAAKEMQLIKDQARDLVRRLPSQYEYLAQMH

SEQ ID NO: 90622 - protein, 509 aa, Caulobacter sp.; identical to SEQ ID NO: 84038
  REGION 1..509: note = tr|A0A0Q6V9C6|A0A0Q6V9C6_9CAUL Tryptophan halogenase; OS = Caulobacter sp. Root343 OX=1736520 GN=ASC70_03605 PE=4; SV = 1

SEQ ID NO: 90623 - protein, 491 aa, unidentified
  source 1..491: note = Erythrobacter luteus
  REGION 1..491: note = tr|A0A0G9MZH6|A0A0G9MZH6_9SPHN Tryptophan halogenase; OS = Erythrobacter luteus OX=1581420 GN=AAW00_10890 PE=4 SV=1
MAAAALSRLISPRREFAITLVESEAIGTVGVGEATIPPFVDFQRLLEIDEAEMMAAVQGTFKLGIQFVNWGKLGDSYIHPFGNYGYEIGGVSFHHVWHRFKGLGDNRPIQVFNAETMAAYFGKFAKTDGQQREDLPPVNYAYHINATAYAGFLRRYAEARGVVRQEGRVEHVELNGQSGFVDSIRLEGGREIAGELFVDCSGFRGLLIEQALETGYEDWTHWLPCNRAVALPCNRDDGSPPAPFTRATAHAAGWQWQVPLQHRNGNGHVYCDAFMSADEATDILLKNIAGKPTADPNHLRFVTGRRRKFWNRNVVALGLAGGFMEPLESTSIHLINTGINKLISLLSLDGVTQAQEDAFNRLTGKEYARIRDFLILHYNTTTRDDTEFWNYCRTMSVPDSLTEKVELFRQNGQIFREEDELFTETSWAAVMMGQGIQMHGHNVMADTLDPAETKRELDEMEKSIRYAVGVMPGHADFLRQYCPAPPPAPAA

SEQ ID NO: 90624 - protein, 498 aa, Pseudoalteromonas sp.
  REGION 1..498: note = tr|A0A4S1FAY6|A0A4S1FAY6_9GAMM Tryptophan 7-halogenase OS=Pseudoalteromonas sp. MEBiC 03607; OX = 2563601 GN=E5N72_11955 PE=4 SV=1
MESKKITKVVIAGGGTAGWITAALLNKVLGKVLDITLIESAEIGTVGVGEASIPPILHLNGALGITEKEFIKATGATIKLGIEFENWRSQGHSYMHAFGEIGKDFPFCEFYHFWLKANQANNAPDFWDFSLNYQAAKAHKFAHLKQIPNTQLAGLHYAYHFDATRYGEFLKELAQSRGVKRIEGKIESVNQCHQSGHITSLLLKNGEQIDGDLFIDCTGLRALLIEQTLNAGFEDWSHWLPCDSAVAVQSESANDAIPYTRSIARDSGWQWQIPLQHRLGNGLVYSSRFLSDEAAKQQLLDNLPAKPLTEPRVIKFKTGRRLKQWHKNVVSVGLSSGFLEPLESTSIHLIQSAAIRLIKFFPHQGIKQSLVDEFNQQSKTEFERIRDFIILHYNITERDDSAFWRFCKGMDIPSSLKKKIELFKTSGKLVREDDELFAEVAWQQVMIGQGLIAEDHHPLTDALSDEQLNELFSNLKTLINSTVEQLPSHSQFLEKVQN

SEQ ID NO: 90625 - protein, 507 aa, Erythrobacter sp.
  REGION 1..507: note = tr|A0A2Z4K4Z4|A0A2Z4K4Z4_9SPHN Tryptophan halogenase; OS = Erythrobacter sp. KY5 OX=2011159 GN=CD351_14245 PE=4; SV = 1
MAEDAYAPLKSIVIVGGGSAGWMTAAALSDALGKSCSITLIESEAIGTVGVGEATIPPIRQFNARIGIDEATFVKETAGSFKLGIQFVDWSRLGHSYFHPFGQYGAEFDKVPFYHYWMREALNGRVEGPIDDFSMCWAMAKAGKFARPEADRRKIQSTFDYAYHFDAGLYAAFLRRVSEARGVKRIEGRVTDVIQRGEDGFIESVTLDNGTSVSGELFVDCSGFRGLLIEDTLEAGYENWQHWLPCDRAVAVPCAKQSDITPYTRSTAKAAGWQWRIPLQHRTGNGYVHCSEFISEDEATETLMGSLDREAQADPRTLRFVTGRRKKFWDKNCVAIGLSAGFMEPLESTSLHLIQYGILRLIALLPDSEMSPLLAREYNRQTADEYARIRDFLILHYKATTRDDAELWRYCSAMEIPDTLQYKIDHFRNYGLLVADERELFANPSWIAVYMGQDIMPRRAPAITEMRDNVPVPQRMQMISQAMREAVAQMPTHADFLARHCPSPLAS

SEQ ID NO: 90626 - protein, 499 aa, Caulobacter sp.; identical to SEQ ID NO: 84105
  REGION 1..499: note = tr|A0A0Q6UQN6|A0A0Q6UQN6_9CAUL Tryptophan halogenase; OS = Caulobacter sp. Root343 OX=1736520 GN=ASC70_08310 PE=4; SV = 1

SEQ ID NO: 90627 - protein, 495 aa, Pseudoalteromonas sp.
  REGION 1..495: note = tr|A0A4S1EZV4|A0A4S1EZV4_9GAMM Tryptophan 7-halogenase OS=Pseudoalteromonas sp. MEBiC 03607; OX = 2563601 GN=E5N72_19845 PE=4 SV=1
MRQQSIKQVIVAGGGTAGWMTAAALAKLLNKDIKVSLVESDDIGTVGVGEATIPPIRTFHKLLGIDEKLFMKATQATFKLGISFENWHKPQSDYIHSFGMTGKECWAGEFHHFWLHAKKMGNKDDFGDYCYELQAAKQGKFGISPHNPINYAFHMDASRYAAFLREFAENLGVKRFEGKIERVNKHADNGFIKSLLLDDGTEITGDFFIDCTGFKGLLIEQALHTGYEDWSHLLPCDSAVAVQTKGTPEIAPYTRSIAHQSGWQWQIPLQNRVGNGLVYCSRYLSDHDATQLLLNNLSSETLTEPKIIKFKTGRRRKGWNKNCLALGLASGFLEPLESTSIHLIMTGIIRFMRLFPFTGITQHAIDEYNKQLQSELESIRDFIVLHYKVTDRDDSEFWQHCKTMETPKSLAHKVALFKETGRVFLDDGDIFRVDSWVQVMLGQGIMPDQYHHVASLMNDQELSRFMQGIKQQIAQRLQQLPTHRAFIEQYCPVDT

SEQ ID NO: 90628 - protein, 501 aa, Cellvibrio mixtus
  REGION 1..501: note = tr|A0A266QCQ6|A0A266QCQ6_9GAMM Tryptophan halogenase; OS = Cellvibrio mixtus OX=39650 GN=CBP51_12060 PE=4 SV=1
MKKIVIVGGGTAGWMSALIMAREWSRQGVSICLVESPEVGIIGVGEGSTPALKLFFDRLNIAEQEWMPACNATYKCGIRFDGWSTHAGFESYFHPFSAALDRQTLPMFMHNAQARLRGANVYAQPDRFFIASRLAQQCLAPVAPEHFPFDVHYGYHFDSTLLGQFLRKKALALGVVHELGHVVAVKQHEHGDIASVQLAGDKHIAADFFVDCTGFSSLLLQKTLAVPFISYANNLLNDAAVALPSAIDEKIPSQTLATAMSCGWAWKIPLTNRYGNGYVYSSAFCSADQAEYELRAHLGLLDADVPVRHLRMKIGRVEQHLAGNCLAVGLSQGFIEPLEATALFLVQQTVAVFAEYFTRGEFTHRLRDEFNQRINNHFDGVRDYIVTHYKTSSRRDTEYWRANTANQQDVSPVMLALYRSWFEGKDLAAEINRLQIGSYYPAPSWYSIFTGMGIVPKGEQLRTATAEEACIDINAVDEFLRRCALNFSDHRAQLARWQSSE

SEQ ID NO: 90629 - protein, 500 aa, Novosphingobium sp.
  REGION 1..500: note = tr|A0A3B7DLD3|A0A3B7DLD3_9SPHN Tryptophan halogenase; OS = Novosphingobium sp. THN1 OX=1016987 GN=C7W88_12285 PE=4; SV = 1
MSNPDLMIRSVAVIGGGTAGWMTAAALAQALRHNCSITLVESEEIGTVGVGEATIPPIRTFNETLQIDEREFVRKTKGSFKLGIEFVDWGSLGNSYFHPFGPHGRAFDIVNLHHYWLRAREAGEAAPLDEHSMAWALAKENRFAPPMPDQRNVLSTFDYAYHFDAGLYAKFLREYSEAKGVTRIEGKVASVQQNAETGFVTGVTLDDGRKIEAELFVDCSGFRGLLIEGALNAGYEEWTHWLPCDRAMAVPCENAYPLTPYTRSTAREAGWQWRIPLQHRTGNGYVFCSQFLSEDEAAEKLLSRLDGKALADPRPLRFVTGRRKSFWEKNVIAVGLSSGFMEPLESTSIHLIQAGISKLLALFPDRTFDPMVIEEYNRIAINEYERIRDFLILHYKLTTRDDSELWRYCAAMAIPDTLNTKVEHFRRYGRLVQRDADLFGAPSWLAVHIGQGNIPERTDPLADYRGIDGREWLGKLRAAMHHAALQQPTHEQFIKANCAA

SEQ ID NO: 90630 - protein, 510 aa, Marinimicrobium koreense
  REGION 1..510: note = tr|A0A3N1NVA1|A0A3N1NVA1_9GAMM Tryptophan halogenase; OS = Marinimicrobium koreense OX=306545 GN=EDC38_2636 PE=4; SV = 1
MTVGPQRIVIVGGGTAGWMSAAALARLLPSRVSLQLIESEQIGTVGVGEATIPHIRYFNALLGIDEREFIHATQATYKLAIEFVGWGRETSRYLHPFSAFGGDIDGIDFHHYWLRTRDEWPELNLDAFSLAAQAARLGRFAPPPEHSEFGYGYAFHLDASRYAGYLRAYAEQRGVTRTEGRIQSVIPRESDGGVAALTLESGERIEGDLFIDCSGFRSLLLGQTLGVPFNSWKHWLPCDRAVAIASGALSEPPSFTRSTATTTGWQWRIPLQERTGNGQVYDSRSISDDEACAQLIGSLNGAPQSDPNLIRFEAGARARSWDKNVIAIGLSSGFLEPLESTSIYLIQMAVFKLVEFFHNSKSGAVGREAFNRWMSLEYERVRDFIILHYHLNQREDSEFWQDCAHMSVPEGLQRKIALFKESATIEFYDQGLFAPPSWLAVYLGQGLNPEAIDPRVAQQPVASLKGPLEQLANHLNRTAQALPLHREVLARGGVAPSAAAPMSLYGGRYG

SEQ ID NO: 90631 - protein, 505 aa, unidentified
  source 1..505: note = Erythrobacter luteus
  REGION 1..505: note = tr|A0A0G9MZ07|A0A0G9MZ07_9SPHN Tryptophan halogenase; OS = Erythrobacter luteus OX=1581420 GN=AAW00_00085 PE=4 SV=1
MTTASAPYDFVIAGGGTAGWMCAAALARFTPPGSRIALVESEAIGTVGVGEATIPQIHLFNGALGLDEAEFLRETKGSFKLGISFDGWLREGESYMHAFGNVGRALGTLPFQHYWLRAKRLGLAKPLQRYSLNELAARTMRMQRGRTQAGQEMPYAYHFDAGLYANYLRRYAEARGVERVEGVIEHVALDGESGAIAALRLDGNRELPGRFFFDCTGFRALLIGEALGTGFDDWSHVLPCDRAMAVPCAGGGDFTPFTRSIARQAGWQWRIPLQHRIGNGLVYSSAHLSDDEASATLLANLDGEPQGDLRPIRFTTGKRRVHWQANCLALGLAAGFMEPLESTSIHLVQSAISRFLAVMPAEGEASPAARDWFNGQAAFEWERIRDFLILHYTANRREGEPFWDHVRHMALPETLVAKLALWREAGFIHREHEELFTEVGWFQVLAGQGVEAEGYNPLADALPEADLAAMLAQTEAALVEQVKPMPRHLDFLADYVGAQSAKEPA

SEQ ID NO: 90632 - protein, 515 aa, Cellvibrio mixtus
  REGION 1..515: note = tr|A0A266Q277|A0A266Q277_9GAMM Tryptophan halogenase; OS = Cellvibrio mixtus OX=39650 GN=CBP51_19270 PE=4 SV=1
MHTHEFAPDHSSEDNSITDILIVGGGTAGWMAAAALSHVYKSKPCRIRLVESDHIGTVGVGEATIPVIQKFNQMLGIDEHDFIKHTQGTFKLGIEFVNWGSLDNAYIHPFGSYGMSMGYLSFYHYWLRLADAGHTQNPGEFSIAIQAALRGRFMPPANIPNSPLSQIAYAYHFDASLYAKYLRHFAQERGVVRIEGEIAQVLLRSTDGFVDKLLLKNGESLSAQLFIDCTGFRGLLIEQAMNTGYDDWSHWLPCDTAVAVPSHNISEPRPYTRSTAHSAGWQWSIPLQHRTGNGHVFCSKYMDDEQAKKILLENIDGDALAEPRFIRFKTGMRRKFWNKNCVAIGLASGFLEPLESTSIHLIQSSISKLIALLPTADFEQSTIDKYNELLTAEFMFVRDFIILHYKVSQRTDSDFWNYCRHMPVPESLQKKLDLYESSGRLFRDNNELFDEVSWFAVMQGQGLRPRHYHPLANQVEANEFHRIMQEIKAVVQRAADAMPTHAEYIAAHCAASKNH

SEQ ID NO: 90633 - protein, 512 aa, Pseudoalteromonas sp.
  REGION 1..512: note = tr|A0A4S1F1M7|A0A4S1F1M7_9GAMM Tryptophan 7-halogenase OS=Pseudoalteromonas sp. MEBiC 03607; OX = 2563601 GN=E5N72_19850 PE=4 SV=1
MSKIINNIVIIGGGAAGWLTAGLLAKEHPHLHITLIESADIGISGVGEGTWPSMRNTLQRIGVKETDFLRQCDASFKQGSKFINWRGEQQGDNYYHPFMIPEGYYEYDVHAAWKQLFSHQKYADAMNMQSFICQAALAPKQINTPQYAGVTNYGYHLDAHKFARFLTQHCVNTLNVKHIVDNVICANNDEQGYIKSVSTQHNGAITGDLFIDCSGSQGLLIAKHYQIPFLDQSHILFNNTAVAAQIPYESQSQNIASATLSTAQSAGWIWDIGLPTRRGIGYTFSDKYCDEASAIETLKSYAAQTIGTQQADTIETRTLRFTPGYREIFWHKNCVAIGMSQGFIEPLEASALAMVELSISMLSEQMPVDQDHMQLLSTRFNKRFKYRWEQVINFLKLHYVLSNRDDNGYWHANRNPNSIPLELQNLLTLWQYQAPSRFDLVENEEIFSSASYQYVLYGMGFETSLTTKLDGQKCHKAEQLYQLNRNKIAQYLQKLPTNRLLLEQLQGSKVAT

SEQ ID NO: 90634 - protein, 324 aa, Bradyrhizobium japonicum; identical to SEQ ID NO: 87666
  REGION 1..324: note = tr|A0A1Y2JP45|A0A1Y2JP45_BRAJP Tryptophan halogenase; OS = Bradyrhizobium japonicum OX=375 GN=BSZ19_20970 PE=4 SV=1

SEQ ID NO: 90635 - protein, 347 aa, unidentified
  source 1..347: note = Betaproteobacteria bacterium
  REGION 1..347: note = tr|A0A2N2SUP7|A0A2N2SUP7_9PROT Tryptophan halogenase (Fragment) OS=Betaproteobacteria bacterium HGW-Betaproteobacteria-17 OX=2013708 GN=CVU23_14550 PE=4; SV = 1
WMSAAALSKLLPPSCRIRLIESEEIGIVGVGEATIPNIKHFNAALEIDEDEFLKATQGTFKLGIEFVNWGRLGDRYIHGFGKVGPDTSLVGFHHYWLRLKQLGKASGLDAYSINTVAPRQARFLRYRKDMPGSPLGDIVHAFHFDASLYARWLRGLAEKRGVMRTEGKVKQVLRRAEDGFIEALVMESGERIDGEFFIDCSGIRALLIGDALGVGYDDWSHWLPCDRALAVPSAPVKPLLSMTRSTAHSAGWQWRIPLQHRVGNGHVYSSRFMSDDEAASILLANLDGEKLADPRLIRFRTGMRRKLWERNCVAVGLSSGFLEPLESTSIHLIQTAVSRIATFFPHR

SEQ ID NO: 90636 - protein, 510 aa, Alteromonas sp.
  REGION 1..510: note = tr|A0A3N5YNB4|A0A3N5YNB4_9ALTE Tryptophan 7-halogenase OS=Alteromonas sp. U0105 OX=2259342; GN = DRW07_05660 PE=4 SV=1
MTSIVRVAIVGAGTAGWLAANHLGRTLCNRPEVQVDVIESPDVPPIGVGEGTVPNIRNTLRQFGISETEFIRRCDVTFKQSIKFVNWLDRSKHGEGNYYHHLFDRPNSHGVDATPFWLNGHYAGAYADAVGHQNQVCEAMLAPKTITTPEYEGVTGYAYHLNAAKFAALLAENAQQKYGVGHVLANVDDVVLADNGSIESLQTAQKGVLTYDFYVDCSGFNALLLGEAMNVPFVDKSDTLLIDKALAVQVPTDKDAVIPPYTVATAHQAGWIWDIALTERRGVGFVYASKYMSDEEAREKLSRYLGRSLMDLNVRHIPMKIGYRQSFWHKNCVALGLAMGFVEPLEATSILLSDFAANFLAERFPSDTSQLANLSERFNKTVGYAWDRTIDFIKLHYYLSDRADSAFWTDNRKEETVPESLKQRLALWTDYQPCAEDFFSKFEVFDLDNYLYVLYGMHYPTAPPLLSDEENHKVKQALSKQKAYAKHLVEQLPAHRALIEKIKQYGLQNV

SEQ ID NO: 90637 - protein, 515 aa, Novosphingobium sp.
  REGION 1..515: note = tr|A0A3B7DPK7|A0A3B7DPK7_9SPHN Tryptophan halogenase; OS = Novosphingobium sp. THN1 OX=1016987 GN=C7W88_00430 PE=4; SV = 1
MIGSVKQVVIVGGGTAGWLSACLLAARRPELAITLVEAPDIPTIGVGEGTWPTMRETLATIGIHEAEFLSQCDASFKQGSRFDGWVDGSAQDSYLHPFTPPPPGDMAAMLQAWRAQSPDLPFATLMTPQAAACDENLAPRQRAMPDYAGALNYGYHLDAGKFAALLKRHATTRLGVTHISAQVTAVADDEAGNIASLSLHDGRTIAGDFFIDCSGLAAILIGDHCGVPWVDRSDVSFNDSALALQVPVEPGSAIASQTIGTAHEAGWIWDIALPTRRGIGCVFSSRFMDDARAEDVLRSYVAAKMPGTDLSALRPRKLTFSTGHRQRFWQGNCLAVGLSAGFIEPLEASAIVTIELSIKALAENFPRRAATMGLLADRFNELFRYRWDRIVEFLKLHYVLSRRPEPYWLAQRDPATIPPRLAEVLELWRDQPPSAWDFPRMDELFCAASQQYVLYGMGFPVPTGAHNAAASQTLAEVRQRSRALAAALPSNRTYLDALRPAAAADSIVMHGAAVK

SEQ ID NO: 90638 - protein, 504 aa, Marinimicrobium koreense
  REGION 1..504: note = tr|A0A3N1NT98|A0A3N1NT98_9GAMM Tryptophan halogenase; OS = Marinimicrobium koreense OX=306545 GN=EDC38_2634 PE=4; SV = 1
MDNRVRKVMIVGGGTAGWMAAAAMAKVLKNQYCDIQLVESDSIGTVGVGEATIPQIQLFNQMLGLDENEFIRRTQGTFKLGIQFVNWGHIGERYLHAFGEVGKDMEGVQFYHYWLKLFQAGEAPNIDAYTLNCQAVEQGRFMRPVDAGNSPLSRIAYAFHFDAARYAMFLRDYAMERGVRRREGKIERVSLRPDDGFIESITLDDGETLEADLFIDCSGFRGLLIEQALKTGYEKWSRWLPCDRAVAVPCAKVAEPVPYTRSTAHSAGWQWRIPLQHRTGNGHVYCSQFISDDEAADTLLKNLDGEPLADPKFIRFTTGKRLKFWNKNCVALGLASGFMEPLESTSIHLVQSGIAKLMSLFPNRNFDQEDIDEYNRQVDFEYTRIRDFLIAHYHVTQRDDSEFWNYCRTMDVPDTLKQKMNHYRKNGRIFRTNEELFNETSWLEVMHGQGLKAEGYHPIVDTLSKDEIARRLESIRNVINKSVEYMPMHSEFIAKHCAAPANTE

SEQ ID NO: 90639 - protein, 507 aa, Shewanella frigidimarina
  REGION 1..507: note = tr|Q083C9|Q083C9_SHEFN Tryptophan halogenase; OS = Shewanella frigidimarina (strain NCIMB 400) OX=318167; GN = Sfri_1786 PE=4 SV=1
MDQTRIKNIVIVGGGTSGWMTAAMLAKLFKKQLNITLIESDTIGTIGVGEATIPPLQIFNSVLGISEKDFIKATQATYKLGIEFENWHKNGDAYMHAFGNIGRDLGFTSFHHYWLSAQANCGQQDHSTFSAKGFWQYSLNYQAAKHNKFQPIQTIAQAQMSGITHAYHFDASLYANLLRQYSIQRGVVRVEGTITSTKLSNDGSIDSVTLLNGDCINGDLFIDCSGFSALLIEKALGVEYENWQHWLPCDSAYAVPCESTSPVIPYTKATAHDAGWQWRIPLQHRTGNGIVYSSQHMSDEQAKQHLLANLDGKPLAEPRKINFTTGRRVKQWHKNCVAIGLSSGFLEPLESTSLHLVQSAIIRLTKLFPRNGIQSHQIDEFNRQSQTEFEQIRDFIILHYHLNAKQSADGEHGLWQQCRDMDIPESLQRKIDLFKSTATVFRHQDELFTEAAWIQVMLGQGIIPSDYHPLTQAVSQVDLTDYLSNIRKVIATTVNQMPTHEAYIKKC

SEQ ID NO: 90640 - protein, 519 aa, Cellvibrio mixtus
  REGION 1..519: note = tr|A0A266Q275|A0A266Q275_9GAMM Tryptophan halogenase; OS = Cellvibrio mixtus OX=39650 GN=CBP51_19255 PE=4 SV=1
MTSHTLRNVVIVGGGTAGWMTAAALAKFLPPQQYHIQLVESDAIGTVGVGEATVPHIRFFNQVLGIDENDFMQKTNATYKLGIEFSHWGKRGDRYIHPFGIYGQARNDISFHHYWLKLQQSGDPHPIGDYSVGVVAAYAEKFAYPHRDAHSLFSKYSYAFHLDASLYASFLRDYSTTRGVTRVEGKIIRVEQHPDSGFIRAVELDSGAQLAGDLFIDCSGFRGLLISDTLKTDFEEWSHWLPCDRAIAVPSSKTSEPLPYTKAIACTAGWQWRIPLQNRTGNGQVYSSHHISDDEVAHNLLHNLDGEPLANLHYLRFKAGRRVQSWNKNCVAIGLSSGFLEPLESTSIYLIQIAIMTLVECFPDAAMEETNRHEFNRTMANEYERIRDFLILHYHATQRDDSAFWNDCRTMNIPESLHYKIQLFREQGHVERYKQGMFLEPSWVAVYMGQGIIPTTYHPAVNALDIQHLRDYFHSLRNTIATGVNAMPSHTNSIQRYCNNPHSETTWPPAAMSLYGVFS

SEQ ID NO: 90641 - protein, 509 aa, Sphingopyxis sp.
  REGION 1..509: note = tr|A0A0W1DX42|A0A0W1DX42_9SPHN Tryptophan halogenase; OS = Sphingopyxis sp. H050 OX=1759072 GN=ATE67_01315 PE=4; SV = 1
MAQKVERVVIVGGGTAGWLAASLLAVSRRAKAAPLSVTLVEAPDVPIVGVGEGTWPTMRATLAAIGLDEGDFLSACDGAFKQASRFDGWVDGSADDSYLHPFTTPPAVPTGELLAAWQVAAPDQPYATAMSAQAAVCSEHLAPRQRAMPGYQGAANYAYHFDAGKFAALLATHATRELGVTHALAHVTGVERAANGDISALTVRDGAAITGDLFIDCTGFAGLLIGRALDIEWIDRGGQLFNDRAIASQVPVPPGSPIASQTIATAHEAGWIWDIGLPSRRGIGCVYSSRFMEPDAAEAVLRAHIARELPDAPEVPFRHIDFRTGHRARFWEKNCIAVGLSAGFIEPLEASAIVLIELSLRALTDNFPADRTAMDIHAARFNTLFRYRWDRIVEFLKLHYVLSRRDEPYWRAHREPSHIPPHLAEMLELWRSQPPSTWDFPYVDEIFSAESHQYILYGMGFPAPAGWSTSDRAMTALAEIRQRARMLTAGLPTNRSYLDALAAERIAAE

SEQ ID NO: 90642 - protein, 509 aa, Stenotrophomonas maltophilia
  REGION 1..509: note = tr|T5L763|T5L763_STEMA Tryptophan halogenase; OS = Stenotrophomonas maltophilia MF89 OX=1333853; GN = L681_05535 PE=4 SV=1
MDTESTPAGRIRKVVIAGGGTAGWLAGCALAHQFRDQLQITLVESEQIGTVGVGESTVPPIRTFHRFLQIDEQEFLREVAGTFKLSISFENWRLPGDRFFHPFGTIGHGTWAAPFHHFWLDSLRRGMPSDLGDFCLESIASRGDRFSLRTQPQASYAYHFDASLYARFLRGRAEANGLRRIEGRIAQVRQHAHDGSVQALVLDDGQVIEGDLFIDCTGFRGLLIEQALGTGYEDWHEWLPCDRAVAVQTEAVAPPVPYTRAIAHEAGWRWHIALQHRVGCGLVYDSRHLSDDEAAAKLLRDAGAPPLRDPWNVPFRSGRRLKAWNSNVVSLGLASGFIEPLESTSIHLTISAVVRLIQLFPFDGISASLVQLYNDVSRQEMEHVRDFIILHYHATQRTEPMWKACREMSVPGSLQQRLQAWRERAHAWQDPGELFRIESWTSVLLGQGIPPGPPHPLARAVSDADLRTLLKGIQQPVHHAAARMPTQAEFIAQYCRSGVDVWRSTAANA

SEQ ID NO: 90643 - protein, 503 aa, Alteromonas sp.
  REGION 1..503: note = tr|A0A3N5YEA9|A0A3N5YEA9_9ALTE Tryptophan 7-halogenase OS=Alteromonas sp. U0105 OX=2259342; GN = DRW07_00960 PE=4 SV=1
MQHALRSICIVGGGTAGWMAATLLSNLLQRANIQITLIESPDIDTVGVGESTVPSIMDFLRACQIDLKEFVQSTSASFKLGIRFDDWLREDHQYFHPFGRVGHHINGFDFYQAWLQTKQAGVQTTWTEHSPCAQMAELGRFILRPRQPKSWTEDSIAHAIHLDALQAARYLRTQATEKGVIRSENTVTQVHQNAEGFIESLSLSDGSKLQSDFFIDCTGFNGLLINQALQVGYQDWSKYLPCNRAVVVQTENIATPQPFTVAKAQAAGWTWKIPLQHRTGNGYVFSSDYCSDDEAVQTLLSGLEGKPLNTPRFIPFTTGKRDKIWHKNCLALGLAAGFIEPLESTAIHIIYKTLIHFITHFPDRDFEHYNEAQFNRKVDADFEEIRDFIVMHYCTSERNDSEFWRRCTQSPLPASLQEKLSLFKQRGQLPPGVDELFTHESWYSVLEGMQYRPKKVHPLMATFNQQKLSDMMHANVKGIKEEVATMPSLHDFIQQHCPAKSAL

SEQ ID NO: 90644 - protein, 506 aa, unidentified
  source 1..506: note = Xanthomonas floridensis
  REGION 1..506: note = tr|A0A1A9MIC4|A0A1A9MIC4_9XANT Tryptophan halogenase; OS = Xanthomonas floridensis OX=1843580 GN=A7D17_00725 PE=4; SV = 1
MTQAQIRKVVIAGGGTAGWIAACALSHQFRDLLDITLVESEQIGTVGVGESTVPPIRTFHRFLQIDEQEFLREVAGTFKLSISFEHWLRQGDRYIHPFGITGQSTLVCAFHHLWLESQRRGMGGSFGDYCLETVASRVDRFALPREPAVNYAYHLDAALYARFLRTRSEACGVTRIEGRIQQVTVHPDSGDVASLVLEDGQVIAGDLFIDCSGFRGLLIEQTLHTGYEDWSHWLPCDRAVAVQTEALGPPVPYTRAIAHEAGWRWHIPLQHRVGNGLVFSSRHLSDDEAHAKLLRDVAAPAVKDPWMVPFRTGRRLKAWNKNVVSLGLASGFIEPLESTSIHLTISAVVRLLTLFPAQGIAPSQVQLFNDVSRAEMEHVRDFVTLHYHATQRKEPLWRQCREMELPESLAVRLRAWRERAHAWQAADELFRVDSWTHVLMGQGLMPEQHHPLTRAFSDQDLQRLLDGIAQPIQHAVEQFPSQQAFIERYCKARPEVWGARTPVMAR

SEQ ID NO: 90645 - protein, 511 aa, Alteromonas sp.
  REGION 1..511: note = tr|A0A3N5Y4Q6|A0A3N5Y4Q6_9ALTE Tryptophan 7-halogenase OS=Alteromonas sp. U0105 OX=2259342; GN = DRW07_01710 PE=4 SV=1
MTDEQVREIVIVGGGTAGWMTAAALAKSFYKKGRRIRLVESDEIGTVGVGEATIPAIRTFNEVLGIDENAFVRATKGTFKLGIEFVNWGNIGEKYIHPFGVYGSPMADNIPFHHYWLKLRDAGYDRPLSSFSLAIAAAKRGRFSRPQNIPNSPLAQMAYAFQFDAGLYAKFLREFAEKREVQRIEGKVDSVALSQTDGSIESVTLASGQVIHGDLFIDCTGFRGLLIEEALQTGYEDWSHWLPCDRAVAVPCESNGPPIPYTRATAHTAGWQWRIPLQHRTGNGHVYCSKYMTDNEATNILLKNLDGKPIADPKPLRFKTGRRKAFWHKNCVAIGLSSGFLEPLESTSIHLIQTGITKLLSLFPDKRFSQSLVERYNKITAWEYERVRDFLILHYKVNQRTDSDFWIQCRNMPIPDELQNKLDLYITGGHIFRDNEELFGIPSWLAVMEGQNAHATGHHPLAESREAERLHQHLTKMQQVIAHCAESLPTHADFISRHCASESWPRNKMGE

SEQ ID NO: 90646 - protein, 494 aa, Marinimicrobium koreense
  REGION 1..494: note = tr|A0A3N1P260|A0A3N1P260_9GAMM Tryptophan halogenase; OS = Marinimicrobium koreense OX=306545 GN=EDC38_2314 PE=4; SV = 1
MQNTSVRRVVIAGGGTAGWVAAAALSHQLGKLIDVVLVESDQIGTVGVGEATIPPMKAFHKLLGIDEQEFMCATEAVFKLGIEFKNWGQVGEQYFHPFGATGQSSYLADFQNFWLYGKSKGIHAGFEEYSLAAQAAKANKFAISKKGSLNYAYHLDATRYAQFLRQFSEKLGAKRVEGKIQHVQQHMNGDIKALQLESGEVVEGDLFIDCTGFTGLLIDKTMKVPYEDWTHWLPCDSAIAVQTESVESPRPYVTCTAHKAGWQWHIPLQHRVGNGNVFCSKFMSGDEATQHLLDNVQGEVRTEPRVIKYKTGRRKVFWTKNCVALGLSSGFVEPLESTSIYMFMIGVIRLMRMFPFNGITQPIIDEYNQQNIAELENVRDFIILHYHATSREDSEFWRYCKHMDIPQSLSHRIELFKENALVFLGENELFRLSSWLHVMLGQGIMPKRYHSIFSTMSDEELVGHLSNTRKTISDAVNKIPTHQEFINHYCKSRC

SEQ ID NO: 90647 - protein, 496 aa, Marinimicrobium koreense
  REGION 1..496: note = tr|A0A3N1NRU6|A0A3N1NRU6_9GAMM Tryptophan halogenase; OS = Marinimicrobium koreense OX=306545 GN=EDC38_2198 PE=4; SV = 1
MNHSIKNVLIVGGGSSGWMAAAVLARFFSKQIQIQLVESSEIGTVGVGEATIPPIRTFNDVLGIKEADFLKQTMGTIKLGIQFENWSQPGDSYMHAFGEIGRNLGIAGFHHYWLKARQAGVAEDFWRYSLNEQAARHNRFAPMETIPGTQFPGLTHAYHLDAGLYAQMLRAYSEKLGVKRIDGKIQTVDKDSESGDIAAVQLESGERLEADLFIDCSGFRALLIGEALDVDFEDWSHWLPCDRALAVPSEAAETITPYTRAIAHEGGWQWRIPLQHRTGNGLVYSHRHLSDDEATHTLLSNLDTPALADPRPIRFKTGRRVQQWCQNVVSLGLSSGFLEPLESTSLHLVQQGLTRLIKLFPRNGIQPSDIEEYNRQSQIEFEKIRDFIILHYHLNSKTDSPFWRMCREAPKPESLLRRIDLFAGSGRVFREQDELFSETAWEQVMIGQGITPQDYHPLVDNLEDHQLREFMNSWQRIVDKTVAQMPSHNDFIASLK

SEQ ID NO: 90648 - protein, 480 aa, Marinimicrobium koreense
  REGION 1..480: note = tr|A0A3N1NR99|A0A3N1NR99_9GAMM Tryptophan halogenase; OS = Marinimicrobium koreense OX=306545 GN=EDC38_2635 PE=4; SV = 1
MDKANLEHLVVVGNGLVAAGTVVTLARFLSRYGARVTWIRTGEDDVSPVEVAQPPFLEWLAMVGLPERDLMVRAQGLFSLGVLGQGTKGEFFMPYGRHGIPAAPASFEHEFFRACAPDKQARFNEHFLATQAARRGRFDFPVNDPRSVKSTLRYGMNLDKGAMRTLLAEYADSLGVSAVRCTRLSVEADPQFGIQRLRLDDDESVQGDFYLDATGDEALLIGQGLGVPLEEASALWSYHWVGRGGTTLDWMPYSTLTQQVWGWQRAVDTQQSGVVERWVSPGETAEQATAKMQSQDCDWVKYPLQWGQRETPWRHNCLALGRAAGQPGELLCSEWHRACQSLLLWLELLPDAAGRPALRSEFNRRDRALFESWRELHELLILAGDPRSEAVTESLRWRLQVFESFGRLWRRDQEPLPDETQLALLIGLGWRSASADNLLAEASPEDLRRKHQRIYDTLVSAAERMPTLKQVIQHHCPAVV

SEQ ID NO: 90649 - protein, 503 aa, Sphingopyxis sp.
  REGION 1..503: note = tr|A0A0W1DWX8|A0A0W1DWX8_9SPHN Tryptophan halogenase; OS = Sphingopyxis sp. H050 OX=1759072 GN=ATE67_00940 PE=4; SV = 1
MSQSAAEPLHVVILGGGSAGWMTAALFGHHWRAHPVRITVVESPDIGIIGVGEGSTPQLKAFFDTLGIAESDWMPACDATYKLGIGFEGWSLADGYQRYFHPFPGPLDVHTEGDFFRNAALRRSGVDVEANPDSFYLAARVAARGGGPHGGETFPFDLGYGYHFDAHKLGTYLRGHAVGQGAEHLARTVERVEIAANGDVAALILDGGERLEGDFFIDCSGFRAMIAQQALGARFLPFAENLFNDRAVVAPTAHPATGPVVTATRSIAMSAGWRWSIPLTTRVGNGYVYSSRYLDRDAAEAELRAALGLGDADAPLRHLDMKVGRLATSWTANCLAMGLAQGFIEPLEATALHIVIATIQEFLAAYEGGNFTARHRDMFNARIGARYDGIRDYIVAHYRMNRRGGSGYWHDASTMDALSDNLKTLITAWFTGADLGEAIDDLGVGGYYPNLSWHCLFAGYGTFPAVTALRAPVAADRAANGDQIERFLARAAANFSSPGGPTA

SEQ ID NO: 90650 - protein, 505 aa, Erythrobacter nanhaisediminis
  REGION 1..505: note = tr|A0A1I5NP83|A0A1I5NP83_9SPHN Tryptophan halogenase; OS = Erythrobacter nanhaisediminis OX=604088; GN = SAMN04488060_2003 PE=4 SV=1
MTDQETFDICIAGGGTAGWMAAALLARFLPATHRVTLVESAEIGTVGVGEATIPQIHLLNNALGLDEAEFLRETRATFKLGIEFDGWKREGEAYMHAFGPVGRAHGLLPFHHYWLRANQAGWAKPLANYSLNEMAARALKMRRGPRIAHTPAMPYAYHFDAGLYAAFLRRYSEQRGVTRVEGTIARVEQNGESGTITALDLGDDRRIEADFFIDCTGFRGLLIEQALETGFDDWSRFLPCDRAMAVPCENGGDFTPYTRSIAHRAGWQWRIPLQHRIGNGLVYSSSHLDDNEAVRLLLGNLDGSPQADPKPIRFTTGKRCKHWHGNCLALGLAAGFMEPLESTSIHLVQSAVSRFLSVLPAKTPDPAIVDWFNDQAQFEWTRIRDFLVLHYSANEREGEPFWDAVRHMSLPDTLAAKLENWRATGFIHREHEELFTEVGWFQVFAGQGVEPRDYNRLADALSDDDLRKLLDGTEAALVEEARQMPSHRDFLTRFANLSPQQEASA

SEQ ID NO: 90651 - protein, 518 aa, Caulobacter sp.; identical to SEQ ID NO: 84040
  REGION 1..518: note = tr|A0A0Q6UFL0|A0A0Q6UFL0_9CAUL Tryptophan halogenase; OS = Caulobacter sp. Root343 OX=1736520 GN=ASC70_22200 PE=4; SV = 1

SEQ ID NO: 90652 - protein, 506 aa, Caulobacter sp.; identical to SEQ ID NO: 84076
  REGION 1..506: note = tr|A0A0Q6UQC2|A0A0Q6UQC2_9CAUL Tryptophan halogenase; OS = Caulobacter sp. Root343 OX=1736520 GN=ASC70_07785 PE=4; SV = 1

SEQ ID NO: 90653 - protein, 522 aa, Caulobacter sp.; identical to SEQ ID NO: 87659
  REGION 1..522: note = tr|A0A0Q6V1T0|A0A0Q6V1T0_9CAUL Tryptophan halogenase; OS = Caulobacter sp. Root343 OX=1736520 GN=ASC70_02035 PE=4; SV = 1

SEQ ID NO: 90654 - protein, 505 aa, Alteromonas sp.
  REGION 1..505: note = tr|A0A3N5XZD0|A0A3N5XZD0_9ALTE Tryptophan 7-halogenase OS=Alteromonas sp. U0105 OX=2259342; GN = DRW07_16110 PE=4 SV=1
MHQDTLHIVILGGGTAGWMTANLMAARWKDKNIHLTLVESPDVAVVGVGEGSTPSMQNFFQEIGVAESEWMPECSATYKNGITFEGWSSMPGFEAYCHPFPSQMDTFTFPQFETNCQLRRHHFDVDTHPDRFFLGAYLSQNSKSPKANYAFPFDHPHGYHFDAGLLGKFLRKKAMQRKVKYVQQHVERVIQRENGDIASIEFRDGGTLEGDVFVDCTGFSALLMQKTLKVPYIALDDVLFNDTAVVVSTPVDMKHLPSETRCTALKYGWVWDIPLTSRTGNGYVFSSRYCTLDNAETELRQHLGLLDADVECRSVKWKQGRLQKGWTHNCLAVGLSQGFLEPIEAMSLHLVYCSIGHFITEFEKGKFTTQYQNEYNRLIDSAFDSVTDYIVAHYRLNSRRDTEYWKDNAANPHISNAFRAIVASWMGASQNSLADALKRYDTSHYFPLTSWLILFAGYGVFPAQAQAQPLQAGMQSTDMQALDNFIKRCASNFDTHQATVSAYHS

SEQ ID NO: 90655 - protein, 224 aa, Novosphingobium sp.
  REGION 1..224: note = tr|A0A258XPA7|A0A258XPA7_9SPHN Tryptophan halogenase (Fragment) OS=Novosphingobium sp. 16-62-11 OX=1970405; GN = B7Y31_05275 PE=4 SV=1
GVVYCSDFLGHDVALEKLLSSVEGEKLVKPNHIRFRTGARRKQWHRNCVAVGLSGGFMEPLESTSIHLIQRAILRIVRMLPAGAISQRDIDEFNDQQFTDMEQIRDFLVLHYKVTDRRDTPFWRHVSAMDVPESLTHKIELFRETGRVFRKNEELFAENSWVQVMMGQGIMPQSHHPVAAKLRDEEMAHLFGTLRDQVARTVAALPVHGDYVVRYCGADVPVAA

SEQ ID NO: 90656 - protein, 248 aa, Novosphingobium sp.
  REGION 1..248: note = tr|A0A258WM29|A0A258WM29_9SPHN Tryptophan halogenase (Fragment) OS=Novosphingobium sp. 16-62-11 OX=1970405; GN = B7Y31_12910 PE=4 SV=1
MTTPHHPRRIVIAGGGTAGWMTAAALARTLGPVAQVTLVESEQIGTVGVGESTIPPLVAYNRILGIAEADFMRATQATFKLGINFENWRVAGESYFHSFGGTGKDHWSAGFQHFWMNGLTRGHTVPYSEYCLELKAAEAGRFAHLPEDRMNYAYQLDSGLYARFLRGMAEADGTKRIEGKIAQVQLDGETGNIAALLLESGKRIEGDLFIDCTGFRALLIEGALRVGYDDWTHWLPCDSAIAIQTASV

SEQ ID NO: 90657 - protein, 525 aa, unidentified
  source 1..525: note = Salinisphaeraceae bacterium
  REGION 1..525: note = tr|A0A2D4SC77|A0A2D4SC77_9GAMM Tryptophan halogenase; OS = Salinisphaeraceae bacterium OX=2026789 GN=CMN28_08675; PE = 4 SV=1
MGGLAAGKIASLELTQSHNTPRSILIVGGGTAGWMAAVLFAKAWGRQDCRITLMESSDIGTIGVGEGSTPRMRDFFRQLDIPESEWMPACNATYKCGIRFPDWSTRPGYPSYYHPFFTLSDNEFVRSFFNNVTLRNHKRAKVHAHPDAFFVSQYLAKSRRAPLAPDGIEYQTDYAYHFDAGLLGEFLKQKALAWGVDHRIDTVTAVNQADDGAIASVDTEGSGALAADLFVDCTGFAGLLIGKTLDEPFVSYSDSLLNDRAVALPTPPEQDQGLPSETLSTALKYGWAWKIPLTGRFGNGYVYSSTYCEPEQAEAELREHIGQHDASVQARHLKMRIGRRERCWARNCLAVGLSQGFIEPLEATALMLVQETIEDFIEHQPRDGADGRAREALNATIAAKFDGVRDYVFMHYKLNTRADTAYWRDCRDLPPCSDLVAELLRTWDRGGDIVELLKQNSQRVVYSPTSWLCILAGMGRFPSNPKKPKKNQRVADPDIVRQHCEALLGHFPDHRSAVEGLRTSGSAAS

SEQ ID NO: 90658 - protein, 497 aa, Alteromonas sp.
  REGION 1..497: note = tr|A0A3N5YP58|A0A3N5YP58_9ALTE Tryptophan 7-halogenase OS=Alteromonas sp. U0105 OX=2259342; GN = DRW07_08695 PE=4 SV=1
MNDTIKKVVVVGGGTAGWLSAALLKKVLGQTVELELVESESIGTVGVGEATIPPIRMLNNVLGLNEADVIRETKATIKLAIKFENWRVKGEGYFHTFGSPGRSYAFCHFHHFLNRARQQLGESSSIWDYDLNYLSAIEGRFAKMDVTDPILDMPFAYHFDASLYAKFLRKVAEQAGAVRTEGTIVDVTQHPGSGYIQGVRLANGREVTGDLFIDCSGFRGLLIQQQLNTGYIDWSHWLPCDRAIAIPSERHEHTLPYTRSIAHTAGWQWRIPLQHRNGNGHVYCSNYMSDDEALAVLKNNLDTAPLADPNFIKFKTGRRRKQWNKNVIAIGLSSGFLEPLESTSIHLIQSAIVRLLHLFPHQGINDSIMSEYNAQSALEFEQIRDFIILHYHVNERDDSQFWRDVRNMDVPERLRHKIDLFRQNGRLFNEHNDLFLDASWLQVMQGQGITPQDYHPMAKSIPQDKLIDMLKTIRKIKQDPVAQLPTHDEFLAKVCGN

SEQ ID NO: 90659 - protein, 517 aa, Streptomyces sp.; identical to SEQ ID NO: 87601
  REGION 1..517: note = tr|A0A1C4KCS3|A0A1C4KCS3_9ACTN Tryptophan halogenase; OS = Streptomyces sp. Termitarium-T10T-6 OX=1839775; GN = GA0115253_1010510 PE=4 SV=1

SEQ ID NO: 90660 - protein, 504 aa, Erythrobacter nanhaisediminis
  REGION 1..504: note = tr|A0A1I5MEP0|A0A1I5MEP0_9SPHN Tryptophan halogenase; OS = Erythrobacter nanhaisediminis OX=604088; GN = SAMN04488060_1321 PE=4 SV=1
MTDPVRKILIVGGGSAGWMAAAYLSRALSDTVAIELVESEAVGTVGVGEATIPPIREFNRMAGIDEVEFVKATDATFKVGIEFENWGVPGDRYLHAFGHVGQELDAMVRLHHWWLLGKQAGGPDYPQWQELFLGRAAADLDRFAIDQRPGSELSRLLPHAYHFDSLSYGKYLRKVAESRGVKRTEGKIVAVHRASDTGEVTGIGLDDGATLEADFFIDCSGFRSLVLGEAMEVPFDDWSHWLPADRALVVQTENVGETISPMTRAIAHSVGWQWRIPLRSRTGNGHVFSSAFSSGDEATERLLATISGDLRGDPRIITFRTGRRQDAWSGNVVGIGLAAGFLEPLESTSIHLVQASLERLVELFPTKAIDPVLRDRFNAQTQQEWEQVRDFVIAHYAVMQRDDSEFWRHCRTMELPDTLSTILELWRSHGSVAIDGGHLFQLGSWTSLLLGQNLEPDRPHPATARAQPQPIADRIAHIAASLRKSAEGLPDHGQFLARMAGTAS

SEQ ID NO: 90661 - protein, 517 aa, Caulobacter sp.; identical to SEQ ID NO: 87664
  REGION 1..517: note = tr|A0A0Q6UTY9|A0A0Q6UTY9_9CAUL Tryptophan halogenase; OS = Caulobacter sp. Root343 OX=1736520 GN=ASC70_08180 PE=4; SV = 1

SEQ ID NO: 90662 - protein, 521 aa, Sphingomonas sanguinis
  REGION 1..521: note = tr|A0A147J166|A0A147J166_9SPHN Tryptophan halogenase; OS = Sphingomonas sanguinis OX=33051 GN=SB4_04420 PE=4 SV=1
MTGRAERTDGPVRRVVVVGGGSAGWIAACRLAAQSRRTGGDVRVTLVESRNVPTVGVGEGTWPTMRNTLAKIGISETDFIRSCDAAFKQGARFVGWTDGTADDGYYHPLNPPAGATEIDLAPHWLHRSEMGASFADWVDYQAMLCDAGLAPKSIVAPEYAGHANYAYHMDAGKFATLLRDHGVGQLGVEHVLGDVVRVAVADNGDIAHLELADGGTVAGDLFVDCTGFAALLIGGVYDVPFRRCGDVLFADRAIALQVPYAQPDDPITCHTVSTAQESGWIWDIGLWTRRGVGHVYSSAHTSDDAAEAALRAYIGPAAEGLSARRITIYAGHRTRFWQNNCVAVGLSAGFIEPLEASALMLIETAMDAIADRLPRTRAAMDVMARQFNATFTHHWMRIIEFLKLHYVLTKRTDTDFWRDNVAASSIPDGLAERLELWRHHSPGPQDFDHAREVFSWPSYQYVLHGMGFESHRPPVDPAAPDAVLAERFVGRTARAKDELRARAPVHRDLLRAIREHGLQRV

SEQ ID NO: 90663 - protein, 500 aa, Alteromonas sp.
  REGION 1..500: note = tr|A0A3N5Y2M9|A0A3N5Y2M9_9ALTE Tryptophan 7-halogenase OS=Alteromonas sp. U0105 OX=2259342; GN = DRW07_00945 PE=4 SV=1
MNVSPSSKQHSILIVGGGTAGWIAANLIACKLPDFDVTVIESDDIGIIGVGEGSTPHLKLFFETIGIADHEWMPQCNATYKNGITFSGWSHKPGYDSYFHPFETQVDDPFTVPLFFKNIQARMQGFDVDARPDRYFLESFLSQHHLGPLPDDSFPFGVAFGYHFDSGLLGKFLTETAKKRGVKRVEGKISHVLTSASGAIHQVVLENGESITADMFIDCSGFRSLLLQDTLHVEFKSFKENLFNDAAVVLATPISSPLPVETKATALSNGWAWKIPLQNRFGNGYVYSSDYINSTQAEHELRAHLGMLDSDTEARHLSMKVGRVEKHWHKNCVAVGLSQGFIEPLEATAIALSLNTVLQFINCYQEGGFTNQYEDVFNQDINKRFDGIRDYVVCHYKANQRSDTEYWRDNAANPHISERLKAILHLWQNSGNFAAEMYQRNLYGSYNPKSWACLLAGYGVFPNQPLRQVPDPKSYQLELDNVADFLRRCGLNFKPHSALL

SEQ ID NO: 90664 - protein, 505 aa, Cellvibrio mixtus
  REGION 1..505: note = tr|A0A266QDW9|A0A266QDW9_9GAMM Tryptophan halogenase; OS = Cellvibrio mixtus OX=39650 GN=CBP51_13010 PE=4 SV=1
MQKNTLGSICIVGGGTAGWMAASLLSSALQGSRIKITVVESPDIATIGVGESTVPTIMDFLRSCQINLKEFVEATSATFKLGIRFDDWLKPGEQFFHPFGRIGQDVNGFEFYQVWLKTLRDGHATRWLDHSPCAIMAENQRFMLRPPQQQNWVLNSYSHALHLDAILAARYLRELCKTRGIERVEATVNKVMVDERQFIRSLELDNGTTLASDFFIDCTGFKGLLIEGALNIGYEDWTHYLPCNRAVAVQTENASGLHPFTVATARDAGWTWKIPLQHRTGNGYVFSSQYCTDDQAIDTLRKAVSGKLLNEPRVIPFTTGRRKKIWHNNCLALGLASGFLEPLESTAIHLVHKTLVHFVRHFPDRDFESYTEQAFNQKINIDYQEIRDFIILHYCTSGRDDTEFWRWCQAMPVPDSLYEKISLFRERGQIEHIPGQFFTIDSWCSILDGMKVSPKKYHPLVNEFDKQYLATLMQESARSVRETVMKMPGHEEYIQQHCAVKKPSV

SEQ ID NO: 90665 - protein, 523 aa, Cellvibrio mixtus
  REGION 1..523: note = tr|A0A266Q769|A0A266Q769_9GAMM Tryptophan halogenase; OS = Cellvibrio mixtus OX=39650 GN=CBP51_01040 PE=4 SV=1
MADHVTRVVIVGGGSAGWLAAGIIAATSPNHVQVSLIESPDVAPIGVGEGTWPTMRATLQSMGILETDFFRECDASFKQGSKFSRWTSLSPNDDYYHPFTLPAKYHEINLAPFWLPFKEKIPFANAVCPQAAVCDFGYAPKQITSPEFSAVLNYGYHLDAGKFAPFLHKHCVEKLGVNYISANVTVINSHENGDIRSVSTDTQGEVVGDLFVDCTGLSSMLLGKHYKVPFVSQQHILFNDSALAVQIPYIENADAIASHTLSTAQTSGWIWDIGLQSRRGIGHVFSSRYTTDELAERELRNYIAPSVGEKMAEELSVRKISFNPGHRDKFWHKNCVAIGLAAGFIEPLEATALVLIEISAKMIAEQFPVNRSTMDIVAKRFNNTLGHHWKRIIDFLKLHYVLTKRTDTEYWRDNCLAGTIPDSLQELLALWKMQSPWLHDEMRREEMFPSASYQYVYYGMKGMTEAADGNRYDPGGKPLHDRNLRKAEALFMENSQKIQQLRKILQPNRELIEKIKLYGLQTI

SEQ ID NO: 90666 - protein, 501 aa, unidentified
  source 1..501: note = Pelagimonas varians
  REGION 1..501: note = tr|A0A238L427|A0A238L427_9RHOB Flavin-dependent tryptophan halogenase RebH OS=Pelagimonas varians; OX = 696760 GN=rebH_2 PE=4 SV=1
MRLAIVGGGSAGWMTAVYLDRTLNGTNGPKRVQITVIESPKIDRIGVGEATVPTILKTLQDMGISEKEFMSEADATFKQAIKFVDWNKGRDSNAYYHCFDRYQTSGRDNFSLRWALSGRDKPFAYTVSAQPYICDQNRAPKRPSDKEYQGRLPYAYHMDAEKFAEFLAKTGVERGIAHISDTVTDVNTDPKGIRSVVLEHGGEMAFDFFIDCTGFARLLMSQLPGYGIRSFSDKLLCDRAVAIQVPHDPEHPEILSSTESTAVENGWIWNISLQSRKGYGYVYSSAHCSDEDAETRLRSFIGPRSESVAARRLSFQSGVLKNPWVGNCVAVGLSAGFVEPMESTGIYFVEYAARMFAELFPIFGNNLLLQSRFNELIHSRYDEVLDFIVAHYVLSDRDDTAFWKEARKQEKATEKLQDLLKIWQHKMVSASDFANSHQLFGHLNYEYCVYGSNYLPDKIRIHQSHNGAIVNKAIQTAVQSFSECLPRNSEYFSSKSPGNED

SEQ ID NO: 90667 - protein, 504 aa, Cellvibrio mixtus
  REGION 1..504: note = tr|A0A266QAP8|A0A266QAP8_9GAMM Tryptophan halogenase; OS = Cellvibrio mixtus OX=39650 GN=CBP51_08010 PE=4 SV=1
MHDNNIRRIAIVGGGTAGWMTAAALSKLIKPDYCQIRLIESEDIGTVGVGEATIPQIQLFNKLLDLDENEFVRKTQGTFKLGIQFVNWKKIGHKYIHAFGEVGKDMEGVQFYHYWLKMLAQGKAEELDNYTIGGLASDRGKFMRPIDAGNSPLSNIAYAFHFDAGLYARFLREYSEARGVLRTEGKIVDTILRASDGFIESVQLASGERVEADFFIDCSGFRGLLIEQALNTGYEDWAHWLPCDRAWAVPCESVGEPTPYTRSTAHSAGWQWRIPLQHRIGNGHVFSSRFMSEDEACSILLNNLDGKPLAEPRLLKFVTGKRKKVWNKNCVAIGLASGFMEPLESTSLHLVQSTIARLMSFFPNKSFDQEDIDEFNRQTSFEVEKIRDFLILHYHATERNDSDFWNYCRTMSIPEDLTQKIEQFKKNGRIYRNNTEMFNELSWFEVMHGQGIHPRAYHPLVDRMSNDEIAKRLEGIRGVIEKSVDYMPTHAEFIAEHCKAIKIY

SEQ ID NO: 90668 - protein, 497 aa, Cellvibrio mixtus
  REGION 1..497: note = tr|A0A266Q2P2|A0A266Q2P2_9GAMM Tryptophan halogenase; OS = Cellvibrio mixtus OX=39650 GN=CBP51_19000 PE=4 SV=1
MSMSSKPVSHIVIAGGGTAGWMTAAYLANWLENTNIRVTLVESELIGTVGVGEATVPGIHQFIKDLNIRESEFIKATNATFKLGIEFENWVAPNQSFFHPFAGYGVPIEDRPFHKTWWAAKQQGYSAALAEFCLCTQLAKAGKFAQPSFDPDSRLAWYNYAYHFDATLFAKYLRGYAEARQVKRIEGKINQVQLDPDSGFICSLHLESGEQISGDLFVDCSGISALLIGKTLGVGYEDWSQWLLSDSALAVQTQSVTEPDPFTRSTARTAGWQWHIPLQHRVGNGYVFSSQFITEDQARAELLANLRGEGVTEPRLIRFTTGMRQDFWHKNCVAIGLSSGFLEPLESTSISLIQTGINKLAAFLVDYEIQEKQVAEANRLNRLEYERIRDFIILHYKLNGRTEPLWQHVRDMEIPATLEEKIATFKASGDIQLLEIESFTEHSWISMYAGFAVNPTGLAPSPEPGKMQAVMDKMRAAVGKGRDYAPSHAEFLQTLEP

SEQ ID NO: 90669 - protein, 493 aa, Marinimicrobium koreense
  REGION 1..493: note = tr|A0A3N1NZW6|A0A3N1NZW6_9GAMM Tryptophan halogenase; OS = Marinimicrobium koreense OX=306545 GN=EDC38_2319 PE=4; SV = 1
MNKPVRKVVIAGGGTAGWVCAAALSSQLGDLLNIVLVESEDIGTVGVGEASIPPMRNFHRLIGVDEQQFMAATGATFKLGIAFENWARDGDHYIHSFGKTGKETWMADFQHFWLRAREQGFGGELGEYCMEHEAAREGKFATSPNGSLNYAYHLDATRYAAFLRSKSESEGVTRIEGKIQQVHLNPDSGHIESLEMASGDVVEGDLFIDCTGFRGLLIEQALHTGYEDWSHWLPCDSALAVQTESVGPPPPYTLSSAHDSGWRWRIPLQHRVGNGLVYCSRYLSDEAARDRLLSSIEGEPLTEPRLIRFRTGRRRQTWNKNCVAVGLSSGFVEPLESTSIHLIMISMTRLIQLFPFDGITPSLVSHYNRIAEDELEKIRDFIILHYHATERSDSPFWRHCGGMSIPDSLRERIALFREQGHAYQSPNELFRLDSWVQVMLGQRINPERYHPIVRAMGDERLKKTLDDFRRQVSLGVERLPPHGAFVEEYCREG

SEQ ID NO: 90670 - protein, 518 aa, Cellvibrio mixtus
  REGION 1..518: note = tr|A0A266Q8S6|A0A266Q8S6_9GAMM Tryptophan halogenase; OS = Cellvibrio mixtus OX=39650 GN=CBP51_03020 PE=4 SV=1
MSNSIKKIIIVGGGTAGWLAAGLLAAEFKHAESSIEITLIESPDVNTIGVGEGTWPSMRATLRKIGISETELVRECFVSFKQGSKFVGWRTGASDDVYHHPFSIPHGYAESNLAAAWQAKFADHPFAEIVSSQFVVAEHGCAPKQVATPEYAGVLNYGYHLDAGKFAVILQRHCTANLGVKHILDHVTKVVSADNGDIAAVDTKATGIISGDLFIDCSGLSCLLLGQHFGVPFVDKKHLSLNDTALAMQVPYPEKNSPIESCTVATAQSAGWTWDIGLSSRRGVGYVFSSGYISEEQAERELRAHIAKSVGAAVADSLSSKKLSIRAGHRQEFWHKNCVAVGMSAGFIEPLEASALALVELSMNMICEEFPVDRSAMSVVAKRFNEVFCYRWERIIDFLKLHYALTERRDSDYWRDMSSPEALPDRLRELLVLWKSRPPHRNDFIQVEEIFPSASYQYVLYGMGFKMDASALPRTSDNLPTALARIRETAEKTRKFLSGLPSNRALIDHVMLHGMPLI

SEQ ID NO: 90671 - protein, 503 aa, Pseudoalteromonas sp.
  REGION 1..503: note = tr|A0A4S1F8R4|A0A4S1F8R4_9GAMM Tryptophan 7-halogenase OS=Pseudoalteromonas sp. MEBiC 03607; OX = 2563601 GN=E5N72_13435 PE=4 SV=1
MIKKIAIVGGGTAGWLAANHLGHALLHSGIEITLIESPNIASIGVGEGTVPSMRNSLQKFGISESDFINECDVTFKQSIKFVNWLDKHKHGANFYHHLFDHPHIFGEELTQQWLADGNGNDYAEFVSKQHVCCEKNLAPKTIATPQYAGINGYAYHFDAKKFASFLGSHATQHFSVKHLFAEIKDITCDQQGFITHLIDSEGNALEFDFIIDCSGFSAAFIGQKLGVGFVDKSDSLLTDTAITLQVPTQSEDEIPPYTIATAHQAGWIWDIALTERRGVGFVYSSKYMSDEQANEKLHRYLGNKFEHLTPRKIPMKVGHREKMWHKNCVAIGLSQGFVEPLEATAILIADFSAGLLAKRFPRSRDDIKLVADDYNQHVNYVWQQTFDFIKMHYCISDRTDSAFWRDNKKTEQLSEKLKNNLTRWQRFTPVREDFASKFDLFDLENYLYVLFGMHYVPAKQQSKQNDNQHVAEFKQQRVKQLLNELPKHRELLDKIKKFGLQKN

SEQ ID NO: 90672 - protein, 520 aa, Novosphingobium sp.
  REGION 1..520: note = tr|A0A3B7DQM8|A0A3B7DQM8_9SPHN Tryptophan halogenase; OS = Novosphingobium sp. THN1 OX=1016987 GN=C7W88_19850 PE=4; SV = 1
MVRAVRDVVIVGGGTAGWLTAAIIAAKHKARIGHDFSVTLVESPNVPIIGVGEGTWPTLRSTLKSVGISETDFFRECDAAFKQGALFAKWTTGADDDAYYHPLVLPQRFGQLNLAPHWLAGSLNEGGDNGETFCDAVCPQGRLCDENLAPKSMVNAEYEGQANYAYHLDAGKFAPFMQRHCTEKLGVRHVLADMRQVLQDERGDIRAIATEQAGEIGGDLFIDCTGMRSLLLGQTLGVGFKDCNDVLFCDTALAMQVPYPSPDAPVATHTISTAQSAGWIWDIGLPTRRGVGHVYSSRHISREDAEEELRAYVGPAAEGLSVRKIDIRSGHREIFWKNNCVAVGLAAGFLEPLEASAIVLIELSAKMIADQMPPVREVMDVVARRYNEKTLYRWGRIIDFLKLHYVLSKRRDTAFWRDNMEPASIPERLQELMALWQYQGPYMHEEFDRVDEVFPSASYQYVLYGMGFRTEVSARTLEPEVREARRARAENADITARMLSGLPKHRDLIDRIVKYGLQPV

SEQ ID NO: 90673 - protein, 324 aa, Bradyrhizobium japonicum
  REGION 1..324: note = tr|A0A1L3FF94|A0A1L3FF94_BRAJP Tryptophan halogenase; OS = Bradyrhizobium japonicum OX=375 GN=BKD09_RS26930 PE=4; SV = 1
MSPLVQPVLRQLGLWTTFLAQGFAPSHRTLTSWDQAGLTSSELLLEARGPSWRVDRMAFDGWLTAAGCRAAERVDAKVCHLAREADGWSVACDDGNSHSARLIIDATGRARALADRQGSRAKAQDRLIAAYAEATTSGPAAPELLVEAFEDGWWYTMALDQGRRAFACMTDADLARGLRLNTPDGWRRALARTQFVSALASKIIRLEPPRLIPAGSRYAATTAGFHFLCAGDAASAFDPISGHGVVKAMRSGVFAAYAACDCLARGDAAALDRYGAWIAREAAAYATTLSEHYGSVSRWSERPFWRRRHADAPSPNPSSSLLEQ

SEQ ID NO: 90674 - protein, 516 aa, Pseudoxanthomonas sp.
  REGION 1..516: note = tr|A0A4V2HD82|A0A4V2HD82_9GAMM Tryptophan 7-halogenase OS=Pseudoxanthomonas sp. NML171202 OX=2480817; GN = EA661_16625 PE=4 SV=1
MDEAIRHVVIVGGGSAGWLTAGLIAAEHRDRHGPTLRVSVLESPDVPAIGVGEGTWPTMRDTLRRIGVGEADFVRACDATFKQGSQFIGWVDGGAHDRYTHPFTLPKGYGETQLAVAWAAQGEVPFAHLACFQPHLCDAGRGPKQFATPEFAAVANYAYHLDATRLGAFLRQHCVERLGVQHVVGHMDAVVSHENGDIAALKVRDQPALEGDLFVDCTGLRALLLGAHYGIAPVGVEDILFNDRALALQVPYADPNAPIACQTLSTAQRAGWIWDIGLSARRGVGHVYSSAFTSDEEAEADLRAYIEATGGPAAATLPPARRIELQPGYRPTAWHRNCVAVGLASGFVEPLEASSLVLVELAAARLADEMPATRAQMDLLAARFNETFAYRWQRVIEFLKLHYVLSRRPTPYWQAHREDASLSPRLRELLQLWRHQAPSRSDFPRSEEIFPSASWQYILYGMGARPHSRPARRSEELQAAQACFAESAALVQRMLPALPSHRALVEHIKAHGLPRL

SEQ ID NO: 90675 - protein, 518 aa, Marinimicrobium koreense
  REGION 1..518: note = tr|A0A3N1P4P3|A0A3N1P4P3_9GAMM Tryptophan halogenase; OS = Marinimicrobium koreense OX=306545 GN=EDC38_2306 PE=4; SV = 1
MRRAFFVLMQNSLNSLCIVGGGTAGWMAASVLSSALQGSGIKITVIESPDIASVGVGESTVPSILDFLRACRIDLNAFIKATSASFKLGIRFDDWREVGEHYFHPFGRVGQDINGFEFYQAWLKTLSEGQATRWLDQSPGAIMAEHSRFMLRPPRSNDWALRNYSYALHLDAVLVARYLRDLCLARGVARIEATVNDVAVDDRQFIRSVSLDSGARVTSDFYIDCTGFRGRLIDRALNVGYRDWSDYLPCDRAVVVQTRNTEDPVPYTQATARAAGWSWRIPLQHRTGNGYVFSSRYCSDEQAIQTLLTTVNGEALNEPRVIPFVTGRREKIWHHNCLALGLASGFLEPLESTAIHLVYKTLIHFIRHFPDRDFDPGIEQAFNRKINTDYHEIRDFIILHYCTADRRDTPFWQNCQNLPVPDSLWEKIRRFRERGELESNSGDFFSRDSWCSIFEGMNIRPRKYHPLMDAFDCQRLAAQLRQQADHIRTTVMKMPSHGDYIRQHCGVESRVRTSGEVS

SEQ ID NO: 90676 - protein, 505 aa, Pseudoxanthomonas sp.; identical to SEQ ID NO: 85982
  REGION 1..505: note = tr|A0A4Q8LL16|A0A4Q8LL16_9GAMM Tryptophan 7-halogenase OS=Pseudoxanthomonas sp. NML171202 OX=2480817; GN = EA661_06515 PE=4 SV=1

SEQ ID NO: 90677 - protein, 505 aa, Pseudoxanthomonas sp.
  REGION 1..505: note = tr|A0A4Q8LMJ7|A0A4Q8LMJ7_9GAMM Tryptophan 7-halogenase OS=Pseudoxanthomonas sp. NML171202 OX=2480817; GN = EA661_06625 PE=4 SV=1
MSVSSIRNIVIVGGGTAGWMAAAAFARVLGPTYNVTLVESEQIGTVGVGEATVPHIKAFNNLLGVDEAEFVRQTQGTFKLGIEFVDWHHVGDRYFHGFGSEIGHPLGLLPFHQYWIKARRAGWAKPLGHYTLNTVAAPQGRFMTSASDVPPGSPLANIAYAYHFDAALYARFLRSYAEQRGVRRIEGIVETVHQHPESGDVIAVTLQDDTRVGGDLFVDCSGFRGLLIEQALHTGYEDFTHWLPCDRALAVPCEKVGPPVPYTRSTARAAGWQWRIPLQHRTGNGYVYSSAHLSVDEAAATLLANLDGKPVGEPRPLRFTTGRRRKCWNKNVVALGLASGFMEPLESTSIHLIQSGISKLLELFPREGLSPVLRQRYNDRLAFEFDRIRDFLVLHYKATTRSDSSFWRQCSDMAIPDTLQTALDLFADSGRFYRNGEEMFAEISWVQVMIGQGILPASYHPLVDQIPDADLKGFLVSIERTIAHCAHAMPPHEAFIARTCAAAVS

SEQ ID NO: 90678 - protein, 521 aa, Caulobacter sp.; identical to SEQ ID NO: 84048
  REGION 1..521: note = tr|A0A0Q6UQA4|A0A0Q6UQA4_9CAUL Tryptophan halogenase; OS = Caulobacter sp. Root343 OX=1736520 GN=ASC70_07790 PE=4; SV = 1

SEQ ID NO: 90679 - protein, 500 aa, Novosphingobium sp.
  REGION 1..500: note = tr|A0A3B7DGX1|A0A3B7DGX1_9SPHN Tryptophan halogenase; OS = Novosphingobium sp. THN1 OX=1016987 GN=C7W88_00415 PE=4; SV = 1
MTASHLPRRIVIAGGGTAGWMAAAALARTLGPVAQVTLVESEQIGTIGVGESTIPPLVTYNRLLGINEAEFMRATQATFKLGINFENWRVEGENYFHSFGGTGKDHWSAGFQHFWLHGLERGHTEPYGEYCLELKAAEAGKFAHLPDDRMNYAYQLDSGLYAKFLRTMAEADGTMRIEGKIARVELDGESGDIAALVLEGDRRIEGDLFIDCTGFRALLIEGALRAGYDDWTHWLPCDSAIAIQTSSVRPPVPYTRAIAHEAGWQWRIPLQHRQGNGVVYCSDYLSHEAALEKLLSTVEGEKLVKPNHIRFRTGARRKQWHRNCVAVGLSGGFMEPLESTSIHLIQRAILRIVRMLPAGVISQRDIDEFNDQQFTDMEQIRDFLVLHYKATDRRDTPFWRHCASMEVPASLEHKMELFRETGRVFRKNEELFAENSWVQVMMGQGINPQSHHPVAAKLRDEELRHLLGSLREQVSRTVAALPSHGDYVARYCGAQVPAAA

SEQ ID NO: 90680 - protein, 510 aa, Shewanella sp.
  REGION 1..510: note = tr|A0A2N7DP41|A0A2N7DP41_9GAMM Tryptophan halogenase; OS = Shewanella sp. 10N.286.48.B5 OX=1880834 GN=BCU57_01345; PE = 4 SV=1
MKVQKIVIIGGGTAGWLAANHIGKAVQSLADVSVTLIESPDIPPIGVGEGTVPAIRQSLQSFGISETEFIQQCDVSFKQSIQFRNWLDKTKHGADNRYHHLFDVPSPLGDDLSAFWNQTATEDMAYSAMVSPQHYICEALKAPKSITTPEYAGSVSYAYHLNAAKFAQLLATNATSKYAVEHIKANVLDAAIDDVGNISRLKTDKLGELAFDFYIDCSGFESILLAKKLNVGFVDKSHQLLVNKAIVAQVPTDITEAIAPFTIATAHQAGWIWDIALPERRGTGFVYSDNHMTSAQAEQKFNRYLGGKLNQLHHREIPMKVGYREQFWAKNCVALGLAQGFLEPIEATSILLTDFAAGYLAKRLPQTLAQMPALSERFNHTIGYAWERVVEFAKLHYCISDRTDSDFWLDNQKPETIPESLQQKLQLWQSFSPITDDLFSRYEVFNIDNYLYVLYGMHYQTKNVSLEAQYLKSAQQQANKIQQIGHKLALDLPEHRALLDKINRYGLQKV

SEQ ID NO: 90681 - protein, 500 aa, Erythrobacter sp.
  REGION 1..500: note = tr|A0A2Z4K2W6|A0A2Z4K2W6_9SPHN Tryptophan halogenase; OS = Erythrobacter sp. KY5 OX=2011159 GN=CD351_14260 PE=4; SV = 1
MSNTSVKKLVIVGGGTAGWITAAAFSRLMGRALSIELVESDAIGTVGVGEATIPQIIRLNTILGLDEHDFIKRTNGTFKLGIEFVDWGKVGSRYLHTFGDAGMNLASVPFHHYWKRAAASGSGHSLWHYSLHQLAASHAKFGKLDRVGNTPMTGLAYAYHFDASLYAAYLRAYSEQKGVTRTEGIVQCVARDGESGDITSITLDNGHEVEGDFFIDCTGFRALLLGQELGVGYQDWSKWLPCDSAQAVPSERLETLVPFTRATAKTAGWQWRIPLQHRTGNGHVYCSDFISDEEAGAALLEGLDTKPLADPRPIRFTTGRREKFWSHNCAAIGLSSGFLEPLESTSIHLIQSHVSRLLQLFPTNNRSDVERAEYNRRCEAEFEQIRDFLILHYHQTERDDSEFWRYCKNMDVPDSLTHKQELFASSGRVGRDADDLFREASWVQVMLGQGVVPQSHDVMANGLSDAQLSEFLRNVRTLIERAVGTLPTHEDYLARHCAAG

SEQ ID NO: 90682 - protein, 504 aa, Pseudoalteromonas sp.
  REGION 1..504: note = tr|A0A426VLH4|A0A426VLH4_9GAMM Tryptophan 7-halogenase OS=Pseudoalteromonas sp. J010 OX=998465; GN = EAG18_15195 PE=4 SV=1
MKSQKIVILGGGTAGWMAANMMAKSWADKAIEITVVESSSIGIIGVGEGSTPQFKGFMDYLGISEAQWMPACNATYKNGIRFIDWSTKTGFSSYFHPFPAQPDDYSAPAFFHNSFVRRKAIDVEGHPDHFFLATHLANTNKSPIAAQNFPFEINYGYHFDSSLLGEFLAREAEKRNVKHIDATISDVRKHVNGDIAALVTSQGVEIAGDIFVDCSGFKSLLLQQALDVGFESFGNNLFNDAAVVLATKQGDIIRSETQSVARKYGWSWHIPLTNRIGNGYVYSQRYCDRDQAETELRAALGLLDSDVEARHIKMKVGQVETHWKNNCIAVGLSQGFIEPLEATALHIVQETVQSFIECYQEAGFTDGNRDKHNHSIATRYQAIRDYIVAHYRVNSRTDTQYWLDNTNNNNLSRSLFNVLQTWVSGNNLSDELARQNIDQYYPSVSWHCLLAGYGVYPDQAQLKPGNALAKQYNIEKIEDYLRRCGLNFKAHRLELDALASTFHK

SEQ ID NO: 90683 - protein, 503 aa, Caulobacter sp.; identical to SEQ ID NO: 84080
  REGION 1..503: note = tr|A0A0Q6VAM3|A0A0Q6VAM3_9CAUL Tryptophan halogenase; OS = Caulobacter sp. Root343 OX=1736520 GN=ASC70_03620 PE=4; SV = 1

SEQ ID NO: 90684 - protein, 523 aa, Marinimicrobium koreense
  REGION 1..523: note = tr|A0A3N1P1R6|A0A3N1P1R6_9GAMM Flavin-dependent dehydrogenase OS=Marinimicrobium koreense OX=306545; GN = EDC38_2115 PE=4 SV=1
MSVHNNPVEHVVIVGGGTAGWLTAGLLAADARLDSRPNRRITLLESPDIATIGVGEGTWPSMLETLRTIGLSESEFIRECDVSFKQGSRFQNWCRGDGDRYDHPFTLPAGYGRLNLAEHWRYAHRDLPFAYAVSPQSAVCDDGRAPKQLATPEYAFNLNYGYHLDAGKFTRLLQRHCVEHLGVVHYLGEVTGVQPRDNGDIKHLHLKSGETLAGDLFIDCTGMASRLLGQHYQVPWVSQRPVLFNDSALAVQVPYSSELSPVASQTLSTAHPDGWIWDIALPTRRGVGAVFSSAHIDKDRVYERLEAYVRGTDSGATLDELSPRLIQFDPGHRERFWQNNCVAIGLSAGFIEPLEATALVLVERSAQFLVQQMPENREEMSVVARRFNRRFCRHWDNIIGFLKLHYVLSTREDSDYWRAHRAEESVPDELAEQLLLWRSRSPWTCDSLYRDELFPSASYQYILYGMRPEYTAPEALERRVRSSGAAAQTAFHENGVQTRKLLQGLPDNRSLINHIRRHGLHTV

SEQ ID NO: 90685 - protein, 503 aa, Marinimicrobium koreense
  REGION 1..503: note = tr|A0A3N1P2T4|A0A3N1P2T4_9GAMM Tryptophan halogenase; OS = Marinimicrobium koreense OX=306545 GN=EDC38_2449 PE=4; SV = 1
MDNSAVNQVVILGGGTAGWMAAASLARYFEGRQAQITLVESADIGTVGVGEATIPSIRDFNASLGVDERDFIRATDATFKLGIEFCDWRAPGSAFFHPFADFGQPLNGVAFHHYLNRLQGEEAGQSLEDYCFAVQLARRGRFAQPHEQPPTPLADYGYAYHFDAGRYANFLRQYAEARGVIRREGKVTRVEQNPDNGFITALHLDDGARAEGQLFVDCSGFRGVLIEQTLQAGHEDWRQWLPCDSAIAVPGAAMPEPTPYTRCTALDAGWQWRIPLQSRTGNGYVYSQAFVSDEQAKQTLLKQMAESPLKDPKTFRFVAGPRKSIWEKNCFALGLASGFLEPLESTSISLIQTGIAKLLRLFPESGFHEVDRAEANRQHHHEFERIRDFLVLHYKTTQRSDTAFWRHCQTMPIPDSLAHKLKLFRHRGELVQMEPEAFEHDSWLAIYSGMGVQPNHYDIRANKIPETALTDELGRMRAMIAQAAEQAPSHSAFIRQHELDRQP

SEQ ID NO: 90686 - protein, 41 aa, Mycobacterium ulcerans
  REGION 1..41: note = tr|X8FHE9|X8FHE9_MYCUL Tryptophan halogenase domain protein OS=Mycobacterium ulcerans str. Harvey OX=1299332; GN = I551_2014 PE=4 SV=1
MKQKQRHLVETLPSNYEYLLKLHGKDMEPNDPMEPEVTFVA

SEQ ID NO: 90687 - protein, 477 aa, unidentified
  source 1..477: note = Streptomyces pluripotens
  REGION 1..477: note = tr|A0A221NTP8|A0A221NTP8_9ACTN Tryptophan halogenase; OS = Streptomyces pluripotens OX=1355015 GN=LK07_03775 PE=4; SV = 1
MTDITETDVVVVGGGPGGSTVATLVARQGHRAVLLEKERFPRYQIGESLLPSTVQGVCRLLGVSEELKEAGFPVKRGGTFRWGSNPEPWTFDFGISPQFAGTAAPAYQVERMKFDQILLNNAMRNGVDVHEEHTVTDVIEENGRVCGVSCTDAAGVRREFRGRYVVDASGNLSRIHSRVGGKRQYSEYFRNLALFGYFTGGKRMPAPTSGNILAVAFSAGWFWYIPLSDELTSVGAVVHREALDRVQGDREQALNELIAECPMIADFLSDAQRVTSGPYGEIRVRKDYSYIQEKFSRPGLVLVGDAAGFIDPVFSSGVHLATYGGLLVARSLNTALRPTTESGMDEKTLFEEYEARYRQEYMRFHDFLVSFYDMHSDEESYFWKAKRVTGNTASELQSFVSLVGGGSSDERALVNAGSYGDRQDVEEAIWSVAQAGANIQVQAATGGTIDEQVPVRDGGLVPSADGMHWALPATAAA

SEQ ID NO: 90688 - protein, 422 aa, Shewanella frigidimarina
  REGION 1..422: note = tr|Q088W0|Q088W0_SHEFN Tryptophan halogenase; OS = Shewanella frigidimarina (strain NCIMB 400) OX=318167; GN = Sfri_0342 PE=4 SV=1
MPFSHSHTVSNMDVDVAIIGAGPSGAIAASLLRQQGHQVVVIEKQHFPRFSIGESLLPCCMQFLEQAGMLDAVNQAGFQFKNGAAFQHQGRYTTFDFTDKFTPGPGTTFQVQRADFDKLLADTAISQGVEIRFGHQVDAIDLTHNPRLTVTNDQGAQYQVNAKFVLDASGFGRVLPRLLNLEQPSNLPPRSAIFTHIEDNIRDPHFDRNKILISVHPQHKDIWYWLIPFSNNRCSIGVVAEPHLLEHLSGSLEQQLLAVINEEPELKKLLSNANIVQPCATLKGYSANVTTLATNKFALLGNAGEFLDPVFSSGVTIAMQSASMAVACLHKQLNGQTVDWDSEYSAPLMQGVNTFRTYVQAWYDGRFQDVIFYQQADNKIKQMICSILAGYAWDMSNPFVKESERRLNTIVELCQEPKPNVA

SEQ ID NO: 90689 - protein, 530 aa, Caulobacter sp.; identical to SEQ ID NO: 87670
  REGION 1..530: note = tr|A0A0Q6VD43|A0A0Q6VD43_9CAUL Tryptophan halogenase; OS = Caulobacter sp. Root343 OX=1736520 GN=ASC70_22870 PE=4; SV = 1

SEQ ID NO: 90690 - protein, 498 aa, Cellvibrio mixtus
  REGION 1..498: note = tr|A0A266Q9K4|A0A266Q9K4_9GAMM Tryptophan halogenase; OS = Cellvibrio mixtus OX=39650 GN=CBP51_05790 PE=4 SV=1
MDKPVRLVILGGGTAGWMAANLFAKRWSRTQVHITLMESPEIPIIGVGEGSTPSLKRFFKQLDLTEQEWMPACHATYKTNIRFVGWSPASGVQEYSHPFYSQPDVFNERTFFTNCRTRRLGLDVITDPEKFFINGELARQGKMPIAPPNFPFQMEYGYHFDSQLLGHYLASVARARGVVHHQAKLAEVLRNDRGEITALQTDAGDLLAGDFFIDCTGFASLLMQKALAVPFHSYQQQLFNDSAVVMPTPALARPPVETRSTALSAGWCWQIPLTHRTGNGYVYSSQFISRDQAETEFRAHIGMSNSSESCRHLSMRVGQLAQHWSHNCVGLGLSQGFIEPLEATALHLVQLTVEALMDAWDDHQFTSNGRDHFNRTVANHFDGVRDYIIAHYKLNTRGLNNTQGSDYWRANRDNTQLPESLLQILDVWYRCGDLTAELAQRTIKPAFNSASWHCLLAGYGAFPPLATNQPGQGKGDLYRECKVADFVEGCAMNFPLFL

SEQ ID NO: 90691 - protein, 501 aa, Marinimicrobium koreense
  REGION 1..501: note = tr|A0A3N1NSK2|A0A3N1NSK2_9GAMM Tryptophan halogenase; OS = Marinimicrobium koreense OX=306545 GN=EDC38_2450 PE=4; SV = 1
MIRHTLKQLVIVGGGTAGWMTAARLARHFRKTDIRITLVESSDIGTVGVGEATIPTLRQFYADLGMTDKEVMRATQATVKLGIQFEQWREPGSDFIHPFGVFGQKANGIDFHHYWLKLRQRGDTSELADYSLGLQLARHHRFTPPSLQPPSELSVFDWALHFDAAAFGRLMRDYAERHGVERLDARIESVKQHPETGNIEALYLDSGNLVGGDLFIDCSGFRALLIEQTLNTGYCDWSEWLHCDRAVAVQSERFGEAPPYTVSRAQTAGWQWRIPLQTRQGNGYVYCSDQVSDDEATSTLVDHIDGPLLNDPKPFRFTAGRRRRAWNRNCIAVGLSAGFLEPLESTSIALVETAIHKIRRAFQKPWYTQADIDRFNEDTALEYERVRDFIILHYKLNGRTDSPFWERCRAMPIPDTLREKVEAFRAQGELLRYRAEIFGPASWLAIYSGLGLLPERYHPGVDRLDFQYLKDALIAMRQSVADAVAQAQTHNDYLQSLNRTG

SEQ ID NO: 90692 - protein, 502 aa, Cellvibrio mixtus
  REGION 1..502: note = tr|A0A266QED3|A0A266QED3_9GAMM Tryptophan halogenase; OS = Cellvibrio mixtus OX=39650 GN=CBP51_09520 PE=4 SV=1
MKANAIHKVVIVGGGTAGWMAAAALSKILGKTLDISLVESDEISTVGVGEATVPPLINFHGLLGIKEQEFMSACQGTIKLGISFEHWKEQDDKYIHAFGKTGKDHWAAGFWHCWLKGLRNGISDGYGDYCVEHLAARAGKFTILPSSRDGHNYQVNYAYHFDAALYAKFLRKIAENSGVKRAEGKITHVTTNADTGFIESVSLASGRLIEGDLFIDCSGFAALLIEQTLHTGYEDWSHWLPCDSAVAVQTTLVGPPVPYTRAIARDFGWQWRIPLQHREGSGLVYCSRYLSDDDAKKTLLQNVDGDPFFEPRVIKFRSGQRLKHWNKNCVALGLASGFIEPLESTSIHLVQQGILRLVSLFPSGGIQQFDIDEFNAQTKIETNNVRDFIILHYNTTQRTDTPFWRYCRNMTVPDSLKHKLELFRESGKIFKVPGELFGENNWVQVLLGQGIMPKQYHQIVDMMSDEELAAFLYSIKMSAQNLVKQLPSHSDFLESYCKASNM

SEQ ID NO: 90693 - protein, 505 aa, Caulobacter sp.; identical to SEQ ID NO: 87682
  REGION 1..505: note = tr|A0A0Q6VE28|A0A0Q6VE28_9CAUL Tryptophan halogenase; OS = Caulobacter sp. Root343 OX=1736520 GN=ASC70_03615 PE=4; SV = 1

SEQ ID NO: 90694 - protein, 495 aa, Shewanella frigidimarina; identical to SEQ ID NO: 83248
  REGION 1..495: note = tr|Q085A3|Q085A3_SHEFN Tryptophan halogenase; OS = Shewanella frigidimarina (strain NCIMB 400) OX=318167; GN = Sfri_1309 PE=4 SV=1

SEQ ID NO: 90695 - protein, 493 aa, Cellvibrio mixtus
  REGION 1..493: note = tr|A0A266QAW6|A0A266QAW6_9GAMM Tryptophan halogenase; OS = Cellvibrio mixtus OX=39650 GN=CBP51_05725 PE=4 SV=1
MSQTIKKVVIAGGGTSGWCAAVALSRQFGTLLDITLIESAEIGTVGVGEATFPTICSFHKIHGIDEQEFLSATKGSIKLAISFENWARKGDRYIHPFGSFGNASWIGDFYHYWLAAKARGYDGELDDICFELQAAKSHKFAITENPKLNYAYHFDAALYAKFLRKLSEEKGVHRIEGKIVQVKQHLDNGFIESVVLESGVAIEGDLFIDCTGFRGLLIEETLNAGYETWGQWLRNDSAVALQTEFSGDIPPYTRAIAHDSGWQWKIPLQHRQGTGHVYSSAYISDEDARNTLLQNLDGDIRAELRLLKFNTGRRKQAWVKNCVAIGLAGGFVEPLESTSIHLIQIGVHRLLRLFPFEGCNEYLIRRYNELSRIEYENIRDFIILHYKATERDDTPYWRDCRDMAIPDSLAERLELFRATGYVHYNSDEVFGVTSWLKVMTGQRIVPQGYHHFPHVISDEKIFSGLISMKEKIANAVKKMPSHTDFLKAYCTVK

SEQ ID NO: 90696 - protein, 502 aa, Marinimicrobium koreense
  REGION 1..502: note = tr|A0A3N1NPK4|A0A3N1NPK4_9GAMM Tryptophan halogenase; OS = Marinimicrobium koreense OX=306545 GN=EDC38_3099 PE=4; SV = 1
MTQTNNFVRRIAIVGGGTAGWMMAAALSKTLSRHPCEVVLIESPDIPTVGVGEATIPPIQLFNRLLQIDEHEFLRETRGTYKLGIEFVDWFKQGQTYFHPFGRYGADIHNVPFHQYWRKLHQLGEGGSLGEYSLPTVAAYRGTFSPPDDNPRSVLSKMAYAYHLDAGLYADYLRRYAEARGVQRLARRVQGATVRPDDGFIESVVFDDNSRLEADFFIDCSGLRGLLIEETLHTGYEDWRHWLPCDRAVAMPCEAPEAPRPYTRSTAREAGWQWRIPLQHRLGNGYVYCSDYLTDDAAESTLLANLEGAPLADPKRLRFTTGRRKQAWNKNCLAVGLSAGFMEPLESTSIHMIQTAIARLMTLFPDNAFDPVDIAEYNRLSDIEYERIRDFLILHYKATARDDSELWRYTRDMAIPDSLQHKLDLYQSRARVFRYDEELFADTSWIAVFEGQGVVPRRYDPLVDTYDLEQLRAVAARMRQTIIAGADSLPRHEEYLARHCTA

SEQ ID NO: 90697 - protein, 501 aa, Marinimicrobium koreense
  REGION 1..501: note = tr|A0A3N1P2I6|A0A3N1P2I6_9GAMM Tryptophan halogenase; OS = Marinimicrobium koreense OX=306545 GN=EDC38_1571 PE=4; SV = 1
MNTDDRRLRRIVIVGGGSAGWMSAAALANATQGQCAITLVESDAIGTVGVGEATIPPIRLFNRVLGLDEREFLRRTKGTFKLGIQFVDWAHQGHSYFHPFGPHGRNFDTVSLHHHWLRSRESGETSTPLHEHSMAWAAASRNRFAPPVQDPRNVRSTYDYAYHFDAGLYAAFLREYSEAKGVERREGTVTDVLLNPENGFVESVQMASGDRIEGDLFIDCSGFRALLIGEAMKVGYRDWSDWLPCDRAVTVASAPGELTPYTRSTAHAAGWQWRIPLQHRTGNGYVYCSRHISSDEAAATLLKHLDGERLGEPRELAFTTGRREKFWEKNVVAVGLSSGFMEPLESTSLHLVQAAISRLLGFFPDRDFDSAVIDEYNRITINEFERIRDFLILHYKLTERDDAPLWRECRDMSVPTPLENKLYHFGAYGRLIADGADLFGPDSWLAVHVGQNHWPKRVDPLLAFRTVDGGTWLEKLRAAVTAAADQMPEHQAFIHKYCSGG

SEQ ID NO: 90698 - protein, 514 aa, Novosphingobium sp.
  REGION 1..514: note = tr|A0A3B7DVH5|A0A3B7DVH5_9SPHN Tryptophan 7-halogenase OS=Novosphingobium sp. THN1 OX=1016987; GN = C7W88_07050 PE=4 SV=1
MGQPIRNITIVGGGTTGWLAALFLVTRLQGAVRRGELDIHLIESDRIPIIGVGESLSPSMATTLEQLGIPEDDFIRDTDATFKVAGYFVGWDEADDGRPLSWVNPFVGFMTAGWEFERYELTGAPYGDGPDYARVVSPCREAIELRKSPKMRGQKPFEHVLRYAYHTNAAAFAPFLRKHAEARGVRRTGADVVGATRDPRGHISAIKLEDGREVPVELVIDASGFSSVLHHKVMGVPLVDYSHILLNDRAVVTQLAHANPDEPLEPATRATALPHGWAFRVPLYHRTGNGFIYSSQHCSDEAAANEFAGYLGGNARVEDMRVIPMRVGRTQRSWEGNCIALGLAAGFVEPLEASAIFTVETSVKWLLHYFPDSDWEPALRDRYNSRVTDLYDEVADYIALHYRLSRREDTSYWRAQRHEMKVSDRLEQNLSIWRHTLPVRADFASTNYFDENTYIAALFGKGFYRGRELQPMREVDARNWAGLKQNITSAHARALGMLPDHRAVLTEIRARASG

SEQ ID NO: 90699 - protein, 488 aa, unidentified
  source 1..488: note = Erythrobacter luteus
  REGION 1..488: note = tr|A0A0G9MW67|A0A0G9MW67_9SPHN Tryptophan halogenase; OS = Erythrobacter luteus OX=1581420 GN=AAW00_00105 PE=4 SV=1
MSEGKKPSIVVLGGGSAGWITACLLHHRWGGEVTVVESPEIGIIGVGEGSTPQLKALFDHLGIAEAEWMAACDATFKLGIRFTGWSERPGFGSYFHPFPGPVDLHTEPGFTHNAMLARRGFDVPALPDDWFLAARLASEGKGPHPSASFPFAPSYGYHFDAYKLGAFLRDWARPRGVVHREAKVAEVELTDGGDVAALVCEGGERIAGDLFVDCSGFRALIAEGALGAKFLPFDSNLFADRAVVMPTERDAHYLPQTEAVAMKAGWRWRIPLTTRVGNGYVYASRYLADEEAEAELRAATGSTGEARFLRMKVGRLEDSWTRNCLAAGLAQGFIEPLEATALHIVIATALEFAEAFEEGGFSARHRDRFNRQIAARYESVRDYIVAHYRMNQRTDTAFWRDNAANQALSNNLRAMVTAWFTHGDMAEVNASTYAEPAYAAMSWHALFAGYGTFPPAARMQPPPPGVAVADVEAARAMLAACAENFAPL

SEQ ID NO: 90700 - protein, 508 aa, Cellvibrio mixtus
  REGION 1..508: note = tr|A0A266Q9P8|A0A266Q9P8_9GAMM Tryptophan halogenase; OS = Cellvibrio mixtus OX=39650 GN=CBP51_04780 PE=4 SV=1
MIRRIAIVGAGTAGWLAANHLGFELRNDKEIEITVIESADVPSIGVGEGTVPYIKKSLEKFGISELDLLVKCDATFKQGIKFVDWLNPELHGLGNYYYHPFSAPYPGGFDVTPYWLTGHHHFDFHSLTEQAVLCNAGYSPKRISSPPYQGEVEYAYHFDAAKFALLLAGNAVEKYNVKRLVKTIVGAVLDDDGYIDHLSDVSGEVLRFDFYIDCSGFSSLLIDSVLQVPFVGVSSQLLTDSALALQVPMTGQEAIPPYTIATAHKNGWIWDIALQQRRGTGFVYSSAHLSDEEAMVEFSNYLNVDLDKIEPRKIPMKVGYRNKFWEKNCVAIGLSQGFVEPLEATSILVTDYSAEYLARSFPRSREEMPLLELRFNRVVGYIWERTIDFIKLHYCLSDRVDSAFWQDNRDLSSISTTLAERIELWRSNHPKKSDFFSRFDLFDAENYLYILYGMKFSTRVPSLSAFEVEASANQLRLLEQRTKNLQKDLIGHREWLEKLKAAVASRSN

SEQ ID NO: 90701 - protein, 501 aa, Pseudoxanthomonas sp.
  REGION 1..501: note = tr|A0A4Q8LCH6|A0A4Q8LCH6_9GAMM Tryptophan 7-halogenase OS=Pseudoxanthomonas sp. NML171202 OX=2480817; GN = EA661_16640 PE=4 SV=1
MTDSSQPRPVKRVVIAGGGTAGWMAAAALSRTLGKVLDITLVESEEIGTVGVGEATIPTLVTFHRLLDIDEQAFMAATGATIKLGIQFEGWREPGQDYIHSFGTTGKDHWTAGFQHFWMKGRQRGLARDYGDYCLELRAAQEQRFAHLARNGMNYAFHLDAGLYGRFLRRFSEGFGARRIEGRIATVQTSVQGDIDALVMEDGTRVEGDLFIDCTGFRALLLGQTLGVAFQDWSHWLFADSALAVQTESVAPPVPYTRSMAGPAGWQWRIPLQHRVGNGIVYSSRFMDQEAARAALLDNLEGPPLFEPRPLRFTPGQRQVTWKRNCVALGLASGFLEPLESTNIHLVSRNLTRLLQSFPHVIRQVDIDEYNAQTEAEMVHIRDFVILHYHVTRRRDTPFWQACAQMDIPATLRHRIDLFAQTGRVFHVPNELFAENSWIQVMLGQGIAPAQYHPVADLMDDAELARFLDGIHQQVEQTVARLPTHADYLRSYCAQPRPAMA

SEQ ID NO: 90702 - protein, 506 aa, Sphingomonas melonis
  REGION 1..506: note = tr|A0A0D1L056|A0A0D1L056_9SPHN Tryptophan halogenase; OS = Sphingomonas melonis OX=152682 GN=SR41_02125 PE=4 SV=1
MAGERQRTTRVVIVGGGTAGWMTAAAIARLLPHCAEVHLVESEAIGVVGVGEATLPHIRAFNERLGIPEAEFMARTRATFKLGIEFRDWGAIGDSYIHPFGTFGTGSGAVDFHHYYMRLLREGAELPPLDRLSYACALAREGRFAMPETGRRSLAGTFGYAYQFDALLFAPYLRGLAEEMGARRSEGIVVDVERDVESGDIVAVTLADGTRIEGDLFVDCSGFRSLLLGEALGEPFEDWSRWLPADRAVAMPCRTETAVTPYTSAIAMPAGWRWRIPLQHRTGNGYVYASDFLSDDAAAAALRGVVEGEALADPRPLRFKAGRRRHSWSHNCVGIGLASGFLEPLESTSIYLVQQAITLLIELFPDGRPSAADRDEFNRVIDLEYDRIRDFLILHYHATTRSDSPFWDYVRTMPIPDSLSEKLELWRRRGRVVKYREGVFLDASWIAVYMGQGIVPQGWDPRADAAPDGDLRRGIGGLAEQIAADVARRPGHRAFIDGYCPMAEAA

SEQ ID NO: 90703 - protein, 406 aa, Streptomyces achromogenes
  REGION 1..406: note = tr|C0LTS4|C0LTS4_STRAH Phospho-2-dehydro-3-deoxyheptonate aldolase; OS = Streptomyces achromogenes OX=67255 GN=tomC PE=3 SV=1
MSRYPFPGAGHDPLIASMVAALPARQQPQWPEPSRLAPVHERLARESPLVSYTSVRELRGLLARAAEGEFCLIQAGDCVELTTECEPCDVERKVEMLDVLGDVMRTGSGLPVVRVGRMAGQFAKPRSDDWETVPGGRLPVFRGPVVNAPDACEEARTPDPSRVITGLEAARCAVTALDRLGRGEGAAPEERVWTSHEALLLDYELPQVRRHTDGGSYLASTHWPWIGERTRQADFAHVRLMTELDNPVACKVGPEATVDEVLDLCAVLDPHRTPGRLTLIARFGADRVAALAPLVRAVRQAGHPVLWMCDPMHGNTVKTPDGLKTRRLDTIMSEIRQCVDVLAENGERCAGLHLEASPDDICECEGAGRVPVRGPGYRSLCDPRLSLVQAVAAVAHWRLPVGAAAV

SEQ ID NO: 90704 - protein, 533 aa, Streptomyces achromogenes
  REGION 1..533: note = tr|C0LTS7|C0LTS7_STRAH Putative phenol-2-monoxygenase oxygenase component OS=Streptomyces achromogenes OX=67255 GN=tomF PE=4 SV=1
MTDTRHSTGATGAPGTGTTGSAGATGDAAPRRTTRPMTGDEYLESIRDGREIWAYGERVDDVTKHPAFRNTARMTARLYDALHDPEHHDTLTTPTDTGSDGYTHKFYRVPRSVEDLVGDRDAIACWARMTYGWMGRSPDYKASFLVTLGADPDYYGEFADNARRWYAEAQERVLFWNHAVINPPVDRNRAPDEVGDVFVHVEKECDDGLVVSGAKVVATGSALTHFNFVAHYGLPVKKKEFALVATLPMDAPGVKLICRQSYELAANRMGSPFDYPLSSRLDENDTVFILDKVKIPWENVFIYGDTAKAGTFLNTSGFTHRLTFHGVTRLAVKLDFLAGLLLKGLDVTGTKDFRGIQTRVGEVLAWRNMFWGLSDAMAHNPNAWHDGGLLPNLDYGMAYRWFMTIGYPRVREIILQDLSSGLIYLNSHAKDFQNPELRPHLDRYMRGSNGYDSVERVKLMKLIWDSVGTEFGGRHELYERNYSGNHENVRIELLMAQTASGLVDGYRGFAEECMSEYDLDGWTAPDLIGPDQA

SEQ ID NO: 90705 - protein, 634 aa, Streptomyces achromogenes
  REGION 1..634: note = tr|C0LTS2|C0LTS2_STRAH Putative nonribosomal peptide synthetase TomA OS=Streptomyces achromogenes OX=67255; GN = tomA PE=4 SV=1
MESNSPSLSTEESTEKLEAALRAGSPPTQDPPLVLTTLFARTVRLHGGAVALADGAERFTYDRLNRRANRMARHLQGRGVGRGDRVGVHMHRSPDLYAVILAVLKAGGCVVPLDPAHPTQYLARILREARPSPVICDDPDDLPSEARAGALSRDDLVRGSEGLPDGDPDPGTGPEDTAFLMYTSGSTGRPKGVRIAHRGLARLGPHSGPLDIGPPDGLTQSAAFSFAASTIEIWLAFLHGATLLPMPPGLPSLPVLREAVEERGATVLSLPCGLFNALVDQEPECLRSVRIVLLSGDFPSPDHLRRALAHTDAVVYNGYGCTENSSITALHPLTSPDDVDGTGVVPIGRPLPTVTLEVYDPSMRPCDAGEVGELCVGGAGVALGYADQPELTAEKFTRDPDGDGLLYRTGDLARRNDNGDIVLVGRGDSMVKIRGFRVETSAVTLAVRALDGVADAAVKAFEDEDTHEKRLVAFYTTGDGCPADPADLVRRLSADLPSHMVPSAFRHLEKMPTNVNGKIDRTALTVESRKNRKIRNNRNEKSEKGEKTMQNPLEAVVLQSWIEISGMDDFSTTDSFLGHGGNSLHFVQLASRLQKIFGIEITTESVFRHGTVEQLARFIEESRDQAATTSSSHG

SEQ ID NO: 90706 - protein, 677 aa, Streptomyces achromogenes
  REGION 1..677: note = tr|C0LTS5|C0LTS5_STRAH Putative phenazine biosynthesis protein PhzE OS=Streptomyces achromogenes; OX = 67255 GN=tomD PE=4 SV=1
MTAPPATTAAPAQAHDALLPPPGHPFAVLHRSGAGRAAPVEILSGPVRREDDLDALGLDRPGGAKRSTDGGADAPDTLVLAPYRQIRERGFAHPDDGEPLLAMEVREHRRVPLDRLLACLPDRAPRVEDTRFDVDDDGYAAAVDGIVHREIHRGEGSNFVLARSLHGRIRAFDRTAALAVLRGLMTAETGAYWTFLIFTGDRYLIGSTPEQQVRVRGDLVEMNPISGTYRYPRTGADLPGLLRFLRDPKETDELYMVVDEELKMMAALCGDEVRVSGPSLKWMSRLAHTEYYLSGRSDRPLTEILRTTMPAPTVTGSPVENACRVIERYEPRGRGYYSGVIALLGREGGQRRLDAALMLRMADLGADGTVRLTAGATVVRESVPAHETAETTAKLSGLLDALSGRRSAKAPVPASAAGLAEAGPVRGALAARNDGLAAFWLRGTGDVRAARAVAGADVTIVDAEDGFTSMLAYQLRSLGCSVRVVPWHRTAGGVAGAPGVVLLGPGPGDPRDTADPRVRALRATARERLTARLPLAAVCLGHQVVCTLLGLRVARLPDPAQGRRLRVPLWGRPRRAGFYNSYAARADGDRLHPPLGDGPVQVQRVGDEVIALRGPALSTIQFHAESFLTEDGPGILADLLTGALAPAAAPRPGVHDSDGAGVHDTGLRESRGTHEHA

SEQ ID NO: 90707 - protein, 66 aa, Streptomyces achromogenes
  REGION 1..66: note = tr|C0LTT5|C0LTT5_STRAH Putative tautomerase; OS = Streptomyces achromogenes OX=67255 GN=tomN PE=1 SV=1
MPLIRVTLLEGRSPQEVAALGEALTAAAHETLGTPVEAVRVIVEETPPERWFVGGRSVAERRASPS

SEQ ID NO: 90708 - protein, 1542 aa, Streptomyces achromogenes
  REGION 1..1542: note = tr|C0LTS3|C0LTS3_STRAH Putative nonribosomal peptide synthetase TomB OS=Streptomyces achromogenes OX=67255; GN = tomB PE=4 SV=1
MTSAVLDLARRTLGSPGLRPDEAFSDHCGDPALLEQLGAVLRAVFAVDPPAGERLGAQSAAAVAERLARGRSGSGGQELTAGSAPRDGATTEASFGQSGIWLIDQYLPTPQAYNGPFLTRLPFRLDGERLRRAVAGVLRRQEVLRTTYALRDARLLQVVSDDDTVFHYGVEHYGDDKELDALARRVANTRLDLEHGPVVSVTCALGPGAESAIVCNIHHIASDAASAGIFLRELLDAYDRTGRGLPVEAVPGRPQYADFAEWHRRHLTPERTTRLLDEWADRLAGDLPVLALPSDRPRPAAQEHRGGTVPLRVPAGVTEKLERLAEREGVTLFMALLAVYGTFLAKLSRQERVLIGSPVSLRDDPQTKDLVGYFVNMVVLRQDVTGAMTVREVLGRAREEVAGALRLKWAPFDKVVERLRPDRTGAHTPVVQTMLVLTDPGSAQVMHGATSLTIRRDMAHGAKYDLSVVFAREAAGLLGSLEYDAHLFDEATARSMGERLGRLLTRFAEAAPDTPVRDLGLLAADEEREVLAHDDRVDRSAPPVPVAELFERQAAATPDAVAVTDGAHGWTYRELDERAERLARVLREEGAAAGRRVAIALPRSVEMVAGLLAVVKSGASYVPLDPSHPPERVAYVLDDAEALLVLTDSATADQLPPGKRLLEIDREADRIAAADPAPLGPTRTPDDEIYVIHTSGSTGAPKGVVIRDRTVGNLVAAQHRISPCGATGTTLQYMTLSFDVSVMEILGTLCVGGTLALIPGELQKDLHRLAAFVAEHDVTRLYLPYIALQRFAALAVAEDLRCDALREVTSVGEALVVSPQIREFFARHPRARLLNMYGPSETHLATWHELSGDPADWPEAAPIGRAVDGMRLRVLGPDRELLPPGVTGELYIGGPYLSPGYRGRLEETARRFLPDPYGGDGEVIYRTGDLVRWNARGDLEYLGRADDQIKIRGYRVEPSEVEAALDALDGVRDSAVVAVEFGPGDRRLVAAVTGDGADDTVRLRAALAERLPEYLVPAHLVRLDRLPTTPSGKIDRGGLAGRLAAEVRDRGADAGAKTAQPPRTGTERAIADAWADILGGGVPGRDGDFFTLGGNSIIATELVYRLRTLFEVDIPLRTLFDNPTVAGMAARIDERRAGDTTAFTEPTADLRADVTLPDTVHPGDRTPVPPDAATRFLLTGATGFLGCWLLRELATVPGHTVTCLVRADDADAALARLHTTADRYGITGGIDWERVRAVPGDLARPRMGLSDADHDELAESVEAVHHAAAHINFVLPYASVKPANVDGLRSVLEFAATGRLKHVHHMSTVAVFAPGREGGTITEEAVPDRCEGLGIGYTQSKWVAEGIARLARERGMPVTVYRIGRISGDSVTGACQADDFLWRQIKSFIELGSAPPAEELTTDLLPVDFVGRAVAALSREPSADGATYHLFHPRGSDFTPVHAAVRDCGHPLDTVPAEEWLTRLEESARRPGGNALAAAVPLFREGALELGENTYGNERTTRLLDRLGLRWPDIDRRSLARMIRWFEAAGELDDRALARQGA

SEQ ID NO: 90709 - protein, 783 aa, Streptomyces achromogenes
  REGION 1..783: note = tr|C0LTT4|C0LTT4_STRAH Putative UvrA-drug resistance pump OS=Streptomyces achromogenes OX=67255 GN=tomM PE=4; SV = 1
MVSIRKPPLRARKVLTMAAHRKNHSGDFIVLSEARQNNLKGVDLRIPKGKLTVFTGVSGSGKSSVVFDTLAIESQRQLNETLPAFVRHRMPKYERPDAGVMENLSTAIVVDQRQVGGNARSTVGTMTEILPMLRVLFSRAGTPSAGPSHMYSPNDPRGMCEECQGLGTTVRLELDKLLDEDKSLNEGAIRFPSFAVGTFQWQLYGESGLFDPDKRLRDFSAKDRELLLHGKGFTVDRAGRNGVYKNEYEGVVERFTRRYITPGLDHAKSKERAEIERVVTQGPCPVCHGGRLNKAALASRIDGDNIADFSAMEITDLIERLARIDAPAVKPVVAGARAALERIQAVGLGYLSLGRQTRTLSGGEAQRLKMVRHLGSSLTGLTYIFDEPSVGLHPRDVRRMNDILLALRDKGNTVLVVEHDRDVIAIADHVVDMGPGAGRDGGEVTFEGTPAGLRRSGTVTGKQLRSVTGLKEEVRSPTGELTVRAAKLHNLRDVTVGFPTGVLTAVTGVAGSGKSTLVSKVFTAQYPDAVVIDQSSVGISARSNPATYTDIMGSLRQRFARASGEKPGLFSFNSEGACPQCGGKGVIETDLAFMDPVTTVCEACDGRRFNDEALRHTVGGRTVVDVLAMTAEEASDFFDDAPVRRKLALLTEVGLGYLTLGQPLSTLSGGERQRLKLAHRLKETGTVYVFDEPTTGLHMSDTRRLLDLFDRLVDGGNTVLVIEHDLDVVKHADWVVDLGPEAGSQGGRVVFEGTPAELARAKGSHTGRSLAADLRTAREHSSS

SEQ ID NO: 90710 - protein, 637 aa, Streptomyces achromogenes
  REGION 1..637: note = tr|C0LTT7|C0LTT7_STRAH Putative anthranilate synthase OS=Streptomyces achromogenes OX=67255 GN=tomP; PE = 4 SV=1
MRPTTDAEVLERLYGADVPPFALLRRQRPDAPGPAPVELLFGDVDTGKSMGSSGSLDNAETAGSLDGAGPPGAAPGPGLLALLPFRHLAEHGLPCRDDGTPVRVLRVREHHVLPADAFTDPRLPGAGPLEWRDAGFTTTDTQYEDLVRGFVASDAARGGLNVLLRRDWTARLPDFRPAAAVDLFRRLLTAESGAYWTFVLHTGGARPLTLVGATPQGHVGVEGGRVVMNPLCGTYRLPPEGPDAGDLLAFLTDRKESEELATTVDAELAVLCGLSGPGVRVEGPFLRRMSHLLHTQCRISGPAAAGARETLARALFASTVVGSPYADACRAIHRHETTGRGYYGGVLALIGRDAAGAEELDSAAVIRTLVVDHRGEARLSVGATVGGRSSPEAEAAETRTKARTVLTALTAQPPAAAQTPAPRAPVLDAAVRDALDRRHAALSSFWTEGTVAPPVGAAPVLVLDPGGDPVAALAALLHLVTAVHGPAVVVRYDAPGAAETLVRHAGPVLLASGPGRPDDPGCVRMAALRRTAASLVRERPPGGPPVAGVGLGFQLLALAALPEARVVPRTGGTGLAREVEVFGRPVTAAFRNAHAIVSGPDGHEVVALGEQTVRGVQFRPESVLTTDGAGVLRRLLG

SEQ ID NO: 90711 - protein, 287 aa, Streptomyces achromogenes
  REGION 1..287: note = tr|C0LTT2|C0LTT2_STRAH TomK OS=Streptomyces achromogenes OX=67255 GN=tomK PE=4 SV=1
MIAYEIVDMFTDTPYGGCALGVVPDAAALSTADMLAVARETALTETAFVVPPALPGSTYGVRVMTPDGESPYGGHSAVGTASALVRAGRLAAGEAVQECGGRQLAVTAGADGSTLSVAGEPLLRPEWDPGPLLTACGLTDTDLTGTPRLTGFGPAFHVLPVGAKALTRAAADLTDPVWADCPDAVLVAWDQAGRTARVRVFAPGYGMPEDPACASAALGLGAWLAEEKALPGADGRHAYQVRQGEGLGRPATLSCTVDLTGGRATAATVHGRVTLTASGRMTPPGRP

SEQ ID NO: 90712 - protein, 206 aa, Streptomyces achromogenes
  REGION 1..206: note = tr|C0LTS6|C0LTS6_STRAH Putative phenol-2-monoxygenase reductase component OS=Streptomyces achromogenes OX=67255 GN=tomE PE=4 SV=1
MPERGGVDTAPRPIDPRALRSCMGQFATGVTVITCRRGDLVHGTTVNAFTSVSLDPPLALVALDRRSRAGALLRENGDYVVNILDASQRDLAMHFAGRPMAEPVPWVDEDGPHPRLAGTVAHLVCRPWQIHDGGDHTLHIGSVEEFESRPGRPLLFHGGAFPELAPDDSAVAWSLCLDGMNPVTHLPVPEEPDEPDRTDRTDRTGD

SEQ ID NO: 90713 - protein, 577 aa, Streptomyces achromogenes
  REGION 1..577: note = tr|C0LTT3|C0LTT3_STRAH Putative gamma-glutamyltransferase OS=Streptomyces achromogenes; OX = 67255 GN=tomL PE=4 SV=1
MLFRPELHGTRGAVASTHWLASQTGMSMLDRGGNAFDAATAAAFVIQVVEPHLNGPGGDVPILAHRSGTGSVDVVCGQGPMPAAATPEAFTERGLAVVPGSGLLPAVVPGAFGAWLRLLKEYGTLPLEDVLEPAIGYAEHGYPVLPKCAAMIGALTELFRDTWTESGRTYLRNGVAPRAGERVTNPALARTYRRLVAEAKASARDREGQIDAATEAFYTGFVAEAVDTYLAKAEEMDSTGRRNSGLLTGADLAAWRPRVERPLSLDHRDLTVHKAGPWSQGPVFLQQLALLADADLAATGPESSEYVHTVVEAAKLAFADREAWYGDPDHADVPVGALLDPAYTATRRALLGAEASYELRPGRPGGREPLLPPLHDESVAPADPAWLGELEQGIPAIMKLTAATGDTCCVSVTDAAGNMVVATPSGGWLKSSPVVPGLGFPLGTRGQMATLTPGHPNTVAPGKRPRNHAEPDLGPAGRPAVPGVRDAGAATSRTSGRSASSCTTPSTGRARRRRGGSRRAPSTPITCPPPSPRAGSGRAPSSWRAAGPRRRSRRSGGAGTRWTWCPTTRSARCAPPG

SEQ ID NO: 90714 - protein, 234 aa, Streptomyces achromogenes
  REGION 1..234: note = tr|C0LTS8|C0LTS8_STRAH Putative O-methyltransferase; OS = Streptomyces achromogenes OX=67255 GN=tomG PE=4 SV=1
MTQHQWSAVDGYFDTVLGDEDPALAAAAQAHIGFDLPDIGVSRSQGKLLHLLALVQRAERILEIGTFGGYSTIWLARALPPGGRLVTIEWERSFAETAAGHLARAGVADRVDQRVGRALDILPDLAKTGEQPFDLVFIDANKPDTPEYFDWALELSRPGGVIVVDNVVLGGAVADSDDPDGGVRGMRRFHEKVAAEPRVSATTIQTVGAKGYDGFTLAVILPAPDDRPEAPAPR

SEQ ID NO: 90715 - protein, 319 aa, Streptomyces achromogenes
  REGION 1..319: note = tr|C0LTT1|C0LTT1_STRAH Putative F-420 dependent reductase OS=Streptomyces achromogenes OX=67255 GN=tomJ; PE = 4 SV=1
MRHGVVILPERRWSRAREQWVLAERLGFDHAWTYDQLMWRWLRDEPWFACVPTFAAAAAVTSRITLGTMVATPTYRHPVTLAKEVMSLEDVAGGRFVCGLGAGAGGLDDRVVDPTERTPRERADRFAEFVEALDLLLTERSASYAGEHYAFDDVPVNPGCLTRPRVPFAVAATGPRGMRLAARRADTWVTAGPPGRFDALPYEKALPDIARQLDELDAACEATGRDPATLDRLLLTGALVGGVLDSVESFRDAVGRFGELGVTDLVVHWPRASFPYEGDPRVLEAVAEEVLLPGREAAPQTGPVSPRPGSAPSGEGERR

SEQ ID NO: 90716 - protein, 482 aa, Streptomyces achromogenes
  REGION 1..482: note = tr|C0LTT8|C0LTT8_STRAH Putative flavin-containing amine oxidase OS=Streptomyces achromogenes OX=67255; GN = tomQ PE=4 SV=1
MREATQTEVRRAFDSGLPGLRPPRSVIVVGAGLAGLAVAHELAARDCEVTVLEASDRAGGRAYTLREPFADGLHAEAGAMTLTPHCHYAMHYLRELGVETETADLFDTTFSYFARGRFFTPDPESVAEAGLGLHPHEKDLGVGGMIERYVSAVADGLQPDLNAPDWAVTQRLAPYDHLSVHEVLTERGASQAAIDLMEPLFLEMRGGDLKTASALSWLRHEASPHSLGNADPRWAKVKHGTDRFPQAFAERLKSRIHYRRPVVRVEQDAERARVTVLAHGRMQTLEAERVVVTVPFSAIRHIDFTDAGLTDAKHDVMRRVKYSSVVRVYLQMRRQFWPQRNASFSTDLPIRWIRDATPRLPGPRKILECLMTGWRARAVSVMTEEERLDFVLDEVERMLPGAREHYETSTSVCWDQRPYAEGAYILPERGHSALMPVIRRPEGRIHFAGDHAGFEPNGGSMTFALESAARTLVELGAAADAS

SEQ ID NO: 90717 - protein, 394 aa, Streptomyces achromogenes
  REGION 1..394: note = tr|C0LTT6|C0LTT6_STRAH Putative NADH-dependent flavin oxidoreductase OS=Streptomyces achromogenes; OX = 67255 GN=tomO PE=4 SV=1
MRIAIIGAGPGGLYTAALVKRLRPGSEIDVWEANAPDVTFGFGVVFSEGALGGIEAADPPLFAALGARCAHWSRIDVHHRGRTSRNGGYRFSAIGRRALLALLRARCADLGVTVRHGTRAPDADELARTYDLVVAADGVNSATRDARREEFGTETTRRGSRYLWLGTERAFTALTFAVAETDHGLLHAHAYPYAPGLSTFIAEVDDRVWEAAGFTEGDAGEPDASGRSDTDRLADLFADVLDGHDLRTNRSRWGRFVSVRNGRWSHGRIALLGDSAHTTHFSVGSGTRLAMEDALALALALDDHGSVPEALAAYEAERLPEVAAVQRTARTSQEWFEELDQYADLEPEAFNAHLITRSGRLTRDDLASWSPDRVERVRERFARADRSPRGAAVR

SEQ ID NO: 90718 - protein, 145 aa, Streptomyces achromogenes
  REGION 1..145: note = tr|C0LTS9|C0LTS9_STRAH Putative L-DOPA-2,3-dioxygenase OS=Streptomyces achromogenes; OX = 67255 GN=tomH PE=4 SV=1
MGVQTDDLDNCAAWYEEFFGCRTNWTLDTFSDLTLSRLPGITRLTEVTVAGLRFHLFERTGHDGAVPGANTRQFQHVCLATGSPEELRAWRERWFRLYESGRFTFAGDEEPTDIVIDDDGVQSCYVLDVNGLEFEFTYVPPGGDR

SEQ ID NO: 90719 - protein, 318 aa, Streptomyces achromogenes
  REGION 1..318: note = tr|C0LTT0|C0LTT0_STRAH Putative tyrosine hydroxylase; OS = Streptomyces achromogenes OX=67255 GN=tomI PE=4 SV=1
MSMRAPRTVTELPVPDGWDFGDFPYGLEPLTLPEPPTPGTETAISDVLPADTSRVRSARPCPRTGPALAAEEISHQLFWFRWITGHQATFAIWQLTAHALHQARSRSDPAPSLRAMTDLTDAYTAMLLYTSSCPTDVYGTVIRPSMYLQHRSFSGTWAPDFVPVRSLLRGKKTEWEGTPEAERLKKAVQMYHRVHAGVAAKLVPGGRSLLQESAAEVAPTRPETQALIYDHYFLTLRAPVDATELVGQLRSRLRAITQDVATNGLYPGLSPQEDVAFPEELRGDEVRQGYEEGFASVLGRIDAAAGQLRPRVLHHSAP

SEQ ID NO: 90720 - protein, 2559 aa, unidentified
  source 1..2559: note = Emericella nidulans
  REGION 1..2559: note = sp|Q5AR54|ASQK_EMENI Nonribosomal peptide synthetase asqK OS=Emericella nidulans (strain FGSC A4 / ATCC 38163 / CBS 112.46 / NRRL 194 / M139) OX=227321 GN=asqK PE=1SV=1
MAVSYTNFTNLPAKLYLVYRACTFTPLHAENLASNITQAMKQLLAQPDACVKDIDIFSPFNEITVSRWNAEIQEAPDASLLEVIRGHSRYRPSHTAIHAWDGTVSYSELDVTSTKWAIYLQSQGVKAGCLVPIMMDHSKWAVIGQLAILKAGGAFVPLDPGQPLFRLENIVRLTTESHISLSSPHLANRLHGLVETVLVISDERTESLPKANAHHDAADISPVVNNGPAYVLFTSGSTGRPKGCVVGYGALSDVVNQTTALKIGPDSRVLQFASYTYGMSLIEIYCTLAAGATICVPSEDDRLNALSSILLSMQVTWAILTPSTTISIADAVVCLNTLVVAGEALTMDRLHSLADKTEVIQAFGLTEWAGICCVSQRITSETDLRVIGRSHTARLRLVDPANYNRLAPVGAVAELLIEGPAMADGYLGDPEQTARAFPKTSTGGRFYRTGDLVQYAADGSLRYVSRKDSQVKIRGMRVELTEVEYQIRRAFPGVEEVVVEAAAPKNSSGIPILVAFLCPEDLSGLVCTIKETMKRSLPDYMRPSVYVPLEFIPKTISRKVDRKALRHLVQSSTRHELERYTQASLPSLVGPRTNIEQLVHELVADMLRLDPLSLGMRQNFISLGGDSVTAMLLVNKLRRKGYKITVAAILRAQSLLDVASLVHYPAGLEPSAQKSTPGDLKLVPRAIHRISDSGTVEQSFSQARIWFLQTLRPSSTWLLLPSATRLRGSLRVDALETAFSALVERHETLRTTFEDREGSGVQVVAPFHPYQLEIIEIPSGSDADLITALHGQQIRPMDLTKECWRATLFRLSPDEHVLNIVLHHIICDGWSFDIFLKTLQIYYAAALQGHSPLEGVEPLPIQYRDFSIWQRQNKARTSVEQLAYWVRQLDGSQPAEFLCDKKRPHMLSGKAGSQPVKIDVCLYHDVKRFCSMKHVTPFTVLFAAFRATHYRLTGASDATIGIPSVSRPQAELEELIGYFGNVQCIRTKVESCSSSFQLLVHQVQSSITAAFENQDVPFDQIVSKLLKDRDVSRHPLVQVAFILHTQAQFGKLRLEGLESEQLPLPHVSRLDLEFHLYPGEGGGDLQGEVLYSMDLFHAETINAMVLVFYDILREGIRKPDTSIDSLPFPGGYSILNERGLIYPQQSRSLSIIDLFDEQVRAQTDEVAVKDINGHLTYSELHKRSSMLSAWLKNSYSFAEETPVGVYASRSCESIVAILGILRAGLAYIRLDIDAPKARTEMILSCLPNCRLVLVASGLEPPRVCVQGVQFAYIADSCKETVTDVHDFLKTCTPPGPMSLAYIVFTSGTTGTPKGVMIEHHGVANLAKEPDIIAHAVNSRIASHMLNPSFDASGFEIYATLLNGGTLVCIDNSVVFDFPALGATFIQHGIRRAFMTPAILKQTLASCNSLLRMLDILYVGGDKLDPGDVAKVQRLTTGRVQIFNCYGPTENSIVSTKYRVPVDEEGVNGVPIGRSISNIGAYVVDRSLRLLPLGVLGELVVTGPALARGYIDPKHDIGRFIELDISEEVAPMRAYRTGDMVRYRPRDAQLEFFGRMDQQVKVRGYRVELAEIDNTLLLSPFISAAVTVARQDQELVSFVTVSDMASGFNDRAETEHVDSWLDVVEGEDYYGSVGTIEPHSLGADFLGWISMYDGEPIDKNDMREWLQDTITAILSCSPSSVLEIGTGSGMILFNIIGSIQKYVGLEPSPRAVDFVRRAVHWVPEAAGKVNIKCGTASDIGRLQDMGTLDLAVINSVAQYFPSLDYLRNTIKDLVRQGVKSIFLGDIRSYALYQEFQVSKVLRLYGRGLTITRFRQHMAEIARLEKELLVDPAFFTSLPAELPGMIEHVEIWPKRMKATNELSCYRYTAVLHVKRAEQPLLIREVKEISWADFQAKGWDYNSLSQMLEISDASTVLAVENIPFKKTIVERDMVRLLQELPEDTGSVSWSSNARGPKRALAPIDLFDVAKKTGWDIEISWARQRSQRGGLDAVFHRQGPRVLFRFPVDPYIPGACSNDPLSPQRNRLLEKHLLEYMSTKLPTYMVPKLIHVLDKMPINNIGKVDRHVLAQRAAITSATISESESLFRREIEPAFTSEIERAVWEEFTGVLGREVGVADSFFRNGGHSLMAIRLVSRINKRLSSALSVSELFRYPTVSGLAQHLQGLGALETRAVTVYAPFSLLDRPYDPSEVRLPPEADIVDVTPVTECQAWFLQCWSLVSHSFIIHGVLDVDRLRAACQAVVRHHPPLRTVFTEFQTQLVQAFDGVSLSAILYDIARAYGNSASPLSNAVPFSHHLHMCRSTRPDALAFWKAYLRDAVLTEVPRPEEVNATNEKPLEIIQQEALGEVSLPSTVDITFSTLVNAAIALALARLVQRNDVIFACVMTSRGVLAELAESVVGPCVNRCLLRVKVPDDSNPDSTALDFCRNLRDNQAQVSGHGHLGFRDVVENCTSWASLGVDVGRIAFVTHLPAETALETFSLTLLDSPVSYDSTNVTINPGNQILVRSAITDEQQACIQVLSSSNVMGAEKALFLANRILMIAQRLSVSVSGGRSPRLLELDK

SEQ ID NO: 90721 - protein, 566 aa, unidentified
  source 1..566: note = Emericella nidulans
  REGION 1..566: note = sp|Q5AR50|ASQG_EMENI FAD-dependent monooxygenase asqG OS=Emericella nidulans (strain FGSC A4 / ATCC 38163 / CBS 112.46 / NRRL 194 / M139) OX=227321 GN=asqG PE=3 SV=1
MAAFTVIIIGGSISGLTLANVLEKYGIKYILLEKRPSIGPQLGATVVVHPSGLHLLSQLGLRERVEELATPVELQKAIGPDGTFVLNIAATNQCDRTIADALSTGYMPMFIARQDLIKVLYDNLQDKFRVHASLGLRELEWAGDKVKVTTTDGTSVVGDIVVGADGANSRTRAEIWKIADVEDPSYGSQQLAKSIACTYRCVFGMVDDGDSSLARTAYLAFQYNRAYTYLPTDSGRAYFLAFFKNPAKTVNDAIPRYSDQDEDADVAAHANDIIVPGLTFGDLYKRRTRCTLVPLQEYLLDKCFYKRVVLIGDAVHKLNPITGRGANLAIEGAALLGDLIKHALEKSLQPTDEMLQTAFFTYQQCTKSRAPSQIDDAHRVQSLAALENPLLKFMSLKLLKRATADKLALGVAVDFSTGHSMRYLPQLPQRGMVPLNKDVVANPEHRPASSTVLWIILMLGMASLGAVWQKHQRAEEDQPIHGYTLLTLSTFYNLMILFASAVHGSLGRRAVNLSFSDDSGMVPFYAVGHAPDKYRPTTPSRRVGLLVPGPSYLGSGGHFNGLLEVA

SEQ ID NO: 90722 - protein, 416 aa, unidentified
  source 1..416: note = Emericella nidulans
  REGION 1..416: note = sp|Q5AR53|ASQJ_EMENI Iron/alpha-ketoglutarate-dependent dioxygenase asqJ; OS = Emericella nidulans (strain FGSC A4 / ATCC 38163 / CBS 112.46 / NRRL 194 / M139) OX=22732 1 GN=asqJ PE=1 SV=1
MGYPKAFTSSDSEPEPDLSRDLGNPVMGNPGVVSRSSSTVAQHSVRNNPTGPDGRLAGLWNARALLRFPAEVNGVRLDFKSVSSRRPTSRLSLLPYSLCSICPSSQATMTSKDHVKSQIPRLSAINDLHKIWPTVEEHGAAIIESFLSLDIVRRLNEEVDPFVKIEPIPAAKTKDHPNHVLSTTTRLVNVLAPISKAYREDVLNSKVLHRICSDAFHVYGDYWVLMGAVMELAPSNPAQPLHRDMRFSHPIVEYLKPDAPATSINFLVALSPFTAENGATHVILGSHKWQNLSNVSMDATVRALMNPGDALLITDSTIHCGGAETTGTETRRLLTITMGISQLTPLESNLAVPRPVIESLTPLAQRLLGWASQRSAAPRDIGLLTIRGNSIEKTMNLKAEQPLHDDEAEPLCRETI

SEQ ID NO: 90723 - protein, 575 aa, unidentified
  source 1..575: note = Emericella nidulans
  REGION 1..575: note = sp|Q5AR49|ASQF_EMENI FAD-linked oxidoreductase asqF; OS = Emericella nidulans (strain FGSC A4 / ATCC 38163 / CBS 112.46 / NRRL 194 / M139) OX=227321 GN=asqH PE=3 SV=1
MALFRLSAAIVVIFLYIWSPSQRIQCRCRSFERCWPSQQDWSALNNSISGHLVNPRPVAYVCHDPDFDHDACEHVRYMANNSLWRASMPGALQNTVWESSLVSTQTCLPFSAREQPCNQGRIPLYAAVVESKKEVQTAVRFARKYNLRLVIRNTGHDGAGSSSGPESFQIFTHRLNSILYHSNFCPGGSHSKYQTCAGPAVSIGAGVMFRDLYARGAERGFVVTGGDSGTVGAAGGFIQGGGVPAFMGYTWGLAVDNVLEFEVVVATGQLVIANADENADLFWALRGGGGGSFGIVVRVTMRTYPDLPTLKGELTVSGNRHDPSFWTEDIAGLLNALRAFNHLDAPGVFRLIQTSAKGSISAVLEVYLLNRTLAEDLTRMMGPILGTSRRKYNISPITVGKISSFANPNEPTITEFFGSTILSRNFFESPNGPLVMAKRMAAINLDPGDGLLTSNLGGRINNENSDLPLHPAWRSSAHLVSLVVNVDTSLRARERAMVRLTDELMPMLYAIDSSQWVSYSNMGNPNEPDFKERYWGMRNYRRLVSIKKKWDPKDLFIARVGVRSDGWDSEGMCRT

SEQ ID NO: 90724 - protein, 271 aa, unidentified
  source 1..271: note = Emericella nidulans
  REGION 1..271: note = sp|Q5AR48|ASQE_EMENI Short chain dehydrogenase asqE; OS = Emericella nidulans (strain FGSC A4 / ATCC 38163 / CBS 112.46 / NRRL 194 / M139) OX=227321 GN=asqE PE=3 SV=1
MTQAPWSLARKTAIVTGGSRGIGRAIAIHLTCKGLSKLAITYISNLAAAESTLDECRKNGLGMGIAIKADLLDPNIGHGLVQQALAGLETPTIDILVNNAAYLDPSEAASVEELTLPVFQKVMQANAFAPISIISATMPHLPVSGGRVINISSAAAKLANPGPVMTYGASKAALDSFTRSLAAEFATDKAATFNTVCVGPTVTDGFHVVGKLYPEGFMEELAKAFTAAQRVGMPQDIAFIVGFLAGEEARWVNGACMSANGGFREVLPALS

SEQ ID NO: 90725 - protein, 478 aa, unidentified
  source 1..478: note = Emericella nidulans
  REGION 1..478: note = sp|Q5AR55|ASQL_EMENI Cytochrome P450 monooxygenase asqL OS=Emericella nidulans (strain FGSC A4 / ATCC 38163 / CBS 112.46 / NRRL 194 / M139) OX=227321 GN=asqL PE=3 SV =1
MSNGAPFPLDYRGTRNYGPRFIPDRYSTFVSSARKSPRTPPGGSDQVVHVNDAGVYKRTFAVASPFPKSEFFYSSVGVGDAIGAMTDTKKHRVRRSILGPRLRAKAIAPYTPSLQKLVIACMDIMAGKARQGKVINLLRYTRALTVDVISDFTFGRPMGVVNEAEEMPDLLNDLEVFGRHFHILKHFPISRKLLDIIPESFARKLMPLPGFFELREKATTAVNEAVVERQAGKTISNNTDGASFLDLLLNQIDENPSVLVDEGCAFITGGSDTTGFTMENATYLILSHPHILQSLLQELDTSPHIRDTFDLDHILRLPFLTAIIKETLRLYTPAPSPLPRTVPAEGIDVHGHFLPGGTILTHSLYLIHHNPVLFADPKSFKPERWLGTQGKVLEQYYVPFSKGSRSCIGMALAYHEVYTYLSLLFSRFEMEIFETSQSDMDWREHFFVKRNGQLRIRIVRDRWTGEAFPTRAVEADLR

SEQ ID NO: 90726 - protein, 387 aa, unidentified
  source 1..387: note = Emericella nidulans
  REGION 1..387: note = sp|Q5AR47|ASQD_EMENI O-methyltransferase asqD; OS = Emericella nidulans (strain FGSC A4 / ATCC 38163 / CBS 112.46 / NRRL 194 / M139) OX=227321 GN=asqD PE=3 SV=1
MPVENEFPRELPNHSLISSKSQMTLQSIWLFRYPVSSIVCVQFPTDFPKPVLALSARIAIDLGLFTHIVQKCPITSRSLAAITGAEELLITRILRLLSTAHFAEETSTGTWAPTPITKTMAKEEIAAGYRFICHMVVPALQSAPGYFQHHGYSCPTDAKDGLVQHALQTKKTSFEYIMSDPHLLKDFNLFMGNGMGARKSWLDWYPVQSNILDGADADPDKALIVDVGGGKGHDLIAFHKRYPNAGRLVLEDLPAAFDDLGQYSMVIEKVPHDFLAEAQPVKGAKAYLCHHILHDWPDNYCVRILEGISSAMTPGYSKLLLHEGIVPEKGVCQFQAMSDIATMACNGGMERTREQWRTLLHMAGLQLIRFWNSPDEGGDGIIEAAKV

SEQ ID NO: 90727 - protein, 289 aa, unidentified
  source 1..289: note = Emericella nidulans
  REGION 1..289: note = sp|Q5AR57|ASQN_EMENI O-methyltransferase asqN; OS = Emericella nidulans (strain FGSC A4 / ATCC 38163 / CBS 112.46 / NRRL 194 / M139) OX=227321 GN=asqN PE=3 SV=1
MRVLVNKHVFMQPQPGHYAHTRMSMLLLKPKTKDLLSHRLDDVFRSASREADALAAARYREPERGAPTGFNLAFNTDKNFWEYITNDDPQRGERFARAMHAVNINSLDVIPRLYPFDSLVVDGGLIVDVGGGQGQVAKRILEYFPSSGLRCIVQDRYVVNASSPGPAVVEMQQHDFFEAQPVKGAAAYFFRHIFHDWPDKACAAILKQTARAMDKDRSRILICDQVLQDDVPAEASLLYDIDMMSLFGGKERSLAEWKYLIASAEESLHIVNVIFSTESEAAILDVRIK

SEQ ID NO: 90728 - protein, 1057 aa, unidentified
  source 1..1057: note = Emericella nidulans
  REGION 1..1057: note = sp|Q5AR52|ASQI_EMENI Tyrosinase family protein asqI; OS = Emericella nidulans (strain FGSC A4 / ATCC 38163 / CBS 112.46 / NRRL 194 / M139) OX=227321 GN=asqI PE=3 SV=1
MTCTLRDLNSLLEICCRCPAHNPSTAFAPTTKVRVSSDVRGIFALPVQKDHKPYNGLSPEHLETMKAVSLMLDAAGPKLEDGISKAKELLEERINPELMRDALGIYLTHSKDAQQRKIFPPPLKNHPFFSTKTRRPANVAGEICTADTLHGHALLSYWRDDYDLNDSHYYWHMVYRGAGGDNSKNVGDFDRHGEVFLYVHSQMVARYETESLCWSLPLVRPWNQYDDFLENGYAPISSLIEHYGGYPPFSTWYSIRNPDMPDTLNVTIPRARLEEWRDNIYAAIRKGQFETTSKDKPLVLTRDNCLNFVGGILDAQYPSLNKLLGGCSLDEERYGNLHNYGLGKFAEMAYRNKPGEKSPYGLTISNFGAPRDPCFWRWYKHLQYYGRLAATRYPQDITAHRAEVVLSNLVVRLQDRSSPHYLDGHITTFLGPPAVNFMESKAKLGHEPYEWNVQVKSCRRSPPSKENPQTLTLRLFIAAEDLMNDYHSWIEMDRATVQLTDESAITKVRLDTDSSVARKMGNYGEPDPRYASAVFRHGWPQNLMLPVGKVEGMPFVAFCIATDDGIPDPAPAPPFHHYHDPRGMGYPFNRAWTQLTEDSTGKASIRTIISNAELYPFITSTTFKIYRTTKFETKQIIQPTTVTWFNTIRGYFKDADRACMRSEYGYDLYNYDHVMLHADAILDATASKRMPLQMALTSSVLLTAALAHENGKVAYPFRLFNGTSSVEEISQQDQMDAPKIMPHVNATTFEWWYFDAVSTTSQNESLTVMFENMGPEGLGAPYPGGPLAVQISGSFSNGTAFTIITAATKGAVLEWGGGGVRGEWRGAGSSFAGKDHREYTVSIANPGIGYWSQFNPKCLKVSPPRYPCDVKERRASEQLIPNMYLANSQPDAIVEVDFNINESTLKFSGIGYHDLSWGSAPLESSVHSWYWGHGRLGRYSLVWFDVMGRDGKEYFSAWITEAGNVILCGCEPDSVLVRPWGENSGFPPGRGTPAPSGYSLRYDLGQNQIFIANFTREVNIIDNDFTKHIIGLFSGGFEGGEQYEGRAMADQFQFGDL

SEQ ID NO: 90729 - protein, 421 aa, unidentified
  source 1..421: note = Emericella nidulans
  REGION 1..421: note = sp|C8VJQ0|ASQH2_EMENI Prenyltransferase asqH2; OS = Emericella nidulans (strain FGSC A4 / ATCC 38163 / CBS 112.46 / NRRL 194 / M139) OX=227321 GN=asqH2 PE=3 SV=1
MDRNSFTAYGPATGAITESGEQENDHTKPHTWKTFAKYACFESEAERQWWNDSGALIARFLSLTNGDIDQQYQCLLFVRQVLIPALGPYPPVRRCCINTTEIGMELSLNFQGPGEPVFRVSIDPVSRMTGTPMDPLNINTVNNMITRLASMGIKGFDRTLHHHFTREFCMSEQSMQSYQRDSGEAIAWSQTILAFDFKGGDVVTKQYIWTRHAARASGLHPHSLIRRAISRVENQMHCSAAVELVLEYMETFNADIPVPFFSWDLVDPTQSRFKIYGISWQWSWAKAEEVCTLGGKLNHHDIDLLKKLWHILKLDEFTPTMGFTWNYEIRPGQPKPEVRLYLAICDRSDEEVAQAVVQWFELLGWHERAQSYPETLRYLHKTKSAHTWLSVTVSEKGVYTSLYYHPLGNGSDDFKIRENWF

SEQ ID NO: 90730 - protein, 443 aa, unidentified
  source 1..443: note = Emericella nidulans
  REGION 1..443: note = sp|Q5AR56|ASQM_EMENI Monooxygenase asqM; OS = Emericella nidulans (strain FGSC A4 / ATCC 38163 / CBS 112.46 / NRRL 194 / M139) OX=227321 GN=asqM PE=3 SV=1
MLRQSDFKIAIVGAGPAGLTLASRLTASSHSFDFTVFERRDKPDPSQVSVPCANLDLHRELGLRAIKGCGLYPQFLEVQSACTEQTRILDITGTVLSDTTGDGERPEISRNALIQLLLESIPEERIRWNTKVLDITPANCSRSKGKECLRFTDTSIATTPISEEIYDLIVGADGAWSRIRAAIPNAPKPIYSGVCYMTMYLRISREQYPDMDNMIGSGTFAVVGDNKLLLAQRAIHGTLRVCLFLHSKCLAAVRKELLASMHNHNTGPCPLLNPDDLINSLPSNPKTLQELLLTHDDFFASWSEDIKRLLRIAFESQVADAEIITRPMYMLPLVPYPYAHQRGIALVGDAASLMTPFAGRGVNVAMADSLDLAEELERLHLVTVSSSASTPAAIFADKLEGALSAYERTAYTRAKDAMELTWRNLCLSFSEKASDLFAAVMAS

SEQ ID NO: 90731 - protein, 451 aa, unidentified
  source 1..451: note = Emericella nidulans
  REGION 1..451: note = sp|C8VJQ1|ASQH1_EMENI Prenyltransferase asqH1; OS = Emericella nidulans (strain FGSC A4 / ATCC 38163 / CBS 112.46 / NRRL 194 / M139) OX=227321 GN=asqH1 PE=3 SV=1
MLCKTGGCVEGRAAEDQSTRKVHWGQEGSGQSPEARPRALDMISRLEPSRGPSHAHWWHIISPQLAVMLEETGYPVEKQLEILTFLYHWVIPYLAPVAAGNAASSCNWKSLLPSAIVPLEYSWKWDSSGKAREPEIRLTIEVFGELSGTQFDPLNQAPAMELLYRLSSILPGVNQILASHFRCKFFDHDNVKYMEEPRLDTLPRSTMLTYMTPRKLGQQGFAPLSEYVSAIQALGQASGRTLDTLTNFLSTSPEGVHLHPFGLAFDNVEPSSSRLKLYFFSNRTSYNSMREVLTLGGRIYSESYDMEEKLRTIYSLAQLLMGCPENNAEDADIPLLPITHSQHTAAERATLLSGFQYYFDVAPGADLPSVKFYIPVRKEHANDRAVGSALTGWFREQGRGKFCDNYMRMLERLAGGLELGECRGLHSFISCMIGGDGEIEVTSYLLPGSEA

SEQ ID NO: 90732 - protein, 347 aa, unidentified
  source 1..347: note = Emericella nidulans
  REGION 1..347: note = sp|Q5AR46|ASQC_EMENI Terpene cyclase asqC; OS = Emericella nidulans (strain FGSC A4 / ATCC 38163 / CBS 112.46 / NRRL 194 / M139) OX=227321 GN=asqC PE=3 SV=1
MRPAILAAFSTLPAAAKATYPFAPETFDGSYKDIGLPTIYDLSATQSTNYNGSWATGSWITSVSGGQYFVVSHYVNDGIHDVYRSSILDLSSLKYRYFFQAGNGSYTASPPSHLKAGVGKGNGFEGISNDNYTTMRVQSSHPNVTFDLTYHATTKPLINGGAGVVMLGASESKQWSLPACWTNGFLIVGDEQIPIDPKRSLTWYDRQWGTGGLTNWTWYGLHIPKTGHVLSIWTGDTDADRAAPITPVRFATVRNAYGAQTVCNITWIPDLSHIFHSDSTNKSYPLAWTVEIPSYDAIIKVKSRTENQLNTGSHGSEPEAYNGFVTFAGQFQGTETEGFGIVEIVYL

SEQ ID NO: 90733 - protein, 138 aa, unidentified
  source 1..138: note = Emericella nidulans
  REGION 1..138: note = sp|Q5AR45|ASQB_EMENI Isochorismatase-like protein asqB OS=Emericella nidulans (strain FGSC A4 / ATCC 38163 / CBS 112.46 / NRRL 194 / M139) OX=227321 GN=asqB PE=3 SV= 1
MSSQSFRQIIGLAPSTATITDSTLIIVDAQNEYAQGLLRVQEVDQSRKVIADLLSRYRYMAHVCVSTTARTGAELGYDVLVVRDGVSDRAIPGVEANVLVDVALKEVTDAFGTVIASGEIKGVIYPVIFLYLYIQDLI

SEQ ID NO: 90734 - protein, 565 aa, unidentified
  source 1..565: note = Emericella nidulans
  REGION 1..565: note = sp|Q5AR44|ASQA_EMENI Transcription factor asqA; OS = Emericella nidulans (strain FGSC A4 / ATCC 38163 / CBS 112.46 / NRRL 194 / M139) OX=227321 GN=asqA PE=4 SV=1
MPKRVLKGAAKRAREAKHARDAAKARRLSSFLNVRLNQEHIPHEILPNSASDDKLLDRPVTGADLFAPSSGPSSNSVYPSLLQEEYFWNYFWQTYHVSLCPILDDAQFKQHYQSLLIADGKGRKPSALVDIVVAACMQYHISTLPLGSQSGLVEGKDASVAGRWHYWRGQTLLTYELESLSISTLQCHVLCSIYLCGGSFHNMMDTAMAQAVRTAYILGLHRDLPSTLPEAKREMRRRLWWTVYFMDTRATMKLGRSFMLSESHSMPALCIDSLRVAASSGSTFVPADEDMTWLSFNLRQITLCRTFRAAYTSFHNTDFHLQEGQPIWDRPDALQAGAEIIAKHIPSLDAWCDSVPDALKLKRQDSNSRPFSTDGARVVLELSAPEWLQRQRMLLENTYHHVCVNLFRSMICFPYQPASQVHISENSLPGELATRCAAHAIALTKLTHQVLEETSLLDGWHEAFYCQWDAVMTLIGFVLAYPGSGTVTLEAKSAIHLAIAVSENFGFKFAVGTSASKIVQGLCAKSETLTANEYASAYIGASTQNANIYRIYGGQICGVIDWQNS

SEQ ID NO: 90735 - protein, 393 aa, unidentified
  source 1..393: note = Streptosporangium sibiricum
  REGION 1..393: note = tr|C0LTN1|C0LTN1_9ACTN Kynureninase; OS = Streptosporangium sibiricum OX=457432 GN=sibQ PE=3 SV=1
MESTRGWAEKEASADPLAVFAKDFLIPEGTLALNGNSLGPPAAAVPIALSNAVRQWSEHLIRGWWDDGWWDAPERVGDRIGRLMGAGPGQVVVGESASVQLFNALTAAVRLVPERRVLIADAGNFPTDRYLAASVARLLGLRLVETSMNDLPGALARHAGQVGAVLCGAVDFRTGELWDVPGLTTAIHQAGGVSVWDLSHAAGAVPVQADAAGVDLAVGCGYKYLSGGPGAPAFLYAARRHHHALDFAVTGWHGHADPFAMSASFVPADGITRARTGTPQILSLLALEAALEPLEAAGMAAVRAKSLRLADYLFALVADLDSVEIVTPRDPHRRGNHVTLRLPDAVAVAESLARRGVIVDERPPDLLRICLNGLYISWTDVYDAVTHLREVLR

SEQ ID NO: 90736 - protein, 261 aa, unidentified
  source 1..261: note = Streptosporangium sibiricum
  REGION 1..261: note = tr|C0LTN0|C0LTN0_9ACTN Tryptophan 2,3-dioxygenase; OS = Streptosporangium sibiricum OX=457432 GN=sibP PE=3 SV=1
MNDANPYVDYARMDALHALQLPVTDSPFEMQFILLSQVKELLFRMVHLELEQARTRICEDRPEAACRALSRAVRHQRTLIGCWESMNAMPVDEFLPFRDTLGEASGTQSYMYRLLEFTLGNRVSAMVRPTDFTRFPQLSAELQRPSLYDEVLRHLARTGLPVPEHILTRDVTGPYVPDDAVEDVWATVYRSPDKYRAAYDLAEQLLEVAYQFSRWRATHLLVVERMIGGKRGLGGTDGAAWLRKINEHRFFAELWTARSAL

SEQ ID NO: 90737 - protein, 331 aa, unidentified
  source 1..331: note = Streptosporangium sibiricum
  REGION 1..331: note = tr|C0LTM3|C0LTM3_9ACTN Glucose-1-phosphate thymidylyltransferase OS=Streptosporangium sibiricum; OX = 457432 GN=sibI PE=3 SV=1
MKGIIMAGGSGSRLKPLTGVLSKQLLPVYNKPMIYYPLSVLMLAGVTEVLIISSPQHLPLFRAMLGDGDRLGMRLTYAEQHRPAGIAEAFLIGAGHIGDDSVSLVLGDNIFHGPGFSALLREQARRVDGCTLFGYPVRDPHRYGVAVVDSGGHLTDIEEKPDRPRSELAVTGLYMYDNDVVGIARGLRPSARGELEVTDINRAYLERGKARLVQLGRGFVWLDTGTHEALLEAGQYVHILEQRQSVRIACLEEIAFRMGFIDRAALQRLGREHADTDYGAYLTEIADKPPATWSVSDGTSAPAAMTDPIGLPEHTGDTKPLVPTPAGLFRS

SEQ ID NO: 90738 - protein, 344 aa, unidentified
  source 1..344: note = Streptosporangium sibiricum
  REGION 1..344: note = tr|C0LTM6|C0LTM6_9ACTN SibL OS=Streptosporangium sibiricum OX=457432 GN=sibL PE=1 SV=1
MSSELSALVPVLFGHAAFQQLNAGCQLGLFELLHERGPLSAEEVADALRLPRRSADILLLGTTALGLSTVTDGGYRNGAPIGAAFRDGLWPVLRDIVQYQDKIAYQPAADYVESLRTGQNAGIRHFPGTTRDLYSRLAAVPGLEELFYRGMHAWSQLSNPVLLAQPDFTRVHRVLDVGGGDAVNAVALARAHPSLRVTVLDRPGALEVARKTIAEAGLEERVRTHAADIFTDSYPAGHDCVLFAHQLVIWSPEQNLTLLRKAYDAVEPGGRVLVFNAFTDDDRTGPLYAALDNVYFTTLPFRHSTIHRWADCESWLREAGFTDVGRTAPPGWTPHGVVSGSRPR

SEQ ID NO: 90739 - protein, 596 aa, unidentified
  source 1..596: note = Streptosporangium sibiricum
  REGION 1..596: note = tr|C0LTL9|C0LTL9_9ACTN SibE OS=Streptosporangium sibiricum OX=457432 GN=sibE PE=3 SV=1
MSALPSLRVPTLPVAFEAAARAAGDRIALEYGSSSITYRELDAAANRFARRLLREGVTPGSRVGLHMTRCLELYIAMIGLLKAGAVVVPLNPSHPVTVRRSVVREADLPLTLRDVPAGLSSVTVERDVHELLAAGADLDDTSPGLCTDPESTAFILFTSGSTGRPRGVRIAHRGIARVASYNGEVEVRPDDCFLQLAPYSFAASTTDIWLSLLHGARVVVLPSQLPSLPKLAHTIKEYGVTFLNLPGGLMNLLIDAHPEAFAKVRTVIVSGDFPSAPHLARVMKAVPGTVYNAFGCTENSALTAVHPMTPEDLQLGVVPIGLPLPGVGLHVLGEDMTPCAPGEVGEMHISGAGLAQGYLGLPEETAAKFPTVDGVRMLRTGDWARTTPAGEVVLVGRTDQMVKIRGFRVELREVELAADQSGLVEKAVVRAVDATDGQKELVLFCTTATGEAPSIEALLADLKSRLPDYMLPARVHHLAELPVNVNGKLDRMALREPRAVLVEPDGTAQQQPVVRDIIATTVTRLLAVVTGREPIGVSDSFLASGANSLQVIQLAASLHDVMGVDVRPEDIFQLDNAESLAGHIRALRQGHREVPA

SEQ ID NO: 90740 - protein, 351 aa, unidentified
  source 1..351: note = Streptosporangium sibiricum
  REGION 1..351: note = tr|C0LTM1|C0LTM1_9ACTN SibG OS=Streptosporangium sibiricum OX=457432 GN=sibG PE=4 SV=1
MRILVNGGGPAGMAFAMFAARSGRGDEITVRDWTGPGDTYGFGVILPPAAVEVFRDAEPDLADELNSHITAWDRLSVHRHGRTASIPAPRLGAMDRRTLLKVLRRRCAERGVRFEHGAVDPALGDHDLVVAADGARSVTRRHRAAAFGTTTREIGPAYIWLGADRALEHLRFLVAETPDGPAVAHAYPYSPDRSTFLVEADGAPPPAVLAEWFAGPLGGARLLENRSRWSRFQEIHNRTWSAGNVVLIGDAAHTAHYSIGSGTRLALDDARALADALCAQPRLADALKGYEDARRPIVEHTQRIGRLSATWFTRLPDVPMERLLDDLATRGGQISWRDLATEGSGAVPVRG

SEQ ID NO: 90741 - protein, 476 aa, unidentified
  source 1..476: note = Streptosporangium sibiricum
  REGION 1..476: note = tr|C0LTL7|C0LTL7_9ACTN SibC OS=Streptosporangium sibiricum OX=457432 GN=sibC PE=4 SV=1
MSATPPKAVIVGAGPVGCLLAVELRRRDFDVEIYEKCDADTVLRPGVGRSFNLTLTHRGLSVLHPWLRDRVYEIGSVLRQRIVHHTDGTLTRQPYGISDDQHLLSVPRRELQRILLAEARASGARMFFGHSCVGADAHRGEAMFVDPRGTVRHAAGDILIGCDGANSALRYELSKGGARMQVHQRYIAHGHVELTLTPEGSAALAPDGMHLWPRSDHFLQAQPNRDGSTTTTLFMPVGNEGGELRFRSLTGTEAVREHFEREYPDIAPHLPLAADEVIRARPALLKVVDCAPYNYGRAVLVGDSAHTIVPFFGQGINCSFEDADILCRLLDKYWRSGVDRHEAIRAAGAEFSEQRVAAGQAISQLSMDNLHELSKSIDDAGFHRRQRLERMLHEYRPAEFTQLYQLVAFTRTPYDEIIRRSRIDKLALDTLCELYDPDTEAETIISSYAEVRRGLDEHDTREPALALTATPAKGEH

SEQ ID NO: 90742 - protein, 298 aa, unidentified
  source 1..298: note = Streptosporangium sibiricum
  REGION 1..298: note = tr|C0LTL5|C0LTL5_9ACTN SibA OS=Streptosporangium sibiricum OX=457432 GN=sibA PE=4 SV=1
MAEGLRDDVARHNYSVDIATTGRAVLEAFTSYDLILLDTDLPDLDGVSVSRAIRQTSMIPIIAFASADEVDQVLLLETGCDDCIERPYRSRDVVARINAVLRRTAPITSPVPFASPVPFASPVPFASPAADLDSVVRARPRGVPPLAAVGEDLVLGEEQGQLIRVGNRLVIDPALREARLGGELLTLTRKEYELLHLLASAPGRIFDRTELMIKIWDYPAGKPVNAQASRTIDTHVSSLRRKLGHRDWIANLRGVGFRLDVPGPRRGGRQAPSRLVAADPEEAPRHGWIRAEGAIESA

SEQ ID NO: 90743 - protein, 299 aa, unidentified
  source 1..299: note = Streptosporangium sibiricum
  REGION 1..299: note = tr|C0LTN3|C0LTN3_9ACTN SibS OS=Streptosporangium sibiricum OX=457432 GN=sibS PE=4 SV=1
MTVSFEIVGIFGTEPGGGSPLAVVHDAGGLSTEQMRWIAGRLRADETVFVLPPATSGATYRVRVFTAAGESPYGGHSAVGTAVSLVRRGDIRPGTVVQECGGRQLTLRAGADRAEFAATGTPRVESLPADPVLDAIGLAAADLAGEPVLAGFGPLFRMVPVRQEALGRARPDFPAMTRHELPEIFLFAWDGPAASAEARLFAPGWAIPRDPACASVALAFGAWLADRQGRPDAPRPFLIRQGAELGRPALLSGTLGAGSGDAEITVTVGGPAPGELAGQITASPPDASQPNVLRTSSAA

SEQ ID NO: 90744 - protein, 389 aa, unidentified
  source 1..389: note = Streptosporangium sibiricum
  REGION 1..389: note = tr|C0LTM8|C0LTM8_9ACTN SibN OS=Streptosporangium sibiricum OX=457432 GN=sibN PE=3 SV=1
MTVAPTVPFHVPHTARHQAEYMSSALVSGDLDGNGDYSARASALIQRITGAGQVLLTPSCTAALEIAALLLDLAPGDEVVMPSFTFAPTASAFALRGAVPVFVDCHPETLNLDEKALEEAITERTRAIIAVHYAGVACEMDEIMRIAERHGIPVLEDNAHGLGASYRDRPLGSIGRLAAQSFHATKNVHSAKGGALLVNDDGMVDRATIIRDRGTNRHQYFLGQVDKYRWVDLGSSYILPELLAALLAAQLEEHDAVQRQRRAVWYRYHEGLAEWAGDQRVQLPAVPADRVHSAHLYHLVLPEPADRAAFLNHLRARGVTATIHFVPLHNSPAGQRYGRTVPGGCPITEHVADRLVRLPLHTGLTPAQVEQVVDAVVSFRTSESRGSQP

SEQ ID NO: 90745 - protein, 193 aa, unidentified
  source 1..193: note = Streptosporangium sibiricum
  REGION 1..193: note = tr|C0LTM4|C0LTM4_9ACTN SibJ OS=Streptosporangium sibiricum OX=457432 GN=sibJ PE=4 SV=1
MKTRELAVDGALELTLPVFPDERGMFCPIYQDGALSVPFPIRRSALSVNRAGAARGIHYAPGGDGPTKIVHCVSGSAIDFVVDVRVGSPTFGHWDTILLDADLPRAVYLPAGLGHGFVALTGGTVVSYLMTTAYQAGDEQPVSLLDPALGLPLPAAQELVMSPADRAAPTLAEALGRGLLPPYRTGPAEEDET

SEQ ID NO: 90746 - protein, 1503 aa, unidentified
  source 1..1503: note = Streptosporangium sibiricum
  REGION 1..1503: note = tr|C0LTL8|C0LTL8_9ACTN SibD OS=Streptosporangium sibiricum OX=457432 GN=sibD PE=4 SV=1
MSDVLLTVVRDRWRTSSGRPEILAAELADILGRAVDPEDIAAAGSPESLVARLTTGSVPAVGTPGTELRSAPAWPATPGQTGIWYLSEFGEARTAYNSPILLRVPGALDPEALRAALEHVVRRHESLRTTFEMRDGTLTQLVAAEPRFGFRTAAVGSAGEAGRLAAELAAEHLDLTDGPLLRAVCVDVGGDNTILLVSVHHAVFDGFSWSVLLSEWLTAYRRAAAGERLPHDAPPVQFRQAVAALRPAGEAGLAYWTGHLAGVPVLDLPLDHPAGPRGRVAAASVHTRLTASEVVRLRRQAASHGATPAVALLAAYALLMHRHTGQPDLTVGLPVSLRDRSADQHVIGHLVNTVVLRHRVTPGSTGTDLLTATRDEVRAALAHKNVPFEQIVERLAPDRADGRPPLFQTMVTIMPAERRDLRHLGLGADAWQHLGSTPKFDLALVVEEAAEHLGLTFEYDPAVLGHDTVTRMAARFRTVLAALMDDPDQRVHDLPWIPEDELRELRAAWSGPVDERPARQSLPQMFEARVREHPDRTAVRSSAGELTYRQLNSAANRLARALRRHGARRGTRVALRLERGPDAVVGLLAVLKSGASFVPLDPAYPPQRLALMLRDANPEVLLVHGGSPVEVPAGTTVVDFGSVELPADDTDPAGQRAADDEMYVVYTSGSTGRPKGVIINDITITNLVHRQDDLSGLGETARTLQYMSISFDVSFMEIFCTLCAGGTVVVPDEQMRTDLRRLAGHLREQRVNRIFLPYVALQELATVLTREDIHLPDLAEVYTTGEALVVTAQIRDMFRRCTPAVLINAYGPSEAHLVSARRLPGDPSSWPERPAIGEVAGNVRAYVLDQQQRPVPFGVRGELYVGGPVVGRGYLHLPDQTRERFRPDPYAGRPGGRMYRTGDLVMLTAPAGLVHLGRADEQIKIRGYRVEPGEVEGALNDLPGITASAVVAAELEAGGRDLVAFVCTGSTLIDPRQVRDRLRASLPAYMVPSRIVTLDRLPVAPSGKTDRAALAALASRSPDRPADVSDDRPLGETEQRVAALWAGLLPGGGIGPDTDFYSAGGHSLLAVRLRQAVEDEFGMELPLSALLATPTVAGMAARVDAVRAGHDEVDGPDLWADTRLLDGLRLGTTRAADARTSRTVLLTGVTGFLGSYLLRVLQQTGHEVHCLVRADGEEQGRARIAEACRRYRVDANLADVRVVAGDLALERFGLHPADYEDLAGRIGAVYHAAAHINFSAPYASVRSSNVDGFVRIAEFCADTVLKPLHHMSTLAVFSPAEPPRTVDEDSIPSTAEGLGISYAQSKWVAERLALAARAHGVPVTVYRIGRIGPDSVTGACRTDDFFWLQIKSFVRLGVVPADLGRPVDLLPVDMVADAVVRLGGSARARNRTVHIFHPTGIDWQTTLAALAAAGHHPRPVTTEEWLAALETAPAGADGNSLASLVPLFREGVMNLSEHRYVNDRTVRDLAALGLEIPAAEPGWITSMIEYFTETGQLAPTSAP

SEQ ID NO: 90747 - protein, 770 aa, unidentified
  source 1..770: note = Streptosporangium sibiricum
  REGION 1..770: note = tr|C0LTM0|C0LTM0_9ACTN SibF OS=Streptosporangium sibiricum OX=457432 GN=sibF PE=4 SV=1
MAADRQHIVVTGARTNNLKGIDLRIPLGKLTVVTGVSGSGKSSLVFGTIAVESQRQLNEVFPAFIRNRLPRYERPEFELIENLSPAIVVDQKAVGGGNRSTVGTMTEVSPILRVMFSRYGEPSAGPSNFYSFNDPQGMCPECEGLGATLQLDVERLLDKNLSLNEGAIQHPNFAVGTNYWKRYAQVARFEAGKARGADLEPLFDANKPLARYTKSEMDLLLYGEGFQTTRPDEFNNVAVNDYEGLVLRFTRRFVKPGLDSLKDKERKATEKVVTEQVCPACEGARLSPAAVASRIDGHNIADFCAMEIGDLVTELVRLEKRWPGPVVPAALASLRRIESVGLGYLTLNRPTRTLSGGEGQRLKTVRHLGSSLTGMTYIFDEPSVGLHAHDVDRLNQLLTALRDKGNTVLIVEHNRDVIEIADHVIDVGPGPGASGGEIIFTGTVKQLAASDTLTGRSFKALPGLKPETRTPTGSLPIRKATLHNLRGVDVDFPTGVLTVVTGVAGSGKSTLASKVFAAEYPYAIVLDQSAVGINPRSTPATYTGVWDLVRKQFAVAHHVDISLFSFNAKGACPECKGRGTITTDLAFMDPVTVVCEVCGGTRYRQDVLEHRIDGLNIAEVLDLTVEESREWFDDRAIVKRLEPLREVGLGYLTLGRPLSMLSGGERQRLKLADRLHESGSVYLFDEPTTGLHMADVQNLLALLDRLVDAGNTVIAIEHDLDVVKHSDWVIDIGPGAGEHGGQVVFTGTPADMAEKGRTRTADYLRAALPR

SEQ ID NO: 90748 - protein, 491 aa, unidentified
  source 1..491: note = Streptosporangium sibiricum
  REGION 1..491: note = tr|C0LTN7|C0LTN7_9ACTN SibW OS=Streptosporangium sibiricum OX=457432 GN=sibW PE=4 SV=1
MISRRGFLGASAVAVVGFDLFGHRWVTAAEAAAGPSFAKAPPLSGELAVDAAAREAVGTDLGNIVHRRPAAVLRPGSAADIAAMIRFCSAHGIPVSARGQAHTTYGQGLSTGLVIEMRHLNRIHRINDRFAEVDAGILWKDLAGAAYEQSPPLTPPVLTGYTGLSVGGTLSVGGVGGIVGGLRTGLQVDHVQELEVVTGAGVIERCSRQRKPDLFDAVLGGLGQCAVITKAVIQLVPAPQRARNFVLQYSDNAAFFRDLRLLIDRTQVDHVYAEFTAPDPEPVYKIHATAFYDAPATPDAAAILAGVSAVAVVEDTPYLDYVLTIDRLIDFLRETEDWDRLVKPWYDVWLSDSTIEQYLAELVPSLTPRDIGPYGAGLIYPQRRELTTRPAPRRPAPDGSSFVYVVDVNTVSSAPGPDPAFSAEMLERNKRLYARARRSYGAVLYPIGSVPFTEQDWRDHYGSAWPAFRAAKRRYDPAGVLTSGPGIFRRS

SEQ ID NO: 90749 - protein, 392 aa, unidentified
  source 1..392: note = Streptosporangium sibiricum
  REGION 1..392: note = tr|C0LTM2|C0LTM2_9ACTN SibH OS=Streptosporangium sibiricum OX=457432 GN=sibH PE=4 SV=1
MRYLFTAMPVASHFMPLVPLAHAALSGGHDVLVATSGPATRTAVAAGLVTADAGGSRQARQPYDDLLDMLARGEAGVAPDDPTSLAVHGRQFGEVGARQLDDIVTIARDWRADAVVYLGIHAAALVAARAAGIPAVLHGYGTPLPTFEPSLEHLAPHAARFGVDTVTEAEFEIDVLPPSLANFTDVPTTIGKPQHTLAMRYGCFNNGGTLPHWALRRGDVPRVVATCGSAPAMTLDGRLYRDIVTATERLGAELILLTADADLPELPSELPPHVRSERWLPLRALLNTTDAVVHHGGSGTFLSTLAAGLPQVTLPMPGTVNMTNARSLTARGTGPTVNLSEVSPDTLTAALEAVLRDPGPRRAAEEVAAEMATMPTTASVINRISQLIQDSR

SEQ ID NO: 90750 - protein, 250 aa, unidentified
  source 1..250: note = Streptosporangium sibiricum
  REGION 1..250: note = tr|C0LTN2|C0LTN2_9ACTN SibR OS=Streptosporangium sibiricum OX=457432 GN=sibR PE=4 SV=1
MVARCAAPRCPVTVTAGSPLCPACVARLGRDLRRLPSLYQQCGERHPHSTAPAWQAPPRAGRPGPTVPLHAGATDARHAIETVLASWAGMIAQATGAAPPRRVVADLARFLLARFGLLQRHPAAGDLAAEVAVLVADAERVLRPERGRPLGGCVVPGCKGRLTGGTQPQNLQVTCDADAAHRWDGPEVLMMRDGTPAPAEAVWLDASAITALWGLSRGSVYRLASENGWRRRRRDGRTHYAADDVRSTLG

SEQ ID NO: 90751 - protein, 245 aa, unidentified
  source 1..245: note = Streptosporangium sibiricum
  REGION 1..245: note = tr|C0LTM9|C0LTM9_9ACTN SibO OS=Streptosporangium sibiricum OX=457432 GN=sibO PE=4 SV=1
MNRLGLTMGEEAYEHALRSDDTREFELLDRTWTQLSGVVGGEYNYATGLFASSLPYDGVHSMLEMGCGCGVAAVLGALAGVPRVTALDINPAAVRTAQLNAERHGVADRVTALVSDLFSAVPEDTAYDLIFWNSPFIQVPADHALDSDLAYHFFDPGYTMHERFLREARRRLTPAGRLFLGFSFAMGSGDRLHDAAAAAGLDVRIHVQESFAAAPEELGTSPVYREHAGDDARVHIDFTLLELVR

SEQ ID NO: 90752 - protein, 416 aa, unidentified
  source 1..416: note = Streptosporangium sibiricum
  REGION 1..416: note = tr|C0LTM7|C0LTM7_9ACTN SibM OS=Streptosporangium sibiricum OX=457432 GN=sibM PE=4 SV=1
MTTEIAKSVTTCRVCGAADWQEVISFGSVPLANAYLDKPGPEEAYPLELISCRSCRLLSLTAVVDPQALYRDYAYVTSESETMTHHMRDVVRLCRERIDAGGLVVELGSNTGNQLQLFQQAGHPVLGVDPAQNLAAIAERRGVPTVADYFNEKVATAIAGEHGRASLILGRHVFAHIDDLADVLRGVKALLTDDGLFAIEVPYACDLLERVAFDTIYHEHLSYFLISTLDRLFTRHGLRAIDVRRLAVHGGSVLVTAARMGSRWETDERVGELIAYEKSERLDTDARYEQFAARVHALRRELTELVRKEAANGKRVAGYGASAKGTTLLNICELTSTEVRFCTDTTPQKQGRFVPGTQIPIVAPGDVSEQPDLYLLLAWNYAEEILQREAAFLDAGGAFIIPVPEPAVYARQKVRQ

SEQ ID NO: 90753 - protein, 292 aa, unidentified
  source 1..292: note = Streptosporangium sibiricum
  REGION 1..292: note = tr|C0LTN4|C0LTN4_9ACTN SibT OS=Streptosporangium sibiricum OX=457432 GN=sibT PE=4 SV=1
MRHGVLILPEHHWPRARNRWMLAERLGFAHAWTYDHLMWRWFAERPWFSAVPTLAAAAAVTGRIGLGTLVASPHFRHPVSFAKELVSLDDIAPGRMVCGVGAGAPGFDESLQGGPVLSPRERADRFDEFTSLLHRLLHEERTTYTGRWFSAHDAVVLPKPRAMPLAVAAAGPRGMALAARHADIWVTSGPPNVFEQDRFDRVAPLLKAQTAALDEACAAIGRDPAGLRRLLLTDGAVGGVLESTGSYADASGLFADLGFTDLVVHWPRPAPPFEGDEQVLLDFASAHLQGDG

SEQ ID NO: 90754 - protein, 273 aa, unidentified
  source 1..273: note = Streptosporangium sibiricum
  REGION 1..273: note = tr|C0LTM5|C0LTM5_9ACTN SibK OS=Streptosporangium sibiricum OX=457432 GN=sibK PE=4 SV=1
MTSVRTELDRQLSPSTVARDAPVTLARYRLRSQAARRDLVHHADLRYGSHPAEVLHHFPPRRPGSPLLIFIHGGHWQESSKEDACFPAPGLIAAGFGYLALGYGLAPQRSLPEMTASVRRGLTWVLDHAEELGGRPDAVFAAGSSAGAHLAAMAADLPLAGLFLLSGLYDLSPVIGSYVNNALGLTAEEAARLSPMLRPPPAVPVLLAVGEHETREYHGQQRRYAAALRLAATPVTELVVAGRDHFDLPFDLGDPATVLGAAVVRAAQPKGAP

SEQ ID NO: 90755 - protein, 151 aa, unidentified
  source 1..151: note = Streptosporangium sibiricum
  REGION 1..151: note = tr|C0LTN6|C0LTN6_9ACTN SibV OS=Streptosporangium sibiricum OX=457432 GN=sibV PE=4 SV=1
MPLRAHHVGVQTADLDNSVRWYTEFFGARVAWELDRFSDLTLSRLPGIRRLVEVSMEGLCVHLIDRAGHTGQLPPAEGYQFQHVCLQVSEPEQLEVLRDHWIELYESGRFSFARTDPPTDIVVDADGVSSVYLFDPNGLEYELTHVPDGPR

SEQ ID NO: 90756 - protein, 336 aa, unidentified
  source 1..336: note = Streptosporangium sibiricum
  REGION 1..336: note = tr|C0LTP0|C0LTP0_9ACTN SibZ OS=Streptosporangium sibiricum OX=457432 GN=sibZ PE=4 SV=1
MREWQDFQLSGMPQLISAMHLCQAVHALAETGLLAELRAGLSREHIDSLSGLDPELVRGFLSYLVVRGVVDDLPDGYRLSRRGELLTTDVSLARLGVYAGAYGAVTARTGDLLTGRARYGVDVHRDGGALGRHCATLFEVFHSETIRTATERRGIRTMLDAGCGAGQLLIDACRRDERLTGIGLDNSPEAIAVAEKLAREHGVADRIQFFVADAFEPETWPEACRDADAMCIVSALHEHFRHGEDAVIELLRRYAGALPALEMLLVGEPELLYEDRENHDDFLLVHVLTGQGLPRDRNAWLPVFEKAGLRCEHIYMRPGAGPRLCFYDLNPRTQRH

SEQ ID NO: 90757 - protein, 390 aa, unidentified
  source 1..390: note = Streptosporangium sibiricum
  REGION 1..390: note = tr|C0LTN8|C0LTN8_9ACTN SibX OS=Streptosporangium sibiricum OX=457432 GN=sibX PE=4 SV=1
MSGEDHQRQGLLHAALDRLRCRLPSLAAATVQAVRRHGDAPPAPAADGALRTIVHHAALWVLEAVDDRTDPAHIGEAGLLNRTHHSLTAPLVSQACNDMCRRTWQALVQEATAEEGQLLLERSARYLAASTELVEHVLTEQSAAAGSETRLREMATRLLNGERPPASLSAEGGTADTYAVLAVPTQRPGEIAGIAARHHWLSAEQPGAVTVLVPVGGPGRRADGRARARHAFHALCPQHPVGLGLPADVEGIPAAVADAWEAVATLRRLGRHEPGLFQLDDVLLEAMLCRAPELAARLAGRLRPVTRCQPYLLDTLAAFLDNDGDRRELARQLYIHPNTLNHRLRRVSELTGLSLANAGDLCLLKAALTAWQVTNAAAGAGTGRPAFRAA

SEQ ID NO: 90758 - protein, 597 aa, unidentified
  source 1..597: note = Streptosporangium sibiricum
  REGION 1..597: note = tr|C0LTN9|C0LTN9_9ACTN SibY OS=Streptosporangium sibiricum OX=457432 GN=sibY PE=4 SV=1
MLSRPELHGTYGAVSSTHWLASAAGAAMFDRGGNAFDAAVAAAFVIQVVEPHVNGPAAEAPIMVHDASSGEVTVVAGQGPMPRRASIETFRRLGLGYVPGSGLLAACVPGAFGAWMTVLLRHGRLRLADVLEPAIGYAEGGYPLLAPAAAIIEALTPLFREEWTETGRIYLDRGAAPRAGSLVRNPDLAATFRRIVREASAPGRARESEIEAAVDVFYEGFVAEAIDAFMCSAEMLDATGKRHRGLLRGEDLAAWRPAVEAPVTAGYRGRLIHKPGPWTQGPVFLQQLALLEGFDLGSMRHLGPDHIHTVVEAAKLAFGDREAWYGDPGHVDVPLRELLSPGYTEQRRALIGDRAAAGLRPGSPLGREPWLPPLPDETAPLEPEWMNQLAHGIPAVVRRTSQNRDTTCISATDRDGNMVVATQSGGWFSSSPAVPGLGFALSTRGQMAWLVEGHPNSLAPGKRPRTTLSPTIVQDGSGEPLLAFGTPGGDQQDQWTLNFALNSIDFAMTPQAAVEALTFHTGHVPSSFMPRQTPPPVVVVEEGLPAETIAALEGRGHRLQQVAARSLGKVCATGHTGDGLVFAAASQRGQQAYGIVR

SEQ ID NO: 90759 - protein, 317 aa, unidentified
  source 1..317: note = Streptosporangium sibiricum
  REGION 1..317: note = tr|C0LTN5|C0LTN5_9ACTN SibU OS=Streptosporangium sibiricum OX=457432 GN=sibU PE=4 SV=1
MTGVMLLDDRVQAWDFGDFPYGLEPLTMPLAGKARALAGVVAPEVPPCDVDHVCAELRLLDGGTRDAGRFDLASPATYEQLFWFRWITGHQVTFALWRLMGALLAEHPTDGAPPGPDVLERLETYVHGYGAMLLYSGSCPRDLYSTLIRPAMFRQHRGFSGTWAPDFHQVRSLLRGRSRGWLRERSAAGVRAAVEAHCAIHEEVAARLVPEGRSLLQESIGEAPVRPSQRTAVLYDNFFMTLRAPISDGTVAVQLLRRLRAVALDLAANGLYPLGRDAAVDETPAAAAMVAHGERRLGRVVTAIASYAAEVAWRQGT

SEQ ID NO: 90760 - protein, 93 aa, unidentified
  source 1..93: note = Streptosporangium sibiricum
  REGION 1..93: note = tr|C0LTL6|C0LTL6_9ACTN SibB OS=Streptosporangium sibiricum OX=457432 GN=sibB PE=4 SV=1
MTRTASPVTVMSTPSPRTFVPVSIVQSGLARMLCIFCSVGRAQNHRAPSCQAPATGVTWGVAGGRTVVSQYNWAPSSRVRVASQSSGSAPGWL

SEQ ID NO: 90761 - DNA, 44 bp, Anoxybacillus sp.
  source 1..44: mol_type = unassigned DNA
  misc_feature 1..44: note = JRLC01000047.1/9312-9355 Anoxybacillus sp. BCO1 LR68_contig000047, whole genome shotgun sequence.
gtaggagaggttctagaacaccctctataaaaaactagggatcg

SEQ ID NO: 90762 - DNA, 45 bp, Clostridium chauvoei
  source 1..45: mol_type = unassigned DNA
  misc_feature 1..45: note = CBML010000006.1/1314853-1314809 Clostridium chauvoei JF4335, WGS project CBML01000000 data, contig: 00001
ctgggagaggttcgtaaccatccctctataaaaaactaggaatat

SEQ ID NO: 90763 - DNA, 45 bp, unidentified
  source 1..45: mol_type = unassigned DNA; note = Fictibacillus arsenicus
  misc_feature 1..45: note = CP016761.1/3921388-3921432 Fictibacillus arsenicus strain G25-54, complete genome.
tatttcgcggttcgaaaactcccgcgttaacaaaactaggaggaa

SEQ ID NO: 90764 - DNA, 48 bp, Carnobacterium divergens
  source 1..48: mol_type = unassigned DNA
  misc_feature 1..48: note = JQBS01000003.1/57754-57801 Carnobacterium divergens DSM 20623 NODE_8, whole genome shotgun sequence.
ataaacgtggttcattcataccatcccacgaaaaaaaactaggaggaa

SEQ ID NO: 90765 - DNA, 66 bp, Pasteurella multocida
  source 1..66: mol_type = unassigned DNA
  misc_feature 1..66: note = AE004439.1/209165-209100 Pasteurella multocida subsp. multocida str. Pm70, complete genome.
ttcatagtggttcgtaaccctcccacttgaacaaccaacaattgttcgaaacaaaactaggaaaat

SEQ ID NO: 90766 - DNA, 45 bp, Clostridium fallax
  source 1..45: mol_type = unassigned DNA
  misc_feature 1..45: note = FQVM01000030.1/26156-26200 Clostridium fallax strain DSM 2631 genome assembly, contig: Ga0131101_130
tgtgaagaggttcgtaaccatccctctataaaaaactaggaattt

SEQ ID NO: 90767 - DNA, 45 bp, Bacillus selenatarsenatis
  source 1..45: mol_type = unassigned DNA
  misc_feature 1..45: note = BASE01000106.1/10275-10319 Bacillus selenatarsenatis SF-1 DNA, contig: BSSF00106.
aataacgtggttcgtaaccatcccacgtaaaaaaactaggagaga

SEQ ID NO: 90768 - DNA, 46 bp, unidentified
  source 1..46: mol_type = unassigned DNA; note = Gilliamella apicola
  misc_feature 1..46: note = CP007445.1/2046578-2046623 Gilliamella apicola strain wkB1, complete genome.
ctaaccgtggttcgtaatccatcccacgaaaaaaaactaggaatta

SEQ ID NO: 90769 - DNA, 44 bp, Bacillus pseudalcaliphilus
  source 1..44: mol_type = unassigned DNA
  misc_feature 1..44: note = LFJO01000005.1/1361271-1361228 Bacillus pseudalcaliphilus strain DSM 8725 super9, whole genome shotgun sequence.
ctacaagaggttcgcaaactccctctataaaaaactatacaagg

SEQ ID NO: 90770 - DNA, 46 bp, Clostridium botulinum
  source 1..46: mol_type = unassigned DNA
  misc_feature 1..46: note = CP001056.1/3123202-3123157 Clostridium botulinum B str. Eklund 17B, complete genome.
gtgggagaggttcgaagaccatccctctataaaaaactaggcaatt

SEQ ID NO: 90771 - DNA, 46 bp, unidentified
  source 1..46: mol_type = unassigned DNA; note = Gilliamella sp.
  misc_feature 1..46: note = FMAQ01000013.1/12884-12839 Gilliamella sp. R-53248 genome assembly, contig: Ga0061081_113
ctaaccgtggttcgtaacccatcccacgtaaaaaaactaggaatat

SEQ ID NO: 90772 - DNA, 45 bp, Bacillus marisflavi
  source 1..45: mol_type = unassigned DNA
  misc_feature 1..45: note = LGUE01000001.1/1495503-1495459 Bacillus marisflavi strain JCM 11544 scaffold1, whole genome shotgun sequence.
acccgagaggttctagcacaaccctctataaaaaactaaggaaaa

SEQ ID NO: 90773 - DNA, 47 bp, Staphylococcus haemolyticus
  source 1..47: mol_type = unassigned DNA
  misc_feature 1..47: note = AP006716.1/2221258-2221304 Staphylococcus haemolyticus JCSC1435 DNA, complete genome.
tcaaaagaggttcctagctgaaaccctctataaaaaactagacaata

SEQ ID NO: 90774 - DNA, 47 bp, Bacillus sp.
  source 1..47: mol_type = unassigned DNA
  misc_feature 1..47: note = ABCF01000007.1/14091-14045 Bacillus sp. SG-1 1101501000790, whole genome shotgun sequence.
gcaggagaggttcatagcccaaaccctctataaaaaactatggatga

SEQ ID NO: 90775 - DNA, 45 bp, Ruminococcus sp.
  source 1..45: mol_type = unassigned DNA
  misc_feature 1..45: note = LFIL01000002.1/32430-32386 Ruminococcus sp. DSM 100440 contig00002, whole genome shotgun sequence.
cccggactggttcgtgaacttcccagtataaaaaaccaagtatct

SEQ ID NO: 90776 - DNA, 47 bp, unidentified
  source 1..47: mol_type = unassigned DNA; note = Lysinibacillus odysseyi
  misc_feature 1..47: note = JPVP01000056.1/195877-195831 Lysinibacillus odysseyi 34hs-1 = NBRC 100172 contig5, whole genome shotgun sequence.
acgggagaggttcatagctgataccctctataaaaaactatggaaac

SEQ ID NO: 90777 - DNA, 44 bp, Paenibacillus sp.
  source 1..44: mol_type = unassigned DNA
  misc_feature 1..44: note = CP009282.1/4222420-4222377 Paenibacillus sp. FSL R5-0912, complete genome.
gcaggagaggttcgcaaactccctctataaaaaactaagaccgc

SEQ ID NO: 90778 - DNA, 45 bp, Bacillus cereus
  source 1..45: mol_type = unassigned DNA
  misc_feature 1..45: note = AE016877.1/1559911-1559955 Bacillus cereus ATCC 14579, complete genome.
aataacgtggttcgaaaccatcccacgtaaaaaaactaaggagat

SEQ ID NO: 90779 - DNA, 45 bp, Granulicatella adiacens
  source 1..45: mol_type = unassigned DNA
  misc_feature 1..45: note = GG694016.1/216936-216892 Granulicatella adiacens ATCC 49175 genomic scaffold SCAFFOLD2, whole genome shotgun sequence.
gccgatgaggttcgaaaccatccctcaataaaaaactaggaggca

SEQ ID NO: 90780 - DNA, 44 bp, Bacillus thuringiensis
  source 1..44: mol_type = unassigned DNA
  misc_feature 1..44: note = AAJM01000029.1/17647-17690 Bacillus thuringiensis serovar israelensis ATCC 35646 sq1905, whole genome shotgun sequence.
gcgggagaggttcgcgaactccctctataaaaaactatggaaac

SEQ ID NO: 90781 - DNA, 45 bp, Avibacterium paragallinarum
  source 1..45: mol_type = unassigned DNA
  misc_feature 1..45: note = CBMK010000031.1/173196-173240 Avibacterium paragallinarum JF4211, WGS project CBMK01000000 data, contig: 20-24-9
attatcgtggttcgcaaccctcccacgcaaaaaaactaggacaat

SEQ ID NO: 90782 - DNA, 44 bp, Paenibacillus sp.
  source 1..44: mol_type = unassigned DNA
  misc_feature 1..44: note = CP009284.1/3824304-3824261 Paenibacillus sp. FSL R7-0331, complete genome.
gcaggagaggttcgcgaactccctctataaaaaactatttagta

SEQ ID NO: 90783 - DNA, 45 bp, unidentified
  source 1..45: mol_type = unassigned DNA; note = [Haemophilus] felis
  misc_feature 1..45: note = MUYB01000002.1/172-216 [Haemophilus] felis strain CCUG 31170 31170T_ctg_0000002, whole genome shotgun sequence.
cggtacgtggttcgcaaccctcccacgcaaaaaaactaaggacac

SEQ ID NO: 90784 - DNA, 45 bp, Wohlfahrtiimonas chitiniclastica
  source 1..45: mol_type = unassigned DNA
  misc_feature 1..45: note = KB372778.1/431567-431523 Wohlfahrtiimonas chitiniclastica SH04 genomic scaffold scaffold_00001, whole genome shotgun sequence.
cgcttcgtggttcgcaaacctcccacgcaaaaaaactaaggaatt

SEQ ID NO: 90785 - DNA, 45 bp, Bacillus atrophaeus
  source 1..45: mol_type = unassigned DNA
  misc_feature 1..45: note = CP002207.1/900902-900946 Bacillus atrophaeus 1942, complete genome.
gcgggagaggttctagctacaccctctataaaaaactaaggacga

SEQ ID NO: 90786 - DNA, 45 bp, unidentified
  source 1..45: mol_type = unassigned DNA; note = Bacillus glycinifermentans
  misc_feature 1..45: note = LECW02000036.1/117956-118000 Bacillus glycinifermentans strain GO-13 contig_41, whole genome shotgun sequence.
gcgggagaggttctagcaaaaccctctataaaaaactaaggaaag

SEQ ID NO: 90787 - DNA, 45 bp, Oceanobacillus oncorhynchi
  source 1..45: mol_type = unassigned DNA
  misc_feature 1..45: note = CDGG01000001.1/2184112-2184068 Oceanobacillus oncorhynchi strain Oc5 genome assembly, contig: CONTIG000001
ttcaacgtggttcgtaaccatcccacgctaaaaaactaggaggaa

SEQ ID NO: 90788 - DNA, 45 bp, Enterococcus faecalis
  source 1..45: mol_type = unassigned DNA
  misc_feature 1..45: note = KE351687.1/62481-62437 Enterococcus faecalis 13-SD-W-01 genomic scaffold Scaffold953, whole genome shotgun sequence.
cttggactggttcgtaaacttcccaggataaaaaactaagtatct

SEQ ID NO: 90789 - DNA, 45 bp, Listeria grayi
  source 1..45: mol_type = unassigned DNA
  misc_feature 1..45: note = GL538352.1/285633-285677 Listeria grayi DSM 20601 genomic scaffold SCAFFOLD1, whole genome shotgun sequence.
ataacagtggttcgagaacctcccactcaaaaaaactaaggagaa

SEQ ID NO: 90790 - DNA, 45 bp, Lactobacillus amylophilus
  source 1..45: mol_type = unassigned DNA
  misc_feature 1..45: note = AYYS01000009.1/134720-134676 Lactobacillus amylophilus DSM 20533 = JCM 1125 strain DSM 20533 NODE_16, whole genome shotgun sequence.
cacactgtggttcgtaaccaccccacaataaaaaactaaggagaa

SEQ ID NO: 90791 - DNA, 45 bp, Lactobacillus saniviri
  source 1..45: mol_type = unassigned DNA
  misc_feature 1..45: note = JQCE01000020.1/23922-23878 Lactobacillus saniviri JCM 17471 = DSM 24301 NODE_21, whole genome shotgun sequence.
aaacatgtggttcgcaaccatcccacataaaaaaactaggagaga

SEQ ID NO: 90792 - DNA, 44 bp, Bacillus smithii
  source 1..44: mol_type = unassigned DNA
  misc_feature 1..44: note = CP012024.1/1122365-1122408 Bacillus smithii strain DSM 4216, complete genome.
gcgggagaggttcgcgaactccctctataaaaaactaaggagag

SEQ ID NO: 90793 - DNA, 45 bp, Sporosarcina sp.
  source 1..45: mol_type = unassigned DNA
  misc_feature 1..45: note = LPUT01000012.1/69668-69624 Sporosarcina sp. HYO08 scaffold_2, whole genome shotgun sequence.
cacaacgtggttcgaaaccatcccacgataaaaaactaaggagaa

SEQ ID NO: 90794 - DNA, 44 bp, Lactobacillus hayakitensis
  source 1..44: mol_type = unassigned DNA
  misc_feature 1..44: note = AZGD01000037.1/74702-74745 Lactobacillus hayakitensis DSM 18933 = JCM 14209 strain DSM 18933 NODE_93, whole genome shotgun sequence.
atgatactggttcgaaaaatcccagttaaaaaaactagaaagag

SEQ ID NO: 90795 - DNA, 44 bp, Thermobacillus composti
  source 1..44: mol_type = unassigned DNA
  misc_feature 1..44: note = CP003255.1/4203402-4203445 Thermobacillus composti KWC4, complete genome.
ccgggagaggttcgcgaactccctctataaaaaactaaggctga

SEQ ID NO: 90796 - DNA, 45 bp, Bacillus sp.
  source 1..45: mol_type = unassigned DNA
  misc_feature 1..45: note = KQ758686.1/14716-14760 Bacillus sp. SGD-V-76 genomic scaffold Scaffold60, whole genome shotgun sequence.
taagacgtggttcggaaccatcccacgtaaaaaaactaaggagag

SEQ ID NO: 90797 - DNA, 45 bp, unidentified
  source 1..45: mol_type = unassigned DNA; note = Rodentibacter rarus
  misc_feature 1..45: note = MLHJ01000085.1/12689-12733 Rodentibacter rarus strain CCUG17206 contig_85, whole genome shotgun sequence.
aacgttgtagttcgcaaacctcctacataaaaaaactaggtacaa

SEQ ID NO: 90798 - DNA, 44 bp, Paenibacillus sp.; identical to SEQ ID NO: 90777
  source 1..44: mol_type = unassigned DNA
  misc_feature 1..44: note = JUEI01000026.1/31987-31944 Paenibacillus sp. IHB B 3415 contig_026, whole genome shotgun sequence.

SEQ ID NO: 90799 - DNA, 45 bp, Sediminibacillus halophilus
  source 1..45: mol_type = unassigned DNA
  misc_feature 1..45: note = FNHF01000001.1/1070030-1069986 Sediminibacillus halophilus strain CGMCC 1.6199 genome assembly, contig: Ga0079860_101
taataagaggttctagctacaccctctataaaaaactaaggaatg

SEQ ID NO: 90800 - DNA, 45 bp, Viridibacillus arenosi
  source 1..45: mol_type = unassigned DNA
  misc_feature 1..45: note = ASQA01000009.1/152539-152583 Viridibacillus arenosi FSL R5-213 Contig009, whole genome shotgun sequence.
tataacgtggttcgtaaccatcccacgaaaaaaaactagggggaa

SEQ ID NO: 90801 - DNA, 45 bp, Lactobacillus composti
  source 1..45: mol_type = unassigned DNA
  misc_feature 1..45: note = AZGA01000088.1/168616-168660 Lactobacillus composti DSM 18527 = JCM 14202 strain DSM 18527 NODE_225, whole genome shotgun sequence.
ttcggactggttcgcaaacttcccaggataaaaaaccaagtactt

SEQ ID NO: 90802 - DNA, 45 bp, Clostridium sp.
  source 1..45: mol_type = unassigned DNA
  misc_feature 1..45: note = LBBT01000340.1/3369-3325 Clostridium sp. JC272 contig366, whole genome shotgun sequence.
ttgggacttgttcgagaacctccaagtataaaaaactaaggtaat

SEQ ID NO: 90803 - DNA, 46 bp, Kingella kingae
  source 1..46: mol_type = unassigned DNA
  misc_feature 1..46: note = GL891964.1/12204-12249 Kingella kingae ATCC 23330 genomic scaffold SCAFFOLD6, whole genome shotgun sequence.
ccaaccgcggttcgtaaccatcccgcgataacaaaactaggaaaat

SEQ ID NO: 90804 - DNA, 45 bp, Pontibacillus yanchengensis
  source 1..45: mol_type = unassigned DNA
  misc_feature 1..45: note = AVBF01000064.1/3980-3936 Pontibacillus yanchengensis Y32 contig26, whole genome shotgun sequence.
acgggagaggttctagctcaaccctctataaaaaactaagggaca

SEQ ID NO: 90805 - DNA, 46 bp, Cardiobacterium valvarum
  source 1..46: mol_type = unassigned DNA
  misc_feature 1..46: note = JH417937.1/1845-1800 Cardiobacterium valvarum F0432 genomic scaffold Scfld509, whole genome shotgun sequence.
gcccctgtggttcgcaacccatcccacataaaaaaactaggaaacc

SEQ ID NO: 90806 - DNA, 45 bp, unidentified
  source 1..45: mol_type = unassigned DNA; note = Gilliamella sp.
  misc_feature 1..45: note = NAST01000006.1/24717-24673 Gilliamella sp. N-G2 NODE_6, whole genome shotgun sequence.
aattacgtggttcgtgaacctcccacgctaaaaaactaaggaaaa

SEQ ID NO: 90807 - DNA, 45 bp, Halobacillus halophilus
  source 1..45: mol_type = unassigned DNA
  misc_feature 1..45: note = HE717023.1/1018382-1018338 Halobacillus halophilus DSM 2266 complete genome
acaggagaggttctagctacaccctctataaaaaactaaggatgg

SEQ ID NO: 90808 - DNA, 47 bp, Caryophanon tenue
  source 1..47: mol_type = unassigned DNA
  misc_feature 1..47: note = MASJ01000002.1/47355-47401 Caryophanon tenue strain DSM 14152 DSM_14152_R1_001_contig_10, whole genome shotgun sequence.
ttgggagaggttcatagcaaataccctctataaaaaactatggaaac

SEQ ID NO: 90809 - DNA, 44 bp, Bacillus sp.
  source 1..44: mol_type = unassigned DNA
  misc_feature 1..44: note = LFZU01000001.1/3225829-3225786 Bacillus sp. FJAT-27231 Scaffold1, whole genome shotgun sequence.
gcaggagaggttcgcgaactccctctataaaaaactatgagaga

SEQ ID NO: 90810 - DNA, 45 bp, unidentified
  source 1..45: mol_type = unassigned DNA; note = Lysinibacillus manganicus
  misc_feature 1..45: note = JPVN01000002.1/167760-167804 Lysinibacillus manganicus DSM 26584 contig2, whole genome shotgun sequence.
cgcaccgtggttcgtaaccatcccacgaaaaaaaactaaggagaa

SEQ ID NO: 90811 - DNA, 47 bp, Lysinibacillus sphaericus; identical to SEQ ID NO: 90776
  source 1..47: mol_type = unassigned DNA
  misc_feature 1..47: note = KB933398.1/2664014-2663968 Lysinibacillus sphaericus OT4b.31 genomic scaffold Ls31_scaffold1, whole genome shotgun sequence.

SEQ ID NO: 90812 - DNA, 44 bp, Paenibacillus rhizosphaerae
  source 1..44: mol_type = unassigned DNA
  misc_feature 1..44: note = MRTP01000001.1/1332557-1332600 Paenibacillus rhizosphaerae strain FSL R5-0378 NODE_1_length_2436333_cov_1.26966_ID_3960, whole genome shotgun sequence.
gcgggagaggttcgcgaactccctctataaaaaactaagactgc

SEQ ID NO: 90813 - DNA, 46 bp, Bhargavaea cecembensis
  source 1..46: mol_type = unassigned DNA
  misc_feature 1..46: note = AOFT01000008.1/83034-83079 Bhargavaea cecembensis DSE10 contig000008, whole genome shotgun sequence.
ccccgcgcggttcgtaaccatcccgcgataacaaaactaagggaga

SEQ ID NO: 90814 - DNA, 44 bp, unidentified
  source 1..44: mol_type = unassigned DNA; note = Domibacillus antri
  misc_feature 1..44: note = MSDU01000005.1/56076-56119 Domibacillus antri strain XD80 WGS_contig_5, whole genome shotgun sequence.
gcgggagaggttcgcgaactccctctataaaaaactaagaaaaa

SEQ ID NO: 90815 - DNA, 45 bp, Lautropia mirabilis
  source 1..45: mol_type = unassigned DNA
  misc_feature 1..45: note = GL636062.1/2737320-2737276 Lautropia mirabilis ATCC 51599 genomic scaffold SCAFFOLD1, whole genome shotgun sequence.
gcccccgtggttcgaaaaacgcccacgttaaaaaactagggaaga

SEQ ID NO: 90816 - DNA, 45 bp, unidentified
  source 1..45: mol_type = unassigned DNA; note = Clostridiales bacterium
  misc_feature 1..45: note = KV441331.1/115204-115248 Clostridiales bacterium KLE1615 genomic scaffold Scaffold383, whole genome shotgun sequence.
tgcctactggttcgaaaccctcccagtataaaaaactaggctgat

SEQ ID NO: 90817 - DNA, 47 bp, Sediminibacillus halophilus
  source 1..47: mol_type = unassigned DNA
  misc_feature 1..47: note = FNHF01000001.1/994012-993966 Sediminibacillus halophilus strain CGMCC 1.6199 genome assembly, contig: Ga0079860_101
tcgggagaggttcttagcgtaaaccctctataaaaaactaaggacat

SEQ ID NO: 90818 - DNA, 48 bp, Lactobacillus animalis
  source 1..48: mol_type = unassigned DNA
  misc_feature 1..48: note = JMHU01000001.1/73363-73316 Lactobacillus animalis strain 381-IL-28 NODE_1_length_157441_cov_30.456526, whole genome shotgun sequence.
atattggtggttcgcaaccatcccaccgtaataaaaaactaggagaga

SEQ ID NO: 90819 - DNA, 44 bp, Lactobacillus composti
  source 1..44: mol_type = unassigned DNA
  misc_feature 1..44: note = AZGA01000002.1/310318-310275 Lactobacillus composti DSM 18527 = JCM 14202 strain DSM 18527 NODE_6, whole genome shotgun sequence.
agcgtggtggttcgcaaaatcccacctaaaaaaactaaggagga

SEQ ID NO: 90820 - DNA, 45 bp, Garciella nitratireducens
  source 1..45: mol_type = unassigned DNA
  misc_feature 1..45: note = FUWV01000007.1/5007-5051 Garciella nitratireducens DSM 15102 genome assembly, contig: BP36DRAFT_scaffold00007.7
cttggactggttcgaaaccatcccagtataaaaaactaaggagat

SEQ ID NO: 90821 - DNA, 45 bp, Bacillus cereus
  source 1..45: mol_type = unassigned DNA
  misc_feature 1..45: note = CP000764.1/1428621-1428665 Bacillus cereus subsp. cytotoxis NVH 391-98, complete genome.
aatcacgtggttcgaaaccatcccacgtaaaaaaactaaggagtt

SEQ ID NO: 90822 - DNA, 45 bp, unidentified
  source 1..45: mol_type = unassigned DNA; note = Gilliamella apicola
  misc_feature 1..45: note = JAIO01000005.1/34660-34616 Gilliamella apicola SCGC AB-598-P17 SCG598P17_12932, whole genome shotgun sequence.
aattacgtggttcgtaaacctcccacgctaaaaaactaaggaaaa

SEQ ID NO: 90823 - DNA, 47 bp, unidentified; identical to SEQ ID NO: 90776
  source 1..47: mol_type = unassigned DNA; note = Lysinibacillus massiliensis
  misc_feature 1..47: note = JPVQ01000012.1/7277-7323 Lysinibacillus massiliensis 4400831 = CIP 108448 = CCUG 49529 contig12, whole genome shotgun sequence.

SEQ ID NO: 90824 - DNA, 45 bp, Lactobacillus sakei
  source 1..45: mol_type = unassigned DNA
  misc_feature 1..45: note = CR936503.1/1598027-1597983 Lactobacillus sakei strain 23K complete genome.
aaaaacgtggttcgtaaccatcccacgctaaaaaactaggaggat

SEQ ID NO: 90825 - DNA, 45 bp, unidentified
  source 1..45: mol_type = unassigned DNA; note = Rodentibacter heylii
  misc_feature 1..45: note = MLAA01000010.1/28914-28870 Rodentibacter heylii strain 1998236014 contig_10, whole genome shotgun sequence.
atgcttgtagttcgcaaacctcctacataaaaaaactaggtacat

SEQ ID NO: 90826 - DNA, 45 bp, unidentified
  source 1..45: mol_type = unassigned DNA; note = Epulopiscium sp.
  misc_feature 1..45: note = LJDB01000044.1/32218-32174 Epulopiscium sp. SCG-B11WGA-EpuloA1 SCGB11WGA_4, whole genome shotgun sequence.
ctaacactggttcgagagcctcccagaataaaaaactaaggtatt

SEQ ID NO: 90827 - DNA, 44 bp, Anoxybacillus flavithermus; identical to SEQ ID NO: 90761
  source 1..44: mol_type = unassigned DNA
  misc_feature 1..44: note = JPZO01000112.1/14590-14633 Anoxybacillus flavithermus strain 25 c115, whole genome shotgun sequence.

SEQ ID NO: 90828 - DNA, 45 bp, unidentified
  source 1..45: mol_type = unassigned DNA; note = Jeotgalibacillus malaysiensis
  misc_feature 1..45: note = CP009416.1/1720011-1720055 Jeotgalibacillus malaysiensis strain D5, complete genome.
ggtaaagaggttcgcgaccatccctctataaaaaactaggccaat

SEQ ID NO: 90829 - DNA, 45 bp, Paenibacillus larvae
  source 1..45: mol_type = unassigned DNA
  misc_feature 1..45: note = CP003355.1/533952-533996 Paenibacillus larvae subsp. larvae DSM 25430, complete genome.
atgggagaggttcgagatcttccctctataaaaaactaaggagct

SEQ ID NO: 90830 - DNA, 46 bp, Neisseria zoodegmatis
  source 1..46: mol_type = unassigned DNA
  misc_feature 1..46: note = MTBM01000012.1/18898-18943 Neisseria zoodegmatis strain DSM 21643 NODE_12_length_84918_cov_34.1738_ID_23, whole genome shotgun sequence.
ttcaacgcggttcgaaatcctcccgcgataccaaaactaggaacca

SEQ ID NO: 90831 - DNA, 45 bp, Weissella paramesenteroides
  source 1..45: mol_type = unassigned DNA
  misc_feature 1..45: note = GG697128.1/280499-280455 Weissella paramesenteroides ATCC 33313 genomic scaffold SCAFFOLD1, whole genome shotgun sequence.
atatcagtggttcgtaaccatcccactcaaaaaaactaggagtag

SEQ ID NO: 90832 - DNA, 45 bp, Bacillus amyloliquefaciens; identical to SEQ ID NO: 90785
  source 1..45: mol_type = unassigned DNA
  misc_feature 1..45: note = CP000560.1/1312567-1312611 Bacillus amyloliquefaciens FZB42, complete genome.

SEQ ID NO: 90833 - DNA, 44 bp, Paenibacillus sp.
  source 1..44: mol_type = unassigned DNA
  misc_feature 1..44: note = LMSP01000023.1/394075-394118 Paenibacillus sp. Soil787 contig_3, whole genome shotgun sequence.
atacaagaggttcgcaaactccctctctaaaaaactatgaaatg

SEQ ID NO: 90834 - DNA, 46 bp, unidentified
  source 1..46: mol_type = unassigned DNA; note = Gilliamella sp.
  misc_feature 1..46: note = NAST01000024.1/27869-27824 Gilliamella sp. N-G2 NODE_24, whole genome shotgun sequence.
ctaaccgtggttcgtaatccatcccacgaaaaaaaactaggaaaga

SEQ ID NO: 90835 - DNA, 46 bp, Haemophilus parasuis
  source 1..46: mol_type = unassigned DNA
  misc_feature 1..46: note = CP001321.1/1370609-1370564 Haemophilus parasuis SH0165, complete genome.
tcaaccgtggttcgcaaacctcccacgcaaaaaaaactaaggaaca

SEQ ID NO: 90836 - DNA, 44 bp, Paenibacillus sp.
  source 1..44: mol_type = unassigned DNA
  misc_feature 1..44: note = LMRV01000024.1/145689-145732 Paenibacillus sp. Soil522 contig_12, whole genome shotgun sequence.
ccgggagaggttcgcgaactccctctataaaaaactatgcgaaa

SEQ ID NO: 90837 - DNA, 32 bp, Paenibacillus uliginis
  source 1..32: mol_type = unassigned DNA
  misc_feature 1..32: note = LT840184.1/4831446-4831477 Paenibacillus uliginis N3/975 genome assembly, chromosome: I
agaggttcgtgaactccctctataaaaaacta

SEQ ID NO: 90838 - DNA, 45 bp, Tetragenococcus muriaticus
  source 1..45: mol_type = unassigned DNA
  misc_feature 1..45: note = JPVT01000171.1/1502-1546 Tetragenococcus muriaticus 3MR10-3 WGS_Sequence171_159, whole genome shotgun sequence.
cctggactggttcggaaacttcccagaataaaaaaccaagaactt

SEQ ID NO: 90839 - DNA, 47 bp, Enterococcus hirae
  source 1..47: mol_type = unassigned DNA
  misc_feature 1..47: note = CP003504.1/520705-520659 Enterococcus hirae ATCC 9790, complete genome.
acagctgcggttcatcaaccatcccgcattaaaaaaactaggagaaa

SEQ ID NO: 90840 - DNA, 63 bp, unidentified
  source 1..63: mol_type = unassigned DNA; note = Pelistega indica
  misc_feature 1..63: note = AYSV01000107.1/4017-3955 Pelistega indica strain HM-7 Contig59, whole genome shotgun sequence.
agtgccgtggttcgaaatcctcccacgcagtaccgttaagtactaaaacaaaactaaggaaaa

SEQ ID NO: 90841 - DNA, 45 bp, unidentified
  source 1..45: mol_type = unassigned DNA; note = [Clostridium] sordellii
  misc_feature 1..45: note = LN681234.1/1955506-1955462 [Clostridium] sordellii strain JGS6382 genome assembly, chromosome: 1
ctaggacttgttcgagaacctccaagtataaaaaactaaggtatt

SEQ ID NO: 90842 - DNA, 45 bp, Dorea longicatena
  source 1..45: mol_type = unassigned DNA
  misc_feature 1..45: note = FR898326.1/7582-7538 Dorea longicatena CAG:42 genomic scaffold, scf110
tttgaactggttcgcaaacctcccagtataaaaaactaggcaaag

SEQ ID NO: 90843 - DNA, 45 bp, Lactobacillus fuchuensis
  source 1..45: mol_type = unassigned DNA
  misc_feature 1..45: note = AZEX01000025.1/4706-4662 Lactobacillus fuchuensis DSM 14340 = JCM 11249 strain DSM 14340 NODE_30, whole genome shotgun sequence.
gaaaacgtggttcgtaaccatcccacgtaaaaaaactaggaggca

SEQ ID NO: 90844 - DNA, 47 bp, Catenibacterium sp.
  source 1..47: mol_type = unassigned DNA
  misc_feature 1..47: note = FR898786.1/632-586 Catenibacterium sp. CAG:290 genomic scaffold, scf47
tgagaactggttcgagagccaaacccagtataaaaaactaagaacat

SEQ ID NO: 90845 - DNA, 44 bp, Paenibacillus sp.
  source 1..44: mol_type = unassigned DNA
  misc_feature 1..44: note = BBIW01000006.1/256902-256945 Paenibacillus sp. TCA20 DNA, contig: PspTCA2nb06.
atgggagaggttcgcgaactccctctataaaaaactatacagat

SEQ ID NO: 90846 - DNA, 44 bp, Bacillus hemicellulosilyticus
  source 1..44: mol_type = unassigned DNA
  misc_feature 1..44: note = BAUU01000014.1/125880-125923 Bacillus hemicellulosilyticus JCM 9152 DNA, contig:contig_14.
aagaaagaggttcgcgaactccctctataaaaaactaaggtgat

SEQ ID NO: 90847 - DNA, 45 bp, Clostridium intestinale
  source 1..45: mol_type = unassigned DNA
  misc_feature 1..45: note = KI273145.1/516303-516347 Clostridium intestinale URNW genomic scaffold scaffold1, whole genome shotgun sequence.
ctaggagaggttcgtaaccatccctctataaaaaactaggaatta

SEQ ID NO: 90848 - DNA, 44 bp, Paenibacillus dendritiformis
  source 1..44: mol_type = unassigned DNA
  misc_feature 1..44: note = AHKH01000127.1/2662-2705 Paenibacillus dendritiformis C454 PDENDC1000127, whole genome shotgun sequence.
gcgggagaggttcgcaatctccctctataaaaaactaaggctga

SEQ ID NO: 90849 - DNA, 44 bp, Paenibacillus sp.
  source 1..44: mol_type = unassigned DNA
  misc_feature 1..44: note = CP001656.1/4969025-4968982 Paenibacillus sp. JDR-2, complete genome.
tcaggagaggttcgcgaactccctctataaaaaactaagaactg

SEQ ID NO: 90850 - DNA, 47 bp, Coprobacillus sp.
  source 1..47: mol_type = unassigned DNA
  misc_feature 1..47: note = GL636577.1/280301-280255 Coprobacillus sp. 29_1 genomic scaffold supercont1.1, whole genome shotgun sequence.
tatgaactggttcgagagccaaacccagtataaaaaactaaggacat

SEQ ID NO: 90851 - DNA, 45 bp, Bacillus pumilus
  source 1..45: mol_type = unassigned DNA
  misc_feature 1..45: note = CP000813.3/1324513-1324557 Bacillus pumilus SAFR-032, complete genome.
acgggagaggttctagcaaaaccctctataaaaaactaaggactt

SEQ ID NO: 90852 - DNA, 45 bp, Bacillus sp.
  source 1..45: mol_type = unassigned DNA
  misc_feature 1..45: note = CP008855.1/2520824-2520780 Bacillus sp. X1(2014), complete genome.
gataaagtggttcgaaaccatcccactataaaaaactaaggagaa

SEQ ID NO: 90853 - DNA, 45 bp, Haemophilus paracuniculus
  source 1..45: mol_type = unassigned DNA
  misc_feature 1..45: note = MUYA01000012.1/1715-1759 Haemophilus paracuniculus strain CCUG 43573 43573T_ctg_0000012, whole genome shotgun sequence.
caacctgtggttcgcaatcctcccacataaaaaaactaaggaact

SEQ ID NO: 90854 - DNA, 45 bp, Paenibacillus curdlanolyticus
  source 1..45: mol_type = unassigned DNA
  misc_feature 1..45: note = AEDD01000004.1/159608-159652 Paenibacillus curdlanolyticus YK9 ctg109, whole genome shotgun sequence.
aaggtagaggttcgcaaacttccctctctaaaaaactaagcataa

SEQ ID NO: 90855 - DNA, 45 bp, unidentified
  source 1..45: mol_type = unassigned DNA; note = Listeriaceae bacterium
  misc_feature 1..45: note = JNEZ01000034.1/143400-143444 Listeriaceae bacterium FSL A5-0209 contig000034, whole genome shotgun sequence.
gtttccgtggttcgggacaatcccacgtaaaaaaactaaggagtg

SEQ ID NO: 90856 - DNA, 45 bp, Gallibacterium salpingitidis
  source 1..45: mol_type = unassigned DNA
  misc_feature 1..45: note = JTJL01000005.1/36014-35970 Gallibacterium salpingitidis strain F150 contig000005, whole genome shotgun sequence.
attgtcgtggttcgcaaacctcccacgttaaaaaactaggaacat

SEQ ID NO: 90857 - DNA, 46 bp, Neisseria mucosa
  source 1..46: mol_type = unassigned DNA
  misc_feature 1..46: note = GL635795.1/101202-101157 Neisseria mucosa C102 genomic scaffold supercont1.3, whole genome shotgun sequence.
aatcacgcggttcgcaaacctcccgcgttaacaaaactaggaattt

SEQ ID NO: 90858 - DNA, 45 bp, Lysinibacillus sphaericus
  source 1..45: mol_type = unassigned DNA
  misc_feature 1..45: note = KB933398.1/1000723-1000679 Lysinibacillus sphaericus OT4b.31 genomic scaffold Ls31_scaffold1, whole genome shotgun sequence.
agcaccgtggttcgtaaccatcccacgaaaaaaaactaaggagaa

SEQ ID NO: 90859 - DNA, 46 bp, Enterococcus haemoperoxidus
  source 1..46: mol_type = unassigned DNA
  misc_feature 1..46: note = KB946315.1/486377-486422 Enterococcus haemoperoxidus ATCC BAA-382 genomic scaffold acvJN-supercont1.2, whole genome shotgun sequence.
ctcgacaaggttcatcaaccatcccttgtaaaaaaactaggagaaa

SEQ ID NO: 90860 - DNA, 44 bp, Paenibacillus sp.
  source 1..44: mol_type = unassigned DNA
  misc_feature 1..44: note = MDER01000072.1/7058-7101 Paenibacillus sp. TI45-13ar contig00072, whole genome shotgun sequence.
gcgggagaggttcgcgaactccctctataaaaaactatcaatcc

SEQ ID NO: 90861 - DNA, 45 bp, Bacillus sp.
  source 1..45: mol_type = unassigned DNA
  misc_feature 1..45: note = LJIZ01000016.1/244798-244842 Bacillus sp. FJAT-25509 scaffold2, whole genome shotgun sequence.
ttttacgtggttcgaaaacctcccacgaaaaaaaactaaggagaa

SEQ ID NO: 90862 - DNA, 44 bp, Bacillus endophyticus
  source 1..44: mol_type = unassigned DNA
  misc_feature 1..44: note = CP011974.1/989489-989532 Bacillus endophyticus strain Hbe603, complete genome.
atgggagaggttcgcaaactccctcgataaaaaactaagcaaca

SEQ ID NO: 90863 - DNA, 44 bp, unidentified
  source 1..44: mol_type = unassigned DNA; note = Domibacillus iocasae
  misc_feature 1..44: note = MAMP01000001.1/11573-11530 Domibacillus iocasae strain DSM 29979 DSM29979_contig_1, whole genome shotgun sequence.
gcgggagaggttcgcgaattccctctataaaaaactaatgatca

SEQ ID NO: 90864 - DNA, 45 bp, Jeotgalibacillus campisalis
  source 1..45: mol_type = unassigned DNA
  misc_feature 1..45: note = JXRR01000014.1/535132-535176 Jeotgalibacillus campisalis strain SF-57 contig00014, whole genome shotgun sequence.
taagaagaggttcgcgaccatccctctataaaaaactagggacaa

SEQ ID NO: 90865 - DNA, 43 bp, Bacillus sp.
  source 1..43: mol_type = unassigned DNA
  misc_feature 1..43: note = CCXR01000001.1/1997282-1997324 Bacillus sp. B-jedd genome assembly, contig: CONTIG000001
gcggtagaggttctagctaccctctttaaaaaactaaggaaac

SEQ ID NO: 90866 - DNA, 45 bp, Aerococcus urinae
  source 1..45: mol_type = unassigned DNA
  misc_feature 1..45: note = CP002512.1/463370-463414 Aerococcus urinae ACS-120-V-Col10a, complete genome.
gtgtgcgttgttcgaaaccatccaacgtaaaaaaactaggaggaa

SEQ ID NO: 90867 - DNA, 48 bp, Virgibacillus necropolis
  source 1..48: mol_type = unassigned DNA
  misc_feature 1..48: note = CP022437.1/1333602-1333649 Virgibacillus necropolis strain LMG 19488 chromosome, complete genome.
acgggagaggttcttagcttttaaccctctataaaaaactaaggacag

SEQ ID NO: 90868 - DNA, 46 bp, Clostridium cavendishii
  source 1..46: mol_type = unassigned DNA
  misc_feature 1..46: note = FQZB01000003.1/427992-427947 Clostridium cavendishii DSM 21758 genome assembly, contig: EJ30DRAFT_scaffold00001.1
ttagtagaggttcatgaaccatccctctataaaaaactaggactgt

SEQ ID NO: 90869 - DNA, 45 bp, Bacillus coagulans
  source 1..45: mol_type = unassigned DNA
  misc_feature 1..45: note = CP003056.1/3182588-3182632 Bacillus coagulans 36D1, complete genome.
caacccgtggttcgaaaccatcccacgtaaaaaaactaaggagag

SEQ ID NO: 90870 - DNA, 45 bp, unidentified
  source 1..45: mol_type = unassigned DNA; note = Frischella perrara
  misc_feature 1..45: note = CP009056.1/860507-860551 Frischella perrara strain PEB0191, complete genome.
tattctgtggttcgaaatcctcccacataaaaaaactaaggaagt

SEQ ID NO: 90871 - DNA, 44 bp, Bacillus anthracis
  source 1..44: mol_type = unassigned DNA
  misc_feature 1..44: note = AE017334.2/1298894-1298937 Bacillus anthracis str. 'Ames Ancestor', complete genome.
acgggagaggttcgcgaactccctctataaaaaactatggaaac

SEQ ID NO: 90872 - DNA, 45 bp, Lactobacillus pobuzihii
  source 1..45: mol_type = unassigned DNA
  misc_feature 1..45: note = JQCN01000008.1/21069-21025 Lactobacillus pobuzihii strain NBRC 103219 NODE_10, whole genome shotgun sequence.
ataatggtggttcgtaaacatcccacctaaaaaaactaggaggtt

SEQ ID NO: 90873 - DNA, 46 bp, unidentified
  source 1..46: mol_type = unassigned DNA; note = Frischella perrara
  misc_feature 1..46: note = CP009056.1/306674-306719 Frischella perrara strain PEB0191, complete genome.
gatatcgtggttcgtaatccatcccacgtaaaaaaactaggagtta

SEQ ID NO: 90874 - DNA, 45 bp, Enterococcus pallens
  source 1..45: mol_type = unassigned DNA
  misc_feature 1..45: note = KB946311.1/776563-776607 Enterococcus pallens ATCC BAA-351 genomic scaffold acvKb-supercont1.7, whole genome shotgun sequence.
ctcggactggttcggaaacttcccagaataaaaaactaagaatct

SEQ ID NO: 90875 - DNA, 43 bp, Bacillus infantis
  source 1..43: mol_type = unassigned DNA
  misc_feature 1..43: note = CP006643.1/2402996-2402954 Bacillus infantis NRRL B-14911, complete genome.
acggtagaggttctagctaccctctcaaaaaaactaaggaaaa

SEQ ID NO: 90876 - DNA, 45 bp, Bacillus thermoamylovorans
  source 1..45: mol_type = unassigned DNA
  misc_feature 1..45: note = CCRF01000028.1/24730-24686 Bacillus thermoamylovorans genome assembly, strain 1A1, contig: A1A_CC28
ttgtccgtggttcgaaaccatcccacgtaaaaaaactaaggaaag

SEQ ID NO: 90877 - DNA, 44 bp, Bacillus cereus
  source 1..44: mol_type = unassigned DNA
  misc_feature 1..44: note = CP000764.1/1180651-1180694 Bacillus cereus subsp. cytotoxis NVH 391-98, complete genome.
atgggagaggttcgcgaactccctctataaaaaactatgagaac

SEQ ID NO: 90878 - DNA, 45 bp, Haemophilus influenzae
  source 1..45: mol_type = unassigned DNA
  misc_feature 1..45: note = L42023.1/1258303-1258259 Haemophilus influenzae Rd KW20, complete genome.
ccccccgtagttcgcaaacctcctacaataaaaaactaggtaaaa

SEQ ID NO: 90879 - DNA, 46 bp, unidentified
  source 1..46: mol_type = unassigned DNA; note = Novibacillus thermophilus
  misc_feature 1..46: note = CP019699.1/668203-668158 Novibacillus thermophilus strain SG-1, complete genome.
acgtgagaggttcttagcttaaccctctataaaaaactaaggacat

SEQ ID NO: 90880 - DNA, 44 bp, Bacillus okhensis
  source 1..44: mol_type = unassigned DNA
  misc_feature 1..44: note = JRJU01000009.1/81853-81810 Bacillus okhensis strain Kh10-101 contig09, whole genome shotgun sequence.
agacaagaggttcgcaaactccctctataaaaaactaaggtgtt

SEQ ID NO: 90881 - DNA, 45 bp, unidentified
  source 1..45: mol_type = unassigned DNA; note = Bacilli bacterium
  misc_feature 1..45: note = LAZH01000027.1/40092-40048 Bacilli bacterium VT-13-104 contig027, whole genome shotgun sequence.
aaatccgtggttcgaaagcctcccacgtaaaaaaactaaggagag

SEQ ID NO: 90882 - DNA, 45 bp, Lysinibacillus sp.
  source 1..45: mol_type = unassigned DNA
  misc_feature 1..45: note = JPUW01000028.1/5750-5706 Lysinibacillus sp. BF-4 contig00028, whole genome shotgun sequence.
ctcaacgtggttcgtaaccatcccacgaaaaaaaactaaggagaa

SEQ ID NO: 90883 - DNA, 45 bp, Mannheimia haemolytica
  source 1..45: mol_type = unassigned DNA
  misc_feature 1..45: note = CP005383.1/2520941-2520897 Mannheimia haemolytica M42548, complete genome.
ttatttgtggttcgtaaacctcccacacaaaaaaactaaggacac

SEQ ID NO: 90884 - DNA, 45 bp, Lactobacillus aviarius
  source 1..45: mol_type = unassigned DNA
  misc_feature 1..45: note = AYYZ01000030.1/48087-48131 Lactobacillus aviarius subsp. araffinosus DSM 20653 NODE_76, whole genome shotgun sequence.
atatgagtggttcgcgaaaatcccacttaaaaaaactagaaagag

SEQ ID NO: 90885 - DNA, 45 bp, Neisseria shayeganii
  source 1..45: mol_type = unassigned DNA
  misc_feature 1..45: note = JH164926.1/1695886-1695930 Neisseria shayeganii 871 genomic scaffold SCAFFOLD1, whole genome shotgun sequence.
tctaccgtggttcgcaaacctcccacgtaaaaaaactaggacact

SEQ ID NO: 90886 - DNA, 45 bp, Ruminococcus obeum
  source 1..45: mol_type = unassigned DNA
  misc_feature 1..45: note = FR896737.1/2108-2064 Ruminococcus obeum CAG:39 genomic scaffold, scf61
tcataactggttcgaaaccctcccagtataaaaaactaggtcatg

SEQ ID NO: 90887 - DNA, 45 bp, Lactobacillus salivarius
  source 1..45: mol_type = unassigned DNA
  misc_feature 1..45: note = CP000233.1/1599957-1600001 Lactobacillus salivarius UCC118, complete genome.
cttggactggttcgtaaacttcccagtataaaaaaccaagaatct

SEQ ID NO: 90888 - DNA, 45 bp, Neisseria mucosa
  source 1..45: mol_type = unassigned DNA
  misc_feature 1..45: note = ACDX02000014.1/67281-67325 Neisseria mucosa ATCC 25996 N_mucosa-1.0.2_Cont13.1, whole genome shotgun sequence.
cccttcgtggttcgaaaacctcccacattaaaaaactaaggaaac

SEQ ID NO: 90889 - DNA, 45 bp, Bacillus subtilis; identical to SEQ ID NO: 90785
  source 1..45: mol_type = unassigned DNA
  misc_feature 1..45: note = AL009126.3/1439274-1439318 Bacillus subtilis subsp. subtilis str. 168 complete genome.

SEQ ID NO: 90890 - DNA, 45 bp, Streptococcus sp.
  source 1..45: mol_type = unassigned DNA
  misc_feature 1..45: note = KQ969395.1/10147-10191 Streptococcus sp. DD11 genomic scaffold scaffold00004, whole genome shotgun sequence.
tttggactggttcgagaacttcccagaataaaaaactaagtcgct

SEQ ID NO: 90891 - DNA, 46 bp, unidentified
  source 1..46: mol_type = unassigned DNA; note = Jeotgalibaca dankookensis
  misc_feature 1..46: note = CP019728.1/1709028-1708983 Jeotgalibaca dankookensis strain EX-07, complete genome.
aagctcgtggttcgttgaccatcccacgtaaaaaaactaggaggag

SEQ ID NO: 90892 - DNA, 45 bp, Neisseria mucosa
  source 1..45: mol_type = unassigned DNA
  misc_feature 1..45: note = GL635794.1/437147-437103 Neisseria mucosa C102 genomic scaffold supercont1.2, whole genome shotgun sequence.
caccccgtggttcgaaaacctcccacattaaaaaactaaggaaac

SEQ ID NO: 90893 - DNA, 45 bp, Bacillus endophyticus
  source 1..45: mol_type = unassigned DNA
  misc_feature 1..45: note = CP011974.1/2991292-2991336 Bacillus endophyticus strain Hbe603, complete genome.
attaccgtggttcgtaaccctcccacgctaaaaaactaaggagaa

SEQ ID NO: 90894 - DNA, 46 bp, unidentified; identical to SEQ ID NO: 90834
  source 1..46: mol_type = unassigned DNA; note = Gilliamella apicola
  misc_feature 1..46: note = JAIO01000027.1/9773-9728 Gilliamella apicola SCGC AB-598-P17 SCG598P17_12314, whole genome shotgun sequence.

SEQ ID NO: 90895 - DNA, 45 bp, Virgibacillus soli
  source 1..45: mol_type = unassigned DNA
  misc_feature 1..45: note = LGPD01000021.1/7639-7683 Virgibacillus soli strain PL205 scaffold000021, whole genome shotgun sequence.
gaggacgtggttcgaaaccatcccacgataaaaaactaaggggag

SEQ ID NO: 90896 - DNA, 45 bp, Clostridium perfringens
  source 1..45: mol_type = unassigned DNA
  misc_feature 1..45: note = BA000016.3/2295327-2295283 Clostridium perfringens str. 13 DNA, complete genome.
ttggtagaggttcgtaaccatccctctataaaaaactaagggctg

SEQ ID NO: 90897 - DNA, 45 bp, Avibacterium paragallinarum; identical to SEQ ID NO: 90781
  source 1..45: mol_type = unassigned DNA
  misc_feature 1..45: note = LAEN01000054.1/1662-1706 Avibacterium paragallinarum strain CL AvpgCL_contig_54, whole genome shotgun sequence.

SEQ ID NO: 90898 - DNA, 44 bp, Sporosarcina psychrophila
  source 1..44: mol_type = unassigned DNA
  misc_feature 1..44: note = CP014616.1/2006254-2006211 Sporosarcina psychrophila strain DSM 6497, complete genome.
aaaaaagaggttcgaaaactccctctctaaaaaactaaggagat

SEQ ID NO: 90899 - DNA, 46 bp, Lactobacillus nasuensis
  source 1..46: mol_type = unassigned DNA
  misc_feature 1..46: note = AZDJ01000032.1/112734-112689 Lactobacillus nasuensis JCM 17158 NODE_122, whole genome shotgun sequence.
gcacatgtggttcgcaatccatcccacaataaaaaactaggaggac

SEQ ID NO: 90900 - DNA, 45 bp, unidentified; identical to SEQ ID NO: 90841
  source 1..45: mol_type = unassigned DNA; note = Paeniclostridium sordellii
  misc_feature 1..45: note = APWR01000098.1/3959-3915 Paeniclostridium sordellii ATCC 9714 gcs9714.contig.98, whole genome shotgun sequence.

SEQ ID NO: 90901 - DNA, 45 bp, Bacillus sp.
  source 1..45: mol_type = unassigned DNA
  misc_feature 1..45: note = JAQV02000024.1/18875-18831 Bacillus sp. SJS contig_24, whole genome shotgun sequence.
acgggagaggttctagcacaaccctctataaaaaactaaggacag

SEQ ID NO: 90902 - DNA, 45 bp, Blautia sp.
  source 1..45: mol_type = unassigned DNA
  misc_feature 1..45: note = CBJJ010000264.1/8316-8272 Blautia sp. CAG:37, WGS project CBJJ01000000 data, contig: 336
tccggactggttcgtgaacttcccagtataaaaaaccaagtatct

SEQ ID NO: 90903 - DNA, 44 bp, Streptococcus lutetiensis
  source 1..44: mol_type = unassigned DNA
  misc_feature 1..44: note = CP003025.1/1391820-1391863 Streptococcus lutetiensis 033, complete genome.
tttggactggttcgaaaactcccagaataaaaaactagctatct

SEQ ID NO: 90904 - DNA, 45 bp, Gracilibacillus boraciitolerans
  source 1..45: mol_type = unassigned DNA
  misc_feature 1..45: note = BAVS01000036.1/10574-10618 Gracilibacillus boraciitolerans JCM 21714 DNA, contig:contig_36.
gcaggagaggttctagctacaccctctataaaaaactaaggataa

SEQ ID NO: 90905 - DNA, 44 bp, Jeotgalicoccus sp.
  source 1..44: mol_type = unassigned DNA
  misc_feature 1..44: note = CCSE01000001.1/2015811-2015768 Jeotgalicoccus sp. 13MG44_air genome assembly, contig: CONTIG000001
ttaaaacaggttcgcaaactccctgtcaaaaaaactaaggagaa

SEQ ID NO: 90906 - DNA, 66 bp, Pasteurella multocida; identical to SEQ ID NO: 90765
  source 1..66: mol_type = unassigned DNA
  misc_feature 1..66: note = ALBY01000294.1/348-283 Pasteurella multocida subsp. multocida str. Anand1_cattle contig294, whole genome shotgun sequence.

SEQ ID NO: 90907 - DNA, 47 bp, Enterococcus faecium
  source 1..47: mol_type = unassigned DNA
  misc_feature 1..47: note = CP003583.1/2341515-2341469 Enterococcus faecium DO, complete genome.
ataaccgcggttcatcaaccatcccgcgttaaaaaaactaggagaaa

SEQ ID NO: 90908 - DNA, 45 bp, Weissella viridescens
  source 1..45: mol_type = unassigned DNA
  misc_feature 1..45: note = JQBM01000001.1/304813-304769 Weissella viridescens strain DSM 20410 Scaffold1, whole genome shotgun sequence.
aatcacgtggttcgtaaccatcccacgcaaaaaaactaggagtct

SEQ ID NO: 90909 - DNA, 48 bp, Lactobacillus ceti
  source 1..48: mol_type = unassigned DNA
  misc_feature 1..48: note = JQBZ01000008.1/12699-12652 Lactobacillus ceti DSM 22408 NODE_34, whole genome shotgun sequence.
tcactggtggttcgtaaacatcccaccataataaaaaactaggaagaa

SEQ ID NO: 90910 - DNA, 45 bp, Caryophanon tenue
  source 1..45: mol_type = unassigned DNA
  misc_feature 1..45: note = MASJ01000038.1/118403-118447 Caryophanon tenue strain DSM 14152 DSM_14152_R1_001_contig_5, whole genome shotgun sequence.
ttctacgtggttcgtaaccatcccacgaaaaaaaactaaggagaa

SEQ ID NO: 90911 - DNA, 47 bp, unidentified
  source 1..47: mol_type = unassigned DNA; note = Lysinibacillus sinduriensis
  misc_feature 1..47: note = JPVO01000055.1/675393-675439 Lysinibacillus sinduriensis BLB-1 = JCM 15800 contig1, whole genome shotgun sequence.
tcgggagaggttcatagctgataccctctataaaaaactatggaaac

SEQ ID NO: 90912 - DNA, 47 bp, Virgibacillus sp.
  source 1..47: mol_type = unassigned DNA
  misc_feature 1..47: note = CP022315.1/2242038-2242084 Virgibacillus sp. LM2416 chromosome, complete genome.
acagaagaggttcttagggttaaccctctataaaaaactaaggacag

SEQ ID NO: 90913 - DNA, 45 bp, Neisseria gonorrhoeae
  source 1..45: mol_type = unassigned DNA
  misc_feature 1..45: note = AE004969.1/1637046-1637090 Neisseria gonorrhoeae FA 1090, complete genome.
cgccccgtggttcgaaaacctcccacactaaaaaactaaggaaac

SEQ ID NO: 90914 - DNA, 48 bp, Oceanobacillus iheyensis
  source 1..48: mol_type = unassigned DNA
  misc_feature 1..48: note = BA000028.3/2885876-2885829 Oceanobacillus iheyensis HTE831 DNA, complete genome.
gcaggagaggttcgcgatttaaatccctctataaaaaactaaggagat

SEQ ID NO: 90915 - DNA, 45 bp, Actinobacillus minor
  source 1..45: mol_type = unassigned DNA
  misc_feature 1..45: note = ACQL01000093.1/20533-20577 Actinobacillus minor NM305 Contig_17, whole genome shotgun sequence.
catctcgtggttcgaaaacctcccacgcaaaaaaactaaggatac

SEQ ID NO: 90916 - DNA, 45 bp, unidentified
  source 1..45: mol_type = unassigned DNA; note = Carnobacterium iners
  misc_feature 1..45: note = FXBJ01000002.1/420355-420311 Carnobacterium iners strain LMG26642 genome assembly, contig: Ga0073236_12
aaatatgtggttcgtaaccatcccacagaaaaaaactaggaggaa

SEQ ID NO: 90917 - DNA, 45 bp, Solibacillus silvestris
  source 1..45: mol_type = unassigned DNA
  misc_feature 1..45: note = AP012157.1/3570017-3570061 Solibacillus silvestris StLB046 DNA, complete genome.
ctttgcgtggttcgtaaccatcccacgttaaaaaactaggaggaa

SEQ ID NO: 90918 - DNA, 47 bp, Oceanobacillus oncorhynchi
  source 1..47: mol_type = unassigned DNA
  misc_feature 1..47: note = CDGG01000001.1/2347912-2347958 Oceanobacillus oncorhynchi strain Oc5 genome assembly, contig: CONTIG000001
caggcagaggttcttagcttaaaccctctataaaaaactaaggacaa

SEQ ID NO: 90919 - DNA, 45 bp, Lactobacillus salivarius
  source 1..45: mol_type = unassigned DNA
  misc_feature 1..45: note = CP000233.1/1530666-1530622 Lactobacillus salivarius UCC118, complete genome.
tccacactggttcgtaaacatcccagttaaaaaaactagaaagca

SEQ ID NO: 90920 - DNA, 45 bp, Bacillus licheniformis; identical to SEQ ID NO: 90786
  source 1..45: mol_type = unassigned DNA
  misc_feature 1..45: note = CP000002.3/1501859-1501903 Bacillus licheniformis ATCC 14580, complete genome.

SEQ ID NO: 90921 - DNA, 45 bp, unidentified
  source 1..45: mol_type = unassigned DNA; note = Lysinibacillus contaminans
  misc_feature 1..45: note = LGRV01000007.1/217560-217516 Lysinibacillus contaminans strain DSM 25560 Scaffold2, whole genome shotgun sequence.
aacaccgtggttcgtaaccatcccacgaaaaaaaactaaggagaa

SEQ ID NO: 90922 - DNA, 47 bp, Staphylococcus epidermidis
  source 1..47: mol_type = unassigned DNA
  misc_feature 1..47: note = CP000029.1/370924-370878 Staphylococcus epidermidis RP62A, complete genome.
ataacagaggttcctagccgaaaccctctataaaaaactagacatga

SEQ ID NO: 90923 - DNA, 45 bp, unidentified
  source 1..45: mol_type = unassigned DNA; note = Bacillus enclensis
  misc_feature 1..45: note = KQ758483.1/339837-339881 Bacillus enclensis strain SGD-1123 genomic scaffold Scaffold2, whole genome shotgun sequence.
tcccgagaggttctagcacaaccctctataaaaaactaagggaaa

SEQ ID NO: 90924 - DNA, 44 bp, Bacillus wakoensis; identical to SEQ ID NO: 90880
  source 1..44: mol_type = unassigned DNA
  misc_feature 1..44: note = BAUT01000002.1/56118-56161 Bacillus wakoensis JCM 9140 DNA, contig:contig_2.

SEQ ID NO: 90925 - DNA, 47 bp, Oceanobacillus iheyensis
  source 1..47: mol_type = unassigned DNA
  misc_feature 1..47: note = BA000028.3/2245805-2245759 Oceanobacillus iheyensis HTE831 DNA, complete genome.
ttgttagaggttcttagcttcaaccctctataaaaaactaaggacaa

SEQ ID NO: 90926 - DNA, 47 bp, Clostridium spiroforme
  source 1..47: mol_type = unassigned DNA
  misc_feature 1..47: note = DS562851.1/112565-112519 Clostridium spiroforme DSM 1552 Scfld_02_8 genomic scaffold, whole genome shotgun sequence.
aataaactggttcgaaagccaaacccagtataaaaaactaagaataa

SEQ ID NO: 90927 - DNA, 44 bp, Paenibacillus popilliae; identical to SEQ ID NO: 90848
  source 1..44: mol_type = unassigned DNA
  misc_feature 1..44: note = BALG01000101.1/10725-10768 Paenibacillus popilliae ATCC 14706 DNA, contig: contig101.

SEQ ID NO: 90928 - DNA, 44 bp, Paenibacillus sp.
  source 1..44: mol_type = unassigned DNA
  misc_feature 1..44: note = GG695985.1/74109-74066 Paenibacillus sp. oral taxon 786 str. D14 genomic scaffold supercont1.16, whole genome shotgun sequence.
acgggagaggttcgagaactccctctataaaaaactataaatgc

SEQ ID NO: 90929 - DNA, 44 bp, Cohnella sp.
  source 1..44: mol_type = unassigned DNA
  misc_feature 1..44: note = JXAL01000001.1/418153-418110 Cohnella sp. VKM B-2846 B2846_01, whole genome shotgun sequence.
tcaggagaggttcgcgaactccctctataaaaaactaaggaaaa

SEQ ID NO: 90930 - DNA, 45 bp, Bacillus bataviensis
  source 1..45: mol_type = unassigned DNA
  misc_feature 1..45: note = AJLS01000054.1/43769-43813 Bacillus bataviensis LMG 21833 contig54, whole genome shotgun sequence.
tttaacgtggttcgagaacctcccacgtaaaaaaactaaggagaa

SEQ ID NO: 90931 - DNA, 45 bp, Bacillus sp.
  source 1..45: mol_type = unassigned DNA
  misc_feature 1..45: note = MLYQ01000038.1/46242-46286 Bacillus sp. MUM 13 38, whole genome shotgun sequence.
actaacgtggttcgtgaccctcccacgcaaaaaaactaaggagaa

SEQ ID NO: 90932 - DNA, 45 bp, unidentified
  source 1..45: mol_type = unassigned DNA; note = Clostridiales bacterium
  misc_feature 1..45: note = FCNS01000008.1/180796-180752 Clostridiales bacterium CHKCI001 isolate CHKC1 genome assembly, contig: {contig8}
tttggactggttcgtaaacttcccagaataaaaaactaagatgaa

SEQ ID NO: 90933 - DNA, 46 bp, Trichococcus sp.
  source 1..46: mol_type = unassigned DNA
  misc_feature 1..46: note = FJNB01000004.1/46001-46046 Trichococcus sp. R210 isolate Trichococcus_R210 genome assembly, contig: TR210DRAFT_scaffold-4
gagcacgtggttcgtcgaccatcccacggaaaaaaactagggggtt

SEQ ID NO: 90934 - DNA, 45 bp, Ruminococcus sp.
  source 1..45: mol_type = unassigned DNA
  misc_feature 1..45: note = HF993610.1/7610-7566 Ruminococcus sp. CAG:17 genomic scaffold, scf209
ccgaaactggttcgaaaacctcccagtataaaaaactaggcaaag

SEQ ID NO: 90935 - DNA, 44 bp, Bacillus sp.
  source 1..44: mol_type = unassigned DNA
  misc_feature 1..44: note = KQ758702.1/8670-8713 Bacillus sp. SGD-V-76 genomic scaffold Scaffold76, whole genome shotgun sequence.
gcgggagaggttcgtaaactccctctataaaaaactaagatcat

SEQ ID NO: 90936 - DNA, 47 bp, unidentified
  source 1..47: mol_type = unassigned DNA; note = Lentibacillus amyloliquefaciens
  misc_feature 1..47: note = CP013862.1/3563841-3563887 Lentibacillus amyloliquefaciens strain LAM0015, complete genome.
acgggagaggttcttagcttaaaccctctataaaaaactaaggacag

SEQ ID NO: 90937 - DNA, 45 bp, Actinobacillus succinogenes
  source 1..45: mol_type = unassigned DNA
  misc_feature 1..45: note = CP000746.1/2223340-2223384 Actinobacillus succinogenes 130Z, complete genome.
ttcatcgtggttcgcaaacctcccacgcaaaaaaactaaggaaat

SEQ ID NO: 90938 - DNA, 44 bp, Paenibacillus sp.
  source 1..44: mol_type = unassigned DNA
  misc_feature 1..44: note = MRTD01000003.1/164798-164841 Paenibacillus sp. FSL A5-0031 NODE_3_length_466146_cov_1.36898_ID_5123, whole genome shotgun sequence.
tcgggagaggttcgcgaactccctctataaaaaactatgcgaaa

SEQ ID NO: 90939 - DNA, 45 bp, Pasteurella bettyae
  source 1..45: mol_type = unassigned DNA
  misc_feature 1..45: note = AJSX01000047.1/96755-96799 Pasteurella bettyae CCUG 2042 contig00004, whole genome shotgun sequence.
ttaatcgtggttcgagaacctcccacgcaaaaaaactaaggaaaa

SEQ ID NO: 90940 - DNA, 45 bp, Bacillus sp.
  source 1..45: mol_type = unassigned DNA
  misc_feature 1..45: note = LAYY01000023.1/52477-52521 Bacillus sp. SA2-6 scf7180000001101, whole genome shotgun sequence.
cccggcgtggttcgtaaccctcccacgaaaaaaaactaaggagag

SEQ ID NO: 90941 - DNA, 48 bp, Leuconostoc gelidum
  source 1..48: mol_type = unassigned DNA
  misc_feature 1..48: note = CP003839.1/1020529-1020482 Leuconostoc gelidum JB7, complete genome.
ttgatagcggttcatcaaccatcccgcttataaaaaaactaggagatt

SEQ ID NO: 90942 - DNA, 45 bp, Lactobacillus sakei
  source 1..45: mol_type = unassigned DNA
  misc_feature 1..45: note = CR936503.1/819401-819357 Lactobacillus sakei strain 23K complete genome.
cttggactggttcggaaacttcccagaataaaaaactaaggatct

SEQ ID NO: 90943 - DNA, 45 bp, Neisseria animaloris
  source 1..45: mol_type = unassigned DNA
  misc_feature 1..45: note = MTBN01000001.1/292025-291981 Neisseria animaloris strain DSM 21642 NODE_1_length_568283_cov_40.5228_ID_1, whole genome shotgun sequence.
cactctgtggttcgcaaacctcccacattaaaaaactaaggaact

SEQ ID NO: 90944 - DNA, 44 bp, Bacillus cereus; identical to SEQ ID NO: 90780
  source 1..44: mol_type = unassigned DNA
  misc_feature 1..44: note = AE016877.1/1318959-1319002 Bacillus cereus ATCC 14579, complete genome.

SEQ ID NO: 90945 - DNA, 44 bp, Paenibacillus sp.
  source 1..44: mol_type = unassigned DNA
  misc_feature 1..44: note = FPIU01000012.1/186098-186141 Paenibacillus sp. UNCCL117 genome assembly, contig: FG16DRAFT_scaffold00011.11
ccgggagaggttcgcgaactccctctataaaaaactaaggcaat

SEQ ID NO: 90946 - DNA, 45 bp, Bacillus cereus; identical to SEQ ID NO: 90778
  source 1..45: mol_type = unassigned DNA
  misc_feature 1..45: note = CM000735.1/1446398-1446354 Bacillus cereus Rock4-18 chromosome, whole genome shotgun sequence.

SEQ ID NO: 90947 - DNA, 48 bp, Lactobacillus saerimneri
  source 1..48: mol_type = unassigned DNA
  misc_feature 1..48: note = ANAG01000014.1/101002-101049 Lactobacillus saerimneri 30a contig00019, whole genome shotgun sequence.
acacaggtggttcgcaaccatcccacctttataaaaaactaaggagag

SEQ ID NO: 90948 - DNA, 45 bp, Enterococcus sp.
  source 1..45: mol_type = unassigned DNA
  misc_feature 1..45: note = NGKU01000001.1/947937-947981 Enterococcus sp. 8G7_MSG3316 scaffold00001, whole genome shotgun sequence.
cttggactggttcgaaaacttcccaggtaaaaaaactaagtatct

SEQ ID NO: 90949 - DNA, 43 bp, Bacillus sp.
  source 1..43: mol_type = unassigned DNA
  misc_feature 1..43: note = LIUR01000001.1/4435528-4435570 Bacillus sp. FJAT-22058 super1, whole genome shotgun sequence.
gcggaagaggttctagctaccctctcaaaaaaactaaggagaa

SEQ ID NO: 90950 - DNA, 44 bp, Planococcus rifietoensis
  source 1..44: mol_type = unassigned DNA
  misc_feature 1..44: note = CP013659.2/1039490-1039447 Planococcus rifietoensis strain M8, complete genome.
ataaaagaggttcgcaaactccctctctaaaaaactaaggagct

SEQ ID NO: 90951 - DNA, 45 bp, unidentified
  source 1..45: mol_type = unassigned DNA; note = Lysinibacillus odysseyi
  misc_feature 1..45: note = JPVP01000053.1/73128-73172 Lysinibacillus odysseyi 34hs-1 = NBRC 100172 contig8, whole genome shotgun sequence.
aaacacgtggttcgcaaccatcccacgcaaaaaaactaggaggat

SEQ ID NO: 90952 - DNA, 46 bp, Jeotgalicoccus sp.
  source 1..46: mol_type = unassigned DNA
  misc_feature 1..46: note = CCSE01000001.1/1105304-1105349 Jeotgalicoccus sp. 13MG44_air genome assembly, contig: CONTIG000001
tacgaagaggttcttagccataccctcttaaaaaaactaagacaca

SEQ ID NO: 90953 - DNA, 46 bp, Lactobacillus suebicus
  source 1..46: mol_type = unassigned DNA
  misc_feature 1..46: note = AZGF01000037.1/2797-2752 Lactobacillus suebicus DSM 5007 = KCTC 3549 strain DSM 5007 Scaffold37, whole genome shotgun sequence.
cccggactggttcgtaaacttcccagttataaaaaaccaagaactt

SEQ ID NO: 90954 - DNA, 44 bp, Paenibacillus pini
  source 1..44: mol_type = unassigned DNA
  misc_feature 1..44: note = BAVZ01000004.1/93866-93909 Paenibacillus pini JCM 16418 DNA, contig: contig00004.
atggaagaggttcgcgaactccctctataaaaaactaagactgc

SEQ ID NO: 90955 - DNA, 45 bp, unidentified
  source 1..45: mol_type = unassigned DNA; note = Gilliamella apicola
  misc_feature 1..45: note = JAIM01000002.1/41981-41937 Gilliamella apicola SCGC AB-598-B02 SCG598B02_13272, whole genome shotgun sequence.
tgtctcgtggttcgtgaacctcccacgctaaaaaactaaggaaaa

SEQ ID NO: 90956 - DNA, 44 bp, unidentified
  source 1..44: mol_type = unassigned DNA; note = Paenibacillus selenitireducens
  misc_feature 1..44: note = MSZX01000011.1/156512-156469 Paenibacillus selenitireducens strain ES3-24 ES3-24_scaffold11, whole genome shotgun sequence.
atgggagaggttcgcgaactccctctataaaaaactaatggcgc

SEQ ID NO: 90957 - DNA, 46 bp, Enterococcus faecalis
  source 1..46: mol_type = unassigned DNA
  misc_feature 1..46: note = KE351671.1/16641-16596 Enterococcus faecalis 13-SD-W-01 genomic scaffold Scaffold642, whole genome shotgun sequence.
aggtccgcggttcatcaaccatcccgcgcaaaaaaactaggagaaa

SEQ ID NO: 90958 - DNA, 46 bp, Bacillus sp.
  source 1..46: mol_type = unassigned DNA
  misc_feature 1..46: note = LFEL01000003.1/137476-137521 Bacillus sp. LL01 scaffold3.1, whole genome shotgun sequence.
tcaggagaggttctagcaaataccctctataaaaaactaaggacag

SEQ ID NO: 90959 - DNA, 43 bp, Bacillus sp.; identical to SEQ ID NO: 90949
  source 1..43: mol_type = unassigned DNA
  misc_feature 1..43: note = LIUR01000001.1/4441541-4441583 Bacillus sp. FJAT-22058 super1, whole genome shotgun sequence.

SEQ ID NO: 90960 - DNA, 44 bp, Paenibacillus antarcticus
  source 1..44: mol_type = unassigned DNA
  misc_feature 1..44: note = LVJI01000001.1/139836-139879 Paenibacillus antarcticus strain CECT 5836 PBAT01, whole genome shotgun sequence.
atggaagaggttcgcgaactccctctataaaaaactattcacct

SEQ ID NO: 90961 - DNA, 44 bp, Paenibacillus sp.
  source 1..44: mol_type = unassigned DNA
  misc_feature 1..44: note = LYPA01000038.1/54925-54968 Paenibacillus sp. 1DrF-4 scaffold1, whole genome shotgun sequence.
ccgggagaggttcgcgaactccctctataaaaaactaaacgaaa

SEQ ID NO: 90962 - DNA, 46 bp, Enterococcus canis
  source 1..46: mol_type = unassigned DNA
  misc_feature 1..46: note = JXKH01000003.1/214159-214204 Enterococcus canis strain DSM 17029 Scaffold3, whole genome shotgun sequence.
gtgaccgcggttcgtaaccatcccgcgacaacaaaactaggaggag

SEQ ID NO: 90963 - DNA, 44 bp, Bacillus sp.
  source 1..44: mol_type = unassigned DNA
  misc_feature 1..44: note = BAWA01000018.1/42267-42224 Bacillus sp. JCM 19045 DNA, contig: contig00018.
aatgaagaggttcgcgaactccctctataaaaaactatttagtt

SEQ ID NO: 90964 - DNA, 45 bp, Rummeliibacillus stabekisii
  source 1..45: mol_type = unassigned DNA
  misc_feature 1..45: note = CP014806.1/3266606-3266562 Rummeliibacillus stabekisii strain PP9, complete genome.
aaacacgtggttcgagaccatcccacgtaaaaaaactagggggaa

SEQ ID NO: 90965 - DNA, 46 bp, unidentified
  source 1..46: mol_type = unassigned DNA; note = Jeotgalibaca sp.
  misc_feature 1..46: note = CP019433.1/1929437-1929482 Jeotgalibaca sp. PTS2502, complete genome.
gagcacgtggttcgttgaccatcccacgtaaaaaaactaggaggag

SEQ ID NO: 90966 - DNA, 44 bp, Clostridium sp.
  source 1..44: mol_type = unassigned DNA
  misc_feature 1..44: note = AUPA01000071.1/20865-20908 Clostridium sp. BL8 Contig155, whole genome shotgun sequence.
gcgggactggttcgagaactcccagtataaaaaactaaggattt

SEQ ID NO: 90967 - DNA, 47 bp, unidentified
  source 1..47: mol_type = unassigned DNA; note = Virgibacillus massiliensis
  misc_feature 1..47: note = CCDP010000002.1/115044-114998 Virgibacillus massiliensis genome assembly, contig: 000002
gcaggagaggttcgaaattccatccctctataaaaaactaaggagat

SEQ ID NO: 90968 - DNA, 46 bp, Carnobacterium inhibens
  source 1..46: mol_type = unassigned DNA
  misc_feature 1..46: note = CP006812.1/225399-225444 Carnobacterium inhibens subsp. gilichinskyi strain WN1359, complete genome.
taaaacgtggttcgttgaccatcccacgaaaaaaaactaggaggaa

SEQ ID NO: 90969 - DNA, 45 bp, Lysinibacillus sp.
  source 1..45: mol_type = unassigned DNA
  misc_feature 1..45: note = LKIE01000028.1/74583-74539 Lysinibacillus sp. F5 Contig18, whole genome shotgun sequence.
agcaccgtggttcgtaaccatcccacgcaaaaaaactaaggagaa

SEQ ID NO: 90970 - DNA, 45 bp, Lactobacillus hayakitensis
  source 1..45: mol_type = unassigned DNA
  misc_feature 1..45: note = AZGD01000037.1/54038-53994 Lactobacillus hayakitensis DSM 18933 = JCM 14209 strain DSM 18933 NODE_93, whole genome shotgun sequence.
aacggactggttcttaaacttcccagaataaaaaactaagaatct

SEQ ID NO: 90971 - DNA, 45 bp, Bacillus sp.
  source 1..45: mol_type = unassigned DNA
  misc_feature 1..45: note = ABCF01000001.1/139145-139189 Bacillus sp. SG-1 1101501000768, whole genome shotgun sequence.
gcaggagaggttctagcttaaccctctataaaaaactaaggaaac

SEQ ID NO: 90972 - DNA, 45 bp, Bacillus sp.
  source 1..45: mol_type = unassigned DNA
  misc_feature 1..45: note = CP012602.1/5095084-5095128 Bacillus sp. FJAT-18017 genome.
aaccgcgtggttcgagaacctcccacgataaaaaactaaggagag

SEQ ID NO: 90973 - DNA, 45 bp, Enterococcus durans; identical to SEQ ID NO: 90942
  source 1..45: mol_type = unassigned DNA
  misc_feature 1..45: note = KE136516.1/160217-160173 Enterococcus durans ATCC 6056 genomic scaffold acyDB-supercont2.4, whole genome shotgun sequence.

SEQ ID NO: 90974 - DNA, 45 bp, Bacillus sp.
  source 1..45: mol_type = unassigned DNA
  misc_feature 1..45: note = LUFJ01000023.1/140412-140368 Bacillus sp. KCTC 13219 scaffold3.1, whole genome shotgun sequence.
tacaccgtggttcgcaaccatcccacgcaaaaaaactaggaggaa

SEQ ID NO: 90975 - DNA, 45 bp, unidentified
  source 1..45: mol_type = unassigned DNA; note = Stoquefichus sp.
  misc_feature 1..45: note = KQ970880.1/82810-82766 Candidatus Stoquefichus sp. KLE1796 genomic scaffold Scaffold92, whole genome shotgun sequence.
tgaaaactggttcgagataaccccagtataaaaaactaagaatgt

SEQ ID NO: 90976 - DNA, 45 bp, unidentified; identical to SEQ ID NO: 90955
  source 1..45: mol_type = unassigned DNA; note = Gilliamella apicola
  misc_feature 1..45: note = CP007445.1/943178-943222 Gilliamella apicola strain wkB1, complete genome.

SEQ ID NO: 90977 - DNA, 45 bp, Cetobacterium ceti
  source 1..45: mol_type = unassigned DNA
  misc_feature 1..45: note = FUWX01000016.1/22898-22854 Cetobacterium ceti strain ATCC 700028 genome assembly, contig: EI52DRAFT_scaffold00013.13
taaagagatgttcggaaacctccatctataaaaaactaggcttat

SEQ ID NO: 90978 - DNA, 45 bp, Clostridium nexile
  source 1..45: mol_type = unassigned DNA
  misc_feature 1..45: note = FR888624.1/5945-5901 Clostridium nexile CAG:348 genomic scaffold, scf72
tctggactggttcgaaaacttcccagaataaaaaactaaggattg

SEQ ID NO: 90979 - DNA, 45 bp, Lactonifactor longoviformis
  source 1..45: mol_type = unassigned DNA
  misc_feature 1..45: note = FQVI01000024.1/18038-17994 Lactonifactor longoviformis DSM 17459 genome assembly, contig: EJ64DRAFT_scaffold00024.24
tctggactggttcgcgaacttcccagtataaaaaaccaagtatct

SEQ ID NO: 90980 - DNA, 45 bp, Bacillus sp.
  source 1..45: mol_type = unassigned DNA
  misc_feature 1..45: note = MAYV01000017.1/55358-55402 Bacillus sp. FJAT-27986 scaffolf6, whole genome shotgun sequence.
ctaaacgtggttcgtaaccatcccacgataaaaaactaagggaga

SEQ ID NO: 90981 - DNA, 44 bp, unidentified
  source 1..44: mol_type = unassigned DNA; note = Paenibacillus bovis
  misc_feature 1..44: note = CP013023.1/1909861-1909818 Paenibacillus bovis strain BD3526, complete genome.
gcgggagaggttcgcgaactccctctataaaaaactaaaaccgc

SEQ ID NO: 90982 - DNA, 47 bp, Sporosarcina psychrophila
  source 1..47: mol_type = unassigned DNA
  misc_feature 1..47: note = CP014616.1/4423872-4423918 Sporosarcina psychrophila strain DSM 6497, complete genome.
taacacgtggttcgtcaaccatcccacgctaaaaaaactaggaggaa

SEQ ID NO: 90983 - DNA, 46 bp, unidentified
  source 1..46: mol_type = unassigned DNA; note = Snodgrassella alvi
  misc_feature 1..46: note = CP007446.1/639021-638976 Snodgrassella alvi wkB2, complete genome.
aaccacgtggttcgcaatccatcccacgaaaaaaaactaggagccc

SEQ ID NO: 90984 - DNA, 45 bp, unidentified
  source 1..45: mol_type = unassigned DNA; note = Listeriaceae bacterium
  misc_feature 1..45: note = JNFA01000011.1/536185-536229 Listeriaceae bacterium FSL A5-0281 contig000011, whole genome shotgun sequence.
gtttccgtggttcgaaactatcccacgataaaaaactaaggagtg

SEQ ID NO: 90985 - DNA, 44 bp, unidentified
  source 1..44: mol_type = unassigned DNA; note = Bacillus gaemokensis
  misc_feature 1..44: note = JOTM01000014.1/70172-70215 Bacillus gaemokensis strain JCM 15801 contig14, whole genome shotgun sequence.
atgggagaggttcgcgaactccctctataaaaaactaagggaac

SEQ ID NO: 90986 - DNA, 44 bp, Salinicoccus alkaliphilus
  source 1..44: mol_type = unassigned DNA
  misc_feature 1..44: note = FRCF01000003.1/45285-45242 Salinicoccus alkaliphilus DSM 16010 genome assembly, contig: EJ97DRAFT_scaffold00002.2
accccacaggttcgcaaactccctgtataaaaaactaaggagaa

SEQ ID NO: 90987 - DNA, 45 bp, Lactobacillus graminis; identical to SEQ ID NO: 90942
  source 1..45: mol_type = unassigned DNA
  misc_feature 1..45: note = AYZB01000035.1/114730-114774 Lactobacillus graminis DSM 20719 NODE_43, whole genome shotgun sequence.

SEQ ID NO: 90988 - DNA, 44 bp, Bacillus sp.; identical to SEQ ID NO: 90836
  source 1..44: mol_type = unassigned DNA
  misc_feature 1..44: note = MAQX01000011.1/119008-118965 Bacillus sp. FJAT-26390 scaffold2, whole genome shotgun sequence.

SEQ ID NO: 90989 - DNA, 44 bp, unidentified
  source 1..44: mol_type = unassigned DNA; note = Paenibacillus darwinianus
  misc_feature 1..44: note = KK082192.1/7518-7561 Paenibacillus darwinianus strain Br genomic scaffold scaffold69, whole genome shotgun sequence.
gcgggagaggttcgcgaactccctctataaaaaactaagaccag

SEQ ID NO: 90990 - DNA, 44 bp, Paenibacillus sp.
  source 1..44: mol_type = unassigned DNA
  misc_feature 1..44: note = LMSD01000001.1/580732-580689 Paenibacillus sp. Soil750 contig_1, whole genome shotgun sequence.
atagaagaggttcgcaaactccctctctaaaaaactatgaaatg

SEQ ID NO: 90991 - DNA, 45 bp, Enterococcus cecorum
  source 1..45: mol_type = unassigned DNA
  misc_feature 1..45: note = KI535313.1/967535-967491 Enterococcus cecorum DSM 20682 = ATCC 43198 genomic scaffold adfme-supercont2.1, whole genome shotgun sequence.
cttggactggttcgagaacttcccaggataaaaaactaagaatct

SEQ ID NO: 90992 - DNA, 46 bp, Paenibacillus sp.
  source 1..46: mol_type = unassigned DNA
  misc_feature 1..46: note = CP009279.1/1403331-1403376 Paenibacillus sp. FSL H7-0737, complete genome.
taagccgcggttcgtaaccatcccgcgtaaacaaaactaggaggag

SEQ ID NO: 90993 - DNA, 47 bp, Sharpea azabuensis
  source 1..47: mol_type = unassigned DNA
  misc_feature 1..47: note = FNYK01000002.1/35927-35973 Sharpea azabuensis strain DSM 20406 genome assembly, contig: Ga0059086_1002
caagcactggttcgagagccaaacccagtataaaaaactaagaacat

SEQ ID NO: 90994 - DNA, 47 bp, Lysinibacillus sp.; identical to SEQ ID NO: 90776
  source 1..47: mol_type = unassigned DNA
  misc_feature 1..47: note = LKIE01000051.1/50847-50893 Lysinibacillus sp. F5 Contig39, whole genome shotgun sequence.

SEQ ID NO: 90995 - DNA, 45 bp, Blautia sp.
  source 1..45: mol_type = unassigned DNA
  misc_feature 1..45: note = HF998991.1/15468-15512 Blautia sp. CAG:257 genomic scaffold, scf22
aataaactggttcgaaaccctcccagtataaaaaactaggttctt

SEQ ID NO: 90996 - DNA, 47 bp, Bacillus sp.
  source 1..47: mol_type = unassigned DNA
  misc_feature 1..47: note = LITN01000017.1/128519-128565 Bacillus sp. FJAT-21945 super33, whole genome shotgun sequence.
tcgggagaggttcatagcttataccctctataaaaaactatggatac

SEQ ID NO: 90997 - DNA, 45 bp, unidentified; identical to SEQ ID NO: 90816
  source 1..45: mol_type = unassigned DNA; note = Clostridiales bacterium
  misc_feature 1..45: note = MNRE01000168.1/24107-24063 Clostridiales bacterium 41_21_two_genomes Ley3_66761_scaffold_831, whole genome shotgun sequence.

SEQ ID NO: 90998 - DNA, 45 bp, Streptococcus agalactiae
  source 1..45: mol_type = unassigned DNA
  misc_feature 1..45: note = AE009948.1/545597-545553 Streptococcus agalactiae 2603V/R, complete genome.
ctcggactggttcgaaaacttcccagaataaaaaactaagtgact

SEQ ID NO: 90999 - DNA, 47 bp, unidentified
  source 1..47: mol_type = unassigned DNA; note = Bacilli bacterium
  misc_feature 1..47: note = LAZH01000014.1/8043-7997 Bacilli bacterium VT-13-104 contig014, whole genome shotgun sequence.
gcaggagaggttcgaaattccatccctctataaaaaactaaggagct

SEQ ID NO: 91000 - DNA, 44 bp, Brevibacillus choshinensis
  source 1..44: mol_type = unassigned DNA
  misc_feature 1..44: note = LJJB01000010.1/470741-470784 Brevibacillus choshinensis strain DSM 8552 scaffold2, whole genome shotgun sequence.
atgggagaggttcgcgaactccctctataaaaaactaaggtgta

SEQ ID NO: 91001 - DNA, 45 bp, Weissella confusa
  source 1..45: mol_type = unassigned DNA
  misc_feature 1..45: note = CAGH01000009.1/54494-54450 Weissella confusa LBAE C39-2, WGS project CAGH01000000 data, contig: WeissC39_1_contig00009
aagttagtggttcgtaaccatcccactcaaaaaaactaggagaga

SEQ ID NO: 91002 - DNA, 32 bp, Paenibacillus sp.; identical to SEQ ID NO: 90837
  source 1..32: mol_type = unassigned DNA
  misc_feature 1..32: note = CP001793.1/1695578-1695547 Paenibacillus sp. Y412MC10, complete genome.

SEQ ID NO: 91003 - DNA, 45 bp, Brevibacillus borstelensis
  source 1..45: mol_type = unassigned DNA
  misc_feature 1..45: note = APBN01000020.1/8663-8619 Brevibacillus borstelensis AK1 seq_num_020, whole genome shotgun sequence.
acccacgtggttcgaaaccatcccacgataaaaaactaaggagct

SEQ ID NO: 91004 - DNA, 45 bp, Tetragenococcus halophilus
  source 1..45: mol_type = unassigned DNA
  misc_feature 1..45: note = AP012046.1/1888148-1888192 Tetragenococcus halophilus NBRC 12172 DNA, complete genome.
cttggactggttcgcaaacttcccagaataaaaaaccaagaactt

SEQ ID NO: 91005 - DNA, 45 bp, unidentified
  source 1..45: mol_type = unassigned DNA; note = Gilliamella apicola
  misc_feature 1..45: note = JAIN01000026.1/15087-15131 Gilliamella apicola SCGC AB-598-I20 SCG598I20_12798, whole genome shotgun sequence.
tattacgtggttcgtgaacctcccacgctaaaaaactaaggaaaa

SEQ ID NO: 91006 - DNA, 45 bp, Pediococcus cellicola
  source 1..45: mol_type = unassigned DNA
  misc_feature 1..45: note = JQBR01000009.1/4936-4892 Pediococcus cellicola strain DSM 17757 Scaffold9, whole genome shotgun sequence.
aggttcgtggttcgcaattatcccacacaaaaaaactaaggaggt

SEQ ID NO: 91007 - DNA, 47 bp, unidentified; identical to SEQ ID NO: 90776
  source 1..47: mol_type = unassigned DNA; note = Lysinibacillus odysseyi
  misc_feature 1..47: note = JPVP01000054.1/165402-165448 Lysinibacillus odysseyi 34hs-1 = NBRC 100172 contig7, whole genome shotgun sequence.

SEQ ID NO: 91008 - DNA, 45 bp, Bacillus sp.
  source 1..45: mol_type = unassigned DNA
  misc_feature 1..45: note = LFZV01000001.1/3432111-3432155 Bacillus sp. FJAT-27916 Scaffold1, whole genome shotgun sequence.
gtaaacgtggttcgtaaccatcccacgataaaaaactaaggagag

SEQ ID NO: 91009 - DNA, 48 bp, Lactobacillus oligofermentans
  source 1..48: mol_type = unassigned DNA
  misc_feature 1..48: note = AZFE01000032.1/107206-107253 Lactobacillus oligofermentans DSM 15707 = LMG 22743 strain DSM 15707 NODE_92, whole genome shotgun sequence.
tcgttggtggttcgtaaccatcccaccagataaaaaaactagggagaa

SEQ ID NO: 91010 - DNA, 45 bp, Bacillus vireti
  source 1..45: mol_type = unassigned DNA
  misc_feature 1..45: note = ALAN01000008.1/80969-80925 Bacillus vireti LMG 21834 contig08, whole genome shotgun sequence.
tttaacgtggttcgagatcctcccacgaaaaaaaactaaggagaa

SEQ ID NO: 91011 - DNA, 44 bp, Paenibacillus sp.
  source 1..44: mol_type = unassigned DNA
  misc_feature 1..44: note = CP009279.1/3644889-3644846 Paenibacillus sp. FSL H7-0737, complete genome.
gcaggagaggttcgcgaactccctctataaaaaactaagagtat

SEQ ID NO: 91012 - DNA, 43 bp, Bacillus sp.
  source 1..43: mol_type = unassigned DNA
  misc_feature 1..43: note = GL635754.1/300045-300087 Bacillus sp. 2_A_57_CT2 genomic scaffold supercont1.5, whole genome shotgun sequence.
acggtagaggttctagctaccctctttaaaaaactaaggaaaa

SEQ ID NO: 91013 - DNA, 46 bp, unidentified
  source 1..46: mol_type = unassigned DNA; note = Listeria aquatica
  misc_feature 1..46: note = AOCG01000008.1/144836-144881 Listeria aquatica FSL S10-1188 c7, whole genome shotgun sequence.
aaaaacgtagttcgaaaccatcctacgtaaaaaaaactagggagag

SEQ ID NO: 91014 - DNA, 45 bp, Clostridium collagenovorans
  source 1..45: mol_type = unassigned DNA
  misc_feature 1..45: note = FQXP01000003.1/563277-563233 Clostridium collagenovorans DSM 3089 genome assembly, contig: EJ35DRAFT_scaffold00001.1
aatactgcagttcgtaaacctcctgcataaaaaaactaggtacct

SEQ ID NO: 91015 - DNA, 44 bp, Bacillus cereus
  source 1..44: mol_type = unassigned DNA
  misc_feature 1..44: note = CM000733.1/1012851-1012808 Bacillus cereus Rock3-44 chromosome, whole genome shotgun sequence.
atgggagaggttcgtgaactccctctataaaaaactatggaaac

SEQ ID NO: 91016 - DNA, 47 bp, unidentified
  source 1..47: mol_type = unassigned DNA; note = Lysinibacillus manganicus
  misc_feature 1..47: note = JPVN01000017.1/5303-5257 Lysinibacillus manganicus DSM 26584 contig19, whole genome shotgun sequence.
atgggagaggttcatagctgataccctctataaaaaactatggaaac

SEQ ID NO: 91017 - DNA, 45 bp, unidentified
  source 1..45: mol_type = unassigned DNA; note = Listeria fleischmannii
  misc_feature 1..45: note = AGUG01000065.1/2552-2596 Listeria fleischmannii subsp. coloradonensis strain TTU M1-001 Contig065, whole genome shotgun sequence.
aaacacgtagttcgaaaccatcctacgtaaaaaaactagggagtg

SEQ ID NO: 91018 - DNA, 45 bp, Jeotgalibacillus soli
  source 1..45: mol_type = unassigned DNA
  misc_feature 1..45: note = JXRP01000018.1/637102-637146 Jeotgalibacillus soli Cunha et al. 2012 strain P9 contig00018, whole genome shotgun sequence.
acagaagaggttcgcgaccatccctctataaaaaactagggactt

SEQ ID NO: 91019 - DNA, 45 bp, Wohlfahrtiimonas chitiniclastica
  source 1..45: mol_type = unassigned DNA
  misc_feature 1..45: note = KB372783.1/44322-44366 Wohlfahrtiimonas chitiniclastica SH04 genomic scaffold scaffold_00006, whole genome shotgun sequence.
tttcccgtggttcgcaatcctcccacacaaaaaaactaaggagtt

SEQ ID NO: 91020 - DNA, 44 bp, unidentified
  source 1..44: mol_type = unassigned DNA; note = Paenibacillus ferrarius
  misc_feature 1..44: note = MBTG01000028.1/56424-56381 Paenibacillus ferrarius strain CY1 CY1_scaffold34, whole genome shotgun sequence.
gtagaagaggttcgcaaactccctctctaaaaaactatgaaatg

SEQ ID NO: 91021 - DNA, 45 bp, unidentified
  source 1..45: mol_type = unassigned DNA; note = Pasteurellaceae bacterium
  misc_feature 1..45: note = MQVI01000066.1/6590-6546 Pasteurellaceae bacterium 15-036681 NODE_66_length_10372_cov_71.6484, whole genome shotgun sequence.
ttgaacgtggttcgtaaacctcccacgcaaaaaaactaaggaaaa

SEQ ID NO: 91022 - DNA, 48 bp, Staphylococcus sp.
  source 1..48: mol_type = unassigned DNA
  misc_feature 1..48: note = KE150417.1/204486-204439 Staphylococcus sp. HGB0015 genomic scaffold aczIz-supercont1.1, whole genome shotgun sequence.
attaaagaggttcctagcttccaaccctctataaaaaactagacacct

SEQ ID NO: 91023 - DNA, 45 bp, Bacillus sp.
  source 1..45: mol_type = unassigned DNA
  misc_feature 1..45: note = LIUR01000001.1/2531596-2531640 Bacillus sp. FJAT-22058 super1, whole genome shotgun sequence.
ctgcacgtggttcgtaaccatcccacgataaaaaactagggagag

SEQ ID NO: 91024 - DNA, 45 bp, Enterococcus columbae
  source 1..45: mol_type = unassigned DNA
  misc_feature 1..45: note = KE136496.1/77567-77523 Enterococcus columbae DSM 7374 = ATCC 51263 genomic scaffold acyDG-supercont2.6, whole genome shotgun sequence.
cttggactggttcggaaacttcccaggttaaaaaactaagaatct

SEQ ID NO: 91025 - DNA, 45 bp, Lactobacillus manihotivorans
  source 1..45: mol_type = unassigned DNA
  misc_feature 1..45: note = AZEU01000031.1/194-238 Lactobacillus manihotivorans DSM 13343 = JCM 12514 strain DSM 13343 NODE_44, whole genome shotgun sequence.
gctggcgtggttcgtaaacttcccacgataaaaaaccaagaactt

SEQ ID NO: 91026 - DNA, 45 bp, Bacillus sp.
  source 1..45: mol_type = unassigned DNA
  misc_feature 1..45: note = LFZW01000001.1/439699-439655 Bacillus sp. FJAT-27997 Scaffold1, whole genome shotgun sequence.
ggctacgtggttcgcaaccatcccacgataaaaaactagggagag

SEQ ID NO: 91027 - DNA, 43 bp, Bacillus sp.
  source 1..43: mol_type = unassigned DNA
  misc_feature 1..43: note = CP005586.1/2228864-2228906 Bacillus sp. 1NLA3E, complete genome.
tataaagaggttctagctaccctctcaaaaaaactaaggaaaa

SEQ ID NO: 91028 - DNA, 45 bp, Lactobacillus fabifermentans
  source 1..45: mol_type = unassigned DNA
  misc_feature 1..45: note = KK036465.1/48719-48763 Lactobacillus fabifermentans T30PCM01 genomic scaffold scaffold11, whole genome shotgun sequence.
cagcacgtggttcgtaaccatcccacgtaaaaaaactaggaggat

SEQ ID NO: 91029 - DNA, 44 bp, unidentified; identical to SEQ ID NO: 90814
  source 1..44: mol_type = unassigned DNA; note = [Bacillus] aminovorans
  misc_feature 1..44: note = LQWY01000017.1/35621-35664 [Bacillus] aminovorans strain DSM 1314 DSM1314_contig_24, whole genome shotgun sequence.

SEQ ID NO: 91030 - DNA, 45 bp, Lysinibacillus macroides
  source 1..45: mol_type = unassigned DNA
  misc_feature 1..45: note = LGCI01000002.1/154763-154807 Lysinibacillus macroides strain DSM 54 Scaffold3, whole genome shotgun sequence.
agcaccgtggttcgagaacctcccacgcaaaaaaactaaggagaa

SEQ ID NO: 91031 - DNA, 44 bp, Paenibacillus sp.; identical to SEQ ID NO: 90836
  source 1..44: mol_type = unassigned DNA
  misc_feature 1..44: note = MRTK01000025.1/28969-28926 Paenibacillus sp. FSL H8-0548 NODE_25_length_93061_cov_1.48596_ID_11316, whole genome shotgun sequence.

SEQ ID NO: 91032 - DNA, 47 bp, Staphylococcus capitis
  source 1..47: mol_type = unassigned DNA
  misc_feature 1..47: note = CVUF01000026.1/80798-80844 Staphylococcus capitis strain CR03 genome assembly, contig: BN1517_Contig_4
taaaaagaggttcctagccgaaaccctctataaaaaactagacgagt

SEQ ID NO: 91033 - DNA, 45 bp, Lactobacillus coryniformis
  source 1..45: mol_type = unassigned DNA
  misc_feature 1..45: note = AKFP01000034.1/11546-11502 Lactobacillus coryniformis subsp. coryniformis CECT 5711 COR000034, whole genome shotgun sequence.
tcagtggtggttcgtgaccatcccaccgaaaaaaactaggaggct

SEQ ID NO: 91034 - DNA, 46 bp, unidentified
  source 1..46: mol_type = unassigned DNA; note = Bacillus manliponensis
  misc_feature 1..46: note = JOTN01000003.1/232023-232068 Bacillus manliponensis strain JCM 15802 contig3, whole genome shotgun sequence.
tatttcgtggttcgaaaccatcccacgtaaaaaaaactaaggagat

SEQ ID NO: 91035 - DNA, 45 bp, Bacillus anthracis; identical to SEQ ID NO: 90778
  source 1..45: mol_type = unassigned DNA
  misc_feature 1..45: note = AE017334.2/1542522-1542566 Bacillus anthracis str. 'Ames Ancestor', complete genome.

SEQ ID NO: 91036 - DNA, 45 bp, unidentified
  source 1..45: mol_type = unassigned DNA; note = Snodgrassella alvi
  misc_feature 1..45: note = JFZW01000008.1/38950-38906 Snodgrassella alvi strain wkB12 wkB12_scaf008, whole genome shotgun sequence.
taccctgtggttcgtaaacctcccacattaaaaaactaggaaatc

SEQ ID NO: 91037 - DNA, 45 bp, Clostridium cadaveris
  source 1..45: mol_type = unassigned DNA
  misc_feature 1..45: note = FOOE01000015.1/41626-41670 Clostridium cadaveris strain NLAE-zl-G419 genome assembly, contig: Ga0070261_115
gtgggagaggttcgtaaccatccctctataaaaaactagggaaaa

SEQ ID NO: 91038 - DNA, 47 bp, Staphylococcus saprophyticus
  source 1..47: mol_type = unassigned DNA
  misc_feature 1..47: note = AP008934.1/2076124-2076170 Staphylococcus saprophyticus subsp. saprophyticus ATCC 15305 DNA, complete genome.
tataaagaggttcctagctgataccctctataaaaaactagacacat

SEQ ID NO: 91039 - DNA, 45 bp, Bacillus vietnamensis
  source 1..45: mol_type = unassigned DNA
  misc_feature 1..45: note = LIXZ01000001.1/277735-277691 Bacillus vietnamensis strain UCD-SED5 scaffold_0, whole genome shotgun sequence.
tcccgagaggttctagcacaaccctctataaaaaactaaggaaaa

SEQ ID NO: 91040 - DNA, 45 bp, unidentified
  source 1..45: mol_type = unassigned DNA; note = Epulopiscium sp.
  misc_feature 1..45: note = LNZR01000087.1/12411-12367 Epulopiscium sp. Nele67-Bin005 Nele67M_MBin00288, whole genome shotgun sequence.
tgctcactggttcgagaacctcccagtataaaaaactaaggcaca

SEQ ID NO: 91041 - DNA, 45 bp, Gracilibacillus halophilus
  source 1..45: mol_type = unassigned DNA
  misc_feature 1..45: note = APML01000048.1/14029-14073 Gracilibacillus halophilus YIM-C55.5 contig_48, whole genome shotgun sequence.
gcaggagaggttctagccaaaccctctataaaaaactaaggagaa

SEQ ID NO: 91042 - DNA, 45 bp, Neisseria sp.
  source 1..45: mol_type = unassigned DNA
  misc_feature 1..45: note = KB291115.1/8945-8989 Neisseria sp. oral taxon 020 str. F0370 genomic scaffold Scfld344, whole genome shotgun sequence.
caaactgtggttcgcaatccccccacaataaaaaactaaggaaac

SEQ ID NO: 91043 - DNA, 45 bp, Bacillus sp.
  source 1..45: mol_type = unassigned DNA
  misc_feature 1..45: note = KV837565.1/22328-22284 Bacillus sp. HMSC76G11 genomic scaffold Scaffold287, whole genome shotgun sequence.
gcgggagaggttctagcacaaccctctataaaaaactaagtatga

SEQ ID NO: 91044 - DNA, 45 bp, Psychrobacillus sp.
  source 1..45: mol_type = unassigned DNA
  misc_feature 1..45: note = LJIY01000016.1/53146-53102 Psychrobacillus sp. FJAT-21963 super31, whole genome shotgun sequence.
tcaaacgtggttcgtgaacctcccacttaaaaaaactaaggagaa

SEQ ID NO: 91045 - DNA, 45 bp, unidentified
  source 1..45: mol_type = unassigned DNA; note = Lachnospiraceae bacterium
  misc_feature 1..45: note = GL890571.1/293291-293335 Lachnospiraceae bacterium 9_1_43BFAA genomic scaffold supercont1.1, whole genome shotgun sequence.
tctggactggttcgtgaacttcccagtataaaaaaccaagtatct

SEQ ID NO: 91046 - DNA, 46 bp, Lactobacillus camelliae
  source 1..46: mol_type = unassigned DNA
  misc_feature 1..46: note = AYZJ01000002.1/82020-82065 Lactobacillus camelliae DSM 22697 = JCM 13995 strain DSM 22697 NODE_6, whole genome shotgun sequence.
ggagtcgtggttcgcaatccatcccacgtaaaaaaactaggaggtc

SEQ ID NO: 91047 - DNA, 47 bp, Caryophanon tenue
  source 1..47: mol_type = unassigned DNA
  misc_feature 1..47: note = MASJ01000017.1/28873-28827 Caryophanon tenue strain DSM 14152 DSM_14152_R1_001_contig_24, whole genome shotgun sequence.
tcaggagaggttcatagcgcataccctctataaaaaactatggatac

SEQ ID NO: 91048 - DNA, 45 bp, Oceanobacillus iheyensis
  source 1..45: mol_type = unassigned DNA
  misc_feature 1..45: note = BA000028.3/467676-467632 Oceanobacillus iheyensis HTE831 DNA, complete genome.
atcaccgtggttcgtaaccatcccacgcaaaaaaactaggaagga

SEQ ID NO: 91049 - DNA, 45 bp, Weissella halotolerans
  source 1..45: mol_type = unassigned DNA
  misc_feature 1..45: note = JQAX01000001.1/208491-208535 Weissella halotolerans DSM 20190 Scaffold1, whole genome shotgun sequence.
atgtatgtggttcgtaaccatcccacacaaaaaaactaggagatt

SEQ ID NO: 91050 - DNA, 47 bp, Coprobacillus sp.
  source 1..47: mol_type = unassigned DNA
  misc_feature 1..47: note = GL636577.1/70635-70681 Coprobacillus sp. 29_1 genomic scaffold supercont1.1, whole genome shotgun sequence.
attgcactggttcgagagccaaacccagtataaaaaactaaggacat

SEQ ID NO: 91051 - DNA, 45 bp, Chelonobacter oris
  source 1..45: mol_type = unassigned DNA
  misc_feature 1..45: note = JSUM01000010.1/192918-192962 Chelonobacter oris strain 1662 contig000009, whole genome shotgun sequence.
atcaacgtggttcgtaaccctcccacgcaaaaaaactaggataaa

SEQ ID NO: 91052 - DNA, 45 bp, Enterococcus faecalis
  source 1..45: mol_type = unassigned DNA
  misc_feature 1..45: note = AE016830.1/2504809-2504853 Enterococcus faecalis V583, complete genome.
ctcggactggttcggaaacttcccagaataaaaaactaagtatct

SEQ ID NO: 91053 - DNA, 45 bp, Bacillus cibi
  source 1..45: mol_type = unassigned DNA
  misc_feature 1..45: note = JNVC02000001.1/552380-552424 Bacillus cibi strain DSM 16189 Contig01, whole genome shotgun sequence.
gcgggagaggttctagcacaaccctctataaaaaactaagatcaa

SEQ ID NO: 91054 - DNA, 45 bp, Enterococcus hermanniensis
  source 1..45: mol_type = unassigned DNA
  misc_feature 1..45: note = JXKQ01000003.1/147908-147864 Enterococcus hermanniensis strain DSM 17122 Scaffold3, whole genome shotgun sequence.
cttggactggttcgtaaacttcccaggtaaaaaaactaagtatct

SEQ ID NO: 91055 - DNA, 45 bp, Kurthia sp.
  source 1..45: mol_type = unassigned DNA
  misc_feature 1..45: note = CP013217.1/2567808-2567852 Kurthia sp. 11kri321, complete genome.
ttcaacgtggttcgtaaccatcccacgaaaaaaaactaaggagaa

SEQ ID NO: 91056 - DNA, 45 bp, Lactobacillus plantarum
  source 1..45: mol_type = unassigned DNA
  misc_feature 1..45: note = AL935263.2/2519559-2519515 Lactobacillus plantarum WCFS1 complete genome
gctggcctggttcgtaaacttcccaggataaaaaaccaagaactt

SEQ ID NO: 91057 - DNA, 46 bp, Neisseria dentiae
  source 1..46: mol_type = unassigned DNA
  misc_feature 1..46: note = MTBO01000005.1/59475-59520 Neisseria dentiae strain DSM 19151 NODE_5_length_90746_cov_19.8067_ID_9, whole genome shotgun sequence.
tgcattgtggttcgcaaacctcccacattaaaaaaactaaggaact

SEQ ID NO: 91058 - DNA, 44 bp, Bacillus megaterium
  source 1..44: mol_type = unassigned DNA
  misc_feature 1..44: note = CP001983.1/1262740-1262783 Bacillus megaterium QM B1551, complete genome.
acgggagaggttcgaaaactccctctataaaaaactaagatcat

SEQ ID NO: 91059 - DNA, 45 bp, Clostridium sp.
  source 1..45: mol_type = unassigned DNA
  misc_feature 1..45: note = FR889797.1/1681-1725 Clostridium sp. CAG:58 genomic scaffold, scf167
tccccactggttcgtgaacctcccagtataaaaaactaggcataa

SEQ ID NO: 91060 - DNA, 47 bp, Lysinibacillus sp.
  source 1..47: mol_type = unassigned DNA
  misc_feature 1..47: note = JPUW01000042.1/1418-1464 Lysinibacillus sp. BF-4 contig00042, whole genome shotgun sequence.
taaaaagaggttcatagcagataccctctataaaaaactatggaatg

SEQ ID NO: 91061 - DNA, 44 bp, Aeribacillus pallidus
  source 1..44: mol_type = unassigned DNA
  misc_feature 1..44: note = LWBR01000072.1/51284-51241 Aeribacillus pallidus strain 8m3 NODE_7, whole genome shotgun sequence.
acgggagaggttctagcacaccctctataaaaaactaaggaaaa

SEQ ID NO: 91062 - DNA, 44 bp, Planomicrobium glaciei
  source 1..44: mol_type = unassigned DNA
  misc_feature 1..44: note = FNDC01000010.1/113014-112971 Planomicrobium glaciei strain CGMCC 1.6846 genome assembly, contig: Ga0070170_110
aaaaaagaggttcgcaaactccctctctaaaaaactaaggagat

SEQ ID NO: 91063 - DNA, 45 bp, Bacillus shackletonii
  source 1..45: mol_type = unassigned DNA
  misc_feature 1..45: note = LJJC01000015.1/535886-535930 Bacillus shackletonii strain LMG 18435 super49, whole genome shotgun sequence.
taatacgtggttcgaaaccatcccacgataaaaaactaagggaga

SEQ ID NO: 91064 - DNA, 44 bp, Bacillus sp.
  source 1..44: mol_type = unassigned DNA
  misc_feature 1..44: note = LXGJ01000139.1/5993-6036 Bacillus sp. WF146 contig139, whole genome shotgun sequence.
atgggagaggttcgcgaactccctctataaaaaactaaggtgaa

SEQ ID NO: 91065 - DNA, 45 bp, Pediococcus argentinicus
  source 1..45: mol_type = unassigned DNA
  misc_feature 1..45: note = JQCQ01000030.1/570-614 Pediococcus argentinicus strain DSM 23026 Scaffold30, whole genome shotgun sequence.
aaaaccgtggttcgcaattatcccacgtaaaaaaactaaggagta

SEQ ID NO: 91066 - DNA, 45 bp, unidentified
  source 1..45: mol_type = unassigned DNA; note = Bacillus gobiensis
  misc_feature 1..45: note = CP012600.1/4521414-4521370 Bacillus gobiensis strain FJAT-4402 chromosome.
caggacgtggttcgtaaccatcccacgataaaaaactaaggagag

SEQ ID NO: 91067 - DNA, 45 bp, Neisseria bacilliformis
  source 1..45: mol_type = unassigned DNA
  misc_feature 1..45: note = GL878494.1/1663561-1663605 Neisseria bacilliformis ATCC BAA-1200 genomic scaffold SCAFFOLD1, whole genome shotgun sequence.
tccagtgtggttcgcaaccctcccacaataaaaaactaaggaaac

SEQ ID NO: 91068 - DNA, 45 bp, Lactobacillus algidus
  source 1..45: mol_type = unassigned DNA
  misc_feature 1..45: note = AZDI01000006.1/73873-73917 Lactobacillus algidus DSM 15638 Scaffold6, whole genome shotgun sequence.
aaaaacgtggttcgtaaccatcccacgctaaaaaactaagggagt

SEQ ID NO: 91069 - DNA, 45 bp, Wohlfahrtiimonas chitiniclastica
  source 1..45: mol_type = unassigned DNA
  misc_feature 1..45: note = KB372780.1/107356-107312 Wohlfahrtiimonas chitiniclastica SH04 genomic scaffold scaffold_00003, whole genome shotgun sequence.
tgagcagaggttctagcgcaaccctctataaaaaactaaggagat

SEQ ID NO: 91070 - DNA, 43 bp, Bacillus selenatarsenatis
  source 1..43: mol_type = unassigned DNA
  misc_feature 1..43: note = BASE01000035.1/55850-55892 Bacillus selenatarsenatis SF-1 DNA, contig: BSSF00035.
acggaagaggttctagctaccctctcaaaaaaactaagggaaa

SEQ ID NO: 91071 - DNA, 44 bp, unidentified
  source 1..44: mol_type = unassigned DNA; note = Paenibacillaceae bacterium
  misc_feature 1..44: note = LT629764.1/1970393-1970350 Paenibacillaceae bacterium GAS479 genome assembly, chromosome: I
tcgggagaggttcgcgaactccctctataaaaaactacagcaca

SEQ ID NO: 91072 - DNA, 44 bp, Bacillus azotoformans
  source 1..44: mol_type = unassigned DNA
  misc_feature 1..44: note = AJLR01000147.1/11210-11253 Bacillus azotoformans LMG 9581 contig147, whole genome shotgun sequence.
atggcagcagttcgaaaaatcctgctttaaaaaactaaggagat

SEQ ID NO: 91073 - DNA, 45 bp, unidentified
  source 1..45: mol_type = unassigned DNA; note = Bacillus gaemokensis
  misc_feature 1..45: note = JOTM01000005.1/127501-127457 Bacillus gaemokensis strain JCM 15801 contig5, whole genome shotgun sequence.
aatcacgtggttcgaaaccatcccacgtaaaaaaactaaggagat

SEQ ID NO: 91074 - DNA, 45 bp, Bacillus sp.
  source 1..45: mol_type = unassigned DNA
  misc_feature 1..45: note = AP013294.1/1241564-1241520 Bacillus sp. OxB-1 DNA, complete genome.
ttgcccgtggttcgaaaccatcccacgtaaaaaaactaggaggaa

SEQ ID NO: 91075 - DNA, 44 bp, Bacillus sp.
  source 1..44: mol_type = unassigned DNA
  misc_feature 1..44: note = MAQW01000001.1/55474-55431 Bacillus sp. FJAT-27264 scaffold1, whole genome shotgun sequence.
gtaggagaggttcgcaaactccctctataaaaaactaagaccct

SEQ ID NO: 91076 - DNA, 44 bp, unidentified
  source 1..44: mol_type = unassigned DNA; note = [Clostridium] purinilyticum
  misc_feature 1..44: note = LGSS01000003.1/9849-9806 [Clostridium] purinilyticum strain DSM 1384 CLPU_3c, whole genome shotgun sequence.
atgggactggttcgagaactcccagtataaaaaactaaggattt

SEQ ID NO: 91077 - DNA, 45 bp, unidentified
  source 1..45: mol_type = unassigned DNA; note = Halobacillus karajensis,
  misc_feature 1..45: note = CCDI010000002.1/585815-585771 Halobacillus karajensis, HD-03, WGS project CCDI01000000 data, contig: 000002
gcaggagaggttctagctacaccctctataaaaaactaaggatgg

SEQ ID NO: 91078 - DNA, 45 bp, unidentified
  source 1..45: mol_type = unassigned DNA; note = Gilliamella sp.
  misc_feature 1..45: note = FMAQ01000001.1/2206-2162 Gilliamella sp. R-53248 genome assembly, contig: Ga0061081_101
tgttacgtggttcgtaaacctcccacgctaaaaaactaaggaaca

SEQ ID NO: 91079 - DNA, 44 bp, Paenibacillus wynnii
  source 1..44: mol_type = unassigned DNA
  misc_feature 1..44: note = JQCR01000003.1/1157348-1157305 Paenibacillus wynnii strain DSM 18334 unitig_3_1r, whole genome shotgun sequence.
gcaggagaggttcgaaaactccctctataaaaaactaagaccgc

SEQ ID NO: 91080 - DNA, 46 bp, Bacillus sp.
  source 1..46: mol_type = unassigned DNA
  misc_feature 1..46: note = MAQW01000023.1/68499-68544 Bacillus sp. FJAT-27264 scaffold3, whole genome shotgun sequence.
ggaaccgcggttcgtaaccatcccgcgtaaacaaaactaggaggag

SEQ ID NO: 91081 - DNA, 45 bp, Enterococcus sp.
  source 1..45: mol_type = unassigned DNA
  misc_feature 1..45: note = LHOX01000016.1/200445-200489 Enterococcus sp. RIT-PI-f contig_6, whole genome shotgun sequence.
cttggactggttcgaaaacttcccaggttaaaaaactaagtatct

SEQ ID NO: 91082 - DNA, 45 bp, Bacillus sp.
  source 1..45: mol_type = unassigned DNA
  misc_feature 1..45: note = JAQV02000022.1/108751-108795 Bacillus sp. SJS contig_22, whole genome shotgun sequence.
tcggtcgtggttcgaaatcctcccacgaaaaaaaactaaggagca

SEQ ID NO: 91083 - DNA, 45 bp, Bacillus koreensis
  source 1..45: mol_type = unassigned DNA
  misc_feature 1..45: note = LILC01000013.1/210877-210833 Bacillus koreensis strain DSM 16467 scaffold2, whole genome shotgun sequence.
cacggcgtggttcgtaaccatcccacgtaaaaaaactaaggagaa

SEQ ID NO: 91084 - DNA, 44 bp, Paenibacillus macerans
  source 1..44: mol_type = unassigned DNA
  misc_feature 1..44: note = KN125580.1/5604621-5604664 Paenibacillus macerans strain 8244 genomic scaffold scaffold1, whole genome shotgun sequence.
atgggagaggttcgagaactccctctataaaaaactataaaacg

SEQ ID NO: 91085 - DNA, 45 bp, Bacillus sp.
  source 1..45: mol_type = unassigned DNA
  misc_feature 1..45: note = MLYR01000019.1/80008-80052 Bacillus sp. MUM 116 19, whole genome shotgun sequence.
ttaaacgtggttcgaaaacctcccacgaaaaaaaactaaggagag

SEQ ID NO: 91086 - DNA, 44 bp, Streptococcus sp.; identical to SEQ ID NO: 90903
  source 1..44: mol_type = unassigned DNA
  misc_feature 1..44: note = CM002131.1/1293088-1293131 Streptococcus sp. HSISB1 chromosome, whole genome shotgun sequence.

SEQ ID NO: 91087 - DNA, 43 bp, Bacillus sp.
  source 1..43: mol_type = unassigned DNA
  misc_feature 1..43: note = CP008855.1/261175-261133 Bacillus sp. X1(2014), complete genome.
gcgggagaggttctagctaccctctataaaaaactaaggaaaa

SEQ ID NO: 91088 - DNA, 45 bp, unidentified
  source 1..45: mol_type = unassigned DNA; note = Mannheimia succiniciproducens
  misc_feature 1..45: note = AE016827.1/1848390-1848434 Mannheimia succiniciproducens MBEL55E, complete genome.
taattcgtggttcgaaaacctcccacgcaaaaaaactaaggaaaa

SEQ ID NO: 91089 - DNA, 44 bp, Paenibacillus sp.
  source 1..44: mol_type = unassigned DNA
  misc_feature 1..44: note = CP009241.1/4345416-4345373 Paenibacillus sp. FSL H7-0357, complete genome.
gcaggagaggttcgcaaactccctctataaaaaactaagacatc

SEQ ID NO: 91090 - DNA, 48 bp, Bacillus shackletonii
  source 1..48: mol_type = unassigned DNA
  misc_feature 1..48: note = LJJC01000015.1/392571-392524 Bacillus shackletonii strain LMG 18435 super49, whole genome shotgun sequence.
acgggagaggttcatagcacaaaaccctctataaaaaactatggatac

SEQ ID NO: 91091 - DNA, 45 bp, Bacillus sp.
  source 1..45: mol_type = unassigned DNA
  misc_feature 1..45: note = MPHG01000178.1/51018-51062 Bacillus sp. VT-16-70 Bacillus_obstructivus_contig183, whole genome shotgun sequence.
tcaaacgtggttcgaaaccatcccacgataaaaaactaaggagag

SEQ ID NO: 91092 - DNA, 45 bp, Pontibacillus chungwhensis
  source 1..45: mol_type = unassigned DNA
  misc_feature 1..45: note = AVBG01000008.1/29242-29198 Pontibacillus chungwhensis BH030062 contig7, whole genome shotgun sequence.
gcaggagaggttctagctacaccctctataaaaaactaaggatcg

SEQ ID NO: 91093 - DNA, 44 bp, Paenibacillus polymyxa
  source 1..44: mol_type = unassigned DNA
  misc_feature 1..44: note = CP002213.2/1292324-1292281 Paenibacillus polymyxa SC2, complete genome.
atgggagaggttcgcgaactccctctataaaaaactaacgatgc

SEQ ID NO: 91094 - DNA, 45 bp, unidentified
  source 1..45: mol_type = unassigned DNA; note = Salegentibacter echinorum
  misc_feature 1..45: note = FQVT01000014.1/7964-7920 Salegentibacter echinorum strain DSM 24579 genome assembly, contig: Ga0131147_114
agaccagtggttcgaaattctcccacattaaaaaactaaaaaagg

SEQ ID NO: 91095 - DNA, 45 bp, Bacillus subterraneus
  source 1..45: mol_type = unassigned DNA
  misc_feature 1..45: note = JXIQ01000016.1/29800-29756 Bacillus subterraneus strain MITOT1 contig_16, whole genome shotgun sequence.
aatatcgtggttcgtaaccatcccacgtaaaaaaactaggagaga

SEQ ID NO: 91096 - DNA, 44 bp, Brevibacillus sp.
  source 1..44: mol_type = unassigned DNA
  misc_feature 1..44: note = AKKB01000097.1/6317-6360 Brevibacillus sp. CF112 PMI08_contig_122.122, whole genome shotgun sequence.
gcgggagaggttcgcgaactccctctataaaaaactaaggtgga

SEQ ID NO: 91097 - DNA, 44 bp, Bacillus halodurans
  source 1..44: mol_type = unassigned DNA
  misc_feature 1..44: note = BA000004.3/2373342-2373299 Bacillus halodurans C-125 DNA, complete genome.
gtgagagaggttcgcgaactccctctataaaaaactaaggcaag

SEQ ID NO: 91098 - DNA, 47 bp, Bacillus galactosidilyticus
  source 1..47: mol_type = unassigned DNA
  misc_feature 1..47: note = LGPB01000135.1/6871-6825 Bacillus galactosidilyticus strain PL133 scaffold000135, whole genome shotgun sequence.
gcagaagaggttcgcaattccatccctctataaaaaactaaggagac

SEQ ID NO: 91099 - DNA, 45 bp, Bacillus megaterium
  source 1..45: mol_type = unassigned DNA
  misc_feature 1..45: note = CP001983.1/465480-465524 Bacillus megaterium QM B1551, complete genome.
gtttacgtggttcgtaaccatcccacgttaaaaaactaaggagag

SEQ ID NO: 91100 - DNA, 47 bp, Bacillus bataviensis
  source 1..47: mol_type = unassigned DNA
  misc_feature 1..47: note = AJLS01000114.1/179237-179283 Bacillus bataviensis LMG 21833 contig114, whole genome shotgun sequence.
acgggagaggttcatagctgataccctctataaaaaactatggatat

SEQ ID NO: 91101 - DNA, 45 bp, Salinicoccus halodurans
  source 1..45: mol_type = unassigned DNA
  misc_feature 1..45: note = CP011366.1/2734534-2734490 Salinicoccus halodurans strain H3B36, complete genome.
ttatcacaggttcgagatcctccctgtataaaaaactaaggagat

SEQ ID NO: 91102 - DNA, 44 bp, unidentified
  source 1..44: mol_type = unassigned DNA; note = Paenibacillus yonginensis
  misc_feature 1..44: note = CP014167.1/547933-547890 Paenibacillus yonginensis strain DCY84 chromosome, complete genome.
atgggagaggttcgagaactccctctataaaaaactaatcagca

SEQ ID NO: 91103 - DNA, 44 bp, Neisseria wadsworthii
  source 1..44: mol_type = unassigned DNA
  misc_feature 1..44: note = JH165159.1/2343808-2343851 Neisseria wadsworthii 9715 genomic scaffold SCAFFOLD1, whole genome shotgun sequence.
ttccctgtggttcgcaaactcccacattaaaaaactaaggaatc

SEQ ID NO: 91104 - DNA, 46 bp, Leuconostoc mesenteroides
  source 1..46: mol_type = unassigned DNA
  misc_feature 1..46: note = CP000414.1/1235047-1235002 Leuconostoc mesenteroides subsp. mesenteroides ATCC 8293, complete genome.
ataatagcggttcatcaaccatcccgcttaaaaaaactaggagata

SEQ ID NO: 91105 - DNA, 45 bp, Clostridium sulfidigenes
  source 1..45: mol_type = unassigned DNA
  misc_feature 1..45: note = JPMD01000024.1/4709-4753 Clostridium sulfidigenes strain 113A c24, whole genome shotgun sequence.
gtgggagaggttcgtaaccatccctctataaaaaactagggaata

SEQ ID NO: 91106 - DNA, 45 bp, Bacillus thuringiensis; identical to SEQ ID NO: 90778
  source 1..45: mol_type = unassigned DNA
  misc_feature 1..45: note = AAJM01000043.1/9570-9526 Bacillus thuringiensis serovar israelensis ATCC 35646 sq1897, whole genome shotgun sequence.

SEQ ID NO: 91107 - DNA, 48 bp, Paraliobacillus sp.
  source 1..48: mol_type = unassigned DNA
  misc_feature 1..48: note = CTEI01000001.1/286297-286344 Paraliobacillus sp. PM-2 genome assembly, contig: CONTIG000001
acgggagaggttcttagcaataaaccctctataaaaaactaaggacat

SEQ ID NO: 91108 - DNA, 48 bp, Lactobacillus ghanensis
  source 1..48: mol_type = unassigned DNA
  misc_feature 1..48: note = AZGB01000018.1/77495-77542 Lactobacillus ghanensis DSM 18630 NODE_39, whole genome shotgun sequence.
tgccgggtggttcgtaaacatcccaccgtaataaaaaactaggaggaa

SEQ ID NO: 91109 - DNA, 44 bp, unidentified
  source 1..44: mol_type = unassigned DNA; note = Bacillus manliponensis
  misc_feature 1..44: note = JOTN01000003.1/19603-19646 Bacillus manliponensis strain JCM 15802 contig3, whole genome shotgun sequence.
acgggagaggttcgcgaactccctctataaaaaactaaggagaa

SEQ ID NO: 91110 - DNA, 45 bp, Enterococcus ratti
  source 1..45: mol_type = unassigned DNA
  misc_feature 1..45: note = JXLB01000023.1/1700-1656 Enterococcus ratti strain DSM 15687 Scaffold23, whole genome shotgun sequence.
tttggactggttcgaaaacttcccagaataaaaaactaagtatct

SEQ ID NO: 91111 - DNA, 45 bp, Enterococcus faecium
  source 1..45: mol_type = unassigned DNA
  misc_feature 1..45: note = CP003583.1/2007885-2007929 Enterococcus faecium DO, complete genome.
cttggactggttcggaaacttcccagaataaaaaactaagtatct

SEQ ID NO: 91112 - DNA, 45 bp, Enterococcus villorum; identical to SEQ ID NO: 91111
  source 1..45: mol_type = unassigned DNA
  misc_feature 1..45: note = KB946287.1/678420-678464 Enterococcus villorum ATCC 700913 genomic scaffold acvIF-supercont1.8, whole genome shotgun sequence.

SEQ ID NO: 91113 - DNA, 46 bp, Lactobacillus plantarum
  source 1..46: mol_type = unassigned DNA
  misc_feature 1..46: note = AL935263.2/482228-482273 Lactobacillus plantarum WCFS1 complete genome
caatacgtggttcgtaaccatcccacgttaaaaaaactaggaggaa

SEQ ID NO: 91114 - DNA, 45 bp, Streptococcus ictaluri
  source 1..45: mol_type = unassigned DNA
  misc_feature 1..45: note = AEUX02000001.1/125491-125447 Streptococcus ictaluri 707-05 Contig1217055106, whole genome shotgun sequence.
cctggactggttcgaaaacttcccagaataaaaaactaagtaacc

SEQ ID NO: 91115 - DNA, 45 bp, Eubacterium limosum
  source 1..45: mol_type = unassigned DNA
  misc_feature 1..45: note = CP002273.2/2056081-2056125 Eubacterium limosum KIST612, complete genome.
aacggagaggttcgtaaccatccctctataaaaaactaaggaaag

SEQ ID NO: 91116 - DNA, 44 bp, Brevibacillus parabrevis; identical to SEQ ID NO: 91096
  source 1..44: mol_type = unassigned DNA
  misc_feature 1..44: note = LQQV01000079.1/7777-7734 Brevibacillus parabrevis strain CN1 contig_47, whole genome shotgun sequence.

SEQ ID NO: 91117 - DNA, 45 bp, unidentified
  source 1..45: mol_type = unassigned DNA; note = Bacillus gobiensis
  misc_feature 1..45: note = CP012600.1/839124-839168 Bacillus gobiensis strain FJAT-4402 chromosome.
acgggagaggttctagaaaaaccctctataaaaaactaaggactc

SEQ ID NO: 91118 - DNA, 44 bp, Bacillus akibai
  source 1..44: mol_type = unassigned DNA
  misc_feature 1..44: note = BAUV01000036.1/7316-7359 Bacillus akibai JCM 9157 DNA, contig:contig_36.
aggaaagaggttcgcaaactccctctataaaaaactaaggtagt

SEQ ID NO: 91119 - DNA, 46 bp, Simonsiella muelleri
  source 1..46: mol_type = unassigned DNA
  misc_feature 1..46: note = JH815302.1/51976-51931 Simonsiella muelleri ATCC 29453 genomic scaffold supercont1.3, whole genome shotgun sequence.
caaaacgcggttcgcaaccctcccgcgataacaaaactaaggaatt

SEQ ID NO: 91120 - DNA, 47 bp, unidentified
  source 1..47: mol_type = unassigned DNA; note = Listeria floridensis
  misc_feature 1..47: note = AODF01000021.1/21107-21153 Listeria floridensis FSL S10-1187 c19, whole genome shotgun sequence.
aaaaacgtagttcgaaaccatcctacgtaaaaaaaaactagggagag

SEQ ID NO: 91121 - DNA, 44 bp, Paenibacillus sp.
  source 1..44: mol_type = unassigned DNA
  misc_feature 1..44: note = AFDH01000025.1/178849-178892 Paenibacillus sp. HGF7 contig00140, whole genome shotgun sequence.
atgggagaggttcgcgaactccctctataaaaaactaaggaaaa

SEQ ID NO: 91122 - DNA, 44 bp, Paenibacillus sp.
  source 1..44: mol_type = unassigned DNA
  misc_feature 1..44: note = JRNV01000013.1/53982-54025 Paenibacillus sp. P1XP2 CM49_contig000013, whole genome shotgun sequence.
ccgggagaggttcgcgaactccctctataaaaaactaaggtcgc

SEQ ID NO: 91123 - DNA, 45 bp, Bacillus cereus; identical to SEQ ID NO: 91073
  source 1..45: mol_type = unassigned DNA
  misc_feature 1..45: note = CM000733.1/1293517-1293473 Bacillus cereus Rock3-44 chromosome, whole genome shotgun sequence.

SEQ ID NO: 91124 - DNA, 45 bp, Streptococcus sinensis
  source 1..45: mol_type = unassigned DNA
  misc_feature 1..45: note = JPEN01000012.1/34343-34299 Streptococcus sinensis strain HKU4 scaffold1, whole genome shotgun sequence.
tttggactggttcgcaaacttcccagtataaaaaactaagtaccc

SEQ ID NO: 91125 - DNA, 47 bp, Virgibacillus soli; identical to SEQ ID NO: 91098
  source 1..47: mol_type = unassigned DNA
  misc_feature 1..47: note = LGPD01000028.1/6630-6584 Virgibacillus soli strain PL205 scaffold000028, whole genome shotgun sequence.

SEQ ID NO: 91126 - DNA, 45 bp, Clostridium celatum
  source 1..45: mol_type = unassigned DNA
  misc_feature 1..45: note = KB291616.1/58316-58360 Clostridium celatum DSM 1785 genomic scaffold Scfld23, whole genome shotgun sequence.
ctgagagaggttcgtaaccatccctctataaaaaactaggaccct

SEQ ID NO: 91127 - DNA, 45 bp, Neisseria sp.
  source 1..45: mol_type = unassigned DNA
  misc_feature 1..45: note = JTDO01000005.1/62727-62683 Neisseria sp. KH1503 contig5, whole genome shotgun sequence.
gcacttgtggttcgagaacctcccacataaaaaaactaaggaaat

SEQ ID NO: 91128 - DNA, 44 bp, Bacillus pseudofirmus
  source 1..44: mol_type = unassigned DNA
  misc_feature 1..44: note = CP001878.2/2145499-2145456 Bacillus pseudofirmus OF4, complete genome.
gtgaaagaggttcgcaaactccctctataaaaaactataaatga

SEQ ID NO: 91129 - DNA, 44 bp, Saccharibacillus sacchari
  source 1..44: mol_type = unassigned DNA
  misc_feature 1..44: note = KK073875.1/886565-886608 Saccharibacillus sacchari DSM 19268 genomic scaffold SacsacDRAFT_Scaffold1.1, whole genome shotgun sequence.
acgggagaggttcgagaactccctctataaaaaactaatcgctg

SEQ ID NO: 91130 - DNA, 44 bp, Bacillus alcalophilus
  source 1..44: mol_type = unassigned DNA
  misc_feature 1..44: note = ALPT02000006.1/78699-78656 Bacillus alcalophilus ATCC 27647 = CGMCC 1.3604 strain AV1934 contig00006, whole genome shotgun sequence.
ccataagaggttcgcaaactccctctataaaaaactatacaaga

SEQ ID NO: 91131 - DNA, 46 bp, Paenibacillus sp.
  source 1..46: mol_type = unassigned DNA
  misc_feature 1..46: note = CP009284.1/1381743-1381788 Paenibacillus sp. FSL R7-0331, complete genome.
ataaccgcggttcgtaaccatcccgcgtaaccaaaactaggaggat

SEQ ID NO: 91132 - DNA, 47 bp, Coprobacillus sp.
  source 1..47: mol_type = unassigned DNA
  misc_feature 1..47: note = HF995054.1/55493-55447 Coprobacillus sp. CAG:235 genomic scaffold, scf160
caaagactggttcgagagccaaacccagtataaaaaactaagaataa

SEQ ID NO: 91133 - DNA, 43 bp, Bacillus ginsengihumi; identical to SEQ ID NO: 91012
  source 1..43: mol_type = unassigned DNA
  misc_feature 1..43: note = JRUN01000001.1/134866-134824 Bacillus ginsengihumi strain M2.11 NODE_1, whole genome shotgun sequence.

SEQ ID NO: 91134 - DNA, 44 bp, Bacillus clausii
  source 1..44: mol_type = unassigned DNA
  misc_feature 1..44: note = AP006627.1/2249570-2249527 Bacillus clausii KSM-K16 DNA, complete genome.
aaagaagaggttcgcgaactccctctataaaaaactaaccaatt

SEQ ID NO: 91135 - DNA, 45 bp, Lactobacillus floricola
  source 1..45: mol_type = unassigned DNA
  misc_feature 1..45: note = AYZL01000020.1/26121-26077 Lactobacillus floricola DSM 23037 = JCM 16512 strain DSM 23037 NODE_63, whole genome shotgun sequence.
aattttgtggttcgaaaccatcccacataaaaaaactaggagtga

SEQ ID NO: 91136 - DNA, 44 bp, Bacillus cereus
  source 1..44: mol_type = unassigned DNA
  misc_feature 1..44: note = CM000735.1/1161457-1161414 Bacillus cereus Rock4-18 chromosome, whole genome shotgun sequence.
atgggagaggttcgcgaactccctctataaaaaactatggaaac

SEQ ID NO: 91137 - DNA, 44 bp, Bacillus koreensis
  source 1..44: mol_type = unassigned DNA
  misc_feature 1..44: note = LILC01000002.1/377693-377736 Bacillus koreensis strain DSM 16467 scaffold1, whole genome shotgun sequence.
gcgggagaggttcgcgaactccctctataaaaaactatagaaag

SEQ ID NO: 91138 - DNA, 47 bp, Salinicoccus halodurans
  source 1..47: mol_type = unassigned DNA
  misc_feature 1..47: note = CP011366.1/439004-439050 Salinicoccus halodurans strain H3B36, complete genome.
tatgaagaggttcttagcccaaaccctctataaaaaactaagccacg

SEQ ID NO: 91139 - DNA, 47 bp, unidentified
  source 1..47: mol_type = unassigned DNA; note = Oceanobacillus picturae,
  misc_feature 1..47: note = CCAX010000001.1/1797810-1797764 Oceanobacillus picturae, S1, WGS project CCAX01000000 data, contig: 000001
atgcgagaggttcttagcttaaaccctctataaaaaactaaggacag

SEQ ID NO: 91140 - DNA, 47 bp, unidentified
  source 1..47: mol_type = unassigned DNA; note = Stoquefichus sp.
  misc_feature 1..47: note = KQ970938.1/11447-11493 Candidatus Stoquefichus sp. KLE1796 genomic scaffold Scaffold420, whole genome shotgun sequence.
atgacactggttcgagagccaaacccagtataaaaaactaaggacat

SEQ ID NO: 91141 - DNA, 45 bp, Lactobacillus coryniformis
  source 1..45: mol_type = unassigned DNA
  misc_feature 1..45: note = AKFP01000001.1/86634-86590 Lactobacillus coryniformis subsp. coryniformis CECT 5711 COR000001, whole genome shotgun sequence.
tctggactggttcggaaacttcccagaataaaaaaccaagtatct

SEQ ID NO: 91142 - DNA, 44 bp, unidentified
  source 1..44: mol_type = unassigned DNA; note = Paenibacillus beijingensis
  misc_feature 1..44: note = CP011058.1/2709642-2709685 Paenibacillus beijingensis strain DSM 24997, complete genome.
ccgggagaggttcgcgaactccctctataaaaaactaagacaac

SEQ ID NO: 91143 - DNA, 46 bp, unidentified
  source 1..46: mol_type = unassigned DNA; note = Clostridium taeniosporum
  misc_feature 1..46: note = CP017253.1/2613466-2613421 Clostridium taeniosporum strain 1/k, complete genome.
gtggtagaggttcgaagaccatccctctataaaaaactaggcaatt

SEQ ID NO: 91144 - DNA, 47 bp, Clostridium celatum
  source 1..47: mol_type = unassigned DNA
  misc_feature 1..47: note = KB291645.1/153593-153547 Clostridium celatum DSM 1785 genomic scaffold Scfld77, whole genome shotgun sequence.
ctaggagaggttcgtatgaccatccctctataaaaaactaggcttag

SEQ ID NO: 91145 - DNA, 48 bp, Listeria monocytogenes
  source 1..48: mol_type = unassigned DNA
  misc_feature 1..48: note = AL591824.1/907926-907973 Listeria monocytogenes EGD-e, complete genome
ccacacgtggttcattcataccatcccacgtaaaaaaactaggaggaa

SEQ ID NO: 91146 - DNA, 44 bp, Bacillus lehensis
  source 1..44: mol_type = unassigned DNA
  misc_feature 1..44: note = CP003923.1/2072394-2072351 Bacillus lehensis G1, complete genome.
aagaaagaggttcgcgaactccctctataaaaaactatgcaagt

SEQ ID NO: 91147 - DNA, 44 bp, Planococcus sp.
  source 1..44: mol_type = unassigned DNA
  misc_feature 1..44: note = CP009129.1/1124724-1124681 Planococcus sp. PAMC 21323, complete genome.
gttaaagaggttcgcaaactccctctctaaaaaactaaggagtg

SEQ ID NO: 91148 - DNA, 45 bp, Bacillus cellulosilyticus
  source 1..45: mol_type = unassigned DNA
  misc_feature 1..45: note = CP002394.1/2569718-2569762 Bacillus cellulosilyticus DSM 2522, complete genome.
gcagcagaggttctagctacaccctctataaaaaactaaggagac

SEQ ID NO: 91149 - DNA, 45 bp, Mycobacterium abscessus; identical to SEQ ID NO: 91052
  source 1..45: mol_type = unassigned DNA
  misc_feature 1..45: note = CSXB01000058.1/14666-14622 Mycobacterium abscessus strain PAP053 genome assembly, contig: ERS075544SCcontig000058

SEQ ID NO: 91150 - DNA, 45 bp, Pontibacillus chungwhensis
  source 1..45: mol_type = unassigned DNA
  misc_feature 1..45: note = AVBG01000002.1/389881-389837 Pontibacillus chungwhensis BH030062 contig4, whole genome shotgun sequence.
tcgggagaggttctagctaaaccctctataaaaaactaaagaaca

SEQ ID NO: 91151 - DNA, 45 bp, Geobacillus sp.
  source 1..45: mol_type = unassigned DNA
  misc_feature 1..45: note = CP002293.1/2878510-2878466 Geobacillus sp. Y4.1MC1, complete genome.
atgggagaggttctagaacaaccctctataaaaaactagggacag

SEQ ID NO: 91152 - DNA, 44 bp, unidentified
  source 1..44: mol_type = unassigned DNA; note = [Actinobacillus] muris
  misc_feature 1..44: note = JWIZ01000061.1/319-362 [Actinobacillus] muris strain Ackerman80-443D cont61, whole genome shotgun sequence.
ttgttcgtggttcgtgaacctcccacgcaaaaaactaaggatat

SEQ ID NO: 91153 - DNA, 46 bp, Pontibacillus yanchengensis
  source 1..46: mol_type = unassigned DNA
  misc_feature 1..46: note = AVBF01000040.1/32900-32855 Pontibacillus yanchengensis Y32 contig47, whole genome shotgun sequence.
gtaggagaggttctagctcacaccctctataaaaaactaaggatat

SEQ ID NO: 91154 - DNA, 45 bp, unidentified
  source 1..45: mol_type = unassigned DNA; note = Bacteroidetes bacterium
  misc_feature 1..45: note = JZQW01000050.1/35890-35846 Bacteroidetes bacterium OLB8 UZ08_BCD00100CONTIG0000050, whole genome shotgun sequence.
aaagacgtggttcgaaatcctcccacgataaaaaactaaggtgtg

SEQ ID NO: 91155 - DNA, 44 bp, Paenisporosarcina sp.
  source 1..44: mol_type = unassigned DNA
  misc_feature 1..44: note = KE150423.1/241555-241512 Paenisporosarcina sp. HGH0030 genomic scaffold acAqH-supercont1.3, whole genome shotgun sequence.
taggaagaggttcgcaaactccctctataaaaaactaaggtgaa

SEQ ID NO: 91156 - DNA, 45 bp, Weissella cibaria
  source 1..45: mol_type = unassigned DNA
  misc_feature 1..45: note = JWHU01000034.1/164526-164570 Weissella cibaria strain MG1 contig000034, whole genome shotgun sequence.
aggttagtggttcgtaaccatcccactcaaaaaaactaggagaat

SEQ ID NO: 91157 - DNA, 45 bp, unidentified
  source 1..45: mol_type = unassigned DNA; note = Lysinibacillus sinduriensis
  misc_feature 1..45: note = JPVO01000048.1/31385-31341 Lysinibacillus sinduriensis BLB-1 = JCM 15800 contig9, whole genome shotgun sequence.
tttaccgtggttcgagaacctcccacgcaaaaaaactaaggagaa

SEQ ID NO: 91158 - DNA, 45 bp, Melissococcus plutonius; identical to SEQ ID NO: 90874
  source 1..45: mol_type = unassigned DNA
  misc_feature 1..45: note = AP012200.1/1198494-1198450 Melissococcus plutonius ATCC 35311 DNA, complete genome.

SEQ ID NO: 91159 - DNA, 45 bp, Pontibacillus marinus
  source 1..45: mol_type = unassigned DNA
  misc_feature 1..45: note = AVPF01000027.1/14696-14740 Pontibacillus marinus BH030004 = DSM 16465 strain BH030004 contig29, whole genome shotgun sequence.
tcgggagaggttctagctcaaccctctataaaaaactaagggacg

SEQ ID NO: 91160 - DNA, 46 bp, Leuconostoc lactis
  source 1..46: mol_type = unassigned DNA
  misc_feature 1..46: note = LJIV01000009.1/103850-103805 Leuconostoc lactis strain WIKIM21 contig00023, whole genome shotgun sequence.
ttattagcggttcatcaaccatcccgcttaaaaaaactaggagatt

SEQ ID NO: 91161 - DNA, 44 bp, Bacillus azotoformans
  source 1..44: mol_type = unassigned DNA
  misc_feature 1..44: note = AJLR01000040.1/54654-54697 Bacillus azotoformans LMG 9581 contig40, whole genome shotgun sequence.
acggtagaggttcttagctaccctctctaaaaaactaagaagga

SEQ ID NO: 91162 - DNA, 45 bp, Enterococcus sp.
  source 1..45: mol_type = unassigned DNA
  misc_feature 1..45: note = NGMO01000003.1/100583-100627 Enterococcus sp. 10A9_DIV0425 scaffold00003, whole genome shotgun sequence.
cttggactggttcggaaacttcccagaataaaaaactaagtgtct

SEQ ID NO: 91163 - DNA, 45 bp, unidentified
  source 1..45: mol_type = unassigned DNA; note = Snodgrassella alvi
  misc_feature 1..45: note = JAIL01000256.1/50865-50821 Snodgrassella alvi SCGC AB-598-O02 SCG598O02_12461, whole genome shotgun sequence.
gtccctgtggttcgcaaacctcccacattaaaaaactaggaaatc

SEQ ID NO: 91164 - DNA, 44 bp, Clostridium difficile
  source 1..44: mol_type = unassigned DNA
  misc_feature 1..44: note = AM180355.1/1956412-1956455 Clostridium difficile 630 complete genome
tctgtacttgttcgagaactccaagtataaaaaactaaggaatt

SEQ ID NO: 91165 - DNA, 46 bp, unidentified
  source 1..46: mol_type = unassigned DNA; note = Snodgrassella alvi
  misc_feature 1..46: note = JAIK01000393.1/4676-4631 Snodgrassella alvi SCGC AB-598-O11 SCG598O11_11285, whole genome shotgun sequence.
aaccacgtggttcgcaatccatcccacgaaaaaaaactaggagcct

SEQ ID NO: 91166 - DNA, 45 bp, Bacillus methanolicus
  source 1..45: mol_type = unassigned DNA
  misc_feature 1..45: note = CP007739.1/400420-400376 Bacillus methanolicus MGA3, complete genome.
tcgaacgtggttcgaaaccatcccacgataaaaaactaaggagag

SEQ ID NO: 91167 - DNA, 44 bp, Paenibacillus sp.
  source 1..44: mol_type = unassigned DNA
  misc_feature 1..44: note = FXAZ01000011.1/35141-35184 Paenibacillus sp. 11 genome assembly, contig: Ga0139009_111
gcgggagaggttcgcaatctccctctataaaaaactaaggtcta

SEQ ID NO: 91168 - DNA, 45 bp, Dichelobacter nodosus
  source 1..45: mol_type = unassigned DNA
  misc_feature 1..45: note = CP000513.1/859945-859989 Dichelobacter nodosus VCS1703A, complete genome.
ccgcttgtggttcgaaaacttcccacactaaaaaactaggaaaaa

SEQ ID NO: 91169 - DNA, 45 bp, Anoxybacillus amylolyticus
  source 1..45: mol_type = unassigned DNA
  misc_feature 1..45: note = CP015438.1/1227076-1227120 Anoxybacillus amylolyticus strain DSM 15939, complete genome.
gcgggagaggttctagaacaaccctctataaaaaactagggaaag

SEQ ID NO: 91170 - DNA, 46 bp, Lactobacillus manihotivorans
  source 1..46: mol_type = unassigned DNA
  misc_feature 1..46: note = AZEU01000151.1/8631-8586 Lactobacillus manihotivorans DSM 13343 = JCM 12514 strain DSM 13343 NODE_221, whole genome shotgun sequence.
aacgtcgtggttcgtgatccatcccacgtaaaaaaactaggaggct

SEQ ID NO: 91171 - DNA, 45 bp, Bacillus sporothermodurans
  source 1..45: mol_type = unassigned DNA
  misc_feature 1..45: note = LQYN01000169.1/9946-9990 Bacillus sporothermodurans strain B4102 NODE_312, whole genome shotgun sequence.
aaagacgtggttcgaaaccatcccacgataaaaaactaaggagag

SEQ ID NO: 91172 - DNA, 45 bp, Streptococcus dysgalactiae
  source 1..45: mol_type = unassigned DNA
  misc_feature 1..45: note = AP011114.1/205619-205575 Streptococcus dysgalactiae subsp. equisimilis RE378 DNA, complete genome.
cctggactggttcgaaaacttcccagaataaaaaactaagtaaca

SEQ ID NO: 91173 - DNA, 48 bp, Lactobacillus rennini
  source 1..48: mol_type = unassigned DNA
  misc_feature 1..48: note = AYYI01000009.1/22832-22785 Lactobacillus rennini DSM 20253 NODE_9, whole genome shotgun sequence.
ttaatggtggttcgtgactatcccaccataataaaaaactaggaggcc

SEQ ID NO: 91174 - DNA, 45 bp, Lysinibacillus sp.
  source 1..45: mol_type = unassigned DNA
  misc_feature 1..45: note = JPUW01000030.1/19339-19295 Lysinibacillus sp. BF-4 contig00030, whole genome shotgun sequence.
gagtaagaggttcgtaaccatccctctataaaaaactaaggagat

SEQ ID NO: 91175 - DNA, 45 bp, Gracilibacillus kekensis
  source 1..45: mol_type = unassigned DNA
  misc_feature 1..45: note = FRCZ01000001.1/30828-30784 Gracilibacillus kekensis strain CGMCC 1.10681 genome assembly, contig: Ga0079828_101
gcaggagaggttctagctacaccctctataaaaaactaaggatga

SEQ ID NO: 91176 - DNA, 66 bp, unidentified
  source 1..66: mol_type = unassigned DNA; note = Haemophilus sputorum
  misc_feature 1..66: note = ALJP01000009.1/510122-510187 Haemophilus sputorum HK 2154 ctg120006325159, whole genome shotgun sequence.
ttttccgtggttcgagaccttcccacggctagtcaatatttgactagaaaacaaaactaaggatgt

SEQ ID NO: 91177 - DNA, 45 bp, unidentified
  source 1..45: mol_type = unassigned DNA; note = Listeriaceae bacterium
  misc_feature 1..45: note = JNFA01000002.1/72649-72693 Listeriaceae bacterium FSL A5-0281 contig000002, whole genome shotgun sequence.
gaaaacgtagttcgaaaccatcctacgtaaaaaaactaagggagt

SEQ ID NO: 91178 - DNA, 45 bp, unidentified
  source 1..45: mol_type = unassigned DNA; note = Listeriaceae bacterium
  misc_feature 1..45: note = JNEZ01000044.1/213430-213386 Listeriaceae bacterium FSL A5-0209 contig000044, whole genome shotgun sequence.
gaaaacgtagttcgaaaccatcctacgtaaaaaaactaaggggag

SEQ ID NO: 91179 - DNA, 45 bp, unidentified
  source 1..45: mol_type = unassigned DNA; note = Rodentibacter myodis
  misc_feature 1..45: note = MLHQ01000011.1/95599-95643 Rodentibacter myodis strain Ac151 contig_11, whole genome shotgun sequence.
ccatttgtagttcgcaaacctcctacataaaaaaactaggtatca

SEQ ID NO: 91180 - DNA, 45 bp, unidentified; identical to SEQ ID NO: 90797
  source 1..45: mol_type = unassigned DNA; note = Rodentibacter heidelbergensis
  misc_feature 1..45: note = MLHH01000003.1/93079-93123 Rodentibacter heidelbergensis strain Ac69 contig_3, whole genome shotgun sequence.

SEQ ID NO: 91181 - DNA, 46 bp, unidentified
  source 1..46: mol_type = unassigned DNA; note = Lactobacillus brantae
  misc_feature 1..46: note = AYZQ01000005.1/22373-22328 Lactobacillus brantae DSM 23927 Scaffold5, whole genome shotgun sequence.
acccttgtggttcgaaattccgcccacaataaaaaactaggaggca

SEQ ID NO: 91182 - DNA, 45 bp, Lactobacillus acidipiscis
  source 1..45: mol_type = unassigned DNA
  misc_feature 1..45: note = JQBK01000021.1/19599-19555 Lactobacillus acidipiscis strain DSM 15353 Scaffold21, whole genome shotgun sequence.
taaatggtggttcgtaaacatcccaccgaaaaaaactaggaggtt

SEQ ID NO: 91183 - DNA, 45 bp, Bacillus sp.; identical to SEQ ID NO: 90785
  source 1..45: mol_type = unassigned DNA
  misc_feature 1..45: note = LSBA01000040.1/101243-101287 Bacillus sp. NRRL B-41092 Bacillus-sp-B-41092_contig_9, whole genome shotgun sequence.

SEQ ID NO: 91184 - DNA, 45 bp, unidentified
  source 1..45: mol_type = unassigned DNA; note = Basilea psittacipulmonis
  misc_feature 1..45: note = CP009238.1/64400-64444 Basilea psittacipulmonis DSM 24701, complete genome.
tgttcagtggttcgtaaccatcccactataaaaaactaaggaatg

SEQ ID NO: 91185 - DNA, 46 bp, Bacillus sp.
  source 1..46: mol_type = unassigned DNA
  misc_feature 1..46: note = LBMD01000019.1/19428-19383 Bacillus sp. CHD6a contig19, whole genome shotgun sequence.
taaggagaggttctagcaaataccctctataaaaaactaaggacag

SEQ ID NO: 91186 - DNA, 44 bp, unidentified
  source 1..44: mol_type = unassigned DNA; note = Domibacillus enclensis
  misc_feature 1..44: note = FTLX01000005.1/265586-265629 Domibacillus enclensis strain NIO-1016 genome assembly, contig: Ga0061089_105
gcgggagaggttcgcgaattccctctataaaaaactaataatca

SEQ ID NO: 91187 - DNA, 45 bp, Lactobacillus fabifermentans
  source 1..45: mol_type = unassigned DNA
  misc_feature 1..45: note = KK036513.1/23562-23518 Lactobacillus fabifermentans T30PCM01 genomic scaffold scaffold59, whole genome shotgun sequence.
tctggcctggttcgtaaactgcccaggataaaaaaccaagaactt

SEQ ID NO: 91188 - DNA, 45 bp, Neisseria zoodegmatis
  source 1..45: mol_type = unassigned DNA
  misc_feature 1..45: note = MTBM01000006.1/128334-128290 Neisseria zoodegmatis strain DSM 21643 NODE_6_length_154384_cov_38.1093_ID_11, whole genome shotgun sequence.
ttccctgtggttcgaaaacctcccacattaaaaaactaaggaata

SEQ ID NO: 91189 - DNA, 45 bp, Clostridium sp.
  source 1..45: mol_type = unassigned DNA
  misc_feature 1..45: note = MBSV01000056.1/4883-4927 Clostridium sp. W14A NODE_35, whole genome shotgun sequence.
cccgcactggttcgagaacctcccagtataaaaaactaaggattg

SEQ ID NO: 91190 - DNA, 44 bp, Paenibacillus sabinae
  source 1..44: mol_type = unassigned DNA
  misc_feature 1..44: note = CP004078.1/2942048-2942005 Paenibacillus sabinae T27, complete genome.
gcaggagaggttcgcaaactccctctataaaaaactaagatccg

SEQ ID NO: 91191 - DNA, 45 bp, Bizionia argentinensis
  source 1..45: mol_type = unassigned DNA
  misc_feature 1..45: note = AFXZ01000008.1/10710-10754 Bizionia argentinensis JUB59 contig00009, whole genome shotgun sequence.
ggacacgtggttcgtaattctcccacgttaaaaaactatgaaacg

SEQ ID NO: 91192 - DNA, 45 bp, Gallibacterium anatis
  source 1..45: mol_type = unassigned DNA
  misc_feature 1..45: note = CP002667.1/567923-567967 Gallibacterium anatis UMN179, complete genome.
ttcaccgtggttcgcaaacctcccacgcaaaaaaactaggaatat

SEQ ID NO: 91193 - DNA, 45 bp, Aggregatibacter actinomycetemcomitans
  source 1..45: mol_type = unassigned DNA
  misc_feature 1..45: note = CP001733.2/995079-995035 Aggregatibacter actinomycetemcomitans D11S-1, complete genome.
ttttctgtagttcgcaaacctcctacataaaaaaactaggtatca

SEQ ID NO: 91194 - DNA, 45 bp, unidentified
  source 1..45: mol_type = unassigned DNA; note = Snodgrassella alvi
  misc_feature 1..45: note = CP007446.1/34780-34824 Snodgrassella alvi wkB2, complete genome.
caccctgtggttcgtaaacctcccacataaaaaaactaggaaatc

SEQ ID NO: 91195 - DNA, 46 bp, Lactobacillus vini
  source 1..46: mol_type = unassigned DNA
  misc_feature 1..46: note = AYYX01000006.1/18880-18835 Lactobacillus vini DSM 20605 Scaffold6, whole genome shotgun sequence.
gtcctggtggttcgaaaccatcccaccataaaaaaactagggggaa

SEQ ID NO: 91196 - DNA, 47 bp, Fructobacillus sp.
  source 1..47: mol_type = unassigned DNA
  misc_feature 1..47: note = LDUY01000013.1/26173-26127 Fructobacillus sp. EFB-N1 FEFB_c000013, whole genome shotgun sequence.
caattagcggttcatcaaccatcccgcttaaacaaaactaggagtac

SEQ ID NO: 91197 - DNA, 45 bp, unidentified
  source 1..45: mol_type = unassigned DNA; note = Ornithinibacillus halophilus
  misc_feature 1..45: note = FQVW01000003.1/36059-36103 Ornithinibacillus halophilus strain IBRC-M 10683 genome assembly, contig: Ga0104432_1003
caacacgtggttcgaaaccatcccacgataaaaaactaagggaga

SEQ ID NO: 91198 - DNA, 43 bp, Bacillus shackletonii
  source 1..43: mol_type = unassigned DNA
  misc_feature 1..43: note = LJJC01000004.1/2513548-2513506 Bacillus shackletonii strain LMG 18435 super11, whole genome shotgun sequence.
gcggtagaggttctagctaccctcttaaaaaaactaagggaaa

SEQ ID NO: 91199 - DNA, 45 bp, unidentified
  source 1..45: mol_type = unassigned DNA; note = Lysinibacillus massiliensis
  misc_feature 1..45: note = JPVQ01000001.1/185771-185727 Lysinibacillus massiliensis 4400831 = CIP 108448 = CCUG 49529 contig1, whole genome shotgun sequence.
tacaccgtggttcgtaaccatcccacgaaaaaaaactaaggagaa

SEQ ID NO: 91200 - DNA, 48 bp, Lactobacillus apodemi
  source 1..48: mol_type = unassigned DNA
  misc_feature 1..48: note = AZFT01000018.1/12769-12722 Lactobacillus apodemi DSM 16634 = JCM 16172 strain DSM 16634 NODE_40, whole genome shotgun sequence.
aatcaggtggttcgcaaccatcccaccttaataaaaaactaggagaga

SEQ ID NO: 91201 - DNA, 45 bp, unidentified
  source 1..45: mol_type = unassigned DNA; note = Salegentibacter echinorum
  misc_feature 1..45: note = FQVT01000013.1/14669-14625 Salegentibacter echinorum strain DSM 24579 genome assembly, contig: Ga0131147_113
ggacacgtggttcgaaactctcccacattaaaaaactaagaaaag

SEQ ID NO: 91202 - DNA, 87 bp, Neotoma lepida
  source 1..87: mol_type = unassigned DNA
  misc_feature 1..87: note = LZPO01055223.1/74398-74484 Neotoma lepida isolate 417 scaffold_2013, whole genome shotgun sequence.
  misc_difference 69: note = n is a, c, g, or t
ctggaactggttcaaacaccactttcccagttttgtttccaaatatatgaaattggtggcttagtgggnaaaaaaaactaggaaaat

SEQ ID NO: 91203 - DNA, 78 bp, unidentified
  source 1..78: mol_type = unassigned DNA; note = Snodgrassella alvi
  misc_feature 1..78: note = JAIL01000253.1/27085-27162 Snodgrassella alvi SCGC AB-598-O02 SCG598O02_11502, whole genome shotgun sequence.
ttcttcgtggttcgaaaacctcccacgtcagatcgatagacaaggttttgtctgctctgaaatcaaaactaggaaacg

SEQ ID NO: 91204 - DNA, 44 bp, Bacillus badius
  source 1..44: mol_type = unassigned DNA
  misc_feature 1..44: note = JXLP01000003.1/302367-302410 Bacillus badius strain MTCC 1458 Contig3, whole genome shotgun sequence.
gcaggagaggttcgcgaactccctctataaaaaactaagggaaa

SEQ ID NO: 91205 - DNA, 45 bp, Sphingobacterium faecium; identical to SEQ ID NO: 91052
  source 1..45: mol_type = unassigned DNA
  misc_feature 1..45: note = FUKX01000034.1/158391-158435 Sphingobacterium faecium PCAi_F2.5 genome assembly, contig: Scaffold8

SEQ ID NO: 91206 - DNA, 45 bp, Bacillus sp.
  source 1..45: mol_type = unassigned DNA
  misc_feature 1..45: note = LITN01000019.1/355661-355705 Bacillus sp. FJAT-21945 scaffold3, whole genome shotgun sequence.
gctcacgtggttcgagaacctcccacggaaaaaaactaaggagag

SEQ ID NO: 91207 - DNA, 45 bp, unidentified
  source 1..45: mol_type = unassigned DNA; note = Firmicutes bacterium
  misc_feature 1..45: note = FR888930.1/78583-78539 Firmicutes bacterium CAG:466 genomic scaffold, scf176
gtcggactggttcgtgaacttcccagtataaaaaaccaagtatct

SEQ ID NO: 91208 - DNA, 44 bp, Paenibacillus sp.
  source 1..44: mol_type = unassigned DNA
  misc_feature 1..44: note = LSFN01000001.1/42494-42537 Paenibacillus sp. LPB0068 PNBC_01, whole genome shotgun sequence.
atggaagaggttcgcgaactccctctataaaaaactatttacct

SEQ ID NO: 91209 - DNA, 44 bp, Paenibacillus pectinilyticus; identical to SEQ ID NO: 90990
  source 1..44: mol_type = unassigned DNA
  misc_feature 1..44: note = LYPC01000030.1/5864-5821 Paenibacillus pectinilyticus strain KCTC13222 scaffold7, whole genome shotgun sequence.

SEQ ID NO: 91210 - DNA, 44 bp, Paenibacillus sp.; identical to SEQ ID NO: 90961
  source 1..44: mol_type = unassigned DNA
  misc_feature 1..44: note = MXQD01000006.1/318351-318308 Paenibacillus sp. MY03 contig6, whole genome shotgun sequence.

SEQ ID NO: 91211 - DNA, 45 bp, Ruminococcus gnavus; identical to SEQ ID NO: 91045
  source 1..45: mol_type = unassigned DNA
  misc_feature 1..45: note = HF997184.1/16271-16315 Ruminococcus gnavus CAG:126 genomic scaffold, scf110

SEQ ID NO: 91212 - DNA, 45 bp, Neisseria weaveri
  source 1..45: mol_type = unassigned DNA
  misc_feature 1..45: note = AFWQ01000022.1/35544-35500 Neisseria weaveri LMG 5135 NW5135.2_22, whole genome shotgun sequence.
tctactgtggttcgaaaacctcccacattaaaaaactaaggaatt

SEQ ID NO: 91213 - DNA, 45 bp, Bacillus galactosidilyticus; identical to SEQ ID NO: 90895
  source 1..45: mol_type = unassigned DNA
  misc_feature 1..45: note = LGPB01000086.1/12207-12163 Bacillus galactosidilyticus strain PL133 scaffold000086, whole genome shotgun sequence.

SEQ ID NO: 91214 - DNA, 45 bp, Tetragenococcus halophilus
  source 1..45: mol_type = unassigned DNA
  misc_feature 1..45: note = AP012046.1/1895612-1895656 Tetragenococcus halophilus NBRC 12172 DNA, complete genome.
cctggactggttcgtaaacttcccagaataaaaaaccaagaactt

SEQ ID NO: 91215 - DNA, 46 bp, unidentified
  source 1..46: mol_type = unassigned DNA; note = Snodgrassella alvi
  misc_feature 1..46: note = JFZW01000007.1/6045-6000 Snodgrassella alvi strain wkB12 wkB12_scaf007, whole genome shotgun sequence.
aaccacgtggttcgcaatccatcccacgctaaaaaactaggagcct

SEQ ID NO: 91216 - DNA, 45 bp, Cardiobacterium hominis
  source 1..45: mol_type = unassigned DNA
  misc_feature 1..45: note = GG694025.1/159470-159426 Cardiobacterium hominis ATCC 15826 genomic scaffold SCAFFOLD1, whole genome shotgun sequence.
gcccctgtggttcgcaaacctcccacaataaaaaactaggaaatc

SEQ ID NO: 91217 - DNA, 44 bp, Brevibacillus brevis
  source 1..44: mol_type = unassigned DNA
  misc_feature 1..44: note = AP008955.1/4851673-4851716 Brevibacillus brevis NBRC 100599 DNA, complete genome.
acgggagaggttcgcgaactccctctataaaaaactaagctgga

SEQ ID NO: 91218 - DNA, 43 bp, Bacillus sporothermodurans
  source 1..43: mol_type = unassigned DNA
  misc_feature 1..43: note = LQYN01000129.1/33546-33504 Bacillus sporothermodurans strain B4102 NODE_155, whole genome shotgun sequence.
gcggtagaggttctagctaccctctttaaaaaactaaggaaaa

SEQ ID NO: 91219 - DNA, 46 bp, Salimicrobium flavidum
  source 1..46: mol_type = unassigned DNA
  misc_feature 1..46: note = FTOC01000002.1/6205-6160 Salimicrobium flavidum strain DSM 23127 genome assembly, contig: Ga0111645_102
tataaagaggttcttagcctaaccctctctaaaaaactaaggacga

SEQ ID NO: 91220 - DNA, 45 bp, Pediococcus claussenii
  source 1..45: mol_type = unassigned DNA
  misc_feature 1..45: note = CP003137.1/230097-230141 Pediococcus claussenii ATCC BAA-344, complete genome.
aatcccgtggttcgcaattatcccacgtaaaaaaactaaggagga

SEQ ID NO: 91221 - DNA, 47 bp, Lysinibacillus xylanilyticus
  source 1..47: mol_type = unassigned DNA
  misc_feature 1..47: note = LFXJ01000005.1/1202925-1202879 Lysinibacillus xylanilyticus strain DSM 23493 Scaffold1, whole genome shotgun sequence.
acgggagaggttcatagctaataccctctataaaaaactatggaaac

SEQ ID NO: 91222 - DNA, 43 bp, unidentified
  source 1..43: mol_type = unassigned DNA; note = Bacilli bacterium
  misc_feature 1..43: note = LAZH01000032.1/116095-116137 Bacilli bacterium VT-13-104 contig032, whole genome shotgun sequence.
taggtagaggttctagctaccctctataaaaaactaagaaaac

SEQ ID NO: 91223 - DNA, 32 bp, Paenibacillus sp.; identical to SEQ ID NO: 90837
  source 1..32: mol_type = unassigned DNA
  misc_feature 1..32: note = BAUO01000016.1/5785-5816 Paenibacillus sp. JCM 10914 DNA, contig: contig_16.

SEQ ID NO: 91224 - DNA, 47 bp, Granulicatella elegans
  source 1..47: mol_type = unassigned DNA
  misc_feature 1..47: note = KI391971.1/1478131-1478085 Granulicatella elegans ATCC 700633 genomic scaffold supercont2.1, whole genome shotgun sequence.
acgctcgaggttcgcaaccatccctcgattcaaaaaactaggaggaa

SEQ ID NO: 91225 - DNA, 45 bp, Bacillus sp.
  source 1..45: mol_type = unassigned DNA
  misc_feature 1..45: note = CVRB01000002.1/327923-327967 Bacillus sp. LF1 genome assembly, contig: CONTIG000002
ttaaacgtggttcgagaacctcccacggaaaaaaactaaggagaa

SEQ ID NO: 91226 - DNA, 45 bp, Haemophilus parahaemolyticus
  source 1..45: mol_type = unassigned DNA
  misc_feature 1..45: note = AJSW01000004.1/5244-5288 Haemophilus parahaemolyticus HK385 contig00007, whole genome shotgun sequence.
tttcttgtggttcgagaacctcccacataaaaaaactaaggatac

SEQ ID NO: 91227 - DNA, 47 bp, Enterococcus durans; identical to SEQ ID NO: 90907
  source 1..47: mol_type = unassigned DNA
  misc_feature 1..47: note = KE136514.1/212747-212793 Enterococcus durans ATCC 6056 genomic scaffold acyDB-supercont2.2, whole genome shotgun sequence.

SEQ ID NO: 91228 - DNA, 45 bp, Lysinibacillus xylanilyticus
  source 1..45: mol_type = unassigned DNA
  misc_feature 1..45: note = LFXJ01000010.1/91329-91285 Lysinibacillus xylanilyticus strain DSM 23493 Scaffold2, whole genome shotgun sequence.
cttcacgtggttcgtaaccatcccacgtaaaaaaactaaggagaa

SEQ ID NO: 91229 - DNA, 44 bp, Bacillus coahuilensis
  source 1..44: mol_type = unassigned DNA
  misc_feature 1..44: note = LDYG01000028.1/69479-69436 Bacillus coahuilensis p1.1.43 ABFP000028, whole genome shotgun sequence.
acaggagaggttcgagaactccctctataaaaaactacaagaaa

SEQ ID NO: 91230 - DNA, 44 bp, Paenibacillus sp.
  source 1..44: mol_type = unassigned DNA
  misc_feature 1..44: note = MRTH01000018.1/82993-83036 Paenibacillus sp. FSL H7-0331 NODE_18_length_160074_cov_0.923132_ID_12113, whole genome shotgun sequence.
gcaagagaggttcgaaaactccctctataaaaaactaaagaact

SEQ ID NO: 91231 - DNA, 45 bp, Anoxybacillus sp.
  source 1..45: mol_type = unassigned DNA
  misc_feature 1..45: note = CP015436.1/180360-180404 Anoxybacillus sp. B7M1, complete genome.
gcgggagaggttctagaacaaccctctataaaaaactagggaagg

SEQ ID NO: 91232 - DNA, 47 bp, Lactobacillus cacaonum
  source 1..47: mol_type = unassigned DNA
  misc_feature 1..47: note = AYZE01000017.1/65100-65146 Lactobacillus cacaonum DSM 21116 NODE_52, whole genome shotgun sequence.
tcaatggtggttcgcaaaaatcccaccaaataaaaaactagaaagag

SEQ ID NO: 91233 - DNA, 44 bp, Paenibacillus sp.
  source 1..44: mol_type = unassigned DNA
  misc_feature 1..44: note = LMLV01000030.1/503610-503653 Paenibacillus sp. Leaf72 contig_4, whole genome shotgun sequence.
acaggagaggttcgcgaactccctctataaaaaactaaggaaaa

SEQ ID NO: 91234 - DNA, 45 bp, Pontibacillus halophilus
  source 1..45: mol_type = unassigned DNA
  misc_feature 1..45: note = AVPE01000001.1/412816-412860 Pontibacillus halophilus JSM 076056 = DSM 19796 strain JSM 076056 contig1, whole genome shotgun sequence.
gcgggagaggttctagcgacaccctctataaaaaactaaggatgt

SEQ ID NO: 91235 - DNA, 45 bp, Lactobacillus agilis
  source 1..45: mol_type = unassigned DNA
  misc_feature 1..45: note = AYYP01000060.1/24447-24403 Lactobacillus agilis DSM 20509 NODE_211, whole genome shotgun sequence.
aacacagtggttcgcaattatcccactaaaaaaaactaaggagcg

SEQ ID NO: 91236 - DNA, 45 bp, Bacillus circulans
  source 1..45: mol_type = unassigned DNA
  misc_feature 1..45: note = LDPH01000042.1/13788-13832 Bacillus circulans strain RIT379 contig42, whole genome shotgun sequence.
gataacgtggttcgagaccatcccacgtaaaaaaactaagggaga

SEQ ID NO: 91237 - DNA, 45 bp, Neisseria elongata
  source 1..45: mol_type = unassigned DNA
  misc_feature 1..45: note = CP007726.1/1259853-1259809 Neisseria elongata subsp. glycolytica ATCC 29315, complete genome.
caaactgtggttcgcaatcctcccacaataaaaaactaaggaatt

SEQ ID NO: 91238 - DNA, 45 bp, Terribacillus aidingensis
  source 1..45: mol_type = unassigned DNA
  misc_feature 1..45: note = CP008876.1/283920-283964 Terribacillus aidingensis strain MP602, complete genome.
ctgggagaggttctagcacaaccctctataaaaaactaaggaact

SEQ ID NO: 91239 - DNA, 44 bp, Sporosarcina sp.
  source 1..44: mol_type = unassigned DNA
  misc_feature 1..44: note = LPUT01000023.1/309630-309673 Sporosarcina sp. HYO08 scaffold_3, whole genome shotgun sequence.
aaacaagaggttcgcaaactccctctataaaaaactaaggagat

SEQ ID NO: 91240 - DNA, 44 bp, unidentified
  source 1..44: mol_type = unassigned DNA; note = Bacillaceae bacterium
  misc_feature 1..44: note = JWIR02000016.1/21963-21920 Bacillaceae bacterium MTCC 8252 Contig16, whole genome shotgun sequence.
gcaggagaggttcgcgaactccctctataaaaaactacgaaaag

SEQ ID NO: 91241 - DNA, 47 bp, Pontibacillus halophilus
  source 1..47: mol_type = unassigned DNA
  misc_feature 1..47: note = AVPE01000001.1/14853-14899 Pontibacillus halophilus JSM 076056 = DSM 19796 strain JSM 076056 contig1, whole genome shotgun sequence.
tcgggagaggttctctagctcaaccctctataaaaaactaagggaat

SEQ ID NO: 91242 - DNA, 45 bp, Neisseria meningitidis
  source 1..45: mol_type = unassigned DNA
  misc_feature 1..45: note = AE002098.2/329220-329176 Neisseria meningitidis MC58, complete genome.
ccgcccgtggttcgaaaacctcccacattaaaaaactaaggaaac

SEQ ID NO: 91243 - DNA, 48 bp, Carnobacterium maltaromaticum
  source 1..48: mol_type = unassigned DNA
  misc_feature 1..48: note = HE999757.2/642665-642712 Carnobacterium maltaromaticum LMA28 complete genome
actgacgtggttcactaataccatcccacgaaaaaaaactaggaggaa

SEQ ID NO: 91244 - DNA, 44 bp, unidentified
  source 1..44: mol_type = unassigned DNA; note = Clostridiales bacterium
  misc_feature 1..44: note = KE993490.1/45180-45137 Clostridiales bacterium oral taxon 876 str. F0540 genomic scaffold Scaffold44, whole genome shotgun sequence.
gcaggactggttcgagaactcccagtataaaaaactaaggattt

SEQ ID NO: 91245 - DNA, 45 bp, Enterococcus hirae; identical to SEQ ID NO: 91111
  source 1..45: mol_type = unassigned DNA
  misc_feature 1..45: note = CP003504.1/1670343-1670299 Enterococcus hirae ATCC 9790, complete genome.

SEQ ID NO: 91246 - DNA, 45 bp, Bibersteinia trehalosi
  source 1..45: mol_type = unassigned DNA
  misc_feature 1..45: note = CP003745.1/835644-835600 Bibersteinia trehalosi USDA-ARS-USMARC-192, complete genome.
tactcagtggttcgaaaacctcccacgctaaaaaactaaggaaca

SEQ ID NO: 91247 - DNA, 44 bp, Sporosarcina psychrophila
  source 1..44: mol_type = unassigned DNA
  misc_feature 1..44: note = CP014616.1/1659215-1659172 Sporosarcina psychrophila strain DSM 6497, complete genome.
tcgggagaggttcatagcgaccctctataaaaaactatggatga

SEQ ID NO: 91248 - DNA, 45 bp, Lactobacillus pobuzihii
  source 1..45: mol_type = unassigned DNA
  misc_feature 1..45: note = JQCN01000007.1/13832-13876 Lactobacillus pobuzihii strain NBRC 103219 NODE_9, whole genome shotgun sequence.
tatcaggtggttcgtaaccatcccacctaaaaaaactaggaggtc

SEQ ID NO: 91249 - DNA, 44 bp, Paenibacillus riograndensis; identical to SEQ ID NO: 90777
  source 1..44: mol_type = unassigned DNA
  misc_feature 1..44: note = LN831776.1/4341332-4341289 Paenibacillus riograndensis SBR5 isolate SBR5(T) genome assembly, chromosome: I

SEQ ID NO: 91250 - DNA, 45 bp, Roseburia sp.; identical to SEQ ID NO: 90902
  source 1..45: mol_type = unassigned DNA
  misc_feature 1..45: note = FR904113.1/15934-15978 Roseburia sp. CAG:100 genomic scaffold, scf107

SEQ ID NO: 91251 - DNA, 45 bp, Bacillus sp.
  source 1..45: mol_type = unassigned DNA
  misc_feature 1..45: note = CCXR01000001.1/318554-318510 Bacillus sp. B-jedd genome assembly, contig: CONTIG000001
gcccgcgtggttcgagaacctcccacgataaaaaactaaggagag

SEQ ID NO: 91252 - DNA, 46 bp, Oceanobacillus oncorhynchi
  source 1..46: mol_type = unassigned DNA
  misc_feature 1..46: note = CDGG01000001.1/3527407-3527452 Oceanobacillus oncorhynchi strain Oc5 genome assembly, contig: CONTIG000001
gtagaagaggttctagctaacaccctctataaaaaactaaggatac

SEQ ID NO: 91253 - DNA, 47 bp, unidentified
  source 1..47: mol_type = unassigned DNA; note = Virgibacillus massiliensis
  misc_feature 1..47: note = CCDP010000002.1/869448-869402 Virgibacillus massiliensis genome assembly, contig: 000002
attggagaggttcttagctataaccctctataaaaaactaaggacaa

SEQ ID NO: 91254 - DNA, 44 bp, Paenibacillus stellifer
  source 1..44: mol_type = unassigned DNA
  misc_feature 1..44: note = CP009286.1/3127258-3127215 Paenibacillus stellifer strain DSM 14472, complete genome.
gcgggagaggttcgcaaactccctctataaaaaactaagaacga

SEQ ID NO: 91255 - DNA, 45 bp, Lactobacillus acidipiscis
  source 1..45: mol_type = unassigned DNA
  misc_feature 1..45: note = JQBK01000002.1/36743-36787 Lactobacillus acidipiscis strain DSM 15353 Scaffold2, whole genome shotgun sequence.
tacatggtggttcgtgaccatcccacctaaaaaaactaggaggtt

SEQ ID NO: 91256 - DNA, 45 bp, Carnobacterium sp.
  source 1..45: mol_type = unassigned DNA
  misc_feature 1..45: note = CP010796.1/2093552-2093596 Carnobacterium sp. CP1, complete genome.
gaatatgtggttcgcaaccatcccacataaaaaaactaggaggat

SEQ ID NO: 91257 - DNA, 48 bp, Lactobacillus oeni
  source 1..48: mol_type = unassigned DNA
  misc_feature 1..48: note = AZEH01000020.1/72536-72489 Lactobacillus oeni DSM 19972 NODE_43, whole genome shotgun sequence.
aaaatggtggttcgcaaacatcccaccgtaataaaaaactagaaagaa

SEQ ID NO: 91258 - DNA, 45 bp, Bacillus subtilis; identical to SEQ ID NO: 90785
  source 1..45: mol_type = unassigned DNA
  misc_feature 1..45: note = AL009126.3/1439274-1439318 Bacillus subtilis subsp. subtilis str. 168 complete genome.

SEQ ID NO: 91259 - DNA, 45 bp, Bacillus sp.; identical to SEQ ID NO: 90858
  source 1..45: mol_type = unassigned DNA
  misc_feature 1..45: note = AAXV01000007.1/14855-14899 Bacillus sp. B14905 1101159007471, whole genome shotgun sequence.

SEQ ID NO: 91260 - DNA, 45 bp, Streptococcus agalactiae; identical to SEQ ID NO: 90998
  source 1..45: mol_type = unassigned DNA
  misc_feature 1..45: note = AL766846.1/39196-39152 Streptococcus agalactiae NEM316 complete genome, segment 4

SEQ ID NO: 91261 - DNA, 46 bp, Leuconostoc mesenteroides; identical to SEQ ID NO: 91104
  source 1..46: mol_type = unassigned DNA
  misc_feature 1..46: note = CP000414.1/1235047-1235002 Leuconostoc mesenteroides subsp. mesenteroides ATCC 8293, complete genome.

SEQ ID NO: 91262 - DNA, 45 bp, Clostridium perfringens; identical to SEQ ID NO: 90896
  source 1..45: mol_type = unassigned DNA
  misc_feature 1..45: note = ABDX01000003.1/184506-184550 Clostridium perfringens CPE str. F4969 gcontig_1106202596996, whole genome shotgun sequence.

SEQ ID NO: 91263 - DNA, 45 bp, Bacillus thuringiensis; identical to SEQ ID NO: 90778
  source 1..45: mol_type = unassigned DNA
  misc_feature 1..45: note = AE017355.1/1568663-1568707 Bacillus thuringiensis serovar konkukian str. 97-27, complete genome.

SEQ ID NO: 91264 - DNA, 45 bp, Dorea longicatena
  source 1..45: mol_type = unassigned DNA
  misc_feature 1..45: note = AAXB02000001.1/142227-142271 Dorea longicatena DSM 13814 D_longicatena-MSIQ_Cont368, whole genome shotgun sequence.
cttgaactggttcgaaaacctcccagtataaaaaactaggcaaag

SEQ ID NO: 91265 - DNA, 45 bp, Neisseria meningitidis; identical to SEQ ID NO: 90913
  source 1..45: mol_type = unassigned DNA
  misc_feature 1..45: note = AM421808.1/1884627-1884671 Neisseria meningitidis serogroup C FAM18 complete genome

SEQ ID NO: 91266 - DNA, 45 bp, Lactobacillus sakei; identical to SEQ ID NO: 90824
  source 1..45: mol_type = unassigned DNA
  misc_feature 1..45: note = CR936503.1/1598027-1597983 Lactobacillus sakei strain 23K complete genome.

SEQ ID NO: 91267 - DNA, 48 bp, Listeria innocua; identical to SEQ ID NO: 91145
  source 1..48: mol_type = unassigned DNA
  misc_feature 1..48: note = AL596166.1/191853-191900 Listeria innocua Clip11262 complete genome, segment 4/12

SEQ ID NO: 91268 - DNA, 45 bp, Bacillus licheniformis; identical to SEQ ID NO: 90786
  source 1..45: mol_type = unassigned DNA
  misc_feature 1..45: note = AE017333.1/1501710-1501754 Bacillus licheniformis DSM 13, complete genome.

SEQ ID NO: 91269 - DNA, 47 bp, Staphylococcus epidermidis; identical to SEQ ID NO: 90922
  source 1..47: mol_type = unassigned DNA
  misc_feature 1..47: note = CP000029.1/370924-370878 Staphylococcus epidermidis RP62A, complete genome.

SEQ ID NO: 91270 - DNA, 45 bp, Ruminococcus gnavus; identical to SEQ ID NO: 91045
  source 1..45: mol_type = unassigned DNA
  misc_feature 1..45: note = AAYG02000018.1/120313-120357 Ruminococcus gnavus ATCC 29149 R_gnavus-1.0.1_Cont103, whole genome shotgun sequence.

SEQ ID NO: 91271 - DNA, 45 bp, Mannheimia haemolytica; identical to SEQ ID NO: 90883
  source 1..45: mol_type = unassigned DNA
  misc_feature 1..45: note = AASA01000045.1/1296-1252 Mannheimia haemolytica PHL213 Ctg156, whole genome shotgun sequence.

SEQ ID NO: 91272 - DNA, 47 bp, Staphylococcus saprophyticus; identical to SEQ ID NO: 91038
  source 1..47: mol_type = unassigned DNA
  misc_feature 1..47: note = AP008934.1/2076124-2076170 Staphylococcus saprophyticus subsp. saprophyticus ATCC 15305 DNA, complete genome.

SEQ ID NO: 91273 - DNA, 45 bp, Paenibacillus larvae; identical to SEQ ID NO: 90829
  source 1..45: mol_type = unassigned DNA
  misc_feature 1..45: note = AARF01000079.1/5363-5319 Paenibacillus larvae subsp. larvae BRL-230010 Ctg01.80, whole genome shotgun sequence.

SEQ ID NO: 91274 - DNA, 45 bp, Bacillus sp.; identical to SEQ ID NO: 90971
  source 1..45: mol_type = unassigned DNA
  misc_feature 1..45: note = ABCF01000001.1/139145-139189 Bacillus sp. SG-1 1101501000768, whole genome shotgun sequence.

SEQ ID NO: 91275 - DNA, 45 bp, unidentified; identical to SEQ ID NO: 91088
  source 1..45: mol_type = unassigned DNA; note = Mannheimia succiniciproducens
  misc_feature 1..45: note = AE016827.1/1848390-1848434 Mannheimia succiniciproducens MBEL55E, complete genome.

SEQ ID NO: 91276 - DNA, 45 bp, Ruminococcus obeum; identical to SEQ ID NO: 90886
  source 1..45: mol_type = unassigned DNA
  misc_feature 1..45: note = AAVO02000002.1/275638-275594 Ruminococcus obeum ATCC 29174 R_obeum-MSIQ_Cont105, whole genome shotgun sequence.

SEQ ID NO: 91277 - DNA, 48 bp, Listeria monocytogenes
  source 1..48: mol_type = unassigned DNA
  misc_feature 1..48: note = AARM02000383.1/1741-1694 Listeria monocytogenes FSL J2-003 cont3.383, whole genome shotgun sequence.
ccacacgtggttcattcataccatcccacgtaaaaaaactaaggagga

SEQ ID NO: 91278 - DNA, 45 bp, Enterococcus faecium; identical to SEQ ID NO: 91111
  source 1..45: mol_type = unassigned DNA
  misc_feature 1..45: note = AAAK03000099.1/1629-1673 Enterococcus faecium DO ctg550, whole genome shotgun sequence.

SEQ ID NO: 91279 - DNA, 45 bp, Oceanobacillus iheyensis; identical to SEQ ID NO: 91048
  source 1..45: mol_type = unassigned DNA
  misc_feature 1..45: note = BA000028.3/467676-467632 Oceanobacillus iheyensis HTE831 DNA, complete genome.

SEQ ID NO: 91280 - DNA, 45 bp, Neisseria meningitidis; identical to SEQ ID NO: 91242
  source 1..45: mol_type = unassigned DNA
  misc_feature 1..45: note = AE002098.2/329220-329176 Neisseria meningitidis MC58, complete genome.

SEQ ID NO: 91281 - DNA, 45 bp, Lactobacillus salivarius; identical to SEQ ID NO: 90887
  source 1..45: mol_type = unassigned DNA
  misc_feature 1..45: note = CP000233.1/1599957-1600001 Lactobacillus salivarius UCC118, complete genome.

SEQ ID NO: 91282 - DNA, 45 bp, Actinobacillus succinogenes; identical to SEQ ID NO: 90937
  source 1..45: mol_type = unassigned DNA
  misc_feature 1..45: note = CP000746.1/2223340-2223384 Actinobacillus succinogenes 130Z, complete genome.

SEQ ID NO: 91283 - DNA, 44 bp, Bacillus halodurans; identical to SEQ ID NO: 91097
  source 1..44: mol_type = unassigned DNA
  misc_feature 1..44: note = BA000004.3/2373342-2373299 Bacillus halodurans C-125 DNA, complete genome.

SEQ ID NO: 91284 - DNA, 44 bp, Bacillus thuringiensis; identical to SEQ ID NO: 90871
  source 1..44: mol_type = unassigned DNA
  misc_feature 1..44: note = AE017355.1/1321429-1321472 Bacillus thuringiensis serovar konkukian str. 97-27, complete genome.

SEQ ID NO: 91285 - DNA, 46 bp, Lactobacillus plantarum; identical to SEQ ID NO: 91113
  source 1..46: mol_type = unassigned DNA
  misc_feature 1..46: note = X99978.2/10136-10181 Lactobacillus plantarum subsp. plantarum citrulline biosynthetic gene cluster (carAB operon and argC, J, B, D, F-ccl operon) and usg and dsg par tial sequences

SEQ ID NO: 91286 - DNA, 44 bp, Bacillus clausii; identical to SEQ ID NO: 91134
  source 1..44: mol_type = unassigned DNA
  misc_feature 1..44: note = AP006627.1/2249570-2249527 Bacillus clausii KSM-K16 DNA, complete genome.

SEQ ID NO: 91287 - DNA, 47 bp, Staphylococcus haemolyticus; identical to SEQ ID NO: 90773
  source 1..47: mol_type = unassigned DNA
  misc_feature 1..47: note = AP006716.1/2221258-2221304 Staphylococcus haemolyticus JCSC1435 DNA, complete genome.

SEQ ID NO: 91288 - DNA, 45 bp, Lactobacillus plantarum; identical to SEQ ID NO: 91056
  source 1..45: mol_type = unassigned DNA
  misc_feature 1..45: note = AL935263.2/2519559-2519515 Lactobacillus plantarum WCFS1 complete genome

SEQ ID NO: 91289 - DNA, 45 bp, Dichelobacter nodosus; identical to SEQ ID NO: 91168
  source 1..45: mol_type = unassigned DNA
  misc_feature 1..45: note = CP000513.1/859945-859989 Dichelobacter nodosus VCS1703A, complete genome.

SEQ ID NO: 91290 - DNA, 44 bp, Bacillus cereus; identical to SEQ ID NO: 90877
  source 1..44: mol_type = unassigned DNA
  misc_feature 1..44: note = CP000764.1/1180651-1180694 Bacillus cereus subsp. cytotoxis NVH 391-98, complete genome.

SEQ ID NO: 91291 - DNA, 43 bp, Bacillus sp.; identical to SEQ ID NO: 90875
  source 1..43: mol_type = unassigned DNA
  misc_feature 1..43: note = AAOX01000006.1/21305-21347 Bacillus sp. NRRL B-14911 1099999053146, whole genome shotgun sequence.

SEQ ID NO: 91292 - DNA, 66 bp, Pasteurella multocida; identical to SEQ ID NO: 90765
  source 1..66: mol_type = unassigned DNA
  misc_feature 1..66: note = AE004439.1/209165-209100 Pasteurella multocida subsp. multocida str. Pm70, complete genome.

SEQ ID NO: 91293 - DNA, 97 bp, Streptococcus sp.
  source 1..97: mol_type = unassigned DNA
  misc_feature 1..97: note = AZMH01000358.1/5861-5765 Streptococcus sp. DORA_10 Q617_SPSC00358, whole genome shotgun sequence.
tgtgctatactagtaaggttgattcaagcaacccttggtgcttagcttctttcaccaagcatattatacgcgggaaaccgccaaaggagaaaagatg

SEQ ID NO: 91294 - DNA, 113 bp, unidentified
  source 1..113: mol_type = unassigned DNA; note = Trichuris trichiura,
  misc_feature 1..113: note = CBXK010000731.1/16622-16734 Trichuris trichiura, WGS project CBXK01000000 data, contig: TTRE_731
tgtgctatacttttaagcgttgtgcaaacaacccttgacgcttagttccctttcgtcaagcatattatagacgtgaagagttgtcgctctttaacgttaaaggagaaaatttt

SEQ ID NO: 91295 - DNA, 120 bp, Streptococcus dysgalactiae
  source 1..120: mol_type = unassigned DNA
  misc_feature 1..120: note = CM001076.1/692240-692359 Streptococcus dysgalactiae subsp. dysgalactiae ATCC 27957 chromosome, whole genome shotgun sequence.
tgtggtacaatgtaaccgttgtttagcaacccttggtgcttagttccctttcaccaagcatattagacacgtaaagagttaggtttgactaactgctttgacgttaaaggagaaaaaatg

SEQ ID NO: 91296 - DNA, 114 bp, unidentified
  source 1..114: mol_type = unassigned DNA; note = Streptococcus cuniculi
  misc_feature 1..114: note = MSJM01000013.1/11472-11359 Streptococcus cuniculi strain NED12-00049-6B 13, whole genome shotgun sequence.
tcccctatttttcgttcggttttttcacggcttcacatctgcacaacccttggcacttccttcctttagccaagcatattacacgcggtttagccgccaaaggagagttatatg

SEQ ID NO: 91297 - DNA, 97 bp, Lactococcus piscium
  source 1..97: mol_type = unassigned DNA
  misc_feature 1..97: note = LN774769.1/1930552-1930456 Lactococcus piscium MKFS47 genome assembly, chromosome: I
tttgctatactagatattgcttgtaatgagcccttcgtactttctcactttgacggagcatattaaaatcgcgggagcgataaaggagattcatttg

SEQ ID NO: 91298 - DNA, 107 bp, Lactococcus lactis
  source 1..107: mol_type = unassigned DNA
  misc_feature 1..107: note = ATBB01000646.1/1429-1323 Lactococcus lactis subsp. cremoris TIFN6 scaffold6.1_8, whole genome shotgun sequence.
tctgttaaaataaaaacgttgctcaattgcgagtcaacccttgagccttcttccctttgctcaagcatattaaacgcgacattttgtcgccaaaggagagtattttg

SEQ ID NO: 91299 - DNA, 137 bp, Streptococcus henryi
  source 1..137: mol_type = unassigned DNA
  misc_feature 1..137: note = FMXP01000013.1/3540-3404 Streptococcus henryi strain A-4 genome assembly, contig: IE83DRAFT_scaffold00012.12
tttgctataataggaaagttgtttcgagcaacccttggtacttgtattcttgagaggatgaaaaacttttaaggataaattcccctttgaccaagcatattataggtgataacaatcactaaagaggagtctaaatg

SEQ ID NO: 91300 - DNA, 107 bp, Streptococcus sp.
  source 1..107: mol_type = unassigned DNA
  misc_feature 1..107: note = CM002128.1/378252-378358 Streptococcus sp. HSISM1 chromosome, whole genome shotgun sequence.
tatgctatacttgaaaggttgaagaaatcaaaccttcaacccttggtgcttaagatcctttcgccaagcatattagacgcgggaaaaccgctaaaggagaataaatg

SEQ ID NO: 91301 - DNA, 224 bp, Streptococcus sp.
  source 1..224: mol_type = unassigned DNA
  misc_feature 1..224: note = CP014699.1/1326974-1326751 Streptococcus sp. TA 26, complete genome.
tatgatacaataagcaagttgtttatgcaacccttggtgcttagcttctttcaccaagcatattagaagcgtgaaataaagtggtggcattctatttagacagtgccgacttcattgtttttgctggctagtcttctatgacagtcaaaacggtgatttctgaacaggcttgtctgacagaataccaaggctcttttattttgacgctaaaggagaattaaatg

SEQ ID NO: 91302 - DNA, 98 bp, Mycobacterium abscessus
  source 1..98: mol_type = unassigned DNA
  misc_feature 1..98: note = FSGV01000016.1/46069-45972 Mycobacterium abscessus subsp. abscessus strain 57 genome assembly, contig: ERS244815SCcontig000016
tgtgctatacttgtaaagttgacttgctcaacccttggtgcttagcttctttcaccaagcatattacacgtggcaaagccgctaaaggagaaaatatg

SEQ ID NO: 91303 - DNA, 112 bp, Streptococcus lutetiensis
  source 1..112: mol_type = unassigned DNA
  misc_feature 1..112: note = CP003025.1/629989-630100 Streptococcus lutetiensis 033, complete genome.
tgtgctatacttttaagcgttgtcttgacgacccttggtgcttagttccctttcaccaagcatattacaaacgttggaagctagcctttcaaacgtcaaaggagaaaaaatg

SEQ ID NO: 91304 - DNA, 112 bp, Streptococcus sp.
  source 1..112: mol_type = unassigned DNA
  misc_feature 1..112: note = CM002131.1/602348-602459 Streptococcus sp. HSISB1 chromosome, whole genome shotgun sequence.
tgtgctatactttaaagcgttgtctctacaacccttggcgctttttccctttcgccaagcatattagaaacgtagaaggggctaactttctaacgttaaaggagaagaattt

SEQ ID NO: 91305 - DNA, 98 bp, Peptoniphilus lacrimalis
  source 1..98: mol_type = unassigned DNA
  misc_feature 1..98: note = JRNL01000008.1/35095-35192 Peptoniphilus lacrimalis DNF00528 contig008, whole genome shotgun sequence.
tgtgctatactaacaaagttgacttgttcaacccttggtgcttaacttctttcaccaagcatattaaacgcggtggagccgctaaaggagaaaacatg

SEQ ID NO: 91306 - DNA, 106 bp, Lactococcus lactis
  source 1..106: mol_type = unassigned DNA
  misc_feature 1..106: note = AE005176.1/802553-802658 Lactococcus lactis subsp. lactis Il1403, complete genome.
tctgctaaaataaaaacgttgctcaatagtgagttaacccttgagccttcatccctttgctcaagcatattataggcgaattttgtcgccaaaggagaaccttttg

SEQ ID NO: 91307 - DNA, 97 bp, Streptococcus pneumoniae
  source 1..97: mol_type = unassigned DNA
  misc_feature 1..97: note = ALBB01000005.1/454112-454208 Streptococcus pneumoniae 2070335 gspj15.contig.4, whole genome shotgun sequence.
tgtgctatactagtaaggttgaatgaatcaacccttggtgcttagcttctttcaccaagcatattacacgcggataaccgccaaaggagaaaagatg

SEQ ID NO: 91308 - DNA, 106 bp, Lactococcus garvieae
  source 1..106: mol_type = unassigned DNA
  misc_feature 1..106: note = AP009333.1/564603-564708 Lactococcus garvieae Lg2 DNA, complete genome.
attgatataatatacaagttgcaatttatcagcaatcctcaggacttttaacctttgcctgagcatattacaggcggtattcagccgctaaaggagaaaaaaattg

SEQ ID NO: 91309 - DNA, 99 bp, Lactobacillus casei
  source 1..99: mol_type = unassigned DNA
  misc_feature 1..99: note = CP000423.1/2043279-2043181 Lactobacillus casei ATCC 334, complete genome.
acaccaaaactgaaaacggaaggcaatccttccacgacgatacttactttcctttgatcgtcgttactactggcatagccacaaaggagaacaaacatg

SEQ ID NO: 91310 - DNA, 115 bp, Streptococcus phocae
  source 1..115: mol_type = unassigned DNA
  misc_feature 1..115: note = LHQM01000030.1/221-335 Streptococcus phocae strain ATCC 51973 contig_33, whole genome shotgun sequence.
tatgttacaatagaatagttgtttggcaacccttgatgcttagttccctttcatcaagcatattacacacgtagcaaggttaagtccttgttttgacgttaaaggagaaaacatg

SEQ ID NO: 91311 - DNA, 100 bp, Lactococcus raffinolactis
  source 1..100: mol_type = unassigned DNA
  misc_feature 1..100: note = HE999887.1/4737-4836 Lactococcus raffinolactis 4877 genomic scaffold, Scaffold1608
tgaaacaagccttatgtgcttaattaattcaagccctctgtactttctcactttgacagagcgtatcacactcgcaaatgcgataaaggagacttttatg

SEQ ID NO: 91312 - DNA, 110 bp, Streptococcus iniae
  source 1..110: mol_type = unassigned DNA
  misc_feature 1..110: note = AOCT02000021.1/49-158 Streptococcus iniae IUSA1 contig021, whole genome shotgun sequence.
tatgctacaataagactgttgctcagcaacccttggtgcttagttccctttcaccaagcatattagacacgtcgttttgagttaaaaacagacgtcaaaggagaaaaatg

SEQ ID NO: 91313 - DNA, 100 bp, Streptococcus sobrinus
  source 1..100: mol_type = unassigned DNA
  misc_feature 1..100: note = KI259672.1/32796-32895 Streptococcus sobrinus W1703 genomic scaffold Scaffold17, whole genome shotgun sequence.
tatgctatactagaacagctggtttccagcccttggtgcttagctcttttcaccaagcatattttaagcggtcgccccgctaaaggagaatcatcacatg

SEQ ID NO: 91314 - DNA, 110 bp, Streptococcus intermedius
  source 1..110: mol_type = unassigned DNA
  misc_feature 1..110: note = CP003857.1/745574-745683 Streptococcus intermedius B196, complete genome.
tgtgctatacttgaaaggctgtattaatgttatcaatacagtccttggcgcttagtttcctttcgccaagcatattatacgcggttatagccgccaaaggagaaaaaatg

SEQ ID NO: 91315 - DNA, 97 bp, Streptococcus mutans
  source 1..97: mol_type = unassigned DNA
  misc_feature 1..97: note = AE014133.2/1474191-1474095 Streptococcus mutans UA159, complete genome.
tatgctatactggataagttgtctgacaacccttggtgcttatttccctttcaccaagcatattacaaacggtagatccgttaaaggagaaacaatg

SEQ ID NO: 91316 - DNA, 131 bp, Streptococcus sp.
  source 1..131: mol_type = unassigned DNA
  misc_feature 1..131: note = AFQU01000001.1/1873926-1874056 Streptococcus sp. oral taxon 056 str. F0418 Noncontiguous_Finished_Chromosome, whole genome shotgun sequence.
tgtgctatactagatgagttgtcaaacgagcaggctagatcatctttgcctcatgttgcgcaacccttggtgcttagcttctttcgccaagcatattacacgcggtaaaaccgccaaaggagaattttatg

SEQ ID NO: 91317 - DNA, 97 bp, Streptococcus sp.
  source 1..97: mol_type = unassigned DNA
  misc_feature 1..97: note = MOWR01000002.1/248662-248758 Streptococcus sp. 'caviae' strain Cavy grass 6 NODE_2_length_346008_cov_216.281, whole genome shotgun sequence.
tatgctatactgaataagttgctcagcaacccttggtgcttacttccctttcaccaagcatattataaacgggacaaccgtcaaaggagaaataatg

SEQ ID NO: 91318 - DNA, 95 bp, Streptococcus sp.
  source 1..95: mol_type = unassigned DNA
  misc_feature 1..95: note = CTEN01000004.1/229855-229761 Streptococcus sp. FF10 genome assembly, contig: CONTIG000004
tctttgagtattaaaaagtaggaacaacccttggcgcttcttccctttagccaagcatattacaagcggtttatccgccaaaggagaattatatg

SEQ ID NO: 91319 - DNA, 98 bp, Streptococcus ratti
  source 1..98: mol_type = unassigned DNA
  misc_feature 1..98: note = AOCD01000041.1/13825-13922 Streptococcus ratti FA-1 = DSM 20564 Contig074, whole genome shotgun sequence.
tatgctatactgaataagctgcgctcagcagcccttggtgcttatgtcctttcaccaagcatattacaaacggtagagccgtcaaaggagaactgatg

SEQ ID NO: 91320 - DNA, 98 bp, Streptococcus agalactiae
  source 1..98: mol_type = unassigned DNA
  misc_feature 1..98: note = ANQC01000134.1/19644-19547 Streptococcus agalactiae LMG 14747 ctg7180000010258, whole genome shotgun sequence.
tatgatacactagaaaagctgttttagcaacccttggcgcttctttcctttcgccaagcatattacaaacggtacaaccgttaaaggagatctttatg

SEQ ID NO: 91321 - DNA, 143 bp, Streptococcus sp.
  source 1..143: mol_type = unassigned DNA
  misc_feature 1..143: note = KQ969157.1/232238-232380 Streptococcus sp. DD10 genomic scaffold scaffold00001, whole genome shotgun sequence.
tgtgctatactagtaaggttgaatggcttaacttttctaaatagttttactatttagaaattctttaactcaatcaacccttggtgcttagcttctttcaccaagcatattacatgcggaaaaccgctaaaggagaaaacatg

SEQ ID NO: 91322 - DNA, 114 bp, Streptococcus uberis
  source 1..114: mol_type = unassigned DNA
  misc_feature 1..114: note = JRQN01000019.1/23931-23818 Streptococcus uberis strain CAIM 1894 contig_019, whole genome shotgun sequence.
tatgctataataatggagttgcaaagcaaccttggtgcttaagttcctttcaccaagcatattatacgcgcactgaagtatcaactttatgtgacgccaaaggagaaaataatg

SEQ ID NO: 91323 - DNA, 111 bp, Streptococcus sp.
  source 1..111: mol_type = unassigned DNA
  misc_feature 1..111: note = KQ969393.1/469908-470018 Streptococcus sp. DD11 genomic scaffold scaffold00002, whole genome shotgun sequence.
tatgctatacttgaaatgctgtgtaatttgaatccatgcagcccttgacgcttagcttctttcgtcaagcatagtagaagcggtttggccgctaaaggagaatctcttatg

SEQ ID NO: 91324 - DNA, 98 bp, Streptococcus infantis
  source 1..98: mol_type = unassigned DNA
  misc_feature 1..98: note = AEDY01000119.1/6069-6166 Streptococcus infantis SK1302 contig73, whole genome shotgun sequence.
tgtgctatacttgaaaggttgacttgctcaacccttggtgcttagcttctttcaccaagcatattttacgcgggttaatcgctaaaggagaaaacatg

SEQ ID NO: 91325 - DNA, 119 bp, Streptococcus equi
  source 1..119: mol_type = unassigned DNA
  misc_feature 1..119: note = FM204884.1/1311057-1310939 Streptococcus equi subsp. zooepidemicus H70, complete genome
tatggtacaatgtaggcgttgcttagcaacccttggtgcttagttccctttcaccaagcatattacaaacgtggcggagctgtttatgctctagtctgacgtcaaaggagaaacacatg

SEQ ID NO: 91326 - DNA, 99 bp, Streptococcus infantis
  source 1..99: mol_type = unassigned DNA
  misc_feature 1..99: note = AFUT01000001.1/415821-415919 Streptococcus infantis SK970 ctg1129914002308, whole genome shotgun sequence.
tgtgctataattgtaaagttgatttttatcaacccttggtgcttagcttctttcaccaagcatattagatgcgggatagccgctaaaggagaaaacatg

SEQ ID NO: 91327 - DNA, 114 bp, Streptococcus urinalis
  source 1..114: mol_type = unassigned DNA
  misc_feature 1..114: note = AEUZ02000001.1/848814-848927 Streptococcus urinalis 2285-97 final_molecule, whole genome shotgun sequence.
tgtggtataatgtaaactgtcgtaaaacgacccttggtgcttagttccctttcaccaagcatattagaaacgtaaatgatccttagattatttggcgttaaaggagaaaaaatg

SEQ ID NO: 91328 - DNA, 99 bp, unidentified
  source 1..99: mol_type = unassigned DNA; note = Lactobacillus ginsenosidimutans
  misc_feature 1..99: note = CP012034.1/1198175-1198077 Lactobacillus ginsenosidimutans strain EMML 3041, complete genome.
ccaagtagaatgtactgaggtgcaaaatgcatcactgcgatacttatttcctttgatcgtagttatttagtggcgattgccataaaggagctaataatg

SEQ ID NO: 91329 - DNA, 135 bp, Streptococcus gordonii
  source 1..135: mol_type = unassigned DNA
  misc_feature 1..135: note = CP000725.1/1440073-1439939 Streptococcus gordonii str. Challis substr. CH1, complete genome.
tatgctatactagttgagttgccgagtttgtaagggaaaggcatgtctttcttcttattcctagcaacccttggctcttagcttctttcgccaagcatattacacgcggtaaaaccgccaaaggagaatttgatg

SEQ ID NO: 91330 - DNA, 115 bp, Streptococcus parauberis
  source 1..115: mol_type = unassigned DNA
  misc_feature 1..115: note = AEUT02000001.1/217880-217994 Streptococcus parauberis NCFD 2020 Noncontiguous_Finished_Chromosome chromosome, whole genome shotgun sequence.
tatgctataataattgagttgccgtgcaacccttggtgcttaagttcctttcaccaagcatattatacgcgagataaagaagtatctttattttacgccaaaggagaatcttatg

SEQ ID NO: 91331 - DNA, 103 bp, Streptococcus suis
  source 1..103: mol_type = unassigned DNA
  misc_feature 1..103: note = CP000407.1/1534158-1534056 Streptococcus suis 05ZYH33, complete genome.
tatgctatactaatcaacgttgttgataaattcaatgacccttggggcttgctcactttacccaagcatattttaagctttttcgctaaaggagaattttatg

SEQ ID NO: 91332 - DNA, 113 bp, Streptococcus gallolyticus
  source 1..113: mol_type = unassigned DNA
  misc_feature 1..113: note = CP013688.1/1209373-1209261 Streptococcus gallolyticus strain ICDDRB-NRC-S1, complete genome.
tgtgctatacttttaagcgttgtgaaaacaacccttgacgcttagttccctttcgtcaagcatattagagacgtgaagaattgtcgctctttaacgttaaaggagaaaaaatt

SEQ ID NO: 91333 - DNA, 114 bp, Streptococcus pseudoporcinus
  source 1..114: mol_type = unassigned DNA
  misc_feature 1..114: note = AEUY02000003.1/47857-47970 Streptococcus pseudoporcinus LQ 940-04 Contig1216510748, whole genome shotgun sequence.
tgtggtataatgaaaaggttgccatgcaacccttggtgcttagttccctttcgccaagcatattacaaatgttattagcaaagattcctgatagcattaaaggagaaaatgatg

SEQ ID NO: 91334 - DNA, 102 bp, Streptococcus ictaluri
  source 1..102: mol_type = unassigned DNA
  misc_feature 1..102: note = AEUX02000006.1/511000-510899 Streptococcus ictaluri 707-05 Contig1217055107, whole genome shotgun sequence.
tgtgctagaatgaagaagttgcctagcaatccttggtgcttagttcctttcaccaagcatattatacgcgtaaaaaatgacaccaaaggagagataccaatg

SEQ ID NO: 91335 - DNA, 97 bp, Streptococcus sp.
  source 1..97: mol_type = unassigned DNA
  misc_feature 1..97: note = MKIR01000001.1/290038-289942 Streptococcus sp. DF1 DF1_Contig1, whole genome shotgun sequence.
tatggtaagatacttattggtctatgaccccttgccacttattcacctttgggcaagcatattacactcgcaaaaagcgataaaggagaaatatatg

SEQ ID NO: 91336 - DNA, 117 bp, Streptococcus uberis
  source 1..117: mol_type = unassigned DNA
  misc_feature 1..117: note = AM946015.1/624185-624301 Streptococcus uberis 0140J complete genome
tatgctacaataataaagttgcttagcaacccttggtgcttagttccctttcgccaagcatattacaaacggcatcaatcattttcaattgatgtatcgttaaaggagaaaaaaatg

SEQ ID NO: 91337 - DNA, 101 bp, Streptococcus sp.
  source 1..101: mol_type = unassigned DNA
  misc_feature 1..101: note = KQ969506.1/799880-799780 Streptococcus sp. DD13 genomic scaffold scaffold00001, whole genome shotgun sequence.
tctgctatacttaacaacgttgcatctgcaacccttgacccttcccttctttggtcaagcatattagaagcgaaacaatcgctaaaggagatttttacatg

SEQ ID NO: 91338 - DNA, 114 bp, Streptococcus agalactiae
  source 1..114: mol_type = unassigned DNA
  misc_feature 1..114: note = AE009948.1/847184-847297 Streptococcus agalactiae 2603V/R, complete genome.
tgtgatatacttagtaagttgttttacacaacccttgatgcttagttccctttcatcaagcatattacaaacgttagaagtgttaactatctaaacgttaaaggagaaattatg

SEQ ID NO: 91339 - DNA, 125 bp, Lactobacillus rhamnosus
  source 1..125: mol_type = unassigned DNA
  misc_feature 1..125: note = AEYM01000577.1/1324-1200 Lactobacillus rhamnosus MTCC 5462 contig1517, whole genome shotgun sequence.
aaaagtaaactgaaaacattgtaagaactattaactgaatcggaaccgccccgcgcgcttccacgacgatacttatttcctttgatcgtcgttattactggcaaagccacaaaggagaaacaata

SEQ ID NO: 91340 - DNA, 116 bp, Streptococcus pyogenes
  source 1..116: mol_type = unassigned DNA
  misc_feature 1..116: note = AE004092.2/610434-610549 Streptococcus pyogenes M1 GAS, complete genome.
tatggtacaatgtaaccgttgctttgcaacccttggtgcttagttccctttcaccaagcatattagaaacgtagatagcttttgagagttatccagacgttaaaggagaaaaaatg

SEQ ID NO: 91341 - DNA, 120 bp, Streptococcus dysgalactiae
  source 1..120: mol_type = unassigned DNA
  misc_feature 1..120: note = AP011114.1/708700-708819 Streptococcus dysgalactiae subsp. equisimilis RE378 DNA, complete genome.
tgtggtacaatgtaaccgttgcttagcaacccttggtgcttagttccctttcaccaagcatattagacacgtaaagagttaggtttgactaactgctttgacgttaaaggagaaaaaatg

SEQ ID NO: 91342 - DNA, 95 bp, Streptococcus sinensis
  source 1..95: mol_type = unassigned DNA
  misc_feature 1..95: note = JPEN01000022.1/6252-6346 Streptococcus sinensis strain HKU4 scaffold52, whole genome shotgun sequence.
catttcttactgttagtgatggatacagcccttgacgcttagcttctttcgtcaagcatattttaagcgggaaaaccgctaaaggagaaaaaatg

SEQ ID NO: 91343 - DNA, 97 bp, Streptococcus pneumoniae; identical to SEQ ID NO: 91307
  source 1..97: mol_type = unassigned DNA
  misc_feature 1..97: note = AE007317.1/904161-904257 Streptococcus pneumoniae R6, complete genome.

SEQ ID NO: 91344 - DNA, 101 bp, Pilibacter termitis
  source 1..101: mol_type = unassigned DNA
  misc_feature 1..101: note = FUXI01000005.1/90928-91028 Pilibacter termitis strain ATCC BAA-1030 genome assembly, contig: EI49DRAFT_scaffold00005.5
tccgttatactatttctcgtggttcaatccaccctttgacacttcctcactttggtcaaagcatattacactcgggtttcgccgataaaggagagtttatt

SEQ ID NO: 91345 - DNA, 98 bp, Streptococcus macacae
  source 1..98: mol_type = unassigned DNA
  misc_feature 1..98: note = AEUW02000001.1/978484-978387 Streptococcus macacae NCTC 11558 final_molecule, whole genome shotgun sequence.
tatgctatactagatgagttgctttagcagcccttgacacttcctgcctttggtcaagcatattataagcggttaagccgctaaaggagaaaagaatg

SEQ ID NO: 91346 - DNA, 97 bp, Streptococcus pneumoniae
  source 1..97: mol_type = unassigned DNA
  misc_feature 1..97: note = ABAA01000002.1/167005-167101 Streptococcus pneumoniae SP6-BS73 ctg865, whole genome shotgun sequence.
tgtgctatactagtagggttgaataaagcaacccttggtgtttagcttctttcaccaagcatattacacgcgggcaaccgccaaaggagaaaagatg

SEQ ID NO: 91347 - DNA, 137 bp, Streptococcus sanguinis
  source 1..137: mol_type = unassigned DNA
  misc_feature 1..137: note = CP000387.1/1493033-1492897 Streptococcus sanguinis SK36, complete genome.
tatgctatactagttgggttgccaaatctgtgggggaatcaactaatgatgctcctctcatgtgatgcaacccttggcgcttagcttctttcgccaagcatattacacgcggtaaagccgctaaaggagaaaacatg

SEQ ID NO: 91348 - DNA, 97 bp, Streptococcus pneumoniae; identical to SEQ ID NO: 91307
  source 1..97: mol_type = unassigned DNA
  misc_feature 1..97: note = ABAC01000009.1/939-843 Streptococcus pneumoniae SP11-BS70 ctg363_SP11-v3, whole genome shotgun sequence.

SEQ ID NO: 91349 - DNA, 107 bp, Lactococcus lactis; identical to SEQ ID NO: 91298
  source 1..107: mol_type = unassigned DNA
  misc_feature 1..107: note = CP000425.1/786495-786601 Lactococcus lactis subsp. cremoris SK11, complete genome.

SEQ ID NO: 91350 - DNA, 114 bp, Streptococcus agalactiae; identical to SEQ ID NO: 91338
  source 1..114: mol_type = unassigned DNA
  misc_feature 1..114: note = CP000114.1/925396-925509 Streptococcus agalactiae A909, complete genome.

SEQ ID NO: 91351 - DNA, 97 bp, Streptococcus pneumoniae; identical to SEQ ID NO: 91307
  source 1..97: mol_type = unassigned DNA
  misc_feature 1..97: note = CP001033.1/966317-966413 Streptococcus pneumoniae CGSP14, complete genome.

SEQ ID NO: 91352 - DNA, 103 bp, Streptococcus suis; identical to SEQ ID NO: 91331
  source 1..103: mol_type = unassigned DNA
  misc_feature 1..103: note = CP000407.1/1534158-1534056 Streptococcus suis 05ZYH33, complete genome.

SEQ ID NO: 91353 - DNA, 116 bp, Streptococcus pyogenes; identical to SEQ ID NO: 91340
  source 1..116: mol_type = unassigned DNA
  misc_feature 1..116: note = CP000003.1/587341-587456 Streptococcus pyogenes MGAS10394, complete genome.

SEQ ID NO: 91354 - DNA, 116 bp, Streptococcus pyogenes; identical to SEQ ID NO: 91340
  source 1..116: mol_type = unassigned DNA
  misc_feature 1..116: note = CP000260.1/602445-602560 Streptococcus pyogenes MGAS10270, complete genome.

SEQ ID NO: 91355 - DNA, 97 bp, Streptococcus mutans; identical to SEQ ID NO: 91315
  source 1..97: mol_type = unassigned DNA
  misc_feature 1..97: note = AE014133.2/1474191-1474095 Streptococcus mutans UA159, complete genome.

SEQ ID NO: 91356 - DNA, 106 bp, Lactococcus lactis; identical to SEQ ID NO: 91306
  source 1..106: mol_type = unassigned DNA
  misc_feature 1..106: note = AM406671.1/1746216-1746111 Lactococcus lactis subsp. cremoris MG1363, complete genome

SEQ ID NO: 91357 - DNA, 137 bp, Streptococcus sanguinis; identical to SEQ ID NO: 91347
  source 1..137: mol_type = unassigned DNA
  misc_feature 1..137: note = CP000387.1/1493033-1492897 Streptococcus sanguinis SK36, complete genome.

SEQ ID NO: 91358 - DNA, 99 bp, Lactobacillus casei; identical to SEQ ID NO: 91309
  source 1..99: mol_type = unassigned DNA
  misc_feature 1..99: note = CP000423.1/2043279-2043181 Lactobacillus casei ATCC 334, complete genome.

SEQ ID NO: 91359 - DNA, 97 bp, Streptococcus pneumoniae
  source 1..97: mol_type = unassigned DNA
  misc_feature 1..97: note = FQ312029.1/941296-941392 Streptococcus pneumoniae INV200 genome.
tgtgctatactagtaaggttgaatgaatcaacccttggtgcttagcttctttcaccaagcatattacacgcgggcaaccgccaaaggagaaaagatg

SEQ ID NO: 91360 - DNA, 114 bp, Streptococcus agalactiae
  source 1..114: mol_type = unassigned DNA
  misc_feature 1..114: note = AAJR01000052.1/12937-13050 Streptococcus agalactiae COH1 s_agalactiae_coh1_6, whole genome shotgun sequence.
tgtgatatacttagtaagttgttttacacaacccttgatgcttagttccctttcatcaagcatattacaaacgttagaagtgttaactgtctaaacgttaaaggagaaattatg

SEQ ID NO: 91361 - DNA, 97 bp, Streptococcus pneumoniae
  source 1..97: mol_type = unassigned DNA
  misc_feature 1..97: note = FQ312042.1/2132413-2132509 Streptococcus pneumoniae SPN033038 draft genome.
tgtgctatactagtagggttgaataaagcaacccttggtgcttagcttctttcaccaagcatattacacgcgggcaaccgccaaaggagaaaagatg

SEQ ID NO: 91362 - DNA, 101 bp, Faecalibacterium prausnitzii
  source 1..101: mol_type = unassigned DNA
  misc_feature 1..101: note = GG697151.2/327995-327895 Faecalibacterium prausnitzii A2-165 genomic scaffold Scfld2, whole genome shotgun sequence.
gagcaacttaggattttaggctccccggcgtgtctcgaaccatgccgggccaaacccatagggctggcggtccctgtgcggtcaaaattcatccgccggag

SEQ ID NO: 91363 - DNA, 104 bp, Faecalibacterium prausnitzii
  source 1..104: mol_type = unassigned DNA
  misc_feature 1..104: note = CYYL01000008.1/39071-39174 Faecalibacterium prausnitzii strain 2789STDY5608869 genome assembly, contig: SCcontig000008
gagcaacttaggattttaggctcccccgtgcggactcgaaaccgcgccgggctaaacccacaggagctggcggttcctgtgcggtcaaaatcaaaccgctggag

SEQ ID NO: 91364 - DNA, 103 bp, Faecalibacterium sp.
  source 1..103: mol_type = unassigned DNA
  misc_feature 1..103: note = FR889011.1/4425-4527 Faecalibacterium sp. CAG:82 genomic scaffold, scf61
gagcaacttaggattttaggctccccggtgtgtctcgaaccacgccgggccaaacccgcaggaactggcggtccctgcgcggtcaaaattcattccgccggag

SEQ ID NO: 91365 - DNA, 102 bp, Faecalibacterium prausnitzii
  source 1..102: mol_type = unassigned DNA
  misc_feature 1..102: note = FP929045.1/1765647-1765748 Faecalibacterium prausnitzii L2/6 draft genome.
gagcaacttaggattttaggctccccggcgtgtctcgaaccatgccgggccaaacccacgggggctggcggtccccgcgcggtcaaaatcaaaccgctggag

SEQ ID NO: 91366 - DNA, 103 bp, Faecalibacterium sp.; identical to SEQ ID NO: 91364
  source 1..103: mol_type = unassigned DNA
  misc_feature 1..103: note = MNSO01000038.1/2228-2126 Faecalibacterium sp. CAG:82-related_59_9 Ley3_66761_scaffold_31584, whole genome shotgun sequence.

SEQ ID NO: 91367 - DNA, 101 bp, unidentified
  source 1..101: mol_type = unassigned DNA; note = Faecalibacterium cf.
  misc_feature 1..101: note = AECU01000177.1/7590-7690 Faecalibacterium cf. prausnitzii KLE1255 F_prausnitziiKLE1255.K95-1.0_Cont551.2, whole genome shotgun sequence.
gagcaacttaggattttaggctccccggcgtgtctcgaaccatgccgggccaaacccacaggggctggcggccctgtgcggtcaaaatcatcccgctggag

SEQ ID NO: 91368 - DNA, 101 bp, Subdoligranulum sp.
  source 1..101: mol_type = unassigned DNA
  misc_feature 1..101: note = MNTR01000025.1/7338-7238 Subdoligranulum sp. 60_17 Ley3_66761_scaffold_782, whole genome shotgun sequence.
gagcaacttaggattttaggctccgctgccggctgctggtcggcagcgcaaaccccgcaaggctggcggtcttgcgagtggtcaaaatctatccgccggag

SEQ ID NO: 91369 - DNA, 102 bp, Faecalibacterium prausnitzii
  source 1..102: mol_type = unassigned DNA
  misc_feature 1..102: note = FP929046.1/562024-562125 Faecalibacterium prausnitzii SL3/3 draft genome.
gagcaacttaggattttaggctccccggtgccactcgagcggcgctgggcaaaacccacaggagctggcggttcctgtgcggtcaaaatcaaaccgctggag

SEQ ID NO: 91370 - DNA, 96 bp, Subdoligranulum variabile
  source 1..96: mol_type = unassigned DNA
  misc_feature 1..96: note = GG704769.1/449620-449525 Subdoligranulum variabile DSM 15176 genomic scaffold Scfld0, whole genome shotgun sequence.
gagcaacttaggattttaggctccgccgcagcttccgcggcgcaaaccggtgtcaggctggcggtctggcatgcggtcaaaatctatccgccggag

SEQ ID NO: 91371 - DNA, 101 bp, Faecalibacterium prausnitzii; identical to SEQ ID NO: 91362
  source 1..101: mol_type = unassigned DNA
  misc_feature 1..101: note = ACOP02000046.1/22370-22270 Faecalibacterium prausnitzii A2-165 F_prausnitzii-1.0.1_Cont2.6, whole genome shotgun sequence.

SEQ ID NO: 91372 - DNA, 101 bp, unidentified; identical to SEQ ID NO: 91367
  source 1..101: mol_type = unassigned DNA; note = Unknown
  misc_feature 1..101: note = ADJS01009870.1/10212-10312 Uncultured Faecalibacterium sp. TS28_contig03264, whole genome shotgun sequence.

SEQ ID NO: 91373 - DNA, 94 bp, unidentified
  source 1..94: mol_type = unassigned DNA; note = Unknown
  misc_feature 1..94: note = ADJS01013861.1/2134-2227 Uncultured Faecalibacterium sp. TS28_contig197612, whole genome shotgun sequence.
gagcaacttaggattttaggctccgcctggttttcaggcgcaaacccacccaagcctggcggtcttgggcgcggtcaaaatctatccgccggag

SEQ ID NO: 91374 - DNA, 102 bp, unidentified; identical to SEQ ID NO: 91369
  source 1..102: mol_type = unassigned DNA; note = Unknown
  misc_feature 1..102: note = ADJS01011583.1/9082-9183 Uncultured Faecalibacterium sp. TS28_contig160857, whole genome shotgun sequence.

SEQ ID NO: 91375 - DNA, 96 bp, unidentified
  source 1..96: mol_type = unassigned DNA; note = Unknown
  misc_feature 1..96: note = ADJS01012726.1/612-517 Uncultured Faecalibacterium sp. TS28_contig185429, whole genome shotgun sequence.
gagcaacttaggattttaggctccaccgcggcttgctgcggtgcaaaccccgcaagcctggcggtcttgcgcgcggtcaaaatctatccgccggag

SEQ ID NO: 91376 - DNA, 101 bp, unidentified; identical to SEQ ID NO: 91367
  source 1..101: mol_type = unassigned DNA; note = Faecalibacterium cf.
  misc_feature 1..101: note = AECU01000177.1/7590-7690 Faecalibacterium cf. prausnitzii KLE1255 F_prausnitziiKLE1255.K95-1.0_Cont551.2, whole genome shotgun sequence.

SEQ ID NO: 91377 - DNA, 101 bp, unidentified
  source 1..101: mol_type = unassigned DNA; note = Unknown
  misc_feature 1..101: note = BABA01018694.1/413-513 Human gut metagenome DNA, contig sequence: F2-Y_018694.
  misc_difference 84: note = n is a, c, g, or t
gagcaacttaggattttaggctccgctgccggctgctggtcggcagcgcaaaccccgcaaggctggcggtcttgcgcgtggtcnaaatctatccgccggag

SEQ ID NO: 91378 - DNA, 102 bp, unidentified; identical to SEQ ID NO: 91369
  source 1..102: mol_type = unassigned DNA; note = Unknown
  misc_feature 1..102: note = BAAX01000750.1/3091-2990 Human gut metagenome DNA, contig sequence: F2-V_000750.

SEQ ID NO: 91379 - DNA, 101 bp, unidentified
  source 1..101: mol_type = unassigned DNA; note = Unknown
  misc_feature 1..101: note = BABG01013292.1/257-357 Human gut metagenome DNA, contig sequence: In-R_013292.
gagcaacttaggattttaggctccccggtgcgtctcgaaccgcgccgggccaaacccacaggggctggcggtcctgtgcggtcaaaatctttccgctggag

SEQ ID NO: 91380 - DNA, 83 bp, unidentified
  source 1..83: mol_type = unassigned DNA; note = Unknown
  misc_feature 1..83: note = BAAU01020333.1/1-83 Human gut metagenome DNA, contig sequence: F1-S_020333.
ggctccgctgtcggctgctggtcggcagcgcaaaccccgcaaggctggcggtcttgcgtgtggtcaaaatctatccgccggag

SEQ ID NO: 91381 - DNA, 101 bp, unidentified
  source 1..101: mol_type = unassigned DNA; note = Unknown
  misc_feature 1..101: note = BABD01012433.1/319-419 Human gut metagenome DNA, contig sequence: In-D_012433.
gagaaacttaggattttaggctccgctgccggctgctggtcggcagcgcaaaccccgcaaggctggcggtcttgcgcgtggtcaaaatctatccgccggag

SEQ ID NO: 91382 - DNA, 102 bp, unidentified
  source 1..102: mol_type = unassigned DNA; note = Unknown
  misc_feature 1..102: note = BAAY01002983.1/1264-1163 Human gut metagenome DNA, contig sequence: F2-W_002983.
gagcaacttaggattttaggctccccggcgtgtctcgaaccatgccgggccaaacccacgggggctggcggtccccgcgtggtcaaaatcaaaccgctggag

SEQ ID NO: 91383 - DNA, 101 bp, unidentified; identical to SEQ ID NO: 91362
  source 1..101: mol_type = unassigned DNA; note = Unknown
  misc_feature 1..101: note = BAAY01013224.1/926-826 Human gut metagenome DNA, contig sequence: F2-W_013224.

SEQ ID NO: 91384 - DNA, 102 bp, Faecalibacterium prausnitzii; identical to SEQ ID NO: 91369
  source 1..102: mol_type = unassigned DNA
  misc_feature 1..102: note = ABED02000027.1/116756-116655 Faecalibacterium prausnitzii M21/2 F_prausnitzii_M212-2.0.1_Cont749, whole genome shotgun sequence.

SEQ ID NO: 91385 - DNA, 101 bp, unidentified; identical to SEQ ID NO: 91362
  source 1..101: mol_type = unassigned DNA; note = Unknown
  misc_feature 1..101: note = BAAX01000347.1/2947-2847 Human gut metagenome DNA, contig sequence: F2-V_000347.

SEQ ID NO: 91386 - DNA, 101 bp, unidentified; identical to SEQ ID NO: 91367
  source 1..101: mol_type = unassigned DNA; note = Unknown
  misc_feature 1..101: note = BABA01010993.1/1076-1176 Human gut metagenome DNA, contig sequence: F2-Y_010993.

SEQ ID NO: 91387 - DNA, 101 bp, unidentified
  source 1..101: mol_type = unassigned DNA; note = Unknown
  misc_feature 1..101: note = BAAZ01007046.1/1247-1147 Human gut metagenome DNA, contig sequence: F2-X_007046.
gcaacttaggattttaggctccccgtgcgtgtctcgaaccatgccgggccaaacccacgggggctggcggtccccgtgcggtcaaaatcaaaccgctggag

SEQ ID NO: 91388 - DNA, 94 bp, unidentified; identical to SEQ ID NO: 91373
  source 1..94: mol_type = unassigned DNA; note = Unknown
  misc_feature 1..94: note = ADJT01007369.1/6381-6474 Uncultured Faecalibacterium sp. TS29_contig137076, whole genome shotgun sequence.

SEQ ID NO: 91389 - DNA, 101 bp, unidentified
  source 1..101: mol_type = unassigned DNA; note = Unknown
  misc_feature 1..101: note = ADJT01005830.1/328-228 Uncultured Faecalibacterium sp. TS29_contig03376, whole genome shotgun sequence.
gagcaacttaggattttaggctccccggcgtgtctcgaaccatgctgggccaaacccatagggctggcggtccctgtgcggtcaaaattcatccgccggag

SEQ ID NO: 91390 - DNA, 102 bp, unidentified
  source 1..102: mol_type = unassigned DNA; note = Unknown
  misc_feature 1..102: note = ADJS01009939.1/10976-11077 Uncultured Faecalibacterium sp. TS28_contig03403, whole genome shotgun sequence.
gagcaacttaggattttaggctccgccgtctcccctgcgggaggcggcgcaaaccccgcaaggctggcggtcttgcgtgcggtcaaaatctatccgccggag

SEQ ID NO: 91391 - DNA, 102 bp, Faecalibacterium prausnitzii; identical to SEQ ID NO: 91365
  source 1..102: mol_type = unassigned DNA
  misc_feature 1..102: note = FP929045.1/1765647-1765748 Faecalibacterium prausnitzii L2/6 draft genome.

SEQ ID NO: 91392 - DNA, 96 bp, Subdoligranulum variabile; identical to SEQ ID NO: 91370
  source 1..96: mol_type = unassigned DNA
  misc_feature 1..96: note = ACBY02000013.1/114529-114434 Subdoligranulum variabile DSM 15176 S_variabile-1.0.1_Cont0.20, whole genome shotgun sequence.

SEQ ID NO: 91393 - DNA, 102 bp, Faecalibacterium prausnitzii; identical to SEQ ID NO: 91369
  source 1..102: mol_type = unassigned DNA
  misc_feature 1..102: note = FP929046.1/562024-562125 Faecalibacterium prausnitzii SL3/3 draft genome.

SEQ ID NO: 91394 - DNA, 101 bp, unidentified
  source 1..101: mol_type = unassigned DNA; note = Unknown
  misc_feature 1..101: note = BABA01026116.1/736-636 Human gut metagenome DNA, contig sequence: F2-Y_026116.
gagcaacttaggattttaggctccccggtgcgtctcgaaccgcgctgggccaaacccacaggggctggcggccctgtgcggtcaaaatcaaaccgctggag

SEQ ID NO: 91395 - DNA, 101 bp, unidentified; identical to SEQ ID NO: 91362
  source 1..101: mol_type = unassigned DNA; note = Unknown
  misc_feature 1..101: note = ADJS01012663.1/5165-5065 Uncultured Faecalibacterium sp. TS28_contig184996, whole genome shotgun sequence.

SEQ ID NO: 91396 - DNA, 102 bp, unidentified; identical to SEQ ID NO: 91365
  source 1..102: mol_type = unassigned DNA; note = Unknown
  misc_feature 1..102: note = BAAX01019688.1/382-483 Human gut metagenome DNA, contig sequence: F2-V_019688.

SEQ ID NO: 91397 - DNA, 101 bp, unidentified; identical to SEQ ID NO: 91362
  source 1..101: mol_type = unassigned DNA; note = Unknown
  misc_feature 1..101: note = BAAV01004919.1/1075-1175 Human gut metagenome DNA, contig sequence: F1-T_004919.

SEQ ID NO: 91398 - DNA, 101 bp, unidentified; identical to SEQ ID NO: 91367
  source 1..101: mol_type = unassigned DNA; note = Unknown
  misc_feature 1..101: note = BAAY01002380.1/1139-1039 Human gut metagenome DNA, contig sequence: F2-W_002380.

SEQ ID NO: 91399 - DNA, 1471 bp, Azotobacter vinelandii
  source 1..1471: mol_type = unassigned DNA
  misc_feature 1..1471: note = NR_041039.1 Azotobacter vinelandii strain IAM 15004 16S ribosomal RNA
ggctcagattgaacgctggcggcaggcctaacacatgcaagtcgagcggcagcgggaccttcgggttgccggcgagcggcggacgggtgagtaatgcctaggaatctgcctgttagtgggggataacgcggggaaactcgcgctaataccgcatacgtcctacgggagaaagtgggggaccctcgggcctcacgctaacagatgagcctaggtcggattagctagttggtggggtaaaggcccaccaaggcgacgatccgtaactggtctgagaggatgatcagtcacactggaactgagacacggtccagactcctacgggaggcagcagtggggaatattggacaatgggcgaaagcctgatccagccatgccgcgtgtgtgaagaaggtcttcggattgtaaagcactttaagttgggaggaagggcgctcggtgaatacccaagcgtcttgacgttaccgacagaataagcaccggctaacttcgtgccagcagccgcggtaatacgaagggtgcaagcgttaatcggaattactgggcgtaaagcgcgcgtaggtggttcggcaagttggatgtgaaagccccgggctcaacctgggaaccgcatccaaaactactgggctagagtacggtagagggtggtggaatttcctgtgtagcggtgaaatgcgtagatataggaaggaacaccagtggcgaaggcgaccacctggaccgatactgacactgaggtgcgaaagcgtggggagcaaacaggattagataccctggtagtccacgccgtaaacgatgtcgactagccgttgggctccttgagagcttagtggcgcagctaacgcattaagtcgaccgcctggggagtacggccgcaaggttaaaactcaaatgaattgacgggggcccgcacaagcggtggagcatgtggtttaattcgaagcaacgcgaagaaccttacctggccttgacatcctgcgaactttcaagagattgatgggtgccttcgggagcgcagagacaggtgctgcatggctgtcgtcagctcgtgtcgtgagatgttgggttaagtcccgtaacgagcgcaacccttgtccttagttaccagcgattcggtcgggcactctaaggagactgccggtgacaaaccggaggaaggtggggatgacgtcaagtcatcatggcccttacggccagggctacacacgtgctacaatggtcggtacaaagggttgccaagtcgcgaggcggagctaatcccagaaaaccgatcgtagtccggatcgcagtctgcaactcgactgcgtgaagtcggaatcgctagtaatcgcgaatcagaatgtcgcggtgaatacgttcccgggccttgtacacaccgcccgtcacaccatgggagtgggttgctccagaagtagctagtctaaccctcgggaggacggttaccacggagtgattcatgactggggtgaagtcg

SEQ ID NO: 91400 - DNA, 1411 bp, Bacillus megaterium
  source 1..1411: mol_type = unassigned DNA
  misc_feature 1..1411: note = MN641873.1 Bacillus megaterium strain CT03 16S ribosomal RNA gene
gcgaactgattagaagcttgcttctatgacgttagcggcggacgggtgagtaacacgtgggcaacctgcctgtaagactgggataacttcgggaaaccgaagctaataccggataggatcttctccttcatgggagatgattgaaagatggtttcggctatcacttacagatgggcccgcggtgcattagctagttggtgaggtaacggctcaccaaggcaacgatgcatagccgacctgagagggtgatcggccacactgggactgagacacggcccagactcctacgggaggcagcagtagggaatcttccgcaatggacgaaagtctgacggagcaacgccgcgtgagtgatgaaggctttcgggtcgtaaaactctgttgttagggaagaacaagtacagagtaactgctgtaccttgacggtacctaaccagaaagccacggctaactacgtgccagcagccgcggtaatacgtaggtggcaagcgttatccggaattattgggcgtaaagcgcgcgcaggcggtttcttaagtctgatgtgaaagcccacggctcaaccgtggagggtcattggaaactggggaacttgagtgcagaagagaaaagcggaattccacgtgtagcggtgaaatgcgtagagatgtggaggaacaccagtggcgaaggcggctttttggtctgtaactgacgctgaggcgcgaaagcgtggggagcaaacaggattagataccctggtagtccacgccgtaaacgatgagtgctaagtgttagagggtttccgccctttagtgctgcagctaacgcattaagcactccgcctggggagtacggtcgcaagactgaaactcaaaggaattgacgggggcccgcacaagcggtggagcatgtggtttaattcgaagcaacgcgaagaaccttaccaggtcttgacatcctctgacaactctagagatagagcgttccccttcgggggacagagtgacaggtggtgcatggttgtcgtcagctcgtgtcgtgagatgttgggttaagtcccgcaacgagcgcaacccttgatcttagttgccagcatttagttgggcactctaaggtgactgccggtgacaaaccggaggaaggtggggatgacgtcaaatcatcatgccccttatgacctgggctacacacgtgctacaatggatggtacaaagggctgcaagaccgcgaggtcaagccaatcccataaaaccattctcagttcggattgtaggctgcaactcgcctacatgaagctggaatcgctagtaatcgcggatcagcatgccgcggtgaatacgttcccgggccttgtacacaccgcccgtcacaccacgagagtttgtaacacccgaatcggtggagtaaccgtaaggagctagccgcctaa

SEQ ID NO: 91401 - DNA, 1550 bp, Bacillus subtilis
  source 1..1550: mol_type = unassigned DNA
  misc_feature 1..1550: note = NR_112116.2 Bacillus subtilis strain IAM 12118 16S ribosomal RNA
ttatcggagagtttgatcctggctcaggacgaacgctggcggcgtgcctaatacatgcaagtcgagcggacagatgggagcttgctccctgatgttagcggcggacgggtgagtaacacgtgggtaacctgcctgtaagactgggataactccgggaaaccggggctaataccggatggttgtttgaaccgcatggttcaaacataaaaggtggcttcggctaccacttacagatggacccgcggcgcattagctagttggtgaggtaacggctcaccaaggcaacgatgcgtagccgacctgagagggtgatcggccacactgggactgagacacggcccagactcctacgggaggcagcagtagggaatcttccgcaatggacgaaagtctgacggagcaacgccgcgtgagtgatgaaggttttcggatcgtaaagctctgttgttagggaagaacaagtaccgttcgaatagggcggtaccttgacggtacctaaccagaaagccacggctaactacgtgccagcagccgcggtaatacgtaggtggcaagcgttgtccggaattattgggcgtaaagggctcgcaggcggtttcttaagtctgatgtgaaagcccccggctcaaccggggagggtcattggaaactggggaacttgagtgcagaagaggagagtggaattccacgtgtagcggtgaaatgcgtagagatgtggaggaacaccagtggcgaaggcgactctctggtctgtaactgacgctgaggagcgaaagcgtggggagcgaacaggattagataccctggtagtccacgccgtaaacgatgagtgctaagtgttagggggtttccgccccttagtgctgcagctaacgcattaagcactccgcctggggagtacggtcgcaagactgaaactcaaaggaattgacgggggcccgcacaagcggtggagcatgtggtttaattcgaagcaacgcgaagaaccttaccaggtcttgacatcctctgacaatcctagagataggacgtccccttcgggggcagagtgacaggtggtgcatggttgtcgtcagctcgtgtcgtgagatgttgggttaagtcccgcaacgagcgcaaccctggatcttagttgccagcattcagttgggcactctaaggtgactgccggtgacaaaccggaggaaggtggggatgacgtcaaatcatcatgccccttatgacctgggctacacacgtgctacaatggacagaacaaagggcagcgaaaccgcgaggttaagccaatcccacaaatctgttctcagttcggatcgcagtctgcaactcgactgcgtgaagctggaatcgctagtaatcgcggatcagcatgccgcggtgaatacgttcccgggccttgtacacaccgcccgtcacaccacgagagtttgtaacacccgaagtcggtgaggtaaccttttaggagccagccgccgaaggtgggacagatgattggggtgaagtcgtaacaaggtagccgtatcggaaggtgcggctggatcacctccttt

SEQ ID NO: 91402 - DNA, 1533 bp, Pantoea allii
  source 1..1533: mol_type = unassigned DNA
  misc_feature 1..1533: note = NR_115258.1 Pantoea allii strain BD 390 16S ribosomal RNA
agagtttgatcctggctcagattgaacgctggcggcaggcctaacacatgcaagtcggacggtagcacagagagcttgctctcgggtgacgagtggcggacgggtgagtaatgtctggggatctgcccgatagagggggataaccactggaaacggtggctaataccgcataacgtcgcaagaccaaagagggggaccttcgggcctctcactatcggatgaacccagatgggattagctagtaggcggggtaacggcccacctaggcgacgatccctagctggtctgagaggatgaccagccacactggaactgagacacggtccagactcctacgggaggcagcagtggggaatattgcacaatgggcgcaagcctgatgcagccatgccgcgtgtatgaagaaggccttcgggttgtaaagtactttcagcggggaggaaggcattgtggttaataaccgcagtgattgacgttacccgcagaagaagcaccggctaactccgtgccagcagccgcggtaatacggagggtgcaagcgttaatcggaattactgggcgtaaagcgcacgcaggcggtctgttaagtcagatgtgaaatccccgggcttaacctgggaactgcatttgaaactggcaggcttgagtctcgtagaggggggtagaattccaggtgtagcggtgaaatgcgtagagatctggaggaataccggtggcgaaggcggccccctggacgaagactgacgctcaggtgcgaaagcgtggggagcaaacaggattagataccctggtagtccacgccgtaaacgatgtcgacttggaggttgttcccttgaggagtggcttccggagctaacgcgttaagtcgaccgcctggggagtacggccgcaaggttaaaactcaaatgaattgacgggggcccgcacaagcggtggagcatgtggtttaattcgatgcaacgcgaagaaccttacctactcttgacatccagagaacttagcagagatgctttggtgccttcgggaactctgagacaggtgctgcatggctgtcgtcagctcgtgttgtgaaatgttgggttaagtcccgcaacgagcgcaacccttatcctttgttgccagcgattcggtcgggaactcaaaggagactgccggtgataaaccggaggaaggtggggatgacgtcaagtcatcatggcccttacgagtagggctacacacgtgctacaatggcgcatacaaagagaagcgacctcgcgagagcaagcggacctcacaaagtgcgtcgtagtccggatcggagtctgcaactcgactccgtgaagtcggaatcgctagtaatctgtggatcagaatgccacggtgaatacgttcccgggccttgtacacaccgcccgtcacaccatgggagtgggttgcaaaagaagtaggtagcttaacctccgggagggcgcttaccactttgtgattcatgactggggtgaagtcgtaacaaggtaaccgtaggggaacctgcggctggatcacctcctt

SEQ ID NO: 91403 - DNA, 1373 bp, Rhizobium radiobacter
  source 1..1373: mol_type = unassigned DNA
  misc_feature 1..1373: note = AM157353.1 Rhizobium radiobacter partial 16S rRNA gene
tggcagacgggtgagtaacgcgtgggaacataccctttcctgcggaatagctccgggaaactggaattaataccgcatacgccctacgggggaaagatttatcggggaaggattggcccgcgttggattagctagttggtggggtaaaggcctaccaaggcgacgatccatagctggtctgagaggatgatcagccacattgggactgagacacggcccaaactcctacgggaggcagcagtggggaatattggacaatgggcgcaagctgatccagccatgccgcgtgagtgatgaaggccttagggttgtaaagctctttcaccgatgaagataatgacggtagtcggagaagaggccccggctaacttcgtgccagcagccgcggtaatacgaagggggctagcgttgttcggaattactgggcgtaaagcgcacgtaggcggatatttaagtcaggggtgaaatcccgcagctcaactgcggaactgcctttgatactgggtatcttgagtatggaagaggtaagtggaattccgagtgtagaggtgaaattcgtagatattcggaggaacaccagtggcgaaggcggcttactggtccattactgacgctgaggtgcgaaagcgtggggagcaaacaggattagataccctggtagtccacgccgtaaacgatgaatgttagccgtcgggcagtatactgttcggtggcgcactaacgcattaaacattccgcctggggagtacggtcgcaagattaaaactcaaaggaattgacgggggcccgcacaagcggtggagcatgtggtttaattcgaagcaacgcgcagaaccttaccagctcttgacattcggggtatgggcattggagacgatgtccttcagttaggctggccccagaacaggtgctgcatggctgtcgtcagctcgtgtcgtgagatgttgggttaagtcccgcaacgagcgcaaccctcgcccttagttgccagcatttagttgggcactctaaggggactgccggtgataagccgagaggaaggtggggatgacgtcaagtcctcatgccttacgggctgggctacacacgtgctacaatggtggtgacagtgggcagcgagacagcgatgtcgagctaatctccaaaagccatcccagttcggattgcactctgcaactcgagtgcatgaagttggaatcgctagtaatcgcagatcagcatgctgcggtgaatacgttcccgggccttgtacacaccgcccgtcacaccatgggagttggttttacccgaaggtagtgcgctaaccgcaaggaggcagctaaccatggtagggtcagcgactggggtgaagtcgtaacaaggtagccgtaggg

SEQ ID NO: 91404 - DNA, 1435 bp, Bacillus subtilis
  source 1..1435: mol_type = unassigned DNA
  misc_feature 1..1435: note = AY864812.1 Bacillus subtilis subsp. natto 16S ribosomal RNA gene
cagatgggagcttgctccctgatgttagcggcggacgggtgagtaacacgtgggtaacctgcctgtaagactgggataactccgggaaaccggggctaataccggatggttgtttgaaccgcatggttcaaacataaaaggtggcttcggctaccacttacagatggacccgcggcgcattagctagttggtgaggtaacggctcaccaaggcgacgatgcgtagccgacctgagagggtgatcggccacactgggactgagacacggcccagactcctacgggaggcagcagtagggaatcttccgcaatggacgaaagtctgacggagcaacgccgcgtgagtgatgaaggttttcggatcgtaaagctctgttgttagggaagaacaagtaccgttcgaatagggcggtaccttgacggtacctaaccagaaagccacggctaactacgtgccagcagccgcggtaatacgtaggtggcaagcgttgtccggaattattgggcgtaaagggctcgcaggcggtttcttaagtctgatgtgaaagcccccggctcaaccggggagggtcattggaaactggggaacttgagtgcagaagaggagagtggaattccacgtgtagcggtgaaatgcgtagagatgtggaggaacaccagtggcgaaggcgactctctggtctgtaactgacgctgaggagcgaaagcgtggggagcgaacaggattagataccctggtagtccacgccgtaaacgatgagtgctaagtgttagggggtttccgccccttagtgctgcagctaacgcattaagcactccgcctggggagtacggtcgcaagactgaaactcaaaggaattgacgggggcccgcacaagcggtggagcatgtggtttaattcgaagcaacgcgaagaaccttaccaggtcttgacatcctctgacaatcctagagataggacgtccccttcgggggcagagtgacaggtggtgcatggttgtcgtcagctcgtgtcgtgagatgttgggttaagtcccgcaacgagcgcaacccttgatcttagttgccagcattcagttgggcactctaaggtgactgccggtgacaaaccggaggaaggtggggatgacgtcaaatcatcatgccccttatgacctgggctacacacgtgctacaatggacagaacaaagggcagcgaaaccgcgaggttaagccaatcccacaaatctgttctcagttcggatcgcagtctgcaactcgactgcgtgaagctggaatcgctagtaatcgcggatcagcatgccgcggtgaatacgttcccgggccttgtacacaccgcccgtcacaccacgagagtttgtaacacccgaagtcggtgaggtaaccttttaggagccagccgccgaaggtgggacagatgattggggtgaagtcg

SEQ ID NO: 91405 - DNA, 1414 bp, Streptomyces achromogenes
  source 1..1414: mol_type = unassigned DNA
  misc_feature 1..1414: note = MK377246.1 Streptomyces achromogenes strain E91CS4 16S ribosomal RNA gene
gctggcggcgtgcttaacacatgcaagtcgaacgatgaacctccttcgggaggggattagtggcgaacgggtgagtaacacgtgggcaatctgcccttcactctgggacaagccctggaaacggggtctaataccggatacgagcctccaaggcatcttggaggttggaaagctccggcggtgaaggatgagcccgcggcctatcagcttgttggtgaggtaatggctcaccaaggcgacgacgggtagccggcctgagagggcgaccggccacactgggactgagacacggcccagactcctacgggaggcagcagtggggaatattgcacaatgggcgaaagcctgatgcagcgacgccgcgtgagggatgacggccttcgggttgtaaacctctttcagcagggaagaagcgaaagtgacggtacctgcagaagaagcgccggctaactacgtgccagcagccgcggtaatacgtagggcgcaagcgttgtccggaattattgggcgtaaagagctcgtaggcggcttgtcacgtcgggtgtgaaagcccggggcttaaccccgggtctgcattcgatacgggctagctagagtgtggtaggggagatcggaattcctggtgtagcggtgaaatgcgcagatatcaggaggaacaccggtggcgaaggcggatctctgggccattactgacgctgaggagcgaaagcgtggggagcgaacaggattagataccctggtagtccacgccgtaaacggtgggaactaggtgttggcgacattccacgtcgtcggtgccgcagctaacgcattaagttccccgcctggggagtacggccgcaaggctaaaactcaaaggaattgacgggggcccgcacaagcagcggagcatgtggcttaattcgacgcaacgcgaagaaccttaccaaggcttgacatacaccggaaagcattagagatagtgccccccttgtggtcggtgtacaggtggtgcatggctgtcgtcagctcgtgtcgtgagatttgggttaagtcccgcaacgagcgcaacccttgttctgtgttgccagcatgcccttcggggtgatggggactcacaggagaccgccggggtcaactcggaggaaggtggggacgacgtcaagtcatcatgccccttatgtcttgggctgcacacgtgctacaatggccggtacaaagagctgcgataccgtgaggtggagcgaatctcaaaaagccggtctcagttcggattggggtctgcaactcgaccccatgaagtcggagttgctagtaatcgcagatcagcattgctgcggtgaatacgttcccgggccttgtacacaccgcccgtcacgtcacgaaagttggtaacacccgaagccggtggcccaaccccttgtgggagggagct

SEQ ID NO: 91406 - DNA, 291 bp, unidentified
  source 1..291: mol_type = unassigned DNA; note = Emericella nidulans
  misc_feature 1..291: note = KC443045.1 Emericella nidulans strain BAB-2648 18S ribosomal RNA gene
ttgaaaagagagttaaacagcacgtgaaattgttgaaagggaagcgcttgcgaccagactcggccccggggttcagccagcactcgtgctggtgtacttccccgggggcgggccagcgtcggtttgggcggccggtcaaaggccccaggaatgtatcgccctccggggttgtcttatagcctggggtgcaatgcggccagcccggaccgaggaacgcgcttcggcacggacgctggcgtaatggtcgcaaacgacccgtcttgaaacacggaccaagactcgcgtcgtttg

SEQ ID NO: 91407 - protein, 252 aa, unidentified
  source 1..252: note = [Curtobacterium] plantarum
  REGION 1..252: note = tr|A0A3M7UJL3|A0A3M7UJL3_9GAMM 2,3-dihydro-2,3-dihydroxybenzoate dehydrogenase; OS = [Curtobacterium] plantarum OX=221276 GN=dhbA PE=4 SV=1
MSHTFDFSGKIVWVTGAGQGIGYHTALAFHQAGAQVEAFDQRFKGHDYPFPCHTMDVADPAQVKTICQRVLAVQPRIDVLVNAAGILRIGATDELSFADWQACLNVNAGGAFNLFQQTLPRFREQRAGAIVTVASNSAHAPRIGMSAYGASKAALRSLCQTVGLEMAPYGVRCNIVSPGSTDTDMQRSLWHTPTGEQEMIAGFPDQFKLGIPLGKIAQPQEIAATVLFLASDLASHVTLQDIVVDGGATLGA

SEQ ID NO: 91408 - protein, 238 aa, Achromobacter piechaudii
  REGION 1..238: note = tr|D4XHL6|D4XHL6_9BURK Oxidoreductase, short chain dehydrogenase/reductase family protein OS=Achromobacter piechaudii ATCC 43553 OX=742159 GN=entA PE=4 SV=1
MSNERNAGLAVVTGASGGIGLAIAQRLLQAGWRVAGLDIGPAAVQHAAYRHVTVDLCDADATGAALEMLKAGGAQVDALVHAAGILRVGPLAQLDPLDGERMWKLHVDVAVRLAQVLAPEMATRGAGRVVLVGSRVAQGMPGRSQYAASKAALVALARSWAAELAPQGVTVNVVSPAATQTGMLQDPARVASAPRLPPIGRLIQPDEIAALVQFLLSPEAAAITGQDIAICGGASLPR

SEQ ID NO: 91409 - protein, 248 aa, Achromobacter sp.
  REGION 1..248: note = tr|A0A0M7NXH5|A0A0M7NXH5_9BURK 2,3-dihydro-2,3-dihydroxybenzoate dehydrogenase; OS = Achromobacter sp. ATCC35328 OX=1806490 GN=entA PE=4 SV=1
MDFSGKNVWVTGAGKGIGYATALAFVEAGAKVTGFDQAFTQEQYPFATEVMDVADAAQVAQVCQRLLAETERLDALVNAAGILRMGATDQLSKEDWQQTFAVNVGGAFNLFQQTMNQFRRQRGGAIVTVASDAAHTPRIGMSAYGASKAALKSLALSVGLELAGSGVRCNVVSPGSTDTDMQRTLWVSDDAEEQRIRGFGEQFKLGIPLGKIARPQEIANTILFLASDLASHITLQDIVVDGGSTLGA

SEQ ID NO: 91410 - protein, 260 aa, Achromobacter sp.
  REGION 1..260: note = tr|A0A0M7G0J7|A0A0M7G0J7_9BURK 2,3-dihydro-2,3-dihydroxybenzoate dehydrogenase; OS = Achromobacter sp. OX=134375 GN=dhbA PE=3 SV=1
MDLQLAGKRVLITGASKGIGLACAIAFAREGADPILVARDDAALHQATASIREQSGRDTRAVTMDLAVPGAAEKLAKETGPIDILVNNAGAVPGGALDQVQDERWRAGWELKVHGYISLARHYYPHMRDAGAGVIANIIGMAGAAPRADYICGAAANASLIAFTRALGGEAPRHGVRVFGVNPSRTRTDRVLTLARQRAHARWGDESRWQETLSDLPFSRLMEPEEVADMIVFGASPRAGYLSGTVIDLDGGEQYANHAR

SEQ ID NO: 91411 - protein, 234 aa, Achromobacter spanius
  REGION 1..234: note = tr|A0A448C108|A0A448C108_9BURK 2,3-dihydro-2,3-dihydroxybenzoate dehydrogenase; OS = Achromobacter spanius OX=217203 GN=entA PE=4 SV=1
MSNNPAGALAVVTGATGGIGLAIVQRLLDAGWQVAGLDIGPAVARHAAYRHITVDLCDEAATRQALVGCKHARALVHAAGIMRVGPLAQLDPADGERMWKLHVDVAVRLAQMLAPEMAERGGGRVVLVGSRTAQGMPGRSQYAASKAALVALARSWAAELAPQGVTVNVVSPAATQTGMLQDPARAASAPRMPPIGRLIQPEEVAALVEFLLSPQAAAITGQDIAICGGASLPR

SEQ ID NO: 91412 - protein, 256 aa, Acinetobacter baumannii
  REGION 1..256: note = tr|D0C790|D0C790_ACIB2 2,3-dihydroxybenzoate-2,3-dehydrogenase OS=Acinetobacter baumannii (strain ATCC 19606 / DSM 30007 / CIP 70.34 / JCM 6841 / NBRC 109757 / NCIMB12457 / NCTC 12156 / 81); OX = 575584 GN=HMPREF001
MRSTIVVTGAARGIGAAIAKQLLDQGYHVIGIDCQKNPEQWDISKTMTSDQSSQWQGISQDITHQQETQTLISELLEKYEITGLVNAAGVLIMRSMLEAKTEDWETLFAVNVMAPIAISQQFAKHFCAKRRGSIVTISSNSARMPRMQLGMYATTKAALSHFCRNLALEIAPYQVRLNIVSPGSTLTQMQQQLWTDNAPPPAVIDGDLSQYRTGIPLRKLAQPDDIANTVNFLLSDRAAQITMQEIVVDGGATLGV

SEQ ID NO: 91413 - protein, 263 aa, Acinetobacter baumannii
  REGION 1..263: note = tr|A0A0J1CVL4|A0A0J1CVL4_ACIBA 2,3-dihydro-2,3-dihydroxybenzoate dehydrogenase; OS = Acinetobacter baumannii MRSN 3527 OX=1409923; GN = T630_4005 PE=4 SV=1
MKEAETQEKSPTLTHSADTKIAWVTGVNQGMGAEIMQRLIAQHIYVVGFDLSTNNIVESDRYEVHQCDVRDAVQISSLCQKLLKTSPPDYFINTAGVLHLDEHDTLPEDAWLQTFEVNTFAPFYFLKHLSPYFREKRNGNIVMVSSNSAHVPRMKMAAYGASKAALTSFSKTVGLELAEYGIRVNIVSPGSTATPMLRQLWKDASGEKQTIHGNLAQYKVGIPLQKIALTEDIAHAVMFLISDQASHITMHDLVIDGGATLGQ

SEQ ID NO: 91414 - protein, 287 aa, Acinetobacter baumannii
  REGION 1..287: note = tr|A0A0E1PTI7|A0A0E1PTI7_ACIBA 2,3-dihydroxybenzoate-2,3-dehydrogenase OS=Acinetobacter baumannii NCGM 237 OX=1401639 GN=entA PE=4 SV=1
MNFYIHLLLIRMIIICNYIYRFLYNINWSIHMRSTIVVTGAARGIGAAIAKQLLDQGYHVIGIDCQKNPEQWDISKTMTSDQSSQWQGISQDITHQQETQTLISELLEKYEITGLVNAAGVLIMRSMLEAKTEDWETLFAVNVMAPIAISQQVAKHFCAKRRGSIVTISSNSARMPRMQLGMYATTKAALSHFCRNLALEIAPYQVRLNIVSPGSTLTQMQQQLWTDNAPPPAVIDGDLSQYRTGIPLRKLAQPDDIANTVSFLLSDRAAQITMQEIVVDGGATLGV

SEQ ID NO: 91415 - protein, 256 aa, Acinetobacter baumannii
  REGION 1..256: note = tr|A0A0D5YHL1|A0A0D5YHL1_ACIBA 2,3-dihydro-2,3-dihydroxybenzoate dehydrogenase; OS = Acinetobacter baumannii OX=470 GN=dhbA PE=4 SV=1
MRSTIVVTGAARGIGAAIAKQLLDQGYHVIGIDCQKNPEQWDISKTMTSDQSSQWQGISQDITHQQETQTLISELLEKYEITGLVNAAGVLIMRSMLEAKTEDWETLFAVNVMAPIAISQQVAKHFCAKRRGSIVTISSNSARMPRMQLGMYATTKAALSHFCRNLALEIAPYQVRLNIVSPGSTLTQMQQQLWTDNAPPPAVIDGDLSQYRTGIPLRKLAQPDDIANTVSFLLSDRAAQITMQEIVIDGGATLGV

SEQ ID NO: 91416 - protein, 256 aa, Acinetobacter baumannii
  REGION 1..256: note = tr|A0A385EVI0|A0A385EVI0_ACIBA 2,3-dihydro-2,3-dihydroxybenzoate dehydrogenase; OS = Acinetobacter baumannii WM99c OX=945555 GN=dhbA PE=4; SV = 1
MRSTIVVTGAARGIGAAIAKQLLDQGYHVIGIDCQKNPEQWDISKTMTSDQSSQWQGISQDITHQQETQTLISELLEKYEITGLVNAAGVLIMRSMLEAKTEDWETLFAVNVMAPIAISQQVAKHFCAKRRGSIVTISSNSARMPRMQLGMYATTKAALSHFCRNLALEIAPYQVRLNIVSPGSTLTQMQQQLWTDNAPPPAVIDGDLSQYRTGIPLRKLAQPDDIANTVSFLLSDRAAQITMQEIVVDGGATLGV

SEQ ID NO: 91417 - protein, 261 aa, Acinetobacter baylyi
  REGION 1..261: note = tr|Q6F8U7|Q6F8U7_ACIAD 2,3-dihydro-2,3-dihydroxybenzoate dehydrogenase; OS = Acinetobacter baylyi (strain ATCC 33305 / BD413 / ADP1); OX = 62977 GN=entA PE=4 SV=1
MTMTQINSEVLDINLVKKIAWVTGVNQGIGAQIMQQLIAQNIYVVGFDLSIRNFMTSDHYEVHQCNVGDSSQVFDLCQKLLNTSPPDYFINTAGVLHLDGHDALPIEAWRQTFEVNTFAPFYFLKNLSPHFRNKREGSIVMVSSNSARVPRIEMAAYGASKAALTSFSKTVALELAEYGVRVNIVSPGSTVTPMLRQLWNDASGEQKTIHGNLAQYKVGIPLQKIALTQDIANAVMFLISDQASHITMHDLVVDGGATLGQ

SEQ ID NO: 91418 - protein, 256 aa, Acinetobacter calcoaceticus
  REGION 1..256: note = tr|A0A380VN72|A0A380VN72_ACICA Dehydrogenase; OS = Acinetobacter calcoaceticus OX=471 GN=dhbA PE=4 SV=1
MRSTIVVTGAARGIGAAIAKQLLDQGYHVIGIDCQKNPEQWDISKTMTSNQSSQWQGISQDITHQQETQTLISELLEKYEITGLVNAAGVLIMRSMLEAKMEDWETLFAVNVMAPIAISQQVAKHFCAKRRGSIVTISSNSARMPRMQLGMYATTKAALSHFCRNLALEIAPYQVRLNIVSPGSTLTQMQQQLWTDNAPPPAVIDGDLSQYRTGIPLRKLAQPDDIANTVSFLLSDRAAQITMQEIVVDGGATLGV

SEQ ID NO: 91419 - protein, 256 aa, Acinetobacter calcoaceticus
  REGION 1..256: note = tr|D0RXX6|D0RXX6_ACICA 2,3-dihydroxybenzoate-2,3-dehydrogenase OS=Acinetobacter calcoaceticus RUH2202 OX=575585 GN=HMPREF0012_01028 PE=4; SV = 1
MSSTIVVTGAARGIGAAIAKQLLQQGYQVIGIDRQENPEQWEISKNLTSDECLRWQGISQDITQQQATQKLIADLLEKHNITGLVNAAGVLIMRSMLEAKTEDWETLFAVNVMAPIAISQQLAKHFCEKKQGSIVTISSNSSRMPRIQLGMYATSKAALSHYCRNLALEIAPHQVRLNIVSPGSTLTQMQQQLWTDNTPPPAVMDGDLSQYRTGIPLRKLAQPEDIANTVSFLLSDQAAQITMQEIVVDGGATLGV

SEQ ID NO: 91420 - protein, 250 aa, Acinetobacter haemolyticus
  REGION 1..250: note = tr|D4XRW4|D4XRW4_ACIHA Oxidoreductase, short chain dehydrogenase/reductase family protein OS=Acinetobacter haemolyticus ATCC 19194 OX=707232 GN=entA PE=4 SV=1
MNMTEKKIAWVVGVNQGIGLEVMQRLYAENIQVVGIDKAKDQVPEHFKEMIHVCDIRDEQQIAKLCRTLLLESPPDYFIHVAGVLHLGEHDEISFAQWRETFEVNLFSPFHFFRHLSPYFKKKKMGNVVIISSNSTKVPRMNMSAYGASKSALTYFTKTVALELAQYGVRVNIISPGSTATAMQYQLWENAQGEQNTILGNLSQFKVGIPLKKIAKVSDIANAVLFFIGEQSSHITMHDLVIDGGATLGS

SEQ ID NO: 91421 - protein, 248 aa, Acinetobacter haemolyticus
  REGION 1..248: note = tr|A0A380UJS5|A0A380UJS5_ACIHA 2,3-dihydroxybenzoate-2,3-dehydrogenase OS=Acinetobacter haemolyticus OX=29430 GN=entA PE=4 SV=1
MTEKKIAWVVGVNQGIGLEVMQRLYAENIQVVGIDKAKDQVPEHFKEMIHVCDIRDEQQIAKLCRTLLLESPPDYFIHVAGVLHLGEHDEISFAQWRETFEVNLFSPFHFFRHLSPYFKKKKMGNVVIISSNSTKVPRMNMSAYGASKSALTYFTKTVALELAQYGVRVNIISPGSTATAMQYQLWENAQGEQNTILGNLSQFKVGIPLKKIAKVSDIANAVLFFIGEQSSHITMHDLVIDGGATLGS

SEQ ID NO: 91422 - protein, 77 aa, Acinetobacter nosocomialis
  REGION 1..77: note = tr|A0A2T7FEK5|A0A2T7FEK5_ACINO 2,3-dihydro-2,3-dihydroxybenzoate dehydrogenase (Fragment); OS = Acinetobacter nosocomialis OX=106654 GN=DC362_24405; PE = 4 SV=1
ELAGSGVRCNVVSPGSTDTDMQRTLWVSDDAEEQRIRGFGEQFKLGIPLGKIARPQEIANTILFLASDLASHITLQD

SEQ ID NO: 91423 - protein, 256 aa, Acinetobacter sp.
  REGION 1..256: note = tr|A0A013TW25|A0A013TW25_9GAMM 2,3-dihydro-2,3-dihydroxybenzoate dehydrogenase; OS = Acinetobacter sp. 826659 OX=1310764 GN=dhbA PE=4 SV=1
MRSTIVVTGAARGIGAAIAKQLLDQGYHVIGIDRQENPKQWDISKTITPDQTSQWQGISQDITHQQETQTLISELLERYEITGLVNAAGVLIMRSMLEAKTEDWETLFAVNVMAPIAISQQVAKHFCAKRRGSIVTISSNSARMPRMQLGMYATTKAALSHFCRNLALEIAPYQVRLNIVSPGSTLTQMQQQLWTDNAPPPAVIDGDLSQYRTGIPLRKLAQPDDIANTVIFLLSDQAAQITMQEIVVDGGATLGV

SEQ ID NO: 91424 - protein, 256 aa, Acinetobacter sp.
  REGION 1..256: note = tr|A0A2U3MZ77|A0A2U3MZ77_9GAMM 2,3-dihydro-2,3-dihydroxybenzoate dehydrogenase; OS = Acinetobacter sp. KPC-SM-21 OX=2126983 GN=entA PE=4 SV=1
MIKKGMNIVVDKKIAWVVGVNQGIGAEIMQRLISDGIHVVGIDKSKENIPNELQEFSHICDIRDDGQVNQICQNLLRSSPPDYFIHVAGVLHMGGHEEISPEKWRETFAVNLFSPFYFLQHLSPYFKAKMSGNVVVISSNAAHVPRMYMSAYGASKAALTYFTKTVALELASYGVRVNVISPGSTATPMQYQLWKDSQGEQHTILGNLGQFKVGIPLKKIAKVKDIANSVMFLISDQASHITMHDLVIDGGATLGC

SEQ ID NO: 91425 - protein, 326 aa, unidentified
  source 1..326: note = Actinoalloteichus hoggarensis
  REGION 1..326: note = tr|A0A221W7W4|A0A221W7W4_9PSEU 2,3-dihydro-2,3-dihydroxybenzoate dehydrogenase; OS = Actinoalloteichus hoggarensis OX=1470176 GN=entA PE=4; SV = 1
MTNNQRTEFRSGFTAESTADEVLTGVDLDGKTALVTGGYSGLGLETTRALVKAGARVLVPARRPEVARARLHDLHRVTVVPMDLADLASVRTAGERLAESEARLDIAIAAAGVMASPERRVGPGWESHFAINHLGHFVLINLLLPLLSRADGARVVSYSSAGHHLSDIRWNDPHFDDGYDKWLAYGQSKTANVLFTVHLDAIAKDDGIRAFSLHPGAVITELQRDMTAAEQIERGWIDAAGDIVGAGFKSPSQGAATGLWAATSALLEGRGGVYCEDCDIAPLAGPEGSMETGGVRDYAVDPESAERLWQVSARITGVHPYERSTA

SEQ ID NO: 91426 - protein, 261 aa, Actinobacillus pleuropneumoniae
  REGION 1..261: note = tr|A0A4U9TNM7|A0A4U9TNM7_ACTPL 3-ketoacyl-ACP reductase OS=Actinobacillus pleuropneumoniae OX=715; GN = fabG_1 PE=3 SV=1
MESTGIRGKVALVTGAAQGIGEAVARALARQGAVVAACDRKEAELLRLTADLSGSGVHAAAYKTDVSRSAEVEAMVERVEDELGPIEILVNVAGVLRVGGVESLTDEDWQAHFNVNTHGLFYTSRSVVRRMASRHSGAIVTVGSNASKVPRSQMSAYAASKAASTMFTKCLGLEYARHQIRCNVVSPGSTDTEMQRLLWKEDHGARSIIEGTPDSFRLGIPLGKIALPSDIADAVVFLVSDRAGHMTMQDVCVDGGATLGC

SEQ ID NO: 91427 - protein, 283 aa, unidentified
  source 1..283: note = Actinobacteria bacterium
  REGION 1..283: note = tr|A0A0N1G3J8|A0A0N1G3J8_9ACTN 2,3-dihydro-2,3-dihydroxybenzoate dehydrogenase; OS = Actinobacteria bacterium OK074 OX=1592327 GN=OK074_5942; PE = 4 SV=1
MSAHPHHRQTRPRGPGVPVSADGELDGRLALVTGAGRGIGAAVVAGLADAGARVLATDLDTEGVTALSAKYGERVLARPLDVTDAAAVEALVTEAERTLGPLDIAVNVAGILRPSPVLDLTDADWAATFAVNAGGVLHVSRSAARRMAERGRGSIVTVASNAAGVPRAGMAAYAASKAAAVMFTKCLGLEVAAHGVRCNTVCPGSTLTDMQRALWAASGERDEVAAARRVVRGDLAAHRTGIPLGRIADPDDIADAVVFLASDRARHITLHDLYVDGGATLRA

SEQ ID NO: 91428 - protein, 256 aa, unidentified
  source 1..256: note = Actinobacteria bacterium
  REGION 1..256: note = tr|A0A0N1FM03|A0A0N1FM03_9ACTN 2,3-dihydro-2,3-dihydroxybenzoate dehydrogenase; OS = Actinobacteria bacterium OV450 OX=1592328 GN=OV450_5088; PE = 3 SV=1
MEGKIALVTGAAGGIGEAIVRALASRGVRVAAVDRDADRLRDVAKSVGEEGGRVDPFPADVTASADVESLVDDVEALVGPLDFLVNAAGVLRLAEARKLTDQEWSTTFAVNTTGVFFVSRAVVNRMVPRRRGAIVTIASNAAGTARTEMSAYAASKAAATMFTKCLGLEVAKFGIRANLVAPGSTDTPMLNSMWQDESSARASIDGVPDAYRVGIPLGKLARPEDVAEAVVFLLSDKAAHITMHDLTVDGGAALGA

SEQ ID NO: 91429 - protein, 258 aa, unidentified
  source 1..258: note = Actinobacteria bacterium
  REGION 1..258: note = tr|A0A538N7A6|A0A538N7A6_9ACTN 2,3-dihydro-2,3-dihydroxybenzoate dehydrogenase; OS = Actinobacteria bacterium OX=1883427 GN=E6F99_09935 PE=4; SV = 1
MTTGIAGRVAVVTGAAGGIGAAVTRALAAHGAIVAALDVDGSGVEKVAAELPEGVGHGYRVDVRDAAAVDAAVTRIEDELGPVRILVTVAGILRTGPFTGSTTADWHEVFAVNLHGVVHCCRAVAGRMVARRSGVIVTVGSNAAGVPRMDMAAYAASKAAVAHFVRCLGLELAGFGIRCNVVAPGSTDTPMQRSMWACDADAAAVVEGSLSRYKVGIPLGRLAHPCDVADAVVFLASEQARHITMQQLYVDGGAALRD

SEQ ID NO: 91430 - protein, 252 aa, unidentified
  source 1..252: note = Actinokineospora spheciospongiae
  REGION 1..252: note = tr|W7JCZ1|W7JCZ1_9PSEU 2,3-dihydro-2,3-dihydroxybenzoate dehydrogenase of siderophore biosynthesis OS=Actinokineospora spheciospongiae OX=909613 GN=UO65_0789 PE=4 SV =1
MGGETGLTGKVAVVTGAARGIGAAIAGALAREGATVAAVDIEAGVAGGAVVPFAADVADPAAIARVVDEVERDLGPIDIGVCAAGVLRPASVCDTRDEDWAATFAVNATGVLTVLREVSRRMVPRGRGALVTVGSNAVGVPRAGMAAYAASKAAATMLTRCLGLELAGSGVRCNVVSPGSTDTEMQRALWTGGNGPERVIAGDAERFRVGIPLGRIADPDDIADAVVFLVSDRARHITMQNLYVDGGATLCA

SEQ ID NO: 91431 - protein, 265 aa, unidentified
  source 1..265: note = Actinomadura parvosata
  REGION 1..265: note = tr|A0A2P9I155|A0A2P9I155_9ACTN 2,3-dihydro-2,3-dihydroxybenzoate dehydrogenase of siderophore biosynthesis OS=Actinomadura parvosata subsp. kistnae OX=1955414 GN=KIS 93_01036 PE=4 SV=1
MGEWGVSSRPSSLAQQSALVTGAAGGIGAAVASALARAGAAVTAFDLDWTRLRHVAAEITAAGHTVTARRLDVTNPWAVEAALALAEAEHGPPDVLVNVAGILHRGSTVSFSEEWWRRLFAVNTDGVFHVSRAAARRMVPRHGGAIITVTSNAAIVPRAQLAGYAASKAAATMFTRCLGLELAAFGIRCNVVAPGSTDTPMLRQAGHDASSAVEGVPEEFRLGIPLGRIASPSDIADAVLFLASDQARHITMHVMPVDGGAGLSA

SEQ ID NO: 91432 - protein, 260 aa, Actinomadura sp.
  REGION 1..260: note = tr|A0A5C4JLJ4|A0A5C4JLJ4_9ACTN 2,3-dihydro-2,3-dihydroxybenzoate dehydrogenase; OS = Actinomadura sp. 14C53 OX=2508997 GN=ETD83_02930 PE=4; SV = 1
MPESWPGVAGKNALVTGAGRGIGAAVASALADAGATVAAVDVDTEGLTRLAARCADRVMPFPADVTDVAAVDAMIAAAEDRLGPVDIGVSVAGILRPATVCETSDEDWAATFAVNVTGVFTVLRELARRMTGRQRGALVTVGSNAAGVPRTGMAAYAASKAAATMLTRCLGLEVAGAGVRCNAVSPGSTDTAMLRLLWTDEDAESRVLHGDPDRFRVGIPLGRVAEPADIADAVLFLASDHARHITMQNIYVDGGATLRA

SEQ ID NO: 91433 - protein, 256 aa, Actinomadura sp.
  REGION 1..256: note = tr|A0A2P4UF86|A0A2P4UF86_9ACTN 2,3-dihydro-2,3-dihydroxybenzoate dehydrogenase; OS = Actinomadura sp. 5-2 OX=1926885 GN=dhbA PE=4 SV=1
MDGIDGTTALVTGAGGGIGAAVARALAAAGASVAALDRDADAAERTAADLPGPALALPADVADPAAVEAAVDRAERDLGPLGVLVNTAGILRPAPVLDLADADWAATFAVNATGVLLASRAVARRMVPRRAGAIVTVGSNAARVPRARIAAYAAAKAAAVQFTKCLGLELAAHGIRCNVVSPGSTGTAMQRDLWPDPAAGERAAVRGDLAEHRTGIPLGRIADPADVADAVVFLASDRARHITLHDLYVDGGASLR

SEQ ID NO: 91434 - protein, 254 aa, Actinomadura sp.
  REGION 1..254: note = tr|A0A4R5AZ18|A0A4R5AZ18_9ACTN 2,3-dihydro-2,3-dihydroxybenzoate dehydrogenase; OS = Actinomadura sp. H3C3 OX=2530368 GN=E1298_29200 PE=4; SV = 1
MANMDEGVAVVTGAAGGIGAATVAALASTGRPVAALDVNGRALHELCDGLREKGCAIEAHLVDICDAAAVETVFDAVESVFGPVTEVVNVAGVLLPSSVVATSDGDWATTFAVNTTGVFVVSRAAARRMAGRGHGAIVTVGSNAGGIPRTGMAAYAASKAAAAHFTRCLGLELAPYGVRCNVVSPGSTDTPMLRELGAGDVIGGDPAAYRTGIPLGRVADPDDIADAVLFLLSERARHITMHELYVDGGATLRA

SEQ ID NO: 91435 - protein, 252 aa, Actinomadura sp.
  REGION 1..252: note = tr|A0A4R4L7Y8|A0A4R4L7Y8_9ACTN 2,3-dihydro-2,3-dihydroxybenzoate dehydrogenase; OS = Actinomadura sp. KC216 OX=2530370 GN=E1264_39125 PE=4; SV = 1
MAPNGIAVVTGAAGGIGAATVEALAGNDRRVAALDLDADRVRALADQAGERGLDVTGHAVDVGDAPAVEAVFDKVEAELGPVTELVNVAGLLRPAAVLDTTDADWAATFAVNVTGVFVVSRAAARRMRRRRRGAIVTVGSNAGGVPRCGMAAYAASKAAAAHLTRCLGLEMAPHGVRCNIVSPGSTDTPMLRALGAGDVIAGDAAAFRTGIPLGRIAAPADIADAVLFLLSERARHITMHELYVDGGATLRA

SEQ ID NO: 91436 - protein, 261 aa, Actinomadura sp.
  REGION 1..261: note = tr|A0A372GFP2|A0A372GFP2_9ACTN 2,3-dihydro-2,3-dihydroxybenzoate dehydrogenase; OS = Actinomadura sp. LHW52907 OX=2303421 GN=D0T12_18890; PE = 3 SV=1
MELTGIESTVALVTGAAQGIGAAVAATLAGAGAHVAAVDRNADRLTTTVAKLEAEGGTARGYTVDVRDSAAVDALVRRVEDELGPIGILVNAAGVLHTGRVVELPDRQWDETFSVNAGGVFNVSRAVARRMIDRRRGAVVTVASNAAGVPRVEMAAYAASKAASAQFTRCLGLELSGYGIRCNVVSPGSTDTPMLRSMLGEEGDPRQVVEGSPAAYRVGIPLRKLARPRDVAEAVAYLVSDQAGHVTMHDLYVDGGAALHV

SEQ ID NO: 91437 - protein, 255 aa, unidentified
  source 1..255: note = Actinomadura syzygii
  REGION 1..255: note = tr|A0A5D0TZM0|A0A5D0TZM0_9ACTN 2,3-dihydro-2,3-dihydroxybenzoate dehydrogenase; OS = Actinomadura syzygii OX=1427538 GN=FXF65_30275 PE=4 SV=1
MRDRVTAVTGAAGGIGAATVAALVSAGRPVAALDIDQDGLRALCGDLQERRPNEAHTVQAHTVDIRDRAAVEAALDKVEAGLGPVTGLVNVAGVLRPSPVVSTTDDDWAATFAVNTTGVFVACRAAARRMAERGQGAIVTVGSNAGGVPRTGMAAYAASKAAAAHFTRCLGLELAPHGVRCNIVSPGSTDTPMLRALGAGDVVEGDLASFRTGIPLGRVADPRDVAEAVLFLLSEKARHITMHELYVDGGAALRA

SEQ ID NO: 91438 - protein, 249 aa, Aeromonas caviae
  REGION 1..249: note = tr|A0A2X4NPA2|A0A2X4NPA2_AERCA 2,3-dihydroxybenzoate-2,3-dehydrogenase OS=Aeromonas caviae OX=648 GN=entA PE=4 SV=1
MAFDFTGKRVWVTGAGRGIGREVATQFVAAGATVVGLDLAFPDAGYPYATRLLDIGDSKAVNACCAALLADGGLDVLVNGAGVLRLGPTETLSDDDWHDCMTVNASGVFYLLRALVPHFKGQRRGAIVTIGSNAAHVPRMQMAAYCASKAAVTSLTQTVGLELAPFGVRANLVSPGSTDTPMLRGMLSSEEAMARTIAGLPEQFKLGIPLRKVATPAEIAHTVLFLASDLASHITLQDLVVDGGATLSA

SEQ ID NO: 91439 - protein, 248 aa, Aeromonas diversa
  REGION 1..248: note = tr|N9V506|N9V506_9GAMM 2,3-dihydroxybenzoate-2,3-dehydrogenase OS=Aeromonas diversa CDC 2478-85 OX=1268237 GN=G114_18436 PE=4 SV=1
MRWQFDGKRVWVTGAGRGIGRAVAEQFVAAGATVVGLDLHFPEPPYTYGVRELDLRDGAAVSRCAAELLEEGLDVLVNAAGVLRLGSLEHLSDEDWHDCMGVNAGAVFSLLRAVTPHFKGLGRGSIVTVSSNAAHVPRMQMAAYCASKAAVSSLTRTAGLELAPFGVRVNLVSPGSTDTPMLRGMLPDEGALSRTIAGLPEQFKLGIPLAKLANTAEVAAAVLFLASDLASHITLQDLVVDGGATLGA

SEQ ID NO: 91440 - protein, 260 aa, Aeromonas encheleia
  REGION 1..260: note = tr|A0A448KV91|A0A448KV91_9GAMM 2,3-dihydroxybenzoate-2,3-dehydrogenase OS=Aeromonas encheleia OX=73010 GN=entA PE=4 SV=1
MGTKMKQEQSKVAFDFSGKRVWVTGAGRGIGREVAEQFVAAGASVVGLDRDFPHGTYPYAIRTLDIRDPQVVNACCERLLADGGLDVLVNGAGVLRLGPTETLSDADWDDCMAVNASGVFYLLRALVPHFKAQRRGAIVTIGSNAAHVPRMQMAAYCASKAAVTSLTQTVGLELAPFGVRANLVSPGSTDTEMLRGMLPDEAALARTIAGLPAQFKLGIPLRKIATPSEIAHTVLFLASDLASHITLQDLVVDGGATLSA

SEQ ID NO: 91441 - protein, 261 aa, Aeromonas hydrophila
  REGION 1..261: note = tr|V9ZWR2|V9ZWR2_AERHY 2,3-dihydroxybenzoate-2,3-dehydrogenase OS=Aeromonas hydrophila 4AK4 OX=1354302 GN=AH4AK4_1751 PE=4 SV=1
MVMGKMTKDQQKMAFDFTGKRVWVTGAGRGIGREVAMQFVAAGASVVGLDLAFPEADYPYATRLLDIGDSKAVNACCAALLADGGLDVLVNGAGVLRLGPTDALSDDDWHDCMMVNASGVFYLLRALVPHFKGQQRGAIVTIGSNAAHVPRMQMAAYCASKAAVTSLTQTVGLELAPFGVRANLVSPGSTDTPMLRGMLPSEEAMARTIAGLPEQFKLGIPLRKVATPAEIAHTVLFLASDLASHITLQDLVVDGGATLSA

SEQ ID NO: 91442 - protein, 249 aa, Aeromonas hydrophila
  REGION 1..249: note = tr|A0A4P7IWE8|A0A4P7IWE8_AERHY 2,3-dihydro-2,3-dihydroxybenzoate dehydrogenase; OS = Aeromonas hydrophila OX=644 GN=dhbA PE=4 SV=1
MAFDFTGKRVWVTGAGRGIGREVATQFVAAGAIVVGLDLAFPEADYPYATRLLDIGDSKAVNACCAALLADGGLDVLVNGAGVLRLGPTDALSDDDWHDCMTVNASGVFYLLRALVPHFKGQQRGAIVTIGSNAAHVPRMQMAAYCASKAAVTSLTQTVGLELAPFGVRANLVSPGSTDTPMLRGMLPSEEAMARTIAGLPEQFKLGIPLRKVATPAEIAHTVLFLASDLASHITLQDLVVDGGATLSA

SEQ ID NO: 91443 - protein, 249 aa, Aeromonas hydrophila
  REGION 1..249: note = tr|A0KL38|A0KL38_AERHH 2,3-dihydro-2,3-dihydroxybenzoate dehydrogenase; OS = Aeromonas hydrophila subsp. hydrophila (strain ATCC 7966 / DSM 30187 / JCM 1027 / KCTC 2358/ NCIMB 9240); OX = 380703 GN=AHA_2475 PE=4 SV=1
MAFDFTGKRVWVTGAGRGIGCEVATQFVAAGAAVVGLDLAFLEADYPYATRLLDIGDSKAVNACCAALLADGGLDVLVNGAGVLRLGPTETLSDDDWHDCMTVNASGVFYLLRALVPHFKEQRRGAIVTIGSNAAHVPRMQMAAYCASKAAVTSLTQTVGLELAPFGVRANLVSPGSTDTPMLRGMLPSEEAMARTIAGLPEQFKLGIPLRKVATPAEIAHTVLFLASDLASHITLQDLVVDGGATLSA

SEQ ID NO: 91444 - protein, 249 aa, Aeromonas hydrophila
  REGION 1..249: note = tr|A0A2R4TV03|A0A2R4TV03_AERHY 2,3-dihydro-2,3-dihydroxybenzoate dehydrogenase; OS = Aeromonas hydrophila subsp. hydrophila OX=196023; GN = dhbA PE=4 SV=1
MAFDFTGKRVWVTGAGRGIGREVAMQFVAAGACVVGLDLAFPEADYPYATRLLDIGDSKAVNACCAALLADGGLDVLVNGAGVLRLGPTDALSDDDWHDCMTVNASGVFYLLRALVPHFKGQRRGAIVTIGSNAAHVPRMQMAAYCASKAAVTSLTQTVGLELAPFGVRANLVSPGSTDTPMLRGMLPNEEAMARTIAGLPEQFKLGIPLRKVATPAEIAHTVLFLASDLASHITLQDLVVDGGATLSA

SEQ ID NO: 91445 - protein, 255 aa, Aeromonas jandaei
  REGION 1..255: note = tr|A0A3N6WPA7|A0A3N6WPA7_AERJA 2,3-dihydro-2,3-dihydroxybenzoate dehydrogenase; OS = Aeromonas jandaei OX=650 GN=dhbA PE=4 SV=1
MSEWQGRTVWVTGAAQGIGHAVARTFAEAGASVVAFDLQLAEALPGNVKRVVIDVSDSEAVTRCCEQLLDEGLGPDVLVNVAGVLATGGLDEVDDALLQRTFAINTFAPFYLMRALTPWFQGRRRGAIVNVSSNAGRVPRVGMGIYGASKAALTSLTQTAGLELAPYGVRCNLVSPGSTRTPMLYGMWQEGEAEQQEGELRTIAGLPGQFKLGIPLGKLGTPDEVAACVLFLASDAASHITLQDLVVDGGATLGV

SEQ ID NO: 91446 - protein, 249 aa, Aeromonas molluscorum
  REGION 1..249: note = tr|R1H5I7|R1H5I7_9GAMM 2,3-dihydroxybenzoate-2,3-dehydrogenase OS=Aeromonas molluscorum 848 OX=1268236 GN=G113_17916 PE=4 SV=1
MAFDFTGKRVWVTGAGRGIGREVATQFVAAGACVVGLDLAFPEADYPYATRLLDIGDSKAVNACCAALLADGGLDVLVNGAGVLRLGPTETLSDDDWHDCMTVNASGVFYLLRALVPHFKGQRRGAIVTIGSNAAHVPRMQMAAYCASKAAVTSLTQTVGLELAPFGVRANLVSPGSTDTPMLRGMLPSEEAMARTIAGLPEQFKLGIPLRKLATPAEIAHTVLFLASDLASHITLQDLVVDGGATLSA

SEQ ID NO: 91447 - protein, 249 aa, Aeromonas salmonicida
  REGION 1..249: note = tr|A0A1Z1NMJ9|A0A1Z1NMJ9_AERSA 2,3-dihydro-2,3-dihydroxybenzoate dehydrogenase; OS = Aeromonas salmonicida OX=645 GN=O23A_p1131 PE=4 SV=1
MAFDFSGKRVWVTGAGRGIGREVAEQFVAAGAAVVGLDLAFPEVGYPYATRLIDIGDAAAVNACCSALLADGGLDVLVNGAGVLRLSPTENLSDQDWHDCMTVNATGVFYLLRALVPHFKGQRRGAIVTIGSNAAHVPRMQMAAYCASKAAVTSLTQTVGLELAPFGVRVNLVSPGSTDTPMLRGMLPDEGAMARTIAGLPDQFKLGIPLRKIATPAEIANTVLFLASDLASHITLQDLVVDGGATLSA

SEQ ID NO: 91448 - protein, 256 aa, Aeromonas salmonicida
  REGION 1..256: note = tr|T0PPZ3|T0PPZ3_AERSA 2,3-dihydro-2,3-dihydroxybenzoate dehydrogenase EntA; OS = Aeromonas salmonicida subsp. pectinolytica 34mel; OX = 1324960 GN=entA PE=4 SV=1
MSKEQQAVAFDFSGKRVWVTGAGRGIGREVAMQFVAAGASVVGLDLAFPEAGYPYATRLLDIGDSKAVKACCAALLADGGLDVLVNGAGVLRLGPTENLSDQDWHDCMTVNATGVFYLLRALVPHFKAQRCGAIVTIGSNAAHVPRMQMAAYCASKAAVTSLTQTVGLELAPFGVRVNLVSPGSTDTPMLRGMLPDEGAMTRTIAGLPDQFKLGIPLRKIATPAEIANTVLFLASDLASHITLQDLVVDGGATLSA

SEQ ID NO: 91449 - protein, 249 aa, Aeromonas salmonicida
  REGION 1..249: note = tr|A0A4U7JUV4|A0A4U7JUV4_AERSA 2,3-dihydro-2,3-dihydroxybenzoate dehydrogenase; OS = Aeromonas salmonicida subsp. salmonicida OX=29491; GN = dhbA PE=4 SV=1
MAFDFSGKRVWVTGAGRGIGREVAEQFVAAGAAVVGLDLAFPEADYPYATRLLDIGDAAAVNACCAALLADGGLDVLVNGAGVLRLGPTENLSDQDWHDCMTVNATGVFYLLRALVPHFKTQRRGAIVTIGSNAAHVPRMQMAAYCASKAAVTSLTQTVGLELAPFGVRVNLVSPGSTDTPMLRGMLPDEGAMARTIAGLPDQFKLGIPLRKIATPAEIANTVLFLASDLASHITLQDLVVDGGATLSA

SEQ ID NO: 91450 - protein, 249 aa, Aeromonas sp.
  REGION 1..249: note = tr|A0A369SQY8|A0A369SQY8_9GAMM 2,3-dihydro-2,3-dihydroxybenzoate dehydrogenase; OS = Aeromonas sp. ARM81 OX=1747384 GN=ASJ36_12940 PE=4 SV=1
MAFDFTGKRVWVTGAGRGIGREVATQFVAAGACVVGLDLAFPEADYPYATRLLDIGDSKAVNACCAALLADGGLDVLVNGAGVLRLGPTDALSDDDWHDCMTVNASGVFYLLRALVPHFKGQQRGAIVTIGSNAAHVPRMQMAAYCASKAAVTSLTQTVGLELAPFGVRANLVSPGSTDTPMLRGMLPSEEAMARTIAGLPEQFKLGIPLRKVATPAEIAHTVLFLASDLASHITLQDLVVDGGATLSA

SEQ ID NO: 91451 - protein, 249 aa, Aeromonas taiwanensis
  REGION 1..249: note = tr|A0A5F0K9D6|A0A5F0K9D6_9GAMM 2,3-dihydro-2,3-dihydroxybenzoate dehydrogenase; OS = Aeromonas taiwanensis OX=633417 GN=DRM93_13620 PE=4 SV=1
MAFDFTGKRVWVTGAGRGIGREVATQFVAAGACVVGLDLAFPEADYPYATRLLDIGDSKAVNACCAALLADGGLDVLVNGAGVLRLGPTETLSDDDWHDCMTVNASGVFYLLRALVPHFKEQQRGAIVTIGSNAAHVPRMQMAAYCASKAAVTSLTQTVGLELAPFGVRANLVSPGSTDTPMLRGMLPSEEAMARTIAGLPEQFKLGIPLRKVATPAEIAHTVLFLASDLASHITLQDLVVDGGATLSA

SEQ ID NO: 91452 - protein, 255 aa, Aeromonas veronii
  REGION 1..255: note = tr|A0A0E2LE71|A0A0E2LE71_9GAMM 2,3-dihydroxybenzoate-2,3-dehydrogenase OS=Aeromonas veronii Hm21 OX=1347420 GN=M001_16850 PE=4 SV=1
MSEWQGRTVWVTGAAQGIGHAVAGTFAEAGASVVAFDLQLAEALPGNVKGVVIDVSDSEAVTRCCEQLLDEGLGPDVLVNVAGILATGRLDEVDDALLQRTFAINTFAPFYLMRALTPWFQGRRRGAIVNVSSNAGRVPRVGMGIYGASKAALTSLTQTVGLELAPYGVRCNLVSPGSTRTPMLYGMWQEGEAAQQEGELRTIAGLPGQFKLGIPLGKLGTPDEVAACVLFLASDAASHITLQDLVVDGGATLGV

SEQ ID NO: 91453 - protein, 253 aa, Aeromonas veronii
  REGION 1..253: note = tr|A0A3A9INI6|A0A3A9INI6_9GAMM 2,3-dihydro-2,3-dihydroxybenzoate dehydrogenase; OS = Aeromonas veronii OX=654 GN=dhbA PE=4 SV=1
MSEWQGRTVWVTGAAQGIGHAVARTFAEAGASVVALDLQLAEALPGNVKGLVIDVSDSEAVTRCCEQLLDEGLGPDVLVNVAGVLATGRLDEVDDALLQRTFAINTFAPFYLMRALTPWFQGRHRGAIVNVSSNAGRVPRVGMGIYGASKAALTSLTQTAGLELAPYGVRCNLVSPGSTRTPMLYGMWQEGEQREGEIRTIAGLPGQFKLGIPLGKLGTPDEVAACVLFLASDAASHITLQDLVVDGGATLGG

SEQ ID NO: 91454 - protein, 251 aa, unidentified
  source 1..251: note = Agrobacterium deltaense
  REGION 1..251: note = tr|A0A1S7U4P7|A0A1S7U4P7_9RHIZ 2,3-dihydro-2,3-dihydroxybenzoate dehydrogenase; OS = Agrobacterium deltaense NCPPB 1641 OX=1183425 GN=entA; PE = 4 SV=1
MTQQRFTGRRVLVTGTAQGIGRRIAERFIEEGAEVIGLDLLADMAEAPFRQIALDITDAAAVETTCKAIESEWGGLDILVNAAGILRLGDSESLTPADWKACMDVNAAGPFYMLRQWSSTFKRQRRGAIVNVGSNAAVVPRIGMMAYCASKAALVSLSHCAALELAPYGVRCNVVSPGSTDTPMLAGMLSDPSGKDRLVAGLPEQFKLGIPLGKIARPDDIADTVLFLASDQAGHVTMQQIVVDGGATLAA

SEQ ID NO: 91455 - protein, 251 aa, unidentified
  source 1..251: note = Agrobacterium deltaense
  REGION 1..251: note = tr|A0A1S7QK27|A0A1S7QK27_9RHIZ 2,3-dihydro-2,3-dihydroxybenzoate dehydrogenase; OS = Agrobacterium deltaense RV3 OX=1183426 GN=entA PE=4 SV=1
MTQQRFTGRRVLVTGTAQGIGRRIAERFIEEGAEVIGLDLLADTAEAPFRQIALDITDAAAVETACKAIESEWGGLDILVNAAGILRLGDSESLTPEDWKACMDVNAAGPFYMLRQWSGTFKRQGRGAIVNVGSNAAVVPRIGMMAYCASKAALVSLSHCAALELAPYGVRCNVVSPGSTDTPMLAGMLSDPSGKDRLVAGLPDQFKLGIPLGKIARPDDIADTVLFLASDQAGHVTMQQIVVDGGATLAA

SEQ ID NO: 91456 - protein, 251 aa, unidentified
  source 1..251: note = Agrobacterium deltaense
  REGION 1..251: note = tr|A0A1S7RGY0|A0A1S7RGY0_9RHIZ 2,3-dihydro-2,3-dihydroxybenzoate dehydrogenase; OS = Agrobacterium deltaense Zutra 3/1 OX=1183427 GN=entA; PE = 4 SV=1
MTQQRFTGRRVLVTGTAQGIGRRIADRFIEEGAEVIGLDLLADTVEAPFRQIALDITDAAAVETTCKAIESEWGGLDILVNAAGILRLGDSESLTPADWKACMDVNAAGPFYMLRQWSGAFKRQRRGAIVNVGSNAAVVPRIGMMAYCASKAALVSLSHCAALELAPYGVRCNVVSPGSTDTPMLAGMLSDPSGKERLVAGLPEQFKLGIPLGKIARPDDIADTVLFLASDQAGHVTMQQIVVDGGATLAA

SEQ ID NO: 91457 - protein, 251 aa, unidentified
  source 1..251: note = Agrobacterium genomosp.
  REGION 1..251: note = tr|A0A1S7RUH7|A0A1S7RUH7_9RHIZ 2,3-dihydro-2,3-dihydroxybenzoate dehydrogenase; OS = Agrobacterium genomosp. 3 str. CFBP 6623 OX=1183432; GN = entA PE=4 SV=1
MTQQRFTGRRVLVTGTAQGIGHRIAERFIEEGAEVIGLDLLAGTTEAPFRQIALDITDAAAVERVCKAIESEWGGLDILVNAAGILRLGDSESLTPEDWKACMDVNAAGPFYLLRQWSGVFKRQRRGAIVNVGSNAAVVPRIGMMAYCASKAALVSLSHCAALELAPYGVRCNVVSPGSTDTPMLAGMLSDPTGKERLVAGLPEQFKLGIPLGKIARPDDIADTVLFLASDQAGHVTMQQIVVDGGATLAA

SEQ ID NO: 91458 - protein, 251 aa, unidentified
  source 1..251: note = Agrobacterium genomosp.
  REGION 1..251: note = tr|A0A1S7RHY6|A0A1S7RHY6_9RHIZ 2,3-dihydro-2,3-dihydroxybenzoate dehydrogenase; OS = Agrobacterium genomosp. 5 str. CFBP 6626 OX=1183435; GN = entA PE=4 SV=1
MTQRRFTERRVLVTGAAQGIGRRIAERFTEEGAEVIGLDLIADATDATFRHITLDITDAAAVEAVSKAIEKEWGGLDILVNAAGILRLGDSESLTPEDWRACMDVNAAGPFYLLRQWSGVFKRQRRGAIVNVSSNAAVVPRIGMMAYCASKAALVSLSHCAALELAPYGVRCNVVSPGSTDTPMLAGMLSDPAGKDRLVAGLPEQFKLGIPLGKIARPDDIADTVLFLASDQAGHVTMQQIVVDGGATLAA

SEQ ID NO: 91459 - protein, 251 aa, unidentified
  source 1..251: note = Agrobacterium radiobacter
  REGION 1..251: note = tr|W1LC72|W1LC72_RHIRD 2,3-dihydroxybenzoate-2,3-dehydrogenase OS=Agrobacterium radiobacter DSM 30147 OX=1336745 GN=L902_06655 PE=4 SV=1
MTQQRFTGRRVLVTGTAQGIGRRIAERFIEEGAEVIGLDLLARTTEAPFRQIALDITDARAVEKACKAIESEWGGLDILVNAAGILRLGDSESLTPADWKACMDVNAAGPFYMLRQWSSIFKRQRRGAIVNVGSNAAVVPRIGMMAYCASKAALVSLSHCAALELAPYGVRCNVVSPGSTDTPMLAGMLSDPAGKERLVAGLPEQFKLGIPLGKIARPDDIADTVLFLASDQAGHVTMQQIVVDGGATLAA

SEQ ID NO: 91460 - protein, 251 aa, unidentified
  source 1..251: note = Agrobacterium rhizogenes
  REGION 1..251: note = tr|A0A546XAP3|A0A546XAP3_AGRRH 2,3-dihydro-2,3-dihydroxybenzoate dehydrogenase; OS = Agrobacterium rhizogenes OX=359 GN=dhbA PE=4 SV=1
MTQQRFTGRRVLVTGTAQGIGRRIAERFIEEGAEVIGLDLLAGTEEAPFRQIALDITDAAAVEGVCKAIESEWGGLDILVNAAGILRLGDSESLTPEDWKACMDVNAAGPFHLLRQWSGAFKRQRRGAIVNVGSNAAVVPRIGMMAYCASKAALVSLSHCAALELAPYGVRCNVVSPGSTDTPMLAGMLSDPTGKERLVAGLPEQFKLGIPLGKIARPDDIADTVLFLASDQAGHVTMQQIVVDGGATLAA

SEQ ID NO: 91461 - protein, 251 aa, unidentified
  source 1..251: note = Agrobacterium salinitolerans
  REGION 1..251: note = tr|A0A546WM68|A0A546WM68_9RHIZ 2,3-dihydro-2,3-dihydroxybenzoate dehydrogenase; OS = Agrobacterium salinitolerans OX=1183413 GN=dhbA PE=4; SV = 1
MTQQRFTGRRALVTGAARGIGRRIAERFIEEGAEVIGLDLLADTVESPFRQIALDITQAEAVETTCKAIESEWGGLDILVNAAGILRLGDSESLTPADWKTCMDVNAAGPFYMLRQWSGTFKRQRRGAIVNIGSNAAVVPRIGMMAYCASKAALVSLSHCAALELAPYGVRCNVVSPGSTDTPMLAGMLSDPAGKDRLVAGLPEQFKLGIPLGKIARPDDIADTVLFLASDQAGHVTMQQIVVDGGATLAA

SEQ ID NO: 91462 - protein, 263 aa, unidentified
  source 1..263: note = Agrobacterium salinitolerans
  REGION 1..263: note = tr|A0A1S7U7F2|A0A1S7U7F2_9RHIZ 2,3-dihydro-2,3-dihydroxybenzoate dehydrogenase; OS = Agrobacterium salinitolerans str. Hayward 0363; OX = 1183434 GN=entA PE=4 SV=1
MKSGSQPERTDKMTQQRFTGRRVLVTGTAQGIGRRIAERFIEEGAEVIGLDLLADAAEAPLRQIALDITDAAAVETVCKAIESEWGGLDILVNAAGILRLGDSESLTPADWKACMDVNAAGPFYMLRQWSGTFKRQRRGAIVNVGSNAAVVPRIGMMAYCASKAALVSLSHCAALELAPYGVRCNVVSPGSTDTPMLAGMLSDPSGKDRLVAGLPEQFKLGIPLGKIARPDDIADTVLFLASDQAGHVTMQQIVIDGGATLAA

SEQ ID NO: 91463 - protein, 251 aa, unidentified
  source 1..251: note = Agrobacterium sp.
  REGION 1..251: note = tr|A0A5D9CP92|A0A5D9CP92_9RHIZ 2,3-dihydro-2,3-dihydroxybenzoate dehydrogenase; OS = Agrobacterium sp. B1(2019) OX=2607032 GN=dhbA PE=4 SV=1
MTQQRFTGRRVLVTGTAQGIGRRIAERFIEEGAEVIGLDLLADAAEAPLRQIALDITDAAAVETVCKAIESEWGGLDILVNAAGILRLGDSESLTPADWKACMDVNAAGPFYMLRQWSGTFKRQRRGAIVNVGSNAAVVPRIGMMAYCASKAALVSLSHCAALELAPYGVRCNVVSPGSTDTPMLAGMLSDPSGKDRLVAGLPEQFKLGIPLGKIARPDDIADTVLFLASDQAGHVTMQQIVIDGGATLAA

SEQ ID NO: 91464 - protein, 251 aa, unidentified
  source 1..251: note = Agrobacterium sp.
  REGION 1..251: note = tr|A0A437KUU0|A0A437KUU0_9RHIZ 2,3-dihydro-2,3-dihydroxybenzoate dehydrogenase; OS = Agrobacterium sp. CNPSo 2736 OX=2499627 GN=dhbA PE=4; SV = 1
MTQQRFTGRRVLVTGTAQGIGRRIAERFIEEGAEVIGLDLLADTVEAPFRQIALDITDAAAVETTCKEIESEWGGLDILVNAAGILRLGDSESLTPADWKACMDVNAAGPFYMLRQWSGAFKRQRRGAIVNVGSNAAVVPRIGMMAYCASKAALVSLSHCAALELAPYGVRCNVVSPGSTDTPMLAGMLSDPSGKDQLVAGVPEQFKLGIPLGKIARPDDIADTVLFLASDQAGHVTMQQIVVDGGATLAA

SEQ ID NO: 91465 - protein, 251 aa, unidentified
  source 1..251: note = Agrobacterium sp.
  REGION 1..251: note = tr|A0A0X6ZNL6|A0A0X6ZNL6_9RHIZ 2,3-dihydroxybenzoate-2,3-dehydrogenase OS=Agrobacterium sp. D14 OX=1336743 GN=L901_12400 PE=4 SV=1
MTQQRFTGRRVLVTGTAQGIGRRIAERFIEEGAEVIGLDLLADTVGAPFRQIALDITDSAAVEAACKAIESEWGGLDILVNAAGILRLGDSESLTPADWKACMDVNAAGPFYMLRQWSGTFKRQRRGAIVNVGSNAAVVPRIGMMAYCASKAALVSLSHCAALELAPYGVRCNVVSPGSTDTPMLAGMLSDPSGKDRLVAGLPEQFKLGIPLGKIARPDDIADTVLFLASNQAGHVTMQQIVVDGGATLAA

SEQ ID NO: 91466 - protein, 251 aa, unidentified
  source 1..251: note = Agrobacterium sp.
  REGION 1..251: note = tr|A0A3R9DME1|A0A3R9DME1_9RHIZ 2,3-dihydro-2,3-dihydroxybenzoate dehydrogenase; OS = Agrobacterium sp. FDAARGOS_525 OX=2420311 GN=dhbA PE=4; SV = 1
MTQQRFTGRRVLVTGTAQGIGRRIAERFIEEGADLIGLDLQARTAEAPFRQIALDITDAAAVERACKAIETEWGGLDILVNAAGILRLGDSESLTPADWKACMDVNAAGPFHMLRQWSATFKRQRRGAIVNIGSNAAVVPRIGMMAYCASKAALVSLSHCAALELAPYGVRCNVVSPGSTDTPMLAGMLSDPAGKDRLVAGLPEQFKLGIPLGKIARPDDIADTVLFLASDQAGHVTMQQIVVDGGATLAA

SEQ ID NO: 91467 - protein, 251 aa, unidentified; identical to SEQ ID NO: 91457
  source 1..251: note = Agrobacterium sp.
  REGION 1..251: note = tr|A0A4U6ASA9|A0A4U6ASA9_9RHIZ 2,3-dihydro-2,3-dihydroxybenzoate dehydrogenase; OS = Agrobacterium sp. LC34 OX=1643810 GN=dhbA PE=4 SV=1

SEQ ID NO: 91468 - protein, 251 aa, unidentified
  source 1..251: note = Agrobacterium sp.
  REGION 1..251: note = tr|A0A0X6ZZQ6|A0A0X6ZZQ6_9RHIZ 2,3-dihydroxybenzoate-2,3-dehydrogenase OS=Agrobacterium sp. LY4 OX=477195 GN=L904_25300 PE=4 SV=1
MTQQRFTGRRVLVTGTAQGIGRRIAERFIEEGAEVIGVDLLADTVEAPFRQIALDITDAAAVETTSKAIESEWGGLDILVNAAGILRLGDSESLTPADWKACMDVNAAGPFYMLRQWSSTFKRQRRGAIVNVGSNAAVVPRIGMMAYCASKAALVSLSHCAALELAPYGVRCNVVSPGSTDTPMLAGMLSDPSGKDRLVAGLPEQFKLGIPLGKIARPDDIADTVLFLASDQAGHVTMQQIVVDGGATLAA

SEQ ID NO: 91469 - protein, 251 aa, unidentified
  source 1..251: note = Agrobacterium sp.
  REGION 1..251: note = tr|A0A328ERZ5|A0A328ERZ5_9RHIZ 2,3-dihydro-2,3-dihydroxybenzoate dehydrogenase; OS = Agrobacterium sp. MS2 OX=1345498 GN=DOU54_23685 PE=4; SV = 1
MTQQRFTGRRVLVTGTAQGIGRRIAERFIEEGADLIGLDLQARTAEAPFRQIALDITDAAAVERASKAIETEWGGLDILVNAAGILRLGDSESLTPADWKACMDVNAAGPFHMLRQWSATFKRQRRGAIVNIGSNAAVVPRIGMMAYCASKAALVSLSHCAALELAPYGVRCNVVSPGSTDTPMLAGMLSDPAGKDRLVAGLPEQFKLGIPLGKIARPDDIADTVLFLASDQAGHVTMQQIVVDGGATLAA

SEQ ID NO: 91470 - protein, 250 aa, unidentified
  source 1..250: note = Agrobacterium tumefaciens
  REGION 1..250: note = tr|H0HGB0|H0HGB0_RHIRD 2,3-dihydroxybenzoate-2,3-dehydrogenase OS=Agrobacterium tumefaciens 5A OX=1107544 GN=AT5A_23565 PE=4 SV=1
MQNRFNGRRVLVTGAAQGIGRRIAERFTEEGAEVIGLDLIADATDATFRQITLDITDAAAVEAASKAIEKEWGGLDILVNAAGILRLGDSESLTPQDWNACMDVNAAGPFYLLRQWSGVFKRQRRGAIVNIASNAAVVPRIGMLAYCASKAALVSLSHCAALELAPYGVRCNVVSPGSTDTPMLAGMLNDPSGKQRLVAGLPEQFKLGIPLGKIARPDDIADTVLFLASDQAGHVTMQQIVVDGGATLAA

SEQ ID NO: 91471 - protein, 251 aa, unidentified
  source 1..251: note = Agrobacterium tumefaciens
  REGION 1..251: note = tr|M8B5T7|M8B5T7_RHIRD 2,3-dihydroxybenzoate-2,3-dehydrogenase OS=Agrobacterium tumefaciens str. Cherry 2E-2-2 OX=1281779 GN=H009_07736; PE = 4 SV=1
MTQQRFTGRRVLVTGTAQGIGRRIAERFIEEGAEVIGLDLLADTADAPFRQIALDITDAAAVETTCKAIESEWGGLDILVNAAGILRLGDSESLTPADWKACMDVNAAGPFYMLRQWSGTFKRQRRGAIVNVGSNAAVVPRIGMMAYCASKAALVSLSHCAALELAPYGVRCNVVSPGSTDTPMLAGMLSDPSGKDRLVAGLPEQFKLGIPLGKIARPDDIADTVLFLASDQAGHVTMQQIVVDGGATLAA

SEQ ID NO: 91472 - protein, 251 aa, unidentified
  source 1..251: note = Agrobacterium tumefaciens
  REGION 1..251: note = tr|A0A1S7R3R1|A0A1S7R3R1_RHIRD 2,3-dihydro-2,3-dihydroxybenzoate dehydrogenase; OS = Agrobacterium tumefaciens str. Kerr 14 OX=1183424; GN = entA PE=4 SV=1
MTQQRFTGRRVLVTGTAQGIGRRIAERFIEEGAEVIGLDLLARTTEAPFRQIALDITDATAVETACKAIESEWGGLDILVNAAGILRLGDSESLTPADWKACMDVNAAGPFYMLRQWSGIFKRQRRGAIVNVGSNAAVVPRIGMMAYCASKAALVSLSHCAALELAPYGVRCNVVSPGSTDTPMLAGMLSDPSGKERLVAGLPEQFKLGIPLGKIARPDDIADTVLFLASDQAGHVTMQQIVVDGGATLAA

SEQ ID NO: 91473 - protein, 257 aa, unidentified
  source 1..257: note = Alcaligenaceae bacterium
  REGION 1..257: note = tr|A0A4S1EGR5|A0A4S1EGR5_9BURK 2,3-dihydro-2,3-dihydroxybenzoate dehydrogenase; OS = Alcaligenaceae bacterium 429 OX=2562948 GN=dhbA PE=4; SV = 1
MYPEFQQQHVLISGAASGIGENVAQQLLALGARLTIIDLHADALNALAAQYPEHVLALGCDVGDFDAVANVVSQAEARFGSIDKLVCAAGRLQMGDITDLSAEQWQKTFTTNTNGVFNLCHHVGLRMKAQKRGAIVNISSNAATSPRMSMGAYAASKAAVTQMSRCLALELAAYNVRVNVVSPGSTDTPMQQAMWQQGSSRETVIAGSGPHYRLGIPLQKIATPAEIANGVLYLLSDQASHITLHDLRIDGGATLDQ

SEQ ID NO: 91474 - protein, 269 aa, unidentified
  source 1..269: note = Alcaligenaceae bacterium
  REGION 1..269: note = tr|A0A4Q4AX51|A0A4Q4AX51_9BURK 2,3-dihydro-2,3-dihydroxybenzoate dehydrogenase; OS = Alcaligenaceae bacterium OX=2021368 GN=EON54_10750 PE=4; SV = 1
MRCPVVIKAPAPRHDFTDACVLVSGAASGIGAALTENLLSQGARVIALDQDEAGLARLAKRWPDTQVHAAVVDVSQAGEVSAAVAAGQDKLGAIDKLACVAGVLQMGKIVDLSDEQWSRTFDVNVTGTFNVCRSVAQGMIQRRSGAIVTVSSNAATTPRASMGAYAASKAAVTQMTRCLALELAEYGIRCNIVSPGSTDTEMQRAMWRQGSSAETVIEGSLPNFRLGIPLRKIATPEEIVESILFLLSDRASHITLHDMRIDGGATLDQ

SEQ ID NO: 91475 - protein, 269 aa, unidentified
  source 1..269: note = Alcaligenaceae bacterium
  REGION 1..269: note = tr|A0A516WCB6|A0A516WCB6_9BURK 2,3-dihydro-2,3-dihydroxybenzoate dehydrogenase; OS = Alcaligenaceae bacterium SJ-26 OX=2593958; GN = FMZ60_12815 PE=3 SV=1
MQLTPHPDTEFSGRHVLVTGAASGIGRALSLRLLALGARVSALDLDTSALAGLAWNADGIGEPDALCLQSVDVGDAAAVETAIAAAEQQHGPVQYLSCVAGVLQMGRIVDLTDAQWLRVFNINTTGVFNVCRRVARSMIEQGRGAIVNVSSNAAGTPRAGMGAYAASKAAVTQMSACLALELAPHGIRVNVVSPGSTDTEMQRAMWRQGSSLDTVLQGDAAQFRLGIPLGKIATPDDIADAILFLLSKRAGHITLHDLRVDGGATLDQR

SEQ ID NO: 91476 - protein, 260 aa, Alcaligenes aquatilis
  REGION 1..260: note = tr|A0A3R8ZMP8|A0A3R8ZMP8_9BURK 2,3-dihydro-2,3-dihydroxybenzoate dehydrogenase; OS = Alcaligenes aquatilis OX=323284 GN=EGK70_09055 PE=4 SV=1
MSTQEFAGECVAVTGAARGIGASVTKLLLERGASIIALDLDVEGLTQLSQSEYSDRVSCHLVDISQADAVDAALAQGQEKLGPIQRLACVAGVLQMGRITELSNEQWDRTFAINTTGVFNVCRNVAKGMIERKQGAIVNVSSNSAATPRIAMGAYAASKAAVTQLSRCLGLELAPHGIRVNIISPGSTDTPMQQAMWAQGSSRETVIAGSGENYRLGIPLQKIATPEEIAEAVLFLLSDRASHITLSDLRVDGGATLDQG

SEQ ID NO: 91477 - protein, 262 aa, Alcaligenes faecalis
  REGION 1..262: note = tr|A0A3G6HIZ3|A0A3G6HIZ3_ALCFA 2,3-dihydro-2,3-dihydroxybenzoate dehydrogenase; OS = Alcaligenes faecalis OX=511 GN=EGY22_06020 PE=4 SV=1
MSTSAQEFAGECIAVTGAARGIGAAVTHLLLERGASVIALDLDVEGLTQLSQSEYSDRVSCHLVDISQADAVDAALAQGQEKLGPIHRLACVAGVLQMGRITELSNEQWDRTFAINTTGVFNVCRNVAKGMIERKQGAIVNVSSNSAATPRIAMGAYAASKAAVTQLSRCLGLELAPHGIRVNIISPGSTDTPMQQAMWAQGSSRETVIAGSGENYRLGIPLQKIATPEEIAEAVLFLLSDRASHITLSDLRVDGGATLDQG

SEQ ID NO: 91478 - protein, 234 aa, unidentified
  source 1..234: note = Alcaligenes xylosoxydans
  REGION 1..234: note = tr|A0A0D6I027|A0A0D6I027_ALCXX 2,3-dihydro-2,3-dihydroxybenzoate dehydrogenase; OS = Alcaligenes xylosoxydans xylosoxydans OX=85698 GN=entA; PE = 4 SV=1
MSTDPTPGHAVVTGATGGIGQAIVQRLLDGRWRVTGLDLGPAVTRHPAYRHVTVDLCDDAATHRALQGLDNATALVHAAGLLRVAPLAQSESADGELMWKLHVDAAVRLTRDLAPAMVAQGGGRVVLVGSRVAQGMPGRGQYAASKAALVALAHSWGAELAGQGVTVNVVSPAATQTGMLEDPARAVSPARMPPIGRLIQPGEIAALVAFLLSAEAAAITGQDIAICGGASLPR

SEQ ID NO: 91479 - protein, 266 aa, unidentified
  source 1..266: note = Aliikangiella sp.
  REGION 1..266: note = tr|A0A545UCB8|A0A545UCB8_9GAMM 2,3-dihydro-2,3-dihydroxybenzoate dehydrogenase; OS = Aliikangiella sp. M105 OX=2592383 GN=dhbA PE=3 SV=1
MYDFNEQVVIVSGAAQGIGLSVVTRLAQSGAKVIALDTQSVKAKASQDAGKGSANLGSVDLETIDWRIVDVSDSKAVKKIVQDCFNKFGRIDVLINVAGILRLGAVENLNDDDWNACFNVNTFGVFNLCRAVIPFMKEQRSGAIVTVGSNAAHVPRTDMAAYAASKSATRMFCQCLALELAPYGVRCNQVSPGSTDTPMQRNMWQDKTGEQKVIQGFPESYKVGIPLGKIAKPDEITNAILFFASSQATHIIMQDLVVDGGASLGA

SEQ ID NO: 91480 - protein, 257 aa, unidentified
  source 1..257: note = Alphaproteobacteria bacterium
  REGION 1..257: note = tr|A0A2S6QAP0|A0A2S6QAP0_9PROT 2,3-dihydro-2,3-dihydroxybenzoate dehydrogenase; OS = Alphaproteobacteria bacterium MarineAlpha11_Bin1; OX = 2013106 GN=dhbA PE=4 SV=1
MELSGIQDAGIVITGAAQGIGEAIARHLAAGGAQLALIDRQANAVGQVAAELSATAIEADQTDETSVNAAIDIAEKKLAGGISGMVNVAGIQKLNPLIDQSTEDFDNHFAVNLRGTWLATRAAARYMAKRKSGAIVTISSNAARVPRVRQGAYCASKAGISHLMRVFALELGPLGIRVNTVAPGATETPMIHRMMEDMGFGKVLLEGDLDNFRAGVPLGRIASVDDVADAVTFLLSDQSRYITMHEMVVDGGAALGA

SEQ ID NO: 91481 - protein, 263 aa, unidentified
  source 1..263: note = Alphaproteobacteria bacterium
  REGION 1..263: note = tr|A0A2S6UMI2|A0A2S6UMI2_9PROT 2,3-dihydro-2,3-dihydroxybenzoate dehydrogenase; OS = Alphaproteobacteria bacterium MarineAlpha2_Bin1; OX = 2013066 GN=dhbA PE=3 SV=1
MAIKTNLNNKTAIITGGSKGIGWETAKLMISDGMNVVLISRSEKLLQSRLDELGQFRRQIRIFPCDLTIPNSTEEIAKYCFSEFKVIDVLVNSAGAAKGGIFSEILDKDWEDSFNLKFFGTIRIIRSVVPYMKDQRDGRIVNVIGDTGKKPNKLMLPGSSVNAALLSLTKGLAEELGEYGIRINAVSPGPTKTERIVNMFNSLAKSTNKTIKEIEAEFLNENIIKKLADPKEIANLILFLSSDVSSNITGTTITSDGGRSKYI

SEQ ID NO: 91482 - protein, 251 aa, unidentified
  source 1..251: note = Alphaproteobacteria bacterium
  REGION 1..251: note = tr|A0A2S6TUI6|A0A2S6TUI6_9PROT 2,3-dihydro-2,3-dihydroxybenzoate dehydrogenase; OS = Alphaproteobacteria bacterium MarineAlpha4_Bin2; OX = 2013075 GN=entA PE=4 SV=1
MSYAAIVTGSASGIGEAPSSDLLADGWAVYGIDMSEDALSATSERLANKKFYPMVCDVRSADRVQAVFSEIGERTGKINALIASADVIRVGALSDMSVNDFDAIFNVNVRGLWLTARDAIPMLKRALALGELARIVMLSSVSALRPKIEGGAYAASKIAVSQLAGVMGVECAGDGILVNAVAPATTDMPMVRNADTSGNWRSSGPSPLGRIAETQDVVRVIRFLLSEESAYVNGTTIPVDSGTRAAYVPLT

SEQ ID NO: 91483 - protein, 255 aa, Altererythrobacter sp.
  REGION 1..255: note = tr|A0A420EAB9|A0A420EAB9_9SPHN 2,3-dihydro-2,3-dihydroxybenzoate dehydrogenase; OS = Altererythrobacter sp. HN-Y73 OX=2320269 GN=D6851_16345; PE = 4 SV=1
MGFSGRIAFVTGAGGGIGQAMVRLLLAEGARVVASDLAVPVFPGDPNQVADTLWCAALDVGDSQAVTDLVDRVEEEWGPIDFAVNVAGVLSTDTVLEMSDAEWHRTFDVNCHGVFHVGRAVARHMVERGRGAMVTVGSNAAGVPRHAMSAYAASKAAAHMFTRCLGIELAPHGIRCNIVAPGSTMTPMQTGMWADDQGAARVIAGQPEQFKAGIPLGKLAEPEDIAEAALFLLSDRAGHITMADLYVDGGATLRA

SEQ ID NO: 91484 - protein, 249 aa, Amycolatopsis japonica
  REGION 1..249: note = tr|A0A075UVV4|A0A075UVV4_9PSEU 2,3-dihydro-2,3-dihydroxybenzoate dehydrogenase; OS = Amycolatopsis japonica OX=208439 GN=dhbA PE=4 SV=1
MEGIEGKVALVTGGARGIGAAVVDGLAEAGAIVAAVDLAESASRGGVTSFVADVGDPAAVARVVGEVENELGPIGIGASVAGVLKPGSVCDTSDEDWAATFAVNSTGVFTVLREISRRMLPRRSGVLVTVGSNAAGVPRSGMAAYAASKAAATMLTRCLGLELAGSGIRCNIVSPGSTDTDMQRLLWTDENGADRVIAGNPEQYRVGIPLGRIAEPADIADAVLFLASDRARHITMQNLYVDGGATLRA

SEQ ID NO: 91485 - protein, 254 aa, Amycolatopsis sp.
  REGION 1..254: note = tr|A0A178WYU4|A0A178WYU4_9PSEU 2,3-dihydro-2,3-dihydroxybenzoate dehydrogenase; OS = Amycolatopsis sp. M39 OX=1825094 GN=entA PE=4 SV=1
MDITGNTVFIPGSTSGIGLALALELRAKGNTVIVGGRRTELLARIAADHPGLDTVQIDTTDPASIETAAEEVLAKHPDLNVLVPMAGIMRVEDWHRPESFLDSAEATLTTNVLGPIRLIAAFVEHLQTRPDATILTVSSGLAFAPLKATPSYNASKAAIHLLSESLRLQLADTSVKVVELEPPSVRTALLPGQEESEFAMPLDAFVSEVMTLLETQPDATEIQVENVKFLRHGEARGDYHEVVAMLNAADPHGK

SEQ ID NO: 91486 - protein, 258 aa, Ancylobacter aquaticus
  REGION 1..258: note = tr|A0A3S0G676|A0A3S0G676_ANCAQ 2,3-dihydro-2,3-dihydroxybenzoate dehydrogenase; OS = Ancylobacter aquaticus OX=100 GN=EJV44_20605 PE=4 SV=1
MRDSGLKGKVALVTGAAGGIGAAVVRQLVEQGARVIATDRDEAGVKALAEELGAAVMPAVLDVRSTEAVDALVARVECEVGPVDLLAHVAGVLSYEPVTSLSDAEWERVLDINATGVFRVARAVARVMQPRHRGAMVVVSSNAAGIPRHAMAAYAASKAAATMFTRCLGLELAPYGIRCNIVAPGSTLTPMQTGMWADEHGAARVIAGTPATFKSGIPLGKLANPDDIADAVLFLLSDRAGHVTMADLYVDGGATLRG

SEQ ID NO: 91487 - protein, 261 aa, Anoxybacillus flavithermus
  REGION 1..261: note = tr|A0A150LKE9|A0A150LKE9_9BACI 2,3-dihydro-2,3-dihydroxybenzoate dehydrogenase; OS = Anoxybacillus flavithermus OX=33934 GN=B4168_3637 PE=3; SV = 1
MEHWGLQGKIALVTGAAQGIGEAVTRSFVKHGVSVAAVDRNGERLAALVSDLQSNGYDVQAFCADVANSAEIDEIVAQIEDNMGPIEILVNVAGILRTGLIESFMDEDWEEVFKVNTAGVFYVSRSVSRRMIPRRSGAIVTVSSNAATIPRMFMAAYAASKAAATMFTKCLGLELAWYHIRCNVVSPGSTETEMQRGLWTDENGANKVITGSMEEFRLGIPLQKLAQPSDIADAVLFLVSEQSRHITMHDLRVDGGATLDA

SEQ ID NO: 91488 - protein, 261 aa, Anoxybacillus sp.
  REGION 1..261: note = tr|A0A160F7P2|A0A160F7P2_9BACI 2,3-dihydro-2,3-dihydroxybenzoate dehydrogenase; OS = Anoxybacillus sp. B7M1 OX=1490057 GN=GFC29_2988 PE=3; SV = 1
MDQCGIAGKVALVTGAAQGIGEAVIRAFVKHGVLVAAVDRNGERLDALVSELQGQGHRVQSFLADVANRTQVDEVVEKVEQSLGPIEILVNVAGILRTGPVSSLTDQDWEEVFKVNATGVFYVSRAVSRRMIPRRSGAIVTVSSNAATTPRMSMSAYAASKAAATMFTKCLGLELAPYHIRCNVVSPGSTETDMQRAMWTDDNGANKVIAGSLEEYRLGIPLKKLAQPSDIADAVLFLASEQSRHITLHDLRVDGGATLDS

SEQ ID NO: 91489 - protein, 255 aa, unidentified
  source 1..255: note = Aquimixticola soesokkakensis
  REGION 1..255: note = tr|A0A1Y5T679|A0A1Y5T679_9RHOB 2,3-dihydro-2,3-dihydroxybenzoate dehydrogenase; OS = Aquimixticola soesokkakensis OX=1519096 GN=dhbA PE=4; SV = 1
MQLTGFEGQAAFVAGAGGGIGRAIVAALADSGAQVFASDLEAALEDAPKMAGVTWAALDVTDPVAVAAAVAQAQALYGPLRHGIFAAGILGGADMLGTSAQDWQRVVNVNLNGGFFVTTELARAMVVQGRGAIVAVGSNSADIPRLAMGAYPASKAALHMHMRCLGLEVAPKGIRCNIVAPGSTLTPMQTGMWADASGARAVIAGNLAIHKTGIPLGKLATPQDIAQSVMFLLSDQAGHITMADLYVDGGATLKA

SEQ ID NO: 91490 - protein, 326 aa, unidentified
  source 1..326: note = Ascidiaceihabitans donghaensis
  REGION 1..326: note = tr|A0A2R8BHP2|A0A2R8BHP2_9RHOB 2,3-dihydro-2,3-dihydroxybenzoate dehydrogenase; OS = Ascidiaceihabitans donghaensis OX=1510460 GN=entA PE=4; SV = 1
MAASDQQPTNAGFPAKTSALDVLDGIDLSGKTAVVTGGYSGIGLETVKALAAKGAKVIVPVRSPQKAQDALAQVNGDVTSAAMDLADITSVRRFAADVLTQTDTLDLLINNAGIMACPETRVGPGWEAQFGVCHMGHFALTQDLMPALQKASGARVVALSSTGHKLSDIRWDDVHYTDEPYDKWQAYGQAKTANALFANALARRLKDSGGHAFSVHPGGIFTPLQRHLPKEEMIALGWLGADGEPSELAKQGFKTPEQGASTTVWAATAAVLDGKAGVYCEDCDVAAVTDPDSPTARFSGVNAHACDDDSAERLWALSQDLLAHTH

SEQ ID NO: 91491 - protein, 249 aa, unidentified
  source 1..249: note = Atlantibacter hermannii
  REGION 1..249: note = tr|A0A447LRS8|A0A447LRS8_ATLHE 2,3-dihydroxybenzoate-2,3-dehydrogenase OS=Atlantibacter hermannii OX=565 GN=entA PE=4 SV=1
MAGLFDGKTVWVTGAGKGIGYAAALAFHQQGATVVGLDVAFDGAYPFAIEQLDIADARQVEQVCARLFAASPRLDVLVNAAGILRMGATDALSHADWQQTFAVNVGGAFHLYQQVMPRFRAQRSGAIVTVASDAAHTPRIGMSAYGASKAALKSLTLTVGLELAPFGVRVNLVSPGSTDTDMQRTLWTTDDAEQRRIAGFAEQFKLGIPLGKIARPHEIASVITFLASEQASHITLQDIVIDGGSTLGA

SEQ ID NO: 91492 - protein, 249 aa, unidentified
  source 1..249: note = Atlantibacter subterranea
  REGION 1..249: note = tr|A0A427USG8|A0A427USG8_9ENTR 2,3-dihydro-2,3-dihydroxybenzoate dehydrogenase; OS = Atlantibacter subterranea OX=255519 GN=dhbA PE=4 SV=1
MAGMFDGKTVWVTGAGKGIGYAAALAFQQQGATVIGLDRAFNGDYPFATEQLDIADAGQVAEVCERLLAAQPRLDVLVNAAGILRMGPTDALSLADWQQTFAVNVGGAFNLYQRLMPVFRTQRGGAIVTVASDAAHTPRIGMSAYGASKAALKSLTLTVGLELASFGVRVNLVSPGSTDTDMQRTLWTTDDAEQRRIAGFAEQFKLGIPLGKIAKPQEIASTILFLASDQASHITLQDIVIDGGSTLGA

SEQ ID NO: 91493 - protein, 256 aa, Azoarcus sp.
  REGION 1..256: note = tr|A0A4V3WBU0|A0A4V3WBU0_9RHOO 2,3-dihydro-2,3-dihydroxybenzoate dehydrogenase; OS = Azoarcus sp. CC-YHH838 OX=2565930 GN=E6C76_10655 PE=4; SV = 1
MRLTGFDGTVALVTGAGGGIGAALVRLLRASGSVVVATDLYAPVLEEQSGTPAAFAEALDVTDSTAVDALVARVEREAGPIGFGINVAGVLQTGTVDTIDDAEWRRVFAVNADGVFHVSRALARVMAPRRQGAIVTVSSNAAGVPRHGMAAYAASKAAATMFMRCLGLELAPLGIRCNIVAPGSTLTPMQTGMWADDSGARRVIEGLPQIYKAGIPLGKLALPEDVAHAVMFLLSEQAGHVAMSDLYVDGGATLRA

SEQ ID NO: 91494 - protein, 253 aa, Azoarcus sp.
  REGION 1..253: note = tr|A0A4S4AAJ0|A0A4S4AAJ0_9RHOO 2,3-dihydro-2,3-dihydroxybenzoate dehydrogenase; OS = Azoarcus sp. CC-YHH848 OX=2565932 GN=E6O51_20580 PE=4; SV = 1
MNGKLAIVSGAAQGIGAAIVDALVVRGARVAALDVQGGPLEEMAARHGGRVRPYAVDLRASREVERTVAAVENGMGEIGMLAHSAGILRLGGVTALSDRDWEDTFAVNVHGVFYLARAVARHMVPRRRGAIVTVGSNAAAVPRTGMAAYAASKAAVCHFTKCLGLELAGFGIRCNVVSPGSTDTAMQRQLWQSEDDAARVIAGTPAEFRTGIPLGRIARPQDIAEAVLFLLGDGARHITMHELCVDGGATLGV

SEQ ID NO: 91495 - protein, 255 aa, Azospirillum brasilense
  REGION 1..255: note = tr|A0A0P0FBQ6|A0A0P0FBQ6_AZOBR 2,3-dihydro-2,3-dihydroxybenzoate dehydrogenase; OS = Azospirillum brasilense OX=192 GN=D3868_24815 PE=4 SV=1
MTDVAGRTVWVTGAGQGIGRAVADLFHARGAIVVAFDRHWHDGGEDSGERPYRAVPLDIADAGAVAGTCEALFAEGTRIDVLANVAGILRMGPVEAMTDADWHDSFAVNVAGPFHMMRAVIPAFKNGGKGGAIVSVSSNAAHVPRIGMAAYGASKAALTSLTMAVGLELAPHGVRCNVVSPGSTDTPMQRALWSGPDGAAQTIRGNPGQHKLGIPLGKLATPRDVAETVVFLASPAAGHITLADLLVDGGATLGR

SEQ ID NO: 91496 - protein, 250 aa, Azospirillum brasilense
  REGION 1..250: note = tr|G8AWH7|G8AWH7_AZOBR 2,3-dihydro-2,3-dihydroxybenzoate dehydrogenase; OS = Azospirillum brasilense Sp245 OX=1064539 GN=entA PE=4; SV = 1
MTDFAGRTAWVTGAGQGIGRAVADLFHARGAIVVAFDRHWHDSGERPYRAVTLDIADADAVAETCRALFAEGTRIDALANVAGILRMGPVEATTDADWSDSFAVNVAGPFHMMRAVIPAFKSGGSGAIVSVSSNAAHVPRIGMAAYGASKAALTSLTMTVGLELAPYGVRCNVVSPGSTDTPMQRALWSGPDGAAQTIQGNPGQHKLGIPLGKLATPRDVAETVVFLASPAAGHITLADLLVDGGATLGR

SEQ ID NO: 91497 - protein, 256 aa, Azospirillum doebereinerae
  REGION 1..256: note = tr|A0A433J5N7|A0A433J5N7_9PROT 2,3-dihydro-2,3-dihydroxybenzoate dehydrogenase; OS = Azospirillum doebereinerae OX=92933 GN=dhbA PE=4 SV=1
MTDHTTAQAFLGQTVWVTGVNQGIGLAVAETFTAQGAEVIGFDLRHDETVERPFRRLALDVTDAEAVARTCEELFAAGTGIDALVNVAGILRLGALETLGLDDWQQSFAVNAAGPFHLMRAVVPVLKRQGKGCIVSVSSNAAHVPRARMAVYGASKAALTSLTMTAGLELAPFGIRCNVVSPGSTDTPMLRGMWSDADGAARTIAGNHAQHRIGIPLGKLATPQDIANTVVFLASPAAGHITMMDVLVDGGATLGK

SEQ ID NO: 91498 - protein, 256 aa, Bacillus aerius
  REGION 1..256: note = tr|A0A3A9DLJ8|A0A3A9DLJ8_9BACI 2,3-dihydro-2,3-dihydroxybenzoate dehydrogenase; OS = Bacillus aerius OX=293388 GN=D7Y08_04280 PE=3 SV=1
MKGKVALVTGASQGIGKEVALSLAERGVFVAAADRNRKGLLELEAELERKDLQGSGFAADVGDSAAVDQLVAHVEREIGPIDMLVNVAGVLRTGLIHSLSDEDWEKTFSANSTGVFNVSRAVARRMISRRTGAIVTVGSNAAAVPRMHMAAYAASKAAALMFTKCLGLELAEYNIRCNIVSPGSTDTPMQRSLWQGEEAAQGVIEGSLETFKTGIPLGKLASPADIADAVVFLLSDGARHITMHDLRVDGGATLGA

SEQ ID NO: 91499 - protein, 256 aa, unidentified
  source 1..256: note = Bacillus albus
  REGION 1..256: note = tr|A0A4V1LLY1|A0A4V1LLY1_9BACI 2,3-dihydro-2,3-dihydroxybenzoate dehydrogenase; OS = Bacillus albus OX=2026189 GN=dhbA PE=4 SV=1
MNLGEFDGKTVLVTGAAQGIGSVVAKMFLDRGATVIAVDQNEEGLNKLLTEIHMKTFCLDVSDSTAVEQMVNDIENEIAPIDILVNVAGILRMGAIHSLSDEDWNKTFSVNSTGVFYMSRAVSKYMMQRKSGTIVTVGSNAANTPRMEMAAYAASKAATTMFMKCLGLELAAYNIRCNLVSPGSTETEMQRLLWADENGEKNIIAGSQSTYRLGIPLQKIAQPSEVAEAVLFLASDKASHITMHNLCVDGGATLGV

SEQ ID NO: 91500 - protein, 261 aa, Bacillus altitudinis
  REGION 1..261: note = tr|A0A5D4PT34|A0A5D4PT34_9BACI 2,3-dihydro-2,3-dihydroxybenzoate dehydrogenase; OS = Bacillus altitudinis OX=293387 GN=FZC69_05990 PE=3 SV=1
MKQSGLSHKIALITGAGQGIGQAVAKRLADEGAIIAAVDTNEDQLQSTVQQLNDKGIRAFAYPGDITDQASVRHIVDQIEKQLGPIYLLVNVAGILRISSIDQLSSDDWHQTFAVNTHGLFYVSQAVSKYMMKRSEGVIVTVSSNAGAIPRMNMAAYAASKAAATSFTKTLGLELATYGIRCNVVSPGSTATPMQWALWTDEQGADQVIKGSLETYKTGIPLQKIADPQQIADAVIFFASEQSSHITMQNLTIDGGATLGI

SEQ ID NO: 91501 - protein, 261 aa, Bacillus amyloliquefaciens
  REGION 1..261: note = tr|A0A5C8IT32|A0A5C8IT32_BACAM 2,3-dihydro-2,3-dihydroxybenzoate dehydrogenase; OS = Bacillus amyloliquefaciens OX=1390 GN=FVD42_10600 PE=3; SV = 1
MTALGMKGKTAVVTGAAQGIGEATALALAEQGVNVAAIDTNEGLLLGLTDRLRQKGVQAQAFAADVSDSAAVNDIIAAVEHDMGPIEILANVAGVLRPGPVHSLSDEDWAQTFSVNTTGVFHVSRAVSRYMMERKKGAIVTVGSNAAGVPRASMAAYAASKAAAVMFTKCLGLELSAYHIRCNIVSPGSTETEMQRAMWQDENGARDVIRGSLDTYKTGIPLQKLAKPSDIANAVLFLASEQANHITMHDLCVDGGATLGV

SEQ ID NO: 91502 - protein, 261 aa, Bacillus amyloliquefaciens
  REGION 1..261: note = tr|I2C9N9|I2C9N9_BACAM 2,3-dihydro-2,3-dihydroxybenzoate dehydrogenase; OS = Bacillus amyloliquefaciens Y2 OX=1126211 GN=dhbA PE=3; SV = 1
MDALGMKGKTAVVTGAAQGIGEATALALAEQGVNVAAIDTNEDLLLGLTDRLRKKGVQAQGFAADVSDSAAVNDIIAAVERDMGPIEILANVAGVLRPGPVQSLSDEDWDQTFSVNTTGVFHVSRAVSRYMIERQKGAIVTVGSNAAGVPRASMAAYAASKAAAVMFTKCLGLELAAHHIRCNIVSPGSTETDMQRALWQDENGARDVIRGSLDTYKTGIPLQKLAKPSDIANAVLFLASEQANHITMHDLCVDGGATLGV

SEQ ID NO: 91503 - protein, 258 aa, Bacillus anthracis
  REGION 1..258: note = tr|A0A0F7RJ47|A0A0F7RJ47_BACAN 2,3-dihydro-2,3-dihydroxybenzoate dehydrogenase; OS = Bacillus anthracis OX=1392 GN=entA PE=4 SV=1
MNVGEFDGKTVLVTGAAQGIGSVVAKMFLERGATVIAVDQNGEGLNVLLNQNETRMKIFHLDVSDSNAVEDTVKRIENDIAPIDILVNVAGVLRMGAIHSLSDEDWNKTFSVNSTGVFYMSRAVSKHMMQRKSGAIVTVGSNAANTPRVEMAAYAASKAATTMFMKCLGLELAAYNIRCNLVSPGSTETEMQRLLWADENGAKNIIAGSQNTYRLGIPLQKIAQPSEITEAVLFLASDKASHITMHNLCVDGGATLGV

SEQ ID NO: 91504 - protein, 261 aa, Bacillus atrophaeus
  REGION 1..261: note = tr|A0A0H3E388|A0A0H3E388_BACA1 2,3-dihydroxybenzoate-2,3-dehydrogenase OS=Bacillus atrophaeus (strain 1942) OX=720555 GN=BATR1942_13820 PE=3; SV = 1
MDVMGIKGKTALVTGAAQGIGEEVARALAELGARVAAVDLNAEKLNGLTAGLRADGHQAEAFPVDVGDSSAVDEITARIEREIGPIDILVNVAGVLRPGLIESISDHDWEATFSVNSTGVFNVSRSVSKYMMNRRSGSIVTVGSNAAAMPRTSMAAYASSKAAAAMFTKCLGLELAEYNIRCNVVSPGSTETEMQWSLWPDENGGQAVIAGSLETFKTGIPLKKIAKPSDIANAVLFLVSDRAGHITMHDLRVDGGATLGV

SEQ ID NO: 91505 - protein, 261 aa, Bacillus atrophaeus; identical to SEQ ID NO: 91504
  REGION 1..261: note = tr|A0A080UKM2|A0A080UKM2_BACAT 2,3-dihydro-2,3-dihydroxybenzoate dehydrogenase; OS = Bacillus atrophaeus OX=1452 GN=DK44_969 PE=3 SV=1

SEQ ID NO: 91506 - protein, 261 aa, unidentified
  source 1..261: note = Bacillus bacterium
  REGION 1..261: note = tr|A0A506QLK1|A0A506QLK1_9BACI 2,3-dihydro-2,3-dihydroxybenzoate dehydrogenase; OS = Bacillus bacterium OX=2053512 GN=dhbA PE=3 SV=1
MNLGEFDGKTVLVTGAAQGIGNVVAKMFLERGATVIAVDQNEEGLQVLLKQNELNKTRMKTFRLDVSDSAAVEDMINHIANEIAPIDILVNVAGVLRMGAIHSLSDEDWNKTFSVNSTGVFYMSRAVSKHMMQRKSGAIVTVGSNAANTPRMEMAAYAASKAATTMFMKCLGLELASYNIRCNVVSPGSTETEMQRLLWADENGAKNIIAGSQSSYRLGIPLQKIAQPSEIAEAVLFLASDKASHITMHNLCVDGGATLGI

SEQ ID NO: 91507 - protein, 261 aa, Bacillus cereus
  REGION 1..261: note = tr|B7IW60|B7IW60_BACC2 2,3-dihydro-2,3-dihydroxybenzoate dehydrogenase; OS = Bacillus cereus (strain G9842) OX=405531 GN=bacA PE=3; SV = 1
MNLGEFDGKTVLVTGAAQGIGSVVAKMFLERGATVIAVDQNEEGLNVLLNQNELNKTRMKTFRLDVSDSTAVEDIVNHIANEIAPIDILVNVAGVLRMGAIHSLSDEDWNKTFSVNTTGVFNMSRAVSKNMMLRKSGAIVTVGSNAANTPRMEMAAYAASKAATTMFMKCLGLELAAYNIRCNLVSPGSTETEMQRLLWADENGAKNIIAGSQNTYRLGIPLQKIAQPSEVAEAVLFLASDRASHITMHNLCVDGGATLGV

SEQ ID NO: 91508 - protein, 258 aa, Bacillus cereus
  REGION 1..258: note = tr|Q63BJ9|Q63BJ9_BACCZ 2,3-dihydro-2,3-dihydroxybenzoate dehydrogenase; OS = Bacillus cereus (strain ZK / E33L) OX=288681 GN=entA; PE = 4 SV=1
MNVGEFDGKTVLVTGAAQGIGSVVAKMFLERGATVIAVDQNGEGLNVLLNQNETRMKIFHLDVSDSNAVEDTVKRIENDIAPIDILVNVAGVLRMGAIHSLSDEDWNKTFSVNSTGVFYMSRAVSKHMMQRKSGAIVTVGSNAANTPRMEMAAYAASKAATTMFMKCLGLELAAYNIRCNLVSPGSTETEMQRLLWADENGAKNIIAGSQNTYRLGIPLQKIAQPSEIAEAVLFLASDKASHITMHNLCVDGGATLGV

SEQ ID NO: 91509 - protein, 258 aa, Bacillus cereus
  REGION 1..258: note = tr|B3ZJ09|B3ZJ09_BACCE 2,3-dihydro-2,3-dihydroxybenzoate dehydrogenase; OS = Bacillus cereus 03BB108 OX=451709 GN=AK40_973 PE=4 SV=1
MNVGEFDGKTVLVTGAAQGIGSVVAKMFLERGATVIAVDQNGEGLNVLLNQNETRMKIFHLDVSDSNAVEDTVKRIENDIAPIDILVNVAGVLRMGAIHSLSDEVWNKTFSVNSTGVFYMSRAVSKHMMQRKSGAIVTVGSNAANTPRVEMAAYAASKAATTMFMKCLGLELAAYNIRCNLVSPGSTETEMQRLLWADENGAKNIIAGSQNTYRLGIPLQKIAQPSEIAEAVLFLASDKASHITMHNLCVDGGATLGV

SEQ ID NO: 91510 - protein, 261 aa, Bacillus cereus
  REGION 1..261: note = tr|B5UTZ0|B5UTZ0_BACCE 2,3-dihydro-2,3-dihydroxybenzoate dehydrogenase; OS = Bacillus cereus AH1134 OX=405533 GN=bacA PE=3 SV=1
MNLGEFDGKTVLVTGAAQGIGSVVAKMFLERGATVIAVDQNEEGLNVLLNQNELNNTRMKTFRLDVSDSAAVEDMVNHIANEIAPIDILINVAGVLRMGPIHSLSDEDWTKTFSVNTTGVFNMSRAVSKNMMLRKSGAIVTVGSNAANTPRMEMAAYAASKAATTMFMKCLGLELAAYNIRCNLVSPGSTETEMQRLLWADENGAKNIIAGSQNTYRLGIPLQKIAQPSEVAEAVLFLASDRASHITMHNLCVDGGATLGV

SEQ ID NO: 91511 - protein, 211 aa, Bacillus cereus
  REGION 1..211: note = tr|A0A4V5TW55|A0A4V5TW55_BACCE 2,3-dihydro-2,3-dihydroxybenzoate dehydrogenase (Fragment); OS = Bacillus cereus OX=1396 GN=dhbA PE=4 SV=1
QNELNNTRMKTFRLDVSDSAAVEDMVNHIANEIAPIDILINVAGVLRMGPIHSLSDEDWNKTFSVNTTGVFNMSRAVSKNMMLRKSGAIVTVGSNAANTPRMEMAAYAASKAATTMFMKCLGLELAAYNIRCNLVSPGSTETEMQRLLWADENGAKNIIAGSQNTYRLGIPLQKIAQPSEVAEAVLFLASDRASHITMHNLCVDGGATLGV

SEQ ID NO: 91512 - protein, 258 aa, Bacillus cereus
  REGION 1..258: note = tr|D8GX09|D8GX09_BACAI 2,3-dihydroxybenzoate-2,3-dehydrogenase OS=Bacillus cereus var. anthracis (strain CI) OX=637380 GN=entA PE=4 SV=1
MNVGEFDGKTVVVTGAAQGIGSVVAKMFLERGATVIAVDQNGEGLNVLLNQNETRMKIFHLDVSDSNAVEDTVKRIENDIAPIDILVNVAGVLRMGAIHSLSDEDWNKTFSVNSTGVFYMSRAVSKHMMQRKSGAIVTVGSNAANTPRVEMAAYAASKAATTMFMKCLGLELAAYNIRCNLVSPGSTETEMQRLLWADENGAKNIIAGSQNTYRLGIPLQKIAQPSEIAEAVLFLASDKASHITMHNLCVDGGATLGV

SEQ ID NO: 91513 - protein, 259 aa, Bacillus endophyticus
  REGION 1..259: note = tr|A0A3N6B4M6|A0A3N6B4M6_9BACI 2,3-dihydro-2,3-dihydroxybenzoate dehydrogenase; OS = Bacillus endophyticus OX=135735 GN=FH5_00588 PE=3 SV=1
MGEGKPSVALITGAAQGIGKEVARRFAQEGFFVALLDQNVQNLHAVEESLKSEHYQAKAFSVDITKSKDVEEIIDDIERNIGPIECLANVAGVLRMGKTVELSDEDWAATFAVNTTGVFVMSRTVSRYMINRRRGSIVTVSSNAGHMPRTDMAAYASSKAAATMFTKCLGLELAQFGIRCNIVAPGSTNTEMLKLLWQDEKGEENLIKGSLETYKTGIPLHKIATPSDIAEAVLFLSSDKAGHITMNSLCVDGGATLGV

SEQ ID NO: 91514 - protein, 256 aa, unidentified
  source 1..256: note = Bacillus glycinifermentans
  REGION 1..256: note = tr|A0A1C3SJH7|A0A1C3SJH7_9BACI 2,3-dihydro-2,3-dihydroxybenzoate dehydrogenase; OS = Bacillus glycinifermentans OX=1664069 GN=dhbA PE=4 SV=1
MKGKVALVTGAAQGIGEAVARALAESGVSVAAVDQNERGLRSIVTDLEKKGLHAKAFAADVGNSAAVEETVGMIERDIGPIDYLVNVAGVLRTGLITSLSDEDWEKTFSVNTAGVFHVSRSVAGRMITRRNGSIVTVGSNAACVPRMQMAAYAASKAAALMFTKCLGLELAEYNIRCNIVSPGSTDTPMQRSMWSGRDGAQAVIDGSPEAFKTGIPLGRLALPADIANAVLFLLSESSRHITMHDLRVDGGATLGV

SEQ ID NO: 91515 - protein, 256 aa, Bacillus licheniformis; identical to SEQ ID NO: 91498
  REGION 1..256: note = tr|A0A3S4I9U7|A0A3S4I9U7_BACLI 2,3-dihydroxybenzoate-2,3-dehydrogenase OS=Bacillus licheniformis OX=1402 GN=dhbA PE=3 SV=1

SEQ ID NO: 91516 - protein, 261 aa, Bacillus megaterium
  REGION 1..261: note = tr|A0A5D4KX08|A0A5D4KX08_BACME 2,3-dihydro-2,3-dihydroxybenzoate dehydrogenase; OS = Bacillus megaterium OX=1404 GN=FZC66_06145 PE=3 SV=1
MSFMNLEGQVALVTGGAQGIGEATVRALCESGAVVAAVDHNSEKLCSLIKELKGQGYKAEAFPADVSDSKAVDRVVETIERDMGPIEVLVNVAGVLRMGLAQSLTDEEWEQTFAVNSTGVFHVSRSVSKHMITRKKGSIVTVGSNAARVPRVSMAAYAASKASAVMFTKCLGLELAQYNIRCNVVSPGSTDTEMQWALWKDENGAQGAIAGAPESFKVGIPLKKIATPSNIVDAILFFISDQANHITMSDLCVDGGATLGV

SEQ ID NO: 91517 - protein, 261 aa, unidentified
  source 1..261: note = Bacillus mobilis
  REGION 1..261: note = tr|A0A386V046|A0A386V046_9BACI 2,3-dihydro-2,3-dihydroxybenzoate dehydrogenase; OS = Bacillus mobilis OX=2026190 GN=MLA2C4_12190 PE=3 SV=1
MNLGEFDGKTVLVTGAAQGIGSVVAKMFLERGATVIAADQNEEGLNVLLNQNELNETRLKTFRLDVSDSTAVKDMVNSIENDIAPIDILVNVAGVLRMGAIHSLSDEDWNKTFSVNSTGVFYMSRAVSKYMMQRKSGAIVTVGSNAANTPRMEMAAYAASKAATTMFMKCLGLELAACNIRCNLVSPGSTETEMQRLLWADENGAKNIIAGSQSTYRLGIPLQKIAKPSEIAEAVLFLASDKASHITMHNLCVDGGATLGV

SEQ ID NO: 91518 - protein, 261 aa, Bacillus mycoides
  REGION 1..261: note = tr|A0A4Q9ZC52|A0A4Q9ZC52_BACMY 2,3-dihydro-2,3-dihydroxybenzoate dehydrogenase; OS = Bacillus mycoides OX=1405 GN=dhbA PE=3 SV=1
MNLGEFDGKTVLVTGAAQGIGSVVAKMFLERGATVIAVDQNAEGLNMFLNHYASNESRIKTFHLDVSDSVTVEEVVERIENDIAPIDILVNVAGVLRMGAIHSLSDEEWNKTFSVNTTGVFYMSRAVSKHMMLRKSGAIVTVGSNAANTPRMEMAAYAASKAATTMFMKCLGLELAAYNIRCNLVSPGSTETEMQRLLWADENGAKNIIAGSQNTYRLGIPLQKIAQPSEIAEAVLFLASDKASHITMHNLCVDGGATLGA

SEQ ID NO: 91519 - protein, 256 aa, unidentified
  source 1..256: note = Bacillus pacificus
  REGION 1..256: note = tr|A0A1J9ZMG6|A0A1J9ZMG6_9BACI 2,3-dihydro-2,3-dihydroxybenzoate dehydrogenase; OS = Bacillus pacificus OX=2026187 GN=dhbA PE=4 SV=1
MNLGEFDGKTVLVTGAAQGIGSVVAKMFLERGATVIAVDQNEEGLNELLNEIHLKTFCLDVSDSTAVEQMVNDIENEIAPIDILVNVAGVLRMGAIHSLSDEDWNKTFSVNSTGVFYMSRAVSKHMMQRKSGAIVTVGSNAANTPRMEMAAYAASKAATTMFMKCLGLELAAYNIRCNVVSPGSTETEMQRLLWADENGEKNIIAGSQSTYRLGIPLQKIAQPSEIAEAVLFLASDKASHITMHNLCVDGGATLGV

SEQ ID NO: 91520 - protein, 256 aa, unidentified
  source 1..256: note = Bacillus paranthracis
  REGION 1..256: note = tr|A0A4U1D6W6|A0A4U1D6W6_9BACI 2,3-dihydro-2,3-dihydroxybenzoate dehydrogenase; OS = Bacillus paranthracis OX=2026186 GN=dhbA PE=4 SV=1
MNLGEFDGKTVLVTGAAQGIGSVVAKMFLERGATVIAVDQNEEGLNELLNEIHLKTFCLDVSDSTAVEQMVNDIENEIAPIDILVNVAGVLRMGAIHSLSDEDWNKTFSVNSTGVFYMSRAVSKHMMQRKSGAIVTVGSNAANTPRMEMAAYVASKAATTMFMKCLGLELAAYNIRCNVVSPGSTETEMQRLLWADENGEKNIIAGSQSTYRLGIPLQKIAQPSEIAEAVLFLASDKASHITMHNLCVDGGATLGV

SEQ ID NO: 91521 - protein, 261 aa, Bacillus pumilus
  REGION 1..261: note = tr|A0A498U4K8|A0A498U4K8_BACPU 2,3-dihydro-2,3-dihydroxybenzoate dehydrogenase; OS = Bacillus pumilus OX=1408 GN=dhbA PE=3 SV=1
MKHNGLSQKIALITGAGQGIGQAVAKRLAEEGAIIAAVDANEEQLQSTVQQMKDEGIRAFAYPGDITDQASVQHIVDQIEKQLGSIYLLVNVAGILRISSIDKLSADDWQQTFAVNTHGVFYVSQAVSKYMMKRSEGVIVTVSSNAGAIPRMNMAAYAASKAAATSFTKTLGLELAAYGIRCNVVSPGSTATPMQWALWSDEQGENQVIKGSLETYKTGIPLQKIADPQNIADAVIFFASEQSSHITMQNLTIDGGATLGI

SEQ ID NO: 91522 - protein, 261 aa, Bacillus safensis
  REGION 1..261: note = tr|A0A5C0WGI6|A0A5C0WGI6_9BACI 2,3-dihydro-2,3-dihydroxybenzoate dehydrogenase; OS = Bacillus safensis OX=561879 GN=dhbA PE=3 SV=1
MKYNGLSQKISLITGAGQGIGQAVAKRLAEEGAIIAAVDANEEQLQSTVQQMKDEGIRAFAYPGDITDQASVQHIVDQIEKQLGSIYLLVNVAGILRISSIDQLSADDWQQTFAVNTHGVFYVSQAVSKYMMKRSEGVIVTVSSNAGAIPRMNMAAYAASKAAATSFTKTLGLELAAYGIRCNVVSPGSTATPMQWALWPDEQGENQVIKGSLETYKTGIPLQKIADPQNIADAVIFFASEQSSHITMQNLTIDGGATLGI

SEQ ID NO: 91523 - protein, 256 aa, Bacillus sonorensis
  REGION 1..256: note = tr|M5P054|M5P054_9BACI 2,3-dihydroxybenzoate-2,3-dehydrogenase OS=Bacillus sonorensis L12 OX=1274524 GN=BSONL12_17164 PE=3 SV=1
MKGKVALVTGASQGIGEAVARALAESGASVAAIDQNEEGLHSLVEDVKKQGLQAGAFAADVGDSASVDKTVDRIEREVGPIDMLVNVAGVLRTGLITSFSDADWEKTFSVNATGVFNVSRSVAGRMITRKEGAIVTVGSNAAAVPRMQMAAYAASKAAALMFTKCLGLELAQYNIRCNIVSPGSTDTPMQRSMWSDQNGAQAAIAGSLETFKTGIPLGRLALPADIAEAVLFLLSERARHITMHDLRVDGGATLGV

SEQ ID NO: 91524 - protein, 261 aa, Bacillus sp.
  REGION 1..261: note = tr|A0A3B0AIM5|A0A3B0AIM5_9BACI 2,3-dihydro-2,3-dihydroxybenzoate dehydrogenase; OS = Bacillus sp. S66 OX=1842608 GN=dhbA PE=3 SV=1
MNLGEFDGQTVLVTGAAQGIGSVVAKMFLERGATVIAVDQNEEGLNVLLNQNELNKTRMKTFRLDVSNSAAVEDMVNHIANEIAPIDILINVAGVLRMGPIHSLSDEDWNKTFSVNTTGVFNMSRAVSKNMMLRKSGAIVTVGSNAANTPRMEMAAYAASKAATTMFMKCLGLELAAYNIRCNLVSPGSTETEMQRLLWADENGAKNIIAGSQNTYRLGIPLQKIAQPSEVAEAVLFLASDRASHITMHNLCVDGGATLGV

SEQ ID NO: 91525 - protein, 261 aa, Bacillus sp.; identical to SEQ ID NO: 91524
  REGION 1..261: note = tr|A0A5C1F001|A0A5C1F001_9BACI 2,3-dihydro-2,3-dihydroxybenzoate dehydrogenase; OS = Bacillus sp. SH8-8 OX=2217830 GN=DN405_11140 PE=3 SV=1

SEQ ID NO: 91526 - protein, 256 aa, Bacillus sp.
  REGION 1..256: note = tr|A0A0F5RUZ9|A0A0F5RUZ9_9BACI 2,3-dihydroxybenzoate-2,3-dehydrogenase OS=Bacillus sp. UMTAT18 OX=1565146 GN=OA45_00711 PE=4 SV=1
MNLGEFDGKTVLVTGAAQGIGSVVAKMFLERGATVIAVDQNEEGLNELLNEIHLKTFCLDVSDSTAVEQMVNDIENEIAPIDILVNVAGVLRMGAIHSLSDEDWNKTFSVNSTGVFYMSRAVSKHMMQRKSGAIVTVGSNAANTPRMEMAAYAASKAATTMFMKCLGLELAAYNIRCNVVSPGSTETEMQRLLWADENGEKNIIAGSQNTYRLGIPLQKIAQPSEIAEAVLFLASDKASHITMHNLCVDGGATLGV

SEQ ID NO: 91527 - protein, 261 aa, Bacillus sp.
  REGION 1..261: note = tr|A0A3S1EQA4|A0A3S1EQA4_9BACI 2,3-dihydro-2,3-dihydroxybenzoate dehydrogenase; OS = Bacillus sp. VKPM B-3276 OX=2499077 GN=dhbA PE=3 SV=1
MNLGEFDGKTVLVTGAAQGIGSVVAEMFLERGATVIAVDQNEEGLNVLLNQNELNKTRMKTFRLDVSDSTAVEDIVNHIANEIAPIDILVNVAGVLRMGAIHSLSDEDWNKTFSVNTTGVFNMSRAVSKNMMLRKSGAIVTVGSNAANTPRMEMAAYAASKAATTMFMKCLGLELAAYNIRCNLVSPGSTETEMQRLLWADENGAKNIIAGSQNTYRLGIPLQKIAQPSEVAEAVLFLASDRASHITMHNLCVDGGATLGV

SEQ ID NO: 91528 - protein, 261 aa, Bacillus sp.
  REGION 1..261: note = tr|A0A410R7H6|A0A410R7H6_9BACI 2,3-dihydro-2,3-dihydroxybenzoate dehydrogenase; OS = Bacillus sp. WR11 OX=2448811 GN=D9C22_17170 PE=3 SV=1
MNAKGLEGKIAFITGAAQGIGEAVARTLASQGAHIAAVDYNPEKLEKVVSSLKAEGRHAEAFPADVRDSAAIDEITARIEREMGPIDILVNVAGVLRPGLIHSLSDEEWEATFSVNSTGVFNASRSVSKYMMDRRSGSIVTVGSNAAGVPRTSMAAYASSKAAAVMFTKCLGLELAEYNIRCNIVSPGSTETDMQWSLWADENGAEQVIKGSLETFKTGIPLKKLAKPSDIADAVLFLVSGQAGHITMHNLCVDGGATLGV

SEQ ID NO: 91529 - protein, 261 aa, Bacillus stratosphericus
  REGION 1..261: note = tr|A0A4Y9JSC0|A0A4Y9JSC0_9BACI 2,3-dihydro-2,3-dihydroxybenzoate dehydrogenase; OS = Bacillus stratosphericus OX=293386 GN=E4T85_16950 PE=3; SV = 1
MKHNGLSQKIALITGAGQGIGQAVAKRLAEEGAIIAAVDANEEQLQSTVQQMKDEGIRAFAYPGDITDQASVQHIVDQIEKQLGPIYLLVNVAGILRMGSIDQLSADDWQQTFAVNTHGVFYVSQAVSKYMMKRSEGVIVTVSSNAGAIPRMNMAAYAASKAAATSFTKTLGLELAAYGIRCNVVSPGSTATPMQWALWSDEQGENQVIKGLLETYKTGIPLQKIADPQNIADAVIFFASEQSSHITMQNLTIDGGATLGI

SEQ ID NO: 91530 - protein, 261 aa, Bacillus subtilis
  REGION 1..261: note = sp|P39071|DHBA_BACSU 2,3-dihydro-2,3-dihydroxybenzoate dehydrogenase; OS = Bacillus subtilis (strain 168) OX=224308 GN=dhbA PE=1; SV = 3
MNAKGIEGKIAFITGAAQGIGEAVARTLASQGAHIAAVDYNPEKLEKVVSSLKAEGRHAEAFPADVRDSAAIDEITARIEREMGPIDILVNVAGVLRPGLIHSLSDEEWEATFSVNSTGVFNASRSVSKYMMDRRSGSIVTVGSNAAGVPRTSMAAYASSKAAAVMFTKCLGLELAEYNIRCNIVSPGSTETDMQWSLWADENGAEQVIKGSLETFKTGIPLKKLAKPSDIADAVLFLVSGQAGHITMHNLCVDGGATLGV

SEQ ID NO: 91531 - protein, 261 aa, Bacillus subtilis
  REGION 1..261: note = tr|A0A410ZKV0|A0A410ZKV0_BACIU 2,3-dihydro-2,3-dihydroxybenzoate dehydrogenase; OS = Bacillus subtilis OX=1423 GN=ETK61_17590 PE=3 SV=1
MNAKGIEGKIAFITGAAQGIGEAVARTLASQGAHIAAVDYNPEKLEKVVSSLKAEGRHAEAFPADVRDSAAIDEITVRIEREMGPIDILVNVAGVLRPGLIHSLSDEEWEATFSVNSTGVFNASRSVSKYMMDRRSGSIVTVGSNAAGVPRTSMAAYASSKAAAVMFTKCLGLELAEYNIRCNIVSPGSTETDMQWSLWADENGAEQVIKGSLETFKTGIPLKKLAKPSDIADAVLFLVSGQAGHITMHNLCVDGGAILGV

SEQ ID NO: 91532 - protein, 261 aa, Bacillus subtilis
  REGION 1..261: note = tr|E0TZZ2|E0TZZ2_BACPZ 2,3-dihydroxybenzoate-2,3-dehydrogenase OS=Bacillus subtilis subsp. spizizenii (strain ATCC 23059 / NRRL B-14472 / W23) OX=655816 GN=dhbA PE=3SV=1
MNAMGIKGKIAFITGAAQGIGEAVARKLADQGAHIAAVDYNPEKLEKVVSSLKAEGCHAEAFPADVRDSAAIDEITARIEREMGPIEILVNVAGVLRPGLIHSLSDEEWEATFSVNSTGVFNASRSVSKYMMDRRSGSIVTVGSNAAGVPRTSMAAYASSKAAAVMFTKCLGLELAEYNIRCNIVSPGSTETDMQWSLWADENGAEQVIKGSLETFKTGIPLKKLAQPSDIANAVLFLVSGQAGHITMHNLCVDGGATLGV

SEQ ID NO: 91533 - protein, 261 aa, Bacillus subtilis
  REGION 1..261: note = tr|G4P089|G4P089_BACPT 2,3-dihydro-2,3-dihydroxybenzoate dehydrogenase; OS = Bacillus subtilis subsp. spizizenii (strain TU-B-10); OX = 1052585 GN=GYO_3491 PE=3 SV=1
MNAMGIKGKIAFITGAAQGIGEAVARKLADQGAHIAAVDYNPEKLEKVVSSLKAEGCRAEAFPADVRDSAAIDEITARIEREMGPIDILVNVAGVLRPGLIHSLSDEEWEATFSVNSTGVFNASRSVSKYMMDRRSGSIVTVGSNAAGVPRTSMAAYASSKAAAVMFTKCLGLELAEYNIRCNIVSPGSTETDMQWSLWADENGAEQVIKGSLETFKTGIPLKKLAQPSDIANAVLFLVSGQAGHITMHNLCVDGGATLGV

SEQ ID NO: 91534 - protein, 272 aa, Bacillus subtilis
  REGION 1..272: note = tr|G4ERP6|G4ERP6_BACIU 2,3-dihydroxybenzoate-2,3-dehydrogenase OS=Bacillus subtilis subsp. subtilis str. SC-8 OX=1089443; GN = BSSC8_10260 PE=3 SV=1
MAFRAKKGIDDMNAKGIEGKIAFITGAAQGIGEAVARTLASQGAHIAAVDYNPEKLEKVVSSLKAEGRHAEAFPADVRDSAAIDEITARIEREMGPIDILVNVAGVLRPGLIHSLSDEEWEATFSVNSTGVFNASRSVSKYMMDRRSGSIVTVGSNAAGVPRTSMAAYASSKAAAVMFTKCLGLELAEYNIRCNIVSPGSTETDMQWSLWADENGAEQVIKGSLETFKTGIPLKKLAKPSDIADAVLFLVSGQAGHITMHNLCVDGGATLGV

SEQ ID NO: 91535 - protein, 261 aa, Bacillus subtilis
  REGION 1..261: note = tr|M4KYK1|M4KYK1_BACIU 2,3-dihydroxybenzoate-2,3-dehydrogenase OS=Bacillus subtilis XF-1 OX=1233100 GN=dhbA PE=3 SV=1
MNAKGIEGKIAFITGAAQGIGEAVARTLASQGAHIAAVDYNPEKLDKVVSSLKAEGRHAEAFPADVRDSAAIDEITARIEREMGPIDILVNVAGVLRPGLIHSLSDEEWEATFSVNSTGVFNASRSVSKYMMDRRSGSIVTVGSNAAGVPRTSMAAYASSKAAAVMFTKCLGLELAEYNIRCNIVSPGSTETDMQWSLWADENGAEQVIKGSLETFKTGIPLKKLAKPSDIADAVLFLVSGQAGHITMHNLVVDGGATLGV

SEQ ID NO: 91536 - protein, 256 aa, unidentified
  source 1..256: note = Bacillus swezeyi
  REGION 1..256: note = tr|A0A5D4QIB6|A0A5D4QIB6_9BACI 2,3-dihydro-2,3-dihydroxybenzoate dehydrogenase; OS = Bacillus swezeyi OX=1925020 GN=FZC77_08670 PE=3 SV=1
MKGKVALVTGASQGIGEEVARALAELGVFVAAIDQNGEGLLELVKDLRKNGLQAADFVVDVGDSTAVDQLVDKIERDLGPIDMLVNVAGILRTGLITSFSDEDWVKTFRVNSTGVFNVSRSVAGRMIPRRNGSIVTVGSNAAAVPRMQMAAYAASKASALMFTKCLGLELAEYNIRCNIVSPGSTDTPMQRSLWRGQDAAQSVIAGSLKTFKTGIPLGKLAMPADIANAVVFLLSDSARHITMHDLRVDGGATLGV

SEQ ID NO: 91537 - protein, 261 aa, Bacillus tequilensis
  REGION 1..261: note = tr|A0A2X0X1E2|A0A2X0X1E2_9BACI 2,3-dihydroxybenzoate-2,3-dehydrogenase OS=Bacillus tequilensis OX=227866 GN=dhbA PE=3 SV=1
MNTMGIKGKIALITGAAQGIGEAVARTLAGQGAHIAAVDYNPEKLEKAVSSLKAEGSQAKAFPADVRDSAAIDEITARIEREMGPIDILVNVAGVLRPGLIHSLSDEEWEATFSVNSTGVFNASRSVSKYMMDRRSGSIVTVGSNAAGVPRTSMAAYASSKAAAVMFTKCLGLELAEYNIRCNIVSPGSTETDMQWSLWADDNGAEQVIKGSLETFKTGIPLKKLAQPSDIADAVLFLVSGQAGHITMHNLCVDGGATLGV

SEQ ID NO: 91538 - protein, 261 aa, Bacillus thuringiensis
  REGION 1..261: note = tr|A0A1C9BTD0|A0A1C9BTD0_BACTU 2,3-dihydro-2,3-dihydroxybenzoate dehydrogenase DhbA; OS = Bacillus thuringiensis Bt18247 OX=1423143 GN=dhbA PE=3; SV = 1
MNLGEFDGKTVLVTGAAQGIGSVVAKMFLERGATVIAVDQNEEGLNVLLNQNELNNTRMKTFRLDVSDSAAVEDMVNHIANEIAPIDILVNVAGILRMGPIHSLSDEDWNKTFSVNTTGVFNMSRAVSKNMMLRKSGAIVTVGSNAANTPRMEMAAYAASKAATTMFMKCLGLELAAYNIRCNLVSPGSTETEMQRLLWADENGAKNIIAGSQNTYRLGIPLQKIAQPSEVAEAVLFLASDRASHITMHNLCVDGGATLGV

SEQ ID NO: 91539 - protein, 261 aa, Bacillus thuringiensis; identical to SEQ ID NO: 91527
  REGION 1..261: note = tr|J3ZWR7|J3ZWR7_BACTU 2,3-dihydroxybenzoate-2,3-dehydrogenase OS=Bacillus thuringiensis HD-771 OX=1218175 GN=BTG_08320 PE=3 SV=1

SEQ ID NO: 91540 - protein, 261 aa, Bacillus thuringiensis
  REGION 1..261: note = tr|A0A1B1L5G5|A0A1B1L5G5_BACTU 2,3-dihydro-2,3-dihydroxybenzoate dehydrogenase DhbA; OS = Bacillus thuringiensis OX=1428 GN=dhbA PE=3 SV=1
MNLGEFDGQTVLVTGAAQGIGSVVAKMFLERGATVIAVDQNEEGLNILLNQNELNKTRMKTFRLDVSNSAAVEDMVNHIANEIAPIDILINVAGVLRMGPIHSLSDEDWNKTFSVNTTGVFNMSRAVSKNMMLRKSGAIVTVGSNAANTPRMEMAAYAASKAATTMFMKCLGLELAAYNIRCNLVSPGSTETEMQRLLWADENGAKNIITGSQNTYRLGIPLQKIAQPSEVAEAVLFLASDRASHITMHNLCVDGGATLGV

SEQ ID NO: 91541 - protein, 261 aa, Bacillus thuringiensis
  REGION 1..261: note = tr|A0A0D1R550|A0A0D1R550_BACTU Contig0003, whole genome shotgun sequence OS=Bacillus thuringiensis Sbt003; OX = 1235825 GN=C797_04771 PE=3 SV=1
MNLGEFDEQTVLVTGAAQGIGSVVAKMFLERGAKVIAVDQNEEGLNVLLNQNELNNTRMKTFRLDVSNSAAVEDMVNHIANEIAPIDILINVAGVLRMGPIHSLSDEDWNKTFSVNTTGVFNMSRAVSKNMMLRKSGAIVTVGSNAANTPRMEMAAYAASKAATTMFMKCLGLELAAYNIRCNLVSPGSTETEMQRLLWADENGAKNIIAGSQNTYRLGIPLQKIAQPSEVAEAVLFLASDRASHITMHNLCVDGGATLGV

SEQ ID NO: 91542 - protein, 261 aa, Bacillus thuringiensis; identical to SEQ ID NO: 91507
  REGION 1..261: note = tr|Q3ENX5|Q3ENX5_BACTI 2,3-dihydro-2,3-dihydroxybenzoate dehydrogenase; OS = Bacillus thuringiensis serovar israelensis ATCC 35646; OX = 339854 GN=RBTH_03421 PE=3 SV=1

SEQ ID NO: 91543 - protein, 261 aa, Bacillus thuringiensis
  REGION 1..261: note = tr|M1QL48|M1QL48_BACTU 2,3-dihydro-2,3-dihydroxybenzoate dehydrogenase; OS = Bacillus thuringiensis serovar thuringiensis str. IS5056 OX=1286404 GN=H175_ch2301 PE=3 SV= 1
MNLGEFDGQTVLVTGAAQGIGSVVAKMFLERGATVIAVDQNEEGLNVLLNQNELNKTRMKTFRLDVSNSAAVEDMVNHIANEIAPIDILINVAGVLRMGPIHSLSDEDWNKTFSVNTTGVFNMSRAVSKNMMLRKSGAIVTVGSNAANTPRMEMAAYAASKAATTMFMKCLGLELAAYNIRCNLVSPGSTETEMQRLLWADENGAKNIITGSQNTYRLGIPLQKIAQPSEVAEAVLFLASDRASHITMHNLCVDGGATLGV

SEQ ID NO: 91544 - protein, 256 aa, Bacillus thuringiensis
  REGION 1..256: note = tr|F0PP82|F0PP82_BACT0 2,3-dihydroxybenzoate-2,3-dehydrogenase OS=Bacillus thuringiensis subsp. finitimus (strain YBT-020) OX=930170; GN = YBT020_12025 PE=4 SV=1
MNLGEFDGKTVLVTGAAQGIGSVVAKMFLERGATVIAVDQNEEGLNELLNEIHLKTFCLDVSDSTAVEQMVNDIENEIAPIDILVNVAGVLRMGAIHSLSDEDWNKTFSVNSTGVFYMSRAVSKHMMQRKSGTIVTVGSNAANTPRMEMAAYAASKAATTMFMKCLGLELAAYNIRCNVVSPGSTETEMQRLLWADENGEKNIIAGSQSTYRLGIPLQKIAQPSEIAEAVLFLASDKASHITMHNLCVDGGATLGV

SEQ ID NO: 91545 - protein, 258 aa, Bacillus thuringiensis
  REGION 1..258: note = tr|Q6HJ06|Q6HJ06_BACHK 2,3-dihydro-2,3-dihydroxybenzoate dehydrogenase; OS = Bacillus thuringiensis subsp. konkukian (strain 97-27); OX = 281309 GN=entA PE=4 SV=1
MNVGEFDGKTVLVTGAAQGIGSVVAKMFLERGATVIAVDQNGEGLNVLLNQNETRMKIFHLDVSDSNAVEDTVKRIENDIAPIDILVNVAGVLRMGAIHSLSDEDWNKTFSVNSTGVFYMSRAVSKHMMQRKSGAIVTVGSNAANTPRVEMAAYAASKAATTMFMKCLGLELAAYNIRCNLVSPGSTETEMQRLLWADENGAKNIIAGSQNTYRLGIPLQKIAQPSEIAEAVLFLASDKASHITMHNLCVDGGATLGV

SEQ ID NO: 91546 - protein, 261 aa, Bacillus thuringiensis
  REGION 1..261: note = tr|A0A0F6FRC4|A0A0F6FRC4_BACTK 2,3-dihydro-2,3-dihydroxybenzoate dehydrogenase; OS = Bacillus thuringiensis subsp. kurstaki OX=29339; GN = BG08_3464 PE=3 SV=1
MNLGEFDGKTVLVTGAAQGIGSVVAKMFLERGATVIAVDQNEEGLNVLLNQNELNNTRMKTFRLDVSDSAAAEDMVNHIANEIAPIDILINVAGVLRMGPIHSLSDEDWNKTFSVNTTGVFNMSRAVSKNMMLRKSGAIVTVGSNAANTPRMEMAAYAASKAATTMFMKCLGLELAAYNIRCNLVSPGSTETEMQRLLWADENGAKNIIAGSQNTYRLGIPLQKIAQPSEVAEAVLFLASDRASHITMHNLCVDGGATLGV

SEQ ID NO: 91547 - protein, 261 aa, Bacillus thuringiensis; identical to SEQ ID NO: 91543
  REGION 1..261: note = tr|A0A0F6JB46|A0A0F6JB46_BACTU 2,3-dihydro-2,3-dihydroxybenzoate dehydrogenase; OS = Bacillus thuringiensis T01-328 OX=1324966; GN = BTCBT_002143 PE=3 SV=1

SEQ ID NO: 91548 - protein, 261 aa, Bacillus thuringiensis; identical to SEQ ID NO: 91543
  REGION 1..261: note = tr|V5M951|V5M951_BACTU Uncharacterized protein; OS = Bacillus thuringiensis YBT-1518 OX=529122; GN = YBT1518_12760 PE=3 SV=1

SEQ ID NO: 91549 - protein, 261 aa, unidentified
  source 1..261: note = Bacillus toyonensis
  REGION 1..261: note = tr|A0A2B7CWD8|A0A2B7CWD8_9BACI 2,3-dihydro-2,3-dihydroxybenzoate dehydrogenase; OS = Bacillus toyonensis OX=155322 GN=dhbA PE=4 SV=1
MNAGEFDGKTVFVTGAAQGIGSVVAKMFLERGATVIAVDQNEEGLNVLLNHDASYETRMKTFHLDVSDSNAVEEVVNRIENDIAPIDILVNVAGVLRMGAINSLSDEDWHKTFSVNTTGVFYISRSVSKRMMVRKSGAIVTVGSNAANTPRMEMAAYAASKAATTMFMKCLGLELASYNIRCNLVSPGSTETEMQRLLWADENGAKNIIAGSQNTYRLGIPLQKIAQPSEIAEAVLFLASDKASHITMHNLCVDGGATLGV

SEQ ID NO: 91550 - protein, 261 aa, unidentified
  source 1..261: note = Bacillus tropicus
  REGION 1..261: note = tr|A0A4Y6EWM4|A0A4Y6EWM4_9BACI 2,3-dihydro-2,3-dihydroxybenzoate dehydrogenase; OS = Bacillus tropicus OX=2026188 GN=dhbA PE=3 SV=1
MNLGEFDGKTVLVTGAAQGIGSVVAKMFLERGATVIAVDQNEERLQVLLKQNELNKTRMKTFRLDVSDSAAVEDMINHIANDIAPIDILVNVAGVLRMGAIHSLSDEDWNKTFSVNSTGVFYMSRAVSKHMMQRKSGAIVTVGSNAANTPRVEMAAYAASKAATTMFMKCLGLELAAYNIRCNLVSPGSTETEMQRLLWADENGAKNIIAGSQSTYRLGIPLQKIAQPSEIAEAVLFLASDKASHITMHNLCVDGGATLGV

SEQ ID NO: 91551 - protein, 261 aa, unidentified
  source 1..261: note = Bacillus velezensis
  REGION 1..261: note = tr|A7Z8B0|A7Z8B0_BACVZ 2,3-dihydro-2,3-dihydroxybenzoate dehydrogenase; OS = Bacillus velezensis (strain DSM 23117 / BGSC 10A6 / FZB42) OX=326423 GN=RBAM_029050 PE=3 SV =2
MDALGMKGKTAVVTGAAQGIGEATALALAEQGVNVAAIDTNEDLLLGLTDRLRQKGVQAQGFAADVSDSAAVNDIIAAVERDMGPIEILANVAGVLRPGPVQSLSDEDWDQTFSVNSTGVFHVSRAVSRYMIERKKGAIVTVGSNAAGVPRASMAAYAASKAAAVMFTKCLGLELAAHHIRCNIVSPGSTETDMQRALWQDENGARGVIRGSLDTYKTGIPLQKLAKPSDIANAVLFLASEQANHITMHDLCVDGGATLGV

SEQ ID NO: 91552 - protein, 261 aa, unidentified
  source 1..261: note = Bacillus velezensis
  REGION 1..261: note = tr|A0A5C2MGL9|A0A5C2MGL9_9BACI 2,3-dihydro-2,3-dihydroxybenzoate dehydrogenase; OS = Bacillus velezensis OX=492670 GN=ETZ92_010365 PE=4 SV=1
MDALGMKGKTAVVTGAAQGIGEATALALAEQGVNVAAIDTNEDLLLGLTDRLRQKGVQAQGFAADVSDSAAVNNIIAAVERDMGPIEILANVAGVLRPGPVQSLSDEDWDQTFSVNTTGVFHVSRAVSRYMIERKKGAIVTVGSNAASVPRASMAAYAASKAAAVMFTKCLGLELAAHHIRCNIVSPGSTETDMQRALWQDENGARDVIRGSLDTYKTGIPLQKLAKPSDIANAVLFLASEQANHITMHDLCVDGGATLGV

SEQ ID NO: 91553 - protein, 261 aa, unidentified
  source 1..261: note = Bacillus velezensis
  REGION 1..261: note = tr|S6FZ65|S6FZ65_9BACI 2,3-dihydro-2,3-dihydroxybenzoate dehydrogenase; OS = Bacillus velezensis UCMB5033 OX=1338518 GN=dhbA PE=3; SV = 1
MDALGMKGKTAVVTGAAQGIGEATALALAEQGVNVAAIDTNQDLLLGLTDRLRQKGVQAQGFAADVSDSAAVNDIIAAVERDMGPIEILANVAGVLRPGPVQSLSDEDWDQTFSVNTTGVFHVSRAVSRYMIERQKGAIVTVGSNAAGVPRASMAAYAASKAAAVMFTKCLGLELAAHHIRCNIVSPGSTETDMQRALWQDGNGARDVIRGSLDTYKTGIPLQKLAKPSDIANAVLFLASEQANHITMHDLCVDGGATLGV

SEQ ID NO: 91554 - protein, 261 aa, unidentified
  source 1..261: note = Bacillus wiedmannii
  REGION 1..261: note = tr|A0A0G8BZ48|A0A0G8BZ48_9BACI 2,3-dihydro-2,3-dihydroxybenzoate dehydrogenase; OS = Bacillus wiedmannii OX=1890302 GN=B4147_1996 PE=4 SV=1
MNIGEFDGKTVLVTGAAQGIGSVVANMFLERGATVIGADQTEEGLNVLLNENELNETRVKTFHLDVSDSAAVEEVVERIENDIAPIDILVNVAGVLRMGAIHSLSDEDWNKTFSVNSTGVFYMCRAVSKYMMQRKSGAIVTVGSNAANTPRMEMAAYAASKAATTMFMKCLGLELAAYNIRCNLVSPGSTETEMQRLLWADENGAENIIAGSQNTYRLGIPLQKIAQPSEIAEAVLFLASDKASHITMHNLCVDGGATLGV

SEQ ID NO: 91555 - protein, 252 aa, unidentified
  source 1..252: note = Unknown
  REGION 1..252: note = tr|A0A0J8YSH7|A0A0J8YSH7_9GAMM 2,3-dihydroxybenzoate-2,3-dehydrogenase OS=bacteria symbiont BFo1 of Frankliniella occidentalis OX=1628855; GN = AI28_10410 PE=4 SV=1
MSCRFDFSGKQVWVTGAGQGIGYHSALAFVAAGATVVGFDKQFSQSHYPFQRAIVDIANADQVKRVCQRLLSDTQRLDVLVNAAGILRTGATDELAVEDWQACMAVNAGGAFNLFQQTLPLFRQQRAGAIVTVASNAAHAPRIGMSAYGASKAALRSLCLTVGLEMAPYGVRCNIVSPGSTDTAMQRSLWSRPEDEQQMIAGYPEQYKLGIPLQKIAQPEEIANAVLFLASDSASHIVLQDIVIDGGATLGA

SEQ ID NO: 91556 - protein, 251 aa, unidentified
  source 1..251: note = Unknown
  REGION 1..251: note = tr|A0A0J8YWC0|A0A0J8YWC0_9GAMM 2,3-dihydroxybenzoate-2,3-dehydrogenase OS=bacteria symbiont BFo2 of Frankliniella occidentalis OX=1628856; GN = AI29_01505 PE=4 SV=1
MISMDFRDKYVWVTGAGQGIGYNAACAFHQAGAVVIGFDKQFSGEHYPFHCTVMDVADPQQVADVCQAQLAQQPRLDVLVNAAGILRIGTTDALSFEDWQACFNVNAGGAFNLFSQTLPLFRQQGFGAIVSVASNSAHAPRLGLSAYGASKAALRSLCQTVGLEMAPYGVRCNIVSPGSTDTAMQRSLWHTPEAEQEMINGFPDQFKLGIPLKKIAKPHEITNAILFLASDLASHIVLQDIVIDGGATLGA

SEQ ID NO: 91557 - protein, 296 aa, unidentified
  source 1..296: note = Unknown
  REGION 1..296: note = tr|A0A1V5J8E4|A0A1V5J8E4_9BACT 2,3-dihydro-2,3-dihydroxybenzoate dehydrogenase; OS = bacterium ADurb.BinA028 OX=1866933 GN=entA PE=4 SV=1
MSWTVDEIPDQSGRVVLITGANSGIGLESASVLADRGAHVILGCRDPHKGAAAQRQIAGSTEVLTIDLSSLASVSEAAEALGGRQIDVLVNNAGIMAVPQEASVDGHELQFATNVLGPFALTSLLLDQITDRVVWVSSMMHRAGKLDLADPSFRHHRYNAWRAYSASKLADLMLSYELQRRLTLAGSTVRSYAAHPGYAQTGLQRHTAVLSWPMVHQLESLLKVAQSADQGALPILYAATAPDLPPGSYVGPAGFGEMSGPPRIVGSSAASHDRDAQRTLWSLCEGLTGTSPGLPG

SEQ ID NO: 91558 - protein, 227 aa, unidentified
  source 1..227: note = Unknown
  REGION 1..227: note = tr|A0A2H6ELI8|A0A2H6ELI8_9BACT 2,3-dihydro-2,3-dihydroxybenzoate dehydrogenase; OS = bacterium BMS3Abin04 OX=2005712 GN=entA PE=4 SV=1
MKSYILIFGSQGNLGKGITKILTEKEFTKVYLFNRHFSRVKSSNNKIVQIKVNDLTNEDNVISSFRRVKIERSAEYHLISTVGMYMGGQTITDMKYEDWLKVHSTNLNISFLIAKHFSKLVKNVKGGSIWFISAVTSLNPEVEKAAYGSSKNSLNYLVKSLALEGKKINLSSNAIAPFIIDTKQNREWITDKTLMVSPKSIGILLYSLIKNYKILSGNIFELPGTFI

SEQ ID NO: 91559 - protein, 252 aa, unidentified
  source 1..252: note = Unknown
  REGION 1..252: note = tr|A0A4S1I468|A0A4S1I468_9BACT 2,3-dihydro-2,3-dihydroxybenzoate dehydrogenase; OS = bacterium M00.F.Ca.ET.141.01.1.1 OX=2563898; GN = EN784_08760 PE=4 SV=1
MQLTGFEGRVALVTGAAGGIGEALVRLLVEVGCIVVATDREAPRVADSRATSLTLDVTNSAAVDALVDQVESSIGPIMLAASVAGVLHVGSVAETGDADWRRVFAVNADGVFHVGRALARVMSPRRRGAIVTVSSNAAGVPRHGMAAYAASKAAATMFTRCLGLELAPLGIRCNIVAPGSTLTPMQTGMWQDEHGAERVIAGSPEIYKAGIPLRKLATPEDIAHSVMFLLSEQAGHVAMSDLYVDGGATLRG

SEQ ID NO: 91560 - protein, 252 aa, unidentified; identical to SEQ ID NO: 91559
  source 1..252: note = Unknown
  REGION 1..252: note = tr|A0A4S0Z9R0|A0A4S0Z9R0_9BACT 2,3-dihydro-2,3-dihydroxybenzoate dehydrogenase; OS = bacterium M00.F.Ca.ET.163.01.1.1 OX=2563906; GN = EN806_03210 PE=4 SV=1

SEQ ID NO: 91561 - protein, 251 aa, unidentified
  source 1..251: note = Unknown
  REGION 1..251: note = tr|A0A4S1HC42|A0A4S1HC42_9BACT 2,3-dihydro-2,3-dihydroxybenzoate dehydrogenase; OS = bacterium M00.F.Ca.ET.168.01.1.1 OX=2563907 GN=dhbA; PE = 4 SV=1
MTQQRFTGRRVLVTGTAQGIGRRIAERFIEEGADLIGLDLQARTAEAPFRQIALDITDAAAVETACKAIETEWGGLDILVNAAGILRLGDSESLTPADWKACMDVNAAGPFHMLRQWSATFKRQRRGAIVNIGSNAAVVPRIGMMAYCASKAALVSLSHCAALELAPYGVRCNVVSPGSTDTPMLAGMLSDPAGKDRLVAGLPEQFKLGIPLGKIARPDDIADTVLFLASDQAGHVTMQQIVVDGGATLAA

SEQ ID NO: 91562 - protein, 252 aa, unidentified; identical to SEQ ID NO: 91559
  source 1..252: note = Unknown
  REGION 1..252: note = tr|A0A4S0RES9|A0A4S0RES9_9BACT 2,3-dihydro-2,3-dihydroxybenzoate dehydrogenase; OS = bacterium M00.F.Ca.ET.177.01.1.1 OX=2563908; GN = EN820_03210 PE=4 SV=1

SEQ ID NO: 91563 - protein, 251 aa, unidentified; identical to SEQ ID NO: 91561
  source 1..251: note = Unknown
  REGION 1..251: note = tr|A0A4S0N425|A0A4S0N425_9BACT 2,3-dihydro-2,3-dihydroxybenzoate dehydrogenase; OS = bacterium M00.F.Ca.ET.179.01.1.1 OX=2563909 GN=dhbA; PE = 4 SV=1

SEQ ID NO: 91564 - protein, 251 aa, unidentified; identical to SEQ ID NO: 91561
  source 1..251: note = Unknown
  REGION 1..251: note = tr|A0A4S0GT19|A0A4S0GT19_9BACT 2,3-dihydro-2,3-dihydroxybenzoate dehydrogenase; OS = bacterium M00.F.Ca.ET.194.01.1.1 OX=2563912 GN=dhbA; PE = 4 SV=1

SEQ ID NO: 91565 - protein, 252 aa, unidentified; identical to SEQ ID NO: 91559
  source 1..252: note = Unknown
  REGION 1..252: note = tr|A0A4S0FQ94|A0A4S0FQ94_9BACT 2,3-dihydro-2,3-dihydroxybenzoate dehydrogenase; OS = bacterium M00.F.Ca.ET.199.01.1.1 OX=2563913; GN = EN842_08025 PE=4 SV=1

SEQ ID NO: 91566 - protein, 279 aa, unidentified
  source 1..279: note = Unknown
  REGION 1..279: note = tr|A0A5J4E8P8|A0A5J4E8P8_9BACT 2,3-dihydro-2,3-dihydroxybenzoate dehydrogenase; OS = bacterium MnTg04 OX=2080454 GN=entA PE=4 SV=1
MAGDYNKSVLVTGCSSGIGRATADLLKDEGFRVFATARTREDIDELTHAGFETISLDVSDPQSVRNCMVEVDQACDGKLFGLVNNAGVGQPGALEDISRETLEKQFQVNVFGCHQLTRHALRMMRVQGAGRIVQISSMLGFVAIPYIGAYNASKYALEGLSDTLRLELMGSGIFVSLVEPGPIESHFRNTATSLFTEEITAAGSAHQQAYQKMHERYQSGQSVSKFALGPEKVAAVVLKAMTSTRPKARYRVTTPATLAAVLKRLLPTRWLDQAMLRLG

SEQ ID NO: 91567 - protein, 259 aa, Bartonella grahamii
  REGION 1..259: note = tr|A0A336NE22|A0A336NE22_BARGR 2,3-dihydro-2,3-dihydroxybenzoate dehydrogenase; OS = Bartonella grahamii OX=33045 GN=entA PE=4 SV=1
MSHSFVDIVNNPAYNEKSLALVVAGTAEIARNVIDSLINGGYFVVFTWFSNETAVSDMKHRYQSAVLPVRLDLTSEQDVVQFCAALENVRIEIAIYCAGYNPACLCDELEPENINAITRLNYLSAVLIFNMVVKTMKQYKENETKLVFISSVAAKKIRVGNSLYGSTKAAMERYLSGIALEMGRFNIRTLCVSPGYIKTKMLQDYCAKEGRSIASIEKTIPMRKMLAAEDVANAVNAFINGKIITTGVSLTIGNGEGII

SEQ ID NO: 91568 - protein, 170 aa, unidentified
  source 1..170: note = Beijerinckiaceae bacterium
  REGION 1..170: note = tr|A0A539CYC9|A0A539CYC9_9RHIZ 2,3-dihydro-2,3-dihydroxybenzoate dehydrogenase; OS = Beijerinckiaceae bacterium OX=1978229 GN=dhbA PE=4 SV=1
MYRADPMDGIAWVTGASSGIGRAVALELARRGYKVAATARRGAELEALAAESQNIFSFPGDVTDRAGMAGLAGEIKASHGQIALAFINAGVYFVAEQEKFSADVVWCTFEINVSGTVNCLDPVLAAMQRRGRGQVALNASLAGRRHRRIASLWLDQGRLDLYGRSLETHL

SEQ ID NO: 91569 - protein, 249 aa, Bhargavaea cecembensis
  REGION 1..249: note = tr|M7P4D6|M7P4D6_9BACL 2,3-dihydro-2,3-dihydroxybenzoate dehydrogenase; OS = Bhargavaea cecembensis DSE10 OX=1235279 GN=dhbA PE=4; SV = 1
MSQLTSKVIAVTGAGGGMGQQVVKDLLRNGATVVGLDINTEALSSIEDKNLRSKNIDLLDEASIVNVFKEIYEEFGRLDGLVNIAGIAQAAKSITNVEVSEWHKLMDINATAVFLTSREAVRYMKEKNQGSIVNVGSVSVTRPRPGLQSYVASKGAVEAFTKALALETAPFNIRANVVHPGPADTNMLGKFSAQENEKIEMNKDVFAKSVPLGRLIEPSDIAPTVIHLLSDGARMITGSVIHVDGGRSI

SEQ ID NO: 91570 - protein, 253 aa, Blastochloris viridis
  REGION 1..253: note = tr|A0A0H5BPD9|A0A0H5BPD9_BLAVI 2,3-dihydro-2,3-dihydroxybenzoate dehydrogenase; OS = Blastochloris viridis OX=1079 GN=dhbA PE=4 SV=1
MRASGLADRFVVVTGAAGGIGRAVVESFLDEGAHVVATDLDVGTFRPSDVLHPLALDVTDAGAVEAVIDTVEATLGPIHAGVSVAGMLATGLVSETRDEDWHRMFAVNTHGVFHFGRALARRMVKRRGGSIVVVSSNAAGVPRHAMAAYASSKAAATMFTRCLGLELAGHGIRCNVVAPGSTLTPMQTGMWADERGAAAVIAGSPATFKAGIPLGKLATSQDVADAVVFLASDRAAHITMTDLYVDGGATLRG

SEQ ID NO: 91571 - protein, 244 aa, unidentified
  source 1..244: note = Bordetella ansorpii
  REGION 1..244: note = tr|A0A157SHE4|A0A157SHE4_9BORD Short-chain dehydrogenase/reductase OS=Bordetella ansorpii OX=288768; GN = entA_2 PE=4 SV=1
MSNDEASGGAGPRSADHGLAVVTGAAGGIGLAIVRHLLADGWRVAGLDLGASSLAHPAYRHVAVDLCDADATARTLQGLQDARALVHCAGVLRVGTLRDLNPADGLRMWTLHVDAAVRLAQGLLPALSGSGRGRVVLIGSRVAQGMPGRSLYAASKAALVALARSWAAELAASGVTVNVVSPAATQTGMLADPARAASAPRLPPIGRLIQPDEIAATVGFLLSDAVAAITGQDLAVCGGSSLPR

SEQ ID NO: 91572 - protein, 259 aa, Bordetella bronchiseptica
  REGION 1..259: note = tr|A0A4U9RI76|A0A4U9RI76_BORBO 2,3-dihydro-2,3-dihydroxybenzoate dehydrogenase; OS = Bordetella bronchiseptica OX=518 GN=dhbA_2 PE=3 SV=1
MDLQLAGKRVLITGASKGIGLACALSFAREGATPVLVARDAQALARAADAVREQTGKAAETHAQDLALPGAAQALAARAGEIDILVNNAGAVPGGALDQVEDERWRAGWELKVHGYINLARVYYPRMRAAGAGVIANVIGMAASSPRYDYVCGAAANAALVAFTRALGGEGPRHGVRVFGVNPSRTRTDRVLGLAQQRAQARWNDPDRWQETLGGLPFDRLMEPAEVADVVVFGCSPRAGYLSATVIDLDGGEQYRGAA

SEQ ID NO: 91573 - protein, 238 aa, Bordetella hinzii
  REGION 1..238: note = tr|A0A0H4W9B3|A0A0H4W9B3_9BORD 2,3-dihydro-2,3-dihydroxybenzoate dehydrogenase; OS = Bordetella hinzii OX=103855 GN=entA PE=4 SV=1
MNDFMNLAGKRILLLGATADIGRAIALNARDLGAEVQGIVRQDPGDMGFPVEALDLLDALAVEAYVRRLDTPLDGLVYCIGDSIKAPLSSLTPDVVHRAVDVNLNTLIVMLRALVMARKLKRGASVVLVSSVSAYLGVRGMAPYAMTKSALLVATRTFSNELMRHGVRVNSVSPVMVRTRMFEPEQQAWLEEMSKRHYPQGLGEPVDVAAPVLFLLSDEASAINGTDIILSAGAMTTA

SEQ ID NO: 91574 - protein, 259 aa, Bordetella pertussis
  REGION 1..259: note = tr|A0A381A9Z6|A0A381A9Z6_BORPT 2,3-dihydro-2,3-dihydroxybenzoate dehydrogenase; OS = Bordetella pertussis OX=520 GN=dhbA PE=3 SV=1
MDLQLAGKRVLITGASKGIGLACALSFAREGATPVLVARDAQALARAADAVREQTGQAAETHAQDLALPGAAQALAARAGAIDILVNNAGAVPGGALDQVEDERWRAGWELKVHGYINLARVYYPRMRAAGAGVIANVIGMAASSPRHDYVCGAAANAALVAFTRALGGEGPRHGVRVFGVNPSRTRTDRVLGLAQQRAQARWNDPDRWQETLSGLPFDRLMEPAEVADVVVFGCSPRAGYLSATVIDLDGGEQYRGAA

SEQ ID NO: 91575 - protein, 237 aa, unidentified
  source 1..237: note = Bordetella pseudohinzii
  REGION 1..237: note = tr|A0A0J6C8U1|A0A0J6C8U1_9BORD 2,3-dihydro-2,3-dihydroxybenzoate dehydrogenase; OS = Bordetella pseudohinzii OX=1331258 GN=entA PE=4 SV=1
MSAAPFMSLEGKRLWVVGAGSDIGKAAARHARALGAKVQGVARQPQDDPAVAVADLLNDEDLKRCLRELEHPLDGMVFCIGHALLVPAHMLGRDAVRRVMEINVASFIAVLTGLLRARKLKAGASVVVLSSISAHTATEGVAPYAMSKAALSAAVRNIALELQRREIRVNAVSPAMVRTKMTASGDVFSLDEMARERYPMGVAAPEDVAALVLFLLSDEARMFTGWDTLMTGGVVEV

SEQ ID NO: 91576 - protein, 251 aa, unidentified; identical to SEQ ID NO: 91466
  source 1..251: note = Bradyrhizobium lupini
  REGION 1..251: note = tr|K5C2P8|K5C2P8_RHILU 2,3-dihydroxybenzoate-2,3-dehydrogenase OS=Bradyrhizobium lupini HPC(L) OX=1229491 GN=C241_09986 PE=4 SV=1

SEQ ID NO: 91577 - protein, 232 aa, Bradyrhizobium sp.
  REGION 1..232: note = tr|A0A4Y9LCA8|A0A4Y9LCA8_9BRAD 2,3-dihydro-2,3-dihydroxybenzoate dehydrogenase; OS = Bradyrhizobium sp. CNPSo 3424 OX=2560056 GN=E4K66_09195; PE = 4 SV=1
MVKALLRKGANVIATDVAVDALAELACGNLLARPLDVTDSAEVERLIEEAAVQCGGIDFGINIAGVLSTTAVVDTSDAEWERVFAVNTGGVFHVSRALARHMAPRGKGSIVTVSSNAAGVPRKDMAAYAASKAAATMFTRCLGLELAEYGIRCNIVAPGSTLTPMQTGMWSDARGGERVIEGSLANFKTGIPLRKLATPEDVVNAVLFLLSEKAGHITMAELYVDGGATLHA

SEQ ID NO: 91578 - protein, 254 aa, Bradyrhizobium sp.
  REGION 1..254: note = tr|A0A4Y9PGC2|A0A4Y9PGC2_9BRAD 2,3-dihydro-2,3-dihydroxybenzoate dehydrogenase; OS = Bradyrhizobium sp. CNPSo 3426 OX=2560054 GN=E4K64_05655; PE = 4 SV=1
MVSDFEGRTAFLTGAAGGIGLAMVKALLREGANVIATDLAVDALAELACDNLLPRPLDVTDSAEVERLIQDAAARCGGIDFGINIAGVLSTTAVVDTSDAEWERVFAVNTAGVFHVSRALARHMAPRRKGSIVTVSSNAAGVPRKDMAVYAASKAAATMFTRCLGLELAEYGIRCNIVAPGSTLTPMQTGMWSDARGGERVIEGSLANFKTGIPLRKLATPEDVVNAVLFLLSEKAGHITMAELYVDGGATLHA

SEQ ID NO: 91579 - protein, 254 aa, Bradyrhizobium sp.
  REGION 1..254: note = tr|A0A5E8VN07|A0A5E8VN07_9BRAD 2,3-dihydro-2,3-dihydroxybenzoate dehydrogenase; OS = Bradyrhizobium sp. LVM 105 OX=2341115 GN=D6B98_00500; PE = 4 SV=1
MVSDFEGRTAFLTGAAGGIGLAMVKALLREGANVIATDLAVDALAELACDNLLPRPLDVTDSAEVERLIEEAAVQCGGIDFGINIAGVLSTTAVVDTSDAEWERVFAVNTGGVFHVSRALARHMAPRGKGSIVTVSSNAAGVPRKDMAAYAASKAAATMFTRCLGLELAEYGIRCNIVAPGSTLTPMQTGMWSDARGGERVIEGSLANFKTGIPLRKLATPEDVVNAVLFLLSEKAGHITMAELYVDGGATLHA

SEQ ID NO: 91580 - protein, 256 aa, unidentified
  source 1..256: note = Brenneria goodwinii
  REGION 1..256: note = tr|A0A0G4JZQ3|A0A0G4JZQ3_9GAMM 2,3-dihydro-2,3-dihydroxybenzoate dehydrogenase of siderophore biosynthesis OS=Brenneria goodwinii OX=1109412; GN = BN1221_03838 PE=4 SV= 1
MEKTQRLQMDFTGKQIWVTGAGRGIGEQIARAFIGLGAEVVGFDREFPNADLPYHCELLDIQRPEQVKNVCQQRLVQVPRLDVLVNAAGILRLGEVEMLSDDDWHQCLNVNAAGAFYLFRAVIPHFKRQRRGAIVTVGSNAAHVPRMQMAAYCASKAALTSLNHCVALELAEYGVRCNLVSPGSTDTAMLRNMWCDASGEQQTIRGFPERYKLGIPLGKIARAEDIANTVVFLASELASHITMQDIVVDGGATLAA

SEQ ID NO: 91581 - protein, 256 aa, Brenneria rubrifaciens
  REGION 1..256: note = tr|A0A4V1F9F6|A0A4V1F9F6_9GAMM 2,3-dihydro-2,3-dihydroxybenzoate dehydrogenase; OS = Brenneria rubrifaciens OX=55213 GN=dhbA PE=4 SV=1
MMSSPQLQLDFSGQCVWVTGAARGIGEQIARHFVVLGAQVIGFDREFHRQDYPFACVTLDISQPERVAAVCRQQLAQSAALDVLVNAAGILRLGEIDALSVEDWHQCINVNASGAFYLLHALLPHFKRQRRGAIVCVGSNAAHVPRMQMAAYCASKAALTSLTYCAGLELAPFGVRCNLVSPGSTDTPMQRGMWQSEDAEQRTIEGFPRQYKLGIPLGKIARPEEVANTVVFLASDLASHITMQDLVVDGGATLTA

SEQ ID NO: 91582 - protein, 252 aa, Brenneria sp.
  REGION 1..252: note = tr|G7LSL4|G7LSL4_9GAMM 2,3-dihydro-2,3-dihydroxybenzoate dehydrogenase; OS = Brenneria sp. EniD312 OX=598467 GN=BrE312_3952 PE=4 SV=1
MSARFDFSGKQVWVTGAGRGIGYETACRFVEAGAGVVGFDLAFPDTALPFTPCQLDIRDAAAVAERCGALLSQTPRLDVLVNGAGILRMGATEKLSQQDWQDCLAVNAGGVFNLLQAAIPQFQRQRAGAIVTVASNAAHVPRVGMAAYCASKAAVRSLCLTAGLELAPYGVRCNLISPGSTDTPMLRGMWASPAGEQSTIDGFPEQFKLGIPLGKIARPQDIADAILFMASDVAGHITLQDIVIDGGATLGA

SEQ ID NO: 91583 - protein, 252 aa, Brenneria sp.
  REGION 1..252: note = tr|A0A5J5G3R8|A0A5J5G3R8_9GAMM 2,3-dihydro-2,3-dihydroxybenzoate dehydrogenase; OS = Brenneria sp. L3-3HA OX=2590031 GN=dhbA PE=4 SV=1
MSRGFDFSGRQVWVSGAGSGIGYRTACRFQQAGAQVVGFDIAFPAGEVPFSVRELDVSDPQAVADCCRETLAGCPELDVLVIGAGILRLGATESLPFADWQRCLAVNAGGAFNLFQAVIPQFRRQRRGAIVTVASNAAHVPRSGMSAYCASKAALRSLSLSVGLELAPFGVRCNLISPGSTDTPMLRSMWRSPAARRQVIDGAPAQFRLGIPLGKLATVDDIADAILFMASDMASHITLQDVVIDGGATLGA

SEQ ID NO: 91584 - protein, 261 aa, Brevibacillus sp.
  REGION 1..261: note = tr|A0A553KKG3|A0A553KKG3_9BACL 2,3-dihydro-2,3-dihydroxybenzoate dehydrogenase; OS = Brevibacillus sp. LEMMJ03 OX=2595056 GN=FOI68_12740; PE = 3 SV=1
MEVAGITGKVALVTGAAQGIGRTVAAALAERGALVAAVDQHAEGVRDLVAELRAGGHQAAAFPADVSDSAAVEAMVDQIEREVGPVEILVNVAGLLRTGPIESLSDEDWAATFAVNASGVFYVSRAVARRMAPRRSGSIVTVGSNAAGVPRMQMSAYAASKAAATMFTKCLGLEYARHNIRCNVVSPGSTDTAMQRALWADDDGAQAVIAGNLEEYRLGIPLGRLALPSDIADAVVFLVSDRARHITMHDLRVDGGATLGM

SEQ ID NO: 91585 - protein, 256 aa, Brevundimonas diminuta
  REGION 1..256: note = tr|A0A1R4G8N6|A0A1R4G8N6_BREDI 2,3-dihydro-2,3-dihydroxybenzoate dehydrogenase of siderophore biosynthesis OS=Brevundimonas diminuta 3F5N; OX = 1255603 GN=FM111_10460 P E=4 SV=1
MRDSGLSGRLALVTGAGGGIGASVVRLLVEEGARVVATDLPSTALSGLAFLNGVRVEPLDVSDGAAVEALFERIEAEDGPIDFVASVAGVLSNVTVDQTSDAEWRRVFAVNADGVFHLGREVSRRMGERGKGAFVTVSSNAAGVPRHAMAAYAASKAAATMFTRCLGLELGPKGVRCNIVAPGSTLTPMQTGMWADEDGAARVIAGSPETFKAGIPLQKLATPEDIAEAVVFLLSDRAAHITMTDLYVDGGATLRA

SEQ ID NO: 91586 - protein, 261 aa, Brevundimonas diminuta
  REGION 1..261: note = tr|A0A246KB07|A0A246KB07_BREDI 2,3-dihydro-2,3-dihydroxybenzoate dehydrogenase; OS = Brevundimonas diminuta OX=293 GN=dhbA PE=4 SV=1
MRDSGLSGRLALVTGAGGGIGAAVVRLLVEEGARVVATDLPSTALSGLAFLNGVRVEPLDVSDGAAVEALFDRIEAEDGPIDFVASVAGVLSNVTVDQTSDAEWRRVFAVNADGVFHLGRAASRRMGERGPKDKKSRAFVTVSSNAAGVPRHAMAAYAASKAAATMFTRCLGLELGPKGVRCNIVAPGSTLTPMQTGMWADEDGAARVIAGSLETFKAGIPLQKLATPEDIAEAVVFLLSDRAAHITMTDLYVDGGATLRA

SEQ ID NO: 91587 - protein, 256 aa, Brevundimonas naejangsanensis
  REGION 1..256: note = tr|A0A172Y3C6|A0A172Y3C6_9CAUL 2,3-dihydro-2,3-dihydroxybenzoate dehydrogenase; OS = Brevundimonas naejangsanensis OX=588932 GN=DA69_02425; PE = 4 SV=1
MRDSGLSGRLALVTGAGGGIGAAVVRLLVEEGARVVATDLPSTALSGLAFLKGVRIEPLDVSDGAAVEALFERIEGEDGPIDLVASVAGVLSNVTVDQTSDAEWRRVFAVNTDGPFHLGREVSRRMGERGKGAFVTVSSNAAGVPRHAMAAYAASKAAATMFTRCLGLELGPKGVRCNIVAPGSTLTPMQTGMWADEDGAARVIAGSPETFKAGIPLQKLATPEDIAEAVVFLLSDRAAHITMTDLYVDGGATLRA

SEQ ID NO: 91588 - protein, 256 aa, Brevundimonas sp.
  REGION 1..256: note = tr|A0A3R8ZIU2|A0A3R8ZIU2_9CAUL 2,3-dihydro-2,3-dihydroxybenzoate dehydrogenase; OS = Brevundimonas sp. 357 OX=2555782 GN=EGK63_11530 PE=4; SV = 1
MRDSGLSGRLALVTGAGGGIGAAVVRLLVEEGARVVATDLPSTALSGLAFLNGVRVEPLDVSDGAAVEALFDRIEAEDGPIDLVASVAGVLSNVTVDQTSDAEWRRVFAVNADGVFHLGRAASRRMGERGEGAFVTVSSNAAGVPRHAMAAYAASKAAATMFTRCLGLELGPKGVRCNIVAPGSTLTPMQTGMWADEDGAARVIAGSPDTFKAGIPLQKLATPEDIAEAVVFLLSDRAAHITMTDLYVDGGATLRA

SEQ ID NO: 91589 - protein, 256 aa, Brevundimonas sp.
  REGION 1..256: note = tr|A0A399UNR8|A0A399UNR8_9CAUL 2,3-dihydro-2,3-dihydroxybenzoate dehydrogenase; OS = Brevundimonas sp. LPMIX5 OX=2305887 GN=D1604_04615 PE=4; SV = 1
MRDSGLSGRLALVTGAGGGIGAAVVRLLVEEGARVVATDLPSTALSGLAFLNGVRVEALDVSDGAAVETLFERIEAEDGPIDLVASVAGVLSNVTVDQTSDAEWRRVFAVNTDGPFHLGREVARRMGERGKGAFVTVSSNAAGVPRHAMAAYAASKAAATMFTRCLGLELGPKGVRCNIVAPGSTLTPMQTGMWADDDGAARVIAGSPETFKTGIPLQKLATPEDIAEAVVFLLSDRAAHITMTDLYVDGGATLRA

SEQ ID NO: 91590 - protein, 261 aa, Brevundimonas vancanneytii
  REGION 1..261: note = tr|A0A4P1KE10|A0A4P1KE10_9CAUL 2,3-dihydro-2,3-dihydroxybenzoate dehydrogenase; OS = Brevundimonas vancanneytii OX=1325724 GN=dhbA PE=4 SV=1
MRDSGLSGRLALVTGAGGGIGAAVVRLLVEEGARVVATDLPSTALSGLAFLNGVRVEPLDVSDGAAVEALFDRIEAEDGPIDFVASVAGVLSNVTVDQTSDAEWRRVFAVNADGVFHLGRAASRRMGERGPKDKKNRAFVTVSSNAAGVPRHAMAAYAASKAAATMFTRCLGLELGPKGVRCNIVAPGSTLTSMQTGMWADEDGAARVIAGSPETFKAGIPLQKLATPEDIAEAVVFLLSDRAAHITMTDLYVDGGATLRA

SEQ ID NO: 91591 - protein, 258 aa, unidentified
  source 1..258: note = Brucella abortus
  REGION 1..258: note = tr|Q2YL97|Q2YL97_BRUA2 Short-chain dehydrogenase/reductase SDR:Blood group Rhesus C/E and D polypeptide:Glucose/ribitol dehydrogenase OS=Brucella abortus (strain 230 8) OX=359391 GN=BAB2_0012 PE=4 SV=1
MVEAKSYPASWRFAGKRVIVTGAAQGIGRRVAEHFLAEGATVIGLDRQAGEADAPFRLIRLDITDAAEVRAVSDGLKAEGKPLDILVNVAGVLKLGNSDRLSAEDWKTCMDVNASGPFHLLSQWVPVFRDQRHGAIVNVASNAAHVPRLNMAAYCASKAALASFSHCVALELAPYGVRCNVVSPGSTRTAMLGAMLNDPSGEAQLVRGLPEQFKLGIPLGKIAMPDDIANVILFLASDQAGHVTMQDIVVDGGATLGA

SEQ ID NO: 91592 - protein, 258 aa, unidentified; identical to SEQ ID NO: 91591
  source 1..258: note = Brucella abortus
  REGION 1..258: note = tr|Q93FY3|Q93FY3_BRUAO 2,3-dihydro-2,3-dihydroxybenzoate dehydrogenase; OS = Brucella abortus OX=235 GN=entA PE=4 SV=1

SEQ ID NO: 91593 - protein, 271 aa, Brucella melitensis
  REGION 1..271: note = tr|Q8YDU5|Q8YDU5_BRUME 2,3-dihydro-2,3-dihydroxybenzoate dehydrogenase; OS = Brucella melitensis biotype 1 (strain 16M / ATCC 23456 / NCTC 10094) OX=224914 GN=BMEII0080PE=4 SV=1
MGPDRNKAEGSRLMVEAKSYPASWRFAGKRVIVTGAAQGIGRRVAEHFLAEGATVIGLDRQAGEADAPFRLIRLDITDAAEVRAVSDGLKAEGKPLDILVNVAGVLKLGNSDRLSAEDWKTCMDVNASGPFHLLSQWVPVFRDQRHGAIVNVASNAAHVPRLNMAAYCASKAALASFSHCVALELAPYGVRCNVVSPGSTRTAMLGAMLNDPSGEAQLVRGLPEQFKLGIPLGKIAIPDDIANVILFLASDQAGHVTMQDIVVDGGATLGA

SEQ ID NO: 91594 - protein, 258 aa, Brucella melitensis
  REGION 1..258: note = tr|A0A4P6KNM0|A0A4P6KNM0_BRUML 2,3-dihydro-2,3-dihydroxybenzoate dehydrogenase; OS = Brucella melitensis OX=29459 GN=dhbA PE=4 SV=1
MVEAKSYPASWRFAGKRVIVTGAAQGIGRRVAEHFLAEGATVIGLDRQAGEADAPFRLIRLDITDAAEVRAVSDGLKAEGKPLDILVNVAGVLKLGNSDRLSAEDWKTCMDVNASGPFHLLSQWVPVFRDQRHGAIVNVASNAAHVPRLNMAAYCASKAALASFSHCVALELAPYGVRCNVVSPGSTRTAMLGAMLNDPSGEAQLVRGLPEQFKLGIPLGKIAIPDDIANVILFLASDQAGHVTMQDIVVDGGATLGA

SEQ ID NO: 91595 - protein, 258 aa, unidentified
  source 1..258: note = Brucella neotomae
  REGION 1..258: note = tr|A0A381C163|A0A381C163_BRUNE 2,3-dihydroxybenzoate-2,3-dehydrogenase OS=Brucella neotomae OX=29460 GN=entA PE=4 SV=1
MVEAKSYPASWRFAGKRVIVTGAAQGIGRRVAERFLAEGATVIGLDRQAGEADAPFRLIRLDITDAAEVRAVSDGLKAEGKLLDILVNVAGVLKLGNSDRLSAEDWKTCMDVNASGPFHLLSQWVPVFRDQRHGAIVNVASNAAHVPRLNMAAYCASKAALASFSHCVALELAPYGVRCNVVSPGSTRTAMLGAMLNDPSGEAQLVRGLPEQFKLGIPLGKIAMPDDIANVILFLASDQAGHVTMQDIVVDGGATLGT

SEQ ID NO: 91596 - protein, 258 aa, unidentified
  source 1..258: note = Brucella ovis
  REGION 1..258: note = tr|A0A0H3ASL5|A0A0H3ASL5_BRUO2 2,3-dihydro-2,3-dihydroxybenzoate dehydrogenase; OS = Brucella ovis (strain ATCC 25840 / 63/290 / NCTC 10512); OX = 444178 GN=entA PE=4 SV=1
MVEAKSYPASWRFAGKRVIVTGAAQGIGRRVAERFLAEGATVIGLDRQAGEADAPFRLIRLDITDAAEVRAVSDGLKAEGKPLDILVNVAGVLKLGNSDRLSAEDWKTCMDVNASGPFHLLSQWVPVFRDQRHGAIVNVASNAAHVPRLNMAAYCASKAALASFSHCVALELAPYGVRCNVVSPGSTRTAMLGAMLNDPSGEAQLVRGLPEQFKLGIPLGKIAMPDDIANVILFLASDQAGHVTMQDIVVDGGATLGA

SEQ ID NO: 91597 - protein, 258 aa, unidentified; identical to SEQ ID NO: 91596
  source 1..258: note = Brucella suis
  REGION 1..258: note = tr|A0A0H3G9U9|A0A0H3G9U9_BRUSU 2,3-dihydroxybenzoate-2,3-dehydrogenase OS=Brucella suis biovar 1 (strain 1330) OX=204722 GN=entA PE=4 SV=1

SEQ ID NO: 91598 - protein, 258 aa, unidentified; identical to SEQ ID NO: 91596
  source 1..258: note = Brucella suis
  REGION 1..258: note = tr|A0A4Z0F0M6|A0A4Z0F0M6_BRUSS 2,3-dihydro-2,3-dihydroxybenzoate dehydrogenase; OS = Brucella suis OX=29461 GN=dhbA PE=4 SV=1

SEQ ID NO: 91599 - protein, 250 aa, Burkholderia cenocepacia
  REGION 1..250: note = tr|A0A1V2XYP3|A0A1V2XYP3_9BURK Ketoreductase; OS = Burkholderia cenocepacia OX=95486 GN=entA_1 PE=4 SV=1
MQSFDNKVVLITGGGAGIGLAAAVAFAREGARVVITGRREDALSAAARSAPGIDYVVADAGDPADAARTIDEAVALAGRLDVLVNNAGAGAILPLGSATFEAISAIFSVNTLGPSMLATAALPHLKAARGSIVNVSSTFGHKAAALLSHYAASKAALEHLTRCWALELASAGVRVNAVAAGPTETDFLSERMKLSAPDIEAIKAQERTRIPLGRRGEPADVANWIVSLASPLAAWMTGQVITVDGGLDAT

SEQ ID NO: 91600 - protein, 263 aa, Burkholderia multivorans
  REGION 1..263: note = tr|B9B883|B9B883_9BURK 2,3-dihydro-2,3-dihydroxybenzoate dehydrogenase; OS = Burkholderia multivorans CGD1 OX=513051; GN = BURMUCGD1_1523 PE=3 SV=1
MSRGTDMTFPAGVAVVTGAARGIGAAVARALVARGVDVAAFDADGDTLARAIEDCPAAGRIHPFTVDVADASAVRAAVERVETTVGPIGMLANVAGVLRLAAATSLTDDDWAHCFAVNTHGVFHLSRAVAARMIARRTGSIVTVGSNAALVPRTQMAAYAASKAAAHQFSRCLGLELAGHGIRCNIVAPGSTDTPMQRQLWRDPEGAAGVIAGSLETYRTGIPLGRIAVPDDVADTVLFLLSDAARHVTLHTLCVDGGATLGV

SEQ ID NO: 91601 - protein, 263 aa, Burkholderia multivorans
  REGION 1..263: note = tr|A0A1W0Y5Q0|A0A1W0Y5Q0_9BURK 2,3-dihydro-2,3-dihydroxybenzoate dehydrogenase; OS = Burkholderia multivorans OX=87883 GN=UA18_03749 PE=4; SV = 1
MSGPAGRRFADRNVIVTGGARGIGEEVARQLAAEGAHVQVLDVAAQALHAWCGELDPDTAGRIRAHVADIRDASAIGELVAVLDDERPVDGLVNAAGVLTTGAFLSTDAQSWRHMLDVNAYGTLVVTQAVAARMVARRRGAIVTVASNAGATPRSGLTAYCASKAAATMLTRCAGLELARYGIRCNVVSPGSTDTPMLSEVAGAGPEREARSIAGDPSVFRAGIPLGKIAVPRDIAQSVAFLLSDDAGHITMRELVVDGGATF

SEQ ID NO: 91602 - protein, 264 aa, Burkholderia pyrrocinia
  REGION 1..264: note = tr|A0A4R4FS70|A0A4R4FS70_BURPY 2,3-dihydro-2,3-dihydroxybenzoate dehydrogenase; OS = Burkholderia pyrrocinia OX=60550 GN=EVG18_19850 PE=3; SV = 1
MSREPEMTFPAGVAVVTGAARGIGAAVVRALAARGVDVAAFDADGDALARATGDRPPAPGRVHPFTVDVADAHAVRAAIEHVEAAVGPIGMLANVAGVLRLATATSLSDDDWAHCFAVNAHGVFHLSRAVAQRMIERRAGSIVTVGSNAALVPRTQMAAYAASKAAAHQFTRCLGLELAGYGIRCNIVAPGSTDTPMQRQLWRGPEGPAGVIAGSLETYRTGIPLGRIATPDDVAGTVLFLLSDAARHVTLHTLCVDGGATLGV

SEQ ID NO: 91603 - protein, 263 aa, unidentified
  source 1..263: note = Burkholderia singularis
  REGION 1..263: note = tr|A0A103E3E3|A0A103E3E3_9BURK 2,3-dihydro-2,3-dihydroxybenzoate dehydrogenase; OS = Burkholderia singularis OX=1503053 GN=BSIN_2629 PE=3; SV = 1
MSGTFPEFPGTVAVVSGAAQGIGAAVARALAARGVSVAALDVRADALAQLAADAGSAGARIHPFAVDVANADAVRAAVERIDATLGPIGMLANVAGILRVADASTLSDDDWAHSFAVNTSGVFYLSRAVAQRMIPLRAGSIVTVGSNAALVPRMRMAAYAASKAAAHQFTKCLGLELAEYGIRCNIVAPGSTDTQMQRQLWTDARSADAVIDGSLPAFRTGIPLRRIADPDDVAAAVLFLLSNASRHVALHSFTVDGGATLGA

SEQ ID NO: 91604 - protein, 258 aa, Burkholderia sp.
  REGION 1..258: note = tr|A0A3N8B7D9|A0A3N8B7D9_9BURK 2,3-dihydro-2,3-dihydroxybenzoate dehydrogenase; OS = Burkholderia sp. Bp9125 OX=2184569 GN=DIE18_37145 PE=4; SV = 1
MTFPGKVAVVSGAAQGIGAAVARALAAGGIEVAAFDVDGDALSRNAADSAAFGARIHPFTVDVADAAAVNDAVASVEATVGPIGLLANVAGVLRLAAATSLSDADWAHCFAVNTNGVFHLSRAVAQRMVPRRAGSIVTVGSNAALVPRMQMAAYAASKAAAHQFTRCLGLELAPHGIRCNIVAPGSTDTPMQRQLWTGPEGPAAVIGGSLDTYRTGIPLGRIAAPDDVAETVLFLLSDASRHVTLHSLCVDGGATLGV

SEQ ID NO: 91605 - protein, 258 aa, Burkholderia sp.
  REGION 1..258: note = tr|A0A0D0GVG8|A0A0D0GVG8_9BURK KY49.ctg7180000000014_quiver, whole genome shotgun sequence OS=Burkholderia sp. MSHR3999 OX=1542965; GN = KY49_3538 PE=4 SV=1
MRFPGTVAVVSGAAQGIGAAVARALAARGIEVAAFDVDGDALARHAADSTAFGARIHPFTVDVADAAAVQRAVARVEETVGPIGMLANVAGVLRLAAATSLSDADWAHCFAVNAHGVFHLSRAVAQRMVARRAGSIVTVGSNAALVPRMQMAAYAASKAAAHQFTRCLGLELAGHGIRCNIVAPGSTDTPMQRQLWDGPAGPAGVIAGSLDTYRTGIPLGRIAAPDDVAETVLFLLSDASRHVTLHSLCVDGGATLGV

SEQ ID NO: 91606 - protein, 264 aa, Burkholderia stabilis
  REGION 1..264: note = tr|A0A4Q2ALV5|A0A4Q2ALV5_9BURK 2,3-dihydro-2,3-dihydroxybenzoate dehydrogenase; OS = Burkholderia stabilis OX=95485 GN=D1006_00105 PE=3 SV=1
MSRETEMTFPAGVAVVTGAARGIGAAVVRALAARGVDVAAFDADGDALARATEDRPPAPSRVHPFAVDVADARAVRVAIERVEATVGPIGMLANVAGVLRLAAATSLTDDDWAHCFAVNTHGVFHLSRAVAQRMIERRAGSIVTVGSNAALVPRTQMAAYAASKAAAHQFTRCLGLELAGYGIRCNIVAPGSTDTPMQRQLWRGPEGPAGVIAGSLETYRTGIPLGRIAAPDDVADTVLFLLSDAARHVTLHTLCVDGGATLGV

SEQ ID NO: 91607 - protein, 258 aa, unidentified
  source 1..258: note = Burkholderia stagnalis
  REGION 1..258: note = tr|A0A3P0E1R7|A0A3P0E1R7_9BURK 2,3-dihydro-2,3-dihydroxybenzoate dehydrogenase; OS = Burkholderia stagnalis OX=1503054 GN=DF145_07115 PE=3; SV = 1
MTFPGTVAVVSGAAQGIGAAVVRALAARGIEVAAFDIDGAALSRNAADSAAFGARIHPFTVDVADAAAVNDAVARVEAALGPIGMLANVAGVLRLAAATSLSDADWAHCFAVNTHGVFHLSRAVAQRMVARRAGSIVTVGSNAALVPRMQMAAYAASKAAAHQFTRCLGLELAPHGIRCNIVAPGSTDTPMQRQLWTGPEGPAAVIGGSLDTYRTGIPLGRIAAPDDVAETVLFLLSDASRHVTLHSLCVDGGATLGA

SEQ ID NO: 91608 - protein, 262 aa, Burkholderia ubonensis
  REGION 1..262: note = tr|A0A3N7Q965|A0A3N7Q965_9BURK 2,3-dihydro-2,3-dihydroxybenzoate dehydrogenase; OS = Burkholderia ubonensis OX=101571 GN=DF011_07875 PE=4; SV = 1
MSFPGTVAVVSGAAQGIGAAVARALAARGIEVAAFDVDGDALARHAADSAADGASFGARIHPFTVDVADAAGVRDAVARVEETVGPIGMLANVAGVLRLAAATSLSDADWAHCFAVNTHGVFHLSRAVAQRMVARRAGSIVTVGSNAALVPRMQMAAYAASKAAAHQFTRCLGLELAGHGIRCNIVAPGSTDTPMQRQLWDGPGGPAGVIAGSLDTYRTGIPLGRIAAPDDVAETVLFLLSDASRHVTLHSLCVDGGATLGV

SEQ ID NO: 91609 - protein, 250 aa, Buttiauxella agrestis
  REGION 1..250: note = tr|A0A085GIG1|A0A085GIG1_9ENTR 2,3-dihydro-2,3-dihydroxybenzoate dehydrogenase; OS = Buttiauxella agrestis ATCC 33320 OX=1006004 GN=entA; PE = 4 SV=1
MKIDFSGKTVWVTGAGKGIGYHTARAFSDAGATVVGLDLAFPLEVYPFETEVLNVADAEQVAAVTQRLLSNEPQLDVLVNAAGILRMGATDALALQDWQDTFAVNVGGAFNLFRAVMPRFREQRSGAIVTVASDAAHTPRTGMSAYGASKAALKSLALTVGLELAPFGVRCNVVSPGSTDTDMQRTLWKTPDAEQQRIQGFPDQFKLGIPLGKIARPQEIASTILFLASSHASHITLQDIVIDGGATLGA

SEQ ID NO: 91610 - protein, 260 aa, Buttiauxella agrestis
  REGION 1..260: note = tr|A0A381CAW0|A0A381CAW0_9ENTR 2,3-dihydro-2,3-dihydroxybenzoate dehydrogenase; OS = Buttiauxella agrestis OX=82977 GN=entA PE=4 SV=1
MGAAVAGFLRVNIDFSGKTVWVTGAGKGIGYHTARAFSDAGATVVGFDLAFPLEVYPFATEVLNVADAEQVAAVTQRLLSDEPQLDVLVNAAGILRMGATDALALQDWQDTFAVNVGGAFNLFRAVMPHLREQQSGAIVTVASDAAHTPRTGMSAYGASKAALKSLALTVGLELAPFGVRCNVVSPGSTDTDMQRTLWKTPDAEQQRIQGFPDQFKLGIPLGKIARPQEIASTILFLASSHASHITLQDIVIDGGATLGA

SEQ ID NO: 91611 - protein, 250 aa, Buttiauxella brennerae
  REGION 1..250: note = tr|A0A1B7IVN1|A0A1B7IVN1_9ENTR 2,3-dihydro-2,3-dihydroxybenzoate dehydrogenase; OS = Buttiauxella brennerae ATCC 51605 OX=1354251; GN = M975_0513 PE=4 SV=1
MNIDFSGKQVWVTGAGRGIGYHTARAFSDAGATVTGFDLTFPLEIYPFAIEVVNVADADQVASITERILSDGQPLDVLVNAAGILRMGATDALALQDWQDTFAVNVGGAFNMFRAVMPRMREQRSGAIVTVASDAAHTPRTGMSAYGASKAALKSLALTVGLELAPFGVRCNVVSPGSTDTDMQRTLWKTPDAEQQRIQGFPEQFKLGIPLGKIARPQEIASTILFLASMHASHITLQDIVIDGGATLGA

SEQ ID NO: 91612 - protein, 250 aa, Buttiauxella gaviniae
  REGION 1..250: note = tr|A0A1B7HRQ5|A0A1B7HRQ5_9ENTR 2,3-dihydro-2,3-dihydroxybenzoate dehydrogenase; OS = Buttiauxella gaviniae ATCC 51604 OX=1354253; GN = M977_03214 PE=4 SV=1
MNIDFSGKQVWVTGAGRGIGYHTARAFSDAGATVVGFDLAFPLDIYPFATEVVNVADADQVGRVTQRILSDEQQLDVLVNAAGILRMGATDALALQDWQDTFAVNVGGAFNMFRAVMPRMREQRSGAIVTVASDAAHTPRTGMSAYGASKAALKSLALTVGLELAPFGVRCNVVSPGSTDTDMQRTLWKTPDAEQQRIQGFPEQFKLGIPLGKIACPQEIASTILFLASTHASHITLQDIVIDGGATLGA

SEQ ID NO: 91613 - protein, 250 aa, Buttiauxella izardii
  REGION 1..250: note = tr|A0A3A5K0J5|A0A3A5K0J5_9ENTR 2,3-dihydro-2,3-dihydroxybenzoate dehydrogenase; OS = Buttiauxella izardii OX=82991 GN=dhbA PE=4 SV=1
MNIDFTGKRVWVTGAGKGIGYDTARAFSEAGATVIGFDLAFPLEVYPFATEVLNVADAEQVSTVTQRLLSDEPQLDVLVNAAGILRMGATDALALQDWQDTFAVNVGGAFNLFRAVMPHLREQQSGAIVTVASDAAHTPRTGMSAYGASKAALKSLALTVGLELAPFGVRCNVVSPGSTDTDMQRTLWKTPDAEQQRIKGFPEQFKLGIPLGKIARPQEIANTILFLASPLASHITLQDIVIDGGATLGA

SEQ ID NO: 91614 - protein, 250 aa, Buttiauxella noackiae
  REGION 1..250: note = tr|A0A1B7I104|A0A1B7I104_9ENTR 2,3-dihydro-2,3-dihydroxybenzoate dehydrogenase; OS = Buttiauxella noackiae ATCC 51607 OX=1354255; GN = M979_0230 PE=4 SV=1
MNIDFSGRQVWVTGAGKGIGYHTACAFSEAGATVIGFDLAFPLDVYPFATQVLNVADADQVGSVTQRILSDERHLDVLVNAAGILRMGATDALALQDWQDTFAVNVGGAFNLFRAVMPRMREQRSGAIVTVASDAAHTPRTGMSAYGASKAALKSLALTVGLELAPFGVRCNVVSPGSTDTDMQRTLWKTPDAEQQRIKGFPDQFKLGIPLGKIARPQEIASTILFLASQHASHITLQDIVIDGGATLGA

SEQ ID NO: 91615 - protein, 248 aa, Buttiauxella sp.
  REGION 1..248: note = tr|A0A3G2IMV9|A0A3G2IMV9_9ENTR 2,3-dihydro-2,3-dihydroxybenzoate dehydrogenase; OS = Buttiauxella sp. 3AFRM03 OX=2479367 GN=dhbA PE=4 SV=1
MDFSGKTVWVTGAGKGIGYHTARAFSEAGATVIGFDLAFPLEIYPFATQVLNVADAEQVAAVTQRLLSDKQQLDVLVNAAGILRMGATDALALQDWQDTFAVNVGGAFNMFRAVMPHMREQRSGAIVTVASDAAHTPRTGMSAYGASKAALKSLALTVGLELAPFGVRCNVVSPGSTDTDMQRTLWKTPDAEQQRIQGFPEQFKLGIPLGKIARPQEIASTILFLASTHASHITLQDIVIDGGATLGA

SEQ ID NO: 91616 - protein, 250 aa, Buttiauxella sp.
  REGION 1..250: note = tr|A0A5C5DA69|A0A5C5DA69_9ENTR 2,3-dihydro-2,3-dihydroxybenzoate dehydrogenase; OS = Buttiauxella sp. B2 OX=2587812 GN=dhbA PE=4 SV=1
MNIDFSGKRVWVTGAGKGIGYHTARLFSEAGAKVTGFDVAFPLDDYPYATEMLNVADTDQVASVCQRLLSDEPQLDVLVNAAGILRMGATDALALQDWQDTFAVNVGGAFNMFRVVIPRMREQRSGAIVTVASDAAHTPRTGMSAYGASKAALKNLSLTVGLELAPFGVRCNVVSPGSTDTDMQRTLWTSPDAEQQRIKGFPEQFKLGIPLGKIARPHEIASTIMFLASQHASHITLQDIVIDGGATLGA

SEQ ID NO: 91617 - protein, 250 aa, Buttiauxella warmboldiae
  REGION 1..250: note = tr|A0A3N5E3V2|A0A3N5E3V2_9ENTR 2,3-dihydro-2,3-dihydroxybenzoate dehydrogenase; OS = Buttiauxella warmboldiae OX=82993 GN=dhbA PE=4 SV=1
MNIDFTGKRVWVTGAGKGIGYDTARAFSEAGATVIGFDLSFPLEVYPFATEVLNVADAEQVSALTQRLLSDEPQLDVLVNAAGILRMGATDALALQDWLDTFAVNVGGAFNLFRAVMPRLRKQQSGAIVTVASDAAHTPRTGMSAYGASKAALKSLALTVGLELAPFGVRCNVVSPGSTDTDMQRTLWKTPDAEQQRIKGFPEQFKLGIPLGKIARPQEIANTILFLASPLASHITLQDIVIDGGATLGA

SEQ ID NO: 91618 - protein, 89 aa, unidentified
  source 1..89: note = Accumulibacter sp.
  REGION 1..89: note = tr|A0A011MUW3|A0A011MUW3_9PROT 2,3-dihydro-2,3-dihydroxybenzoate dehydrogenase; OS = Candidatus Accumulibacter sp. SK-11 OX=1454000 GN=dhbA; PE = 4 SV=1
MQLDGAVAIVTGAAQNIGRCIAVALAEAGCRVAAIDLDGERLETLADERIDVLAGDVADPEQAARVVDTSTSLPAMLPIPSRRRASSTR

SEQ ID NO: 91619 - protein, 236 aa, unidentified
  source 1..236: note = Aminicenantes sp.
  REGION 1..236: note = tr|A0A1V5JXQ2|A0A1V5JXQ2_9BACT 2,3-dihydro-2,3-dihydroxybenzoate dehydrogenase; OS = Candidatus Aminicenantes bacterium ADurb.Bin508; OX = 1852832 GN=entA PE=4 SV=1
MADKLFQIRSIRAPLEENLKGFEGKVLVCFGAGKGIGREVVQRAEGLGARVYGTSLSTGTDVCDYKSVRGFLEGVLLQEGRIDFVVNTAGLLGMGKVADREIETMRREIEVNYLGALNVLKASVAPLRASRGSLVLFTSSSYTRGRALYSVYSSCKAAVVNLMQGAAEELLGDGVRVNVINPERTATPMRRENFGLEDPRTLLDPREVAEATLQTLLSPLTGQVVDVKRGERVGEP

SEQ ID NO: 91620 - protein, 300 aa, unidentified
  source 1..300: note = Saccharimonas sp.
  REGION 1..300: note = tr|R4PY11|R4PY11_9BACT Putative 2,3-dihydro-2,3-dihydroxybenzoate dehydrogenase; OS = Candidatus Saccharimonas aalborgensis OX=1332188; GN = L336_0953 PE=4 SV=1
MGANSELISHIDPSYRNLVVISGARRGIGHAVADRFLQSYNTAVIGVDNHPDIVEQFPERQGRNFWPVQLDICDTDGVKELFGEVIAAPQPLDAVVHAAGHIVAGTDYHRHVRDYPTETARQQVKRLREVNGQAAIHFVSQAVGALSAQENGGCVIGISSSKADFPDPYRKEYMLAKARFSEAMAIQRTKLPPSIRLIDVQPGNTQTDIDGGEWIDGSDPDTARAVQAVNEWWRTHFGTPVKTIAEAIYDIAQDPRERRAVIPLGRDALLGSYMSRLPGWHTVSNTAARGVYTAVRLTSR

SEQ ID NO: 91621 - protein, 280 aa, Streptomyces sp.
  REGION 1..280: note = tr|A0A367FBT8|A0A367FBT8_9ACTN 2,3-dihydro-2,3-dihydroxybenzoate dehydrogenase; OS = Candidatus Streptomyces philanthi OX=371608; GN = DTL70_05560 PE=4 SV=1
MSTAHRTAPGAARPRTPGYAPELDGRLALVTGAARGIGAAVVQALVTQGAHVLATDLDPAGVEQLAAEHPGQVTARPLDVTDAAAVEALLTESDRLLGPLDIVANVAGILRAAAVTELSDADWAATFAVNTGGVFHVSRAAARRMSERGSGSIVTVASNAAGVPRTGMAAYAASKAATVMFTKCLGLEVAGRGVRCNTVSPGSTLTDMQRACWGPGADDETAAARRVVEGDLATYRTGIPLGRIADPADVAEAVVFLASDRARHITLHDLYVDGGATLRA

SEQ ID NO: 91622 - protein, 267 aa, Capnocytophaga canimorsus
  REGION 1..267: note = tr|A0A0B7IK96|A0A0B7IK96_9FLAO 2,3-dihydro-2,3-dihydroxybenzoate dehydrogenase; OS = Capnocytophaga canimorsus OX=28188 GN=entA PE=3 SV=1
MSKIVLITGATSGIGRATAQWLSENGYVVYGTGRSVAQEDLPFKLIRMDVRDGQCVIEAVQRVVAQEKRIDVLINNAGVGITGAVEELPEEALQNVFQTNLFGAIRVIQAVLPYMRNQKSGLIINITSIAGYMGLPFRGGYSASKGALVLISEALRMELKNTGIHVTTIAPGDYATDIASRRYHAPVKANSPYREVYQKSLDLMNQHVDSGGNPIEMAKKIHRIIETKHPKVHYSQGSFLQKFSVILKRILPAKWYEKMLMNHYQLD

SEQ ID NO: 91623 - protein, 273 aa, Capnocytophaga ochracea
  REGION 1..273: note = tr|A0A2X2RN31|A0A2X2RN31_CAPOC 2,3-dihydro-2,3-dihydroxybenzoate dehydrogenase; OS = Capnocytophaga ochracea OX=1018 GN=entA PE=3 SV=1
MNKTVLITGATSGIGKETALLLTSKGFLVYGTARNVEGKNLPFRLLPMDVRNEASIKEAVQQILTEVGRIDILINNAGVGITGAIEELPTEQLHNVFATNLYGAITVIQQVLPAMRSQGSGLIINIASIAGYMGLPFRGAYSASKGALLLMSEALRMEVKSFGIEVCTISPGDYATDIASRRYHTPVNEGSPYAEVYEKQLRLMNEHVDSGGDPKEMADKILKVINTKHLKVHYKQGSFLQKFSIVLKRLLPSNSYEKMLMKHYQLGANRTGN

SEQ ID NO: 91624 - protein, 252 aa, unidentified
  source 1..252: note = Chania multitudinisentens
  REGION 1..252: note = tr|W0L951|W0L951_9GAMM 2,3-dihydroxybenzoate-2,3-dehydrogenase OS=Chania multitudinisentens RB-25 OX=1441930 GN=Z042_04145 PE=4 SV=1
MNNGHDFAGQRVWVTGAGAGIGYQTALAFVQAGAEVIGFDLHFGEQHYPFHTEVLDIADGAAVDSVCQRLLVEQPELDVLVNGAGILRMGLADETSSADWLACMAVNAGGAFNMFRHTLPIFRHQRRGAIVSVASNAAHVPRVGMAAYCASKAALRSLCQTVGLEMAPYGVRCNLVSPGSTNTPMQRGMWQDESGERKTINGFPEQFKLGIPLGKIAQPQEIADAILFLASERASHITMQDIVIDGGATLAA

SEQ ID NO: 91625 - protein, 259 aa, Chitinimonas sp.
  REGION 1..259: note = tr|A0A516SK11|A0A516SK11_9MICO 2,3-dihydro-2,3-dihydroxybenzoate dehydrogenase; OS = Chitinimonas sp. R3-44 OX=2594795 GN=FNU76_20220 PE=4; SV = 1
MEFQGKVALVTGAAQGIGASVAMALARGGAAVAVLDLQAEAVAGTAAALRDLGRPALGLAVDVARTDAVEAAVAQVEQELGAIDILVNVAGLLRMGNILTLSDEDWDRTFAVNVGGVFRVSRAVANRMAPRKRGAIVTVGSNASAVPRQQMAAYAASKAASAHFSRCLALEMAQHGIRCNVVSPGSTDTAMQRQLWTSPASEQAVIAGSLDSYRLGIPLGRIAAPDDIAEAVCFLASDRARHITMQDLCVDGGATLGAR

SEQ ID NO: 91626 - protein, 254 aa, Chromobacterium sp.
  REGION 1..254: note = tr|A0A5C1DCV7|A0A5C1DCV7_9NEIS 2,3-dihydro-2,3-dihydroxybenzoate dehydrogenase; OS = Chromobacterium sp. 257-1 OX=2605945 GN=dhbA PE=4 SV=1
MIGLDFTGQCVWVTGAAQGIGQEVAQRFVEAGARVVALDLQFEQAAAHCGVLRELPLDIRDAEAVAALCRRLAEEDTLPDVLVNAAGVLRLGAFDALSIDDWQQCLAVNVSGPFYLLRALLPHFKARRAGAIVNVASNAAHVPRIAMAAYGASKAAMASLSHNAALELAPYGVRCNVVSPGSTDTPMLRAMWQDEHGAARTIAGKPEAFRLGIPLGKLATPADVAGAVLYLASDLAGHVTMQDIVVDGGATLAA

SEQ ID NO: 91627 - protein, 254 aa, Chromobacterium violaceum
  REGION 1..254: note = tr|Q7NXZ4|Q7NXZ4_CHRVO 2,3-dihydro-2,3-dihydroxybenzoate dehydrogenase; OS = Chromobacterium violaceum (strain ATCC 12472 / DSM 30191 / JCM 1249 / NBRC 12614 / NCIMB 91 31 / NCTC 9757); OX = 243365 GN=entA PE=4 SV=1
MVGLDFTGQCVWVTGAAQGIGQEVARRFVEAGARVIALDLKFNSPAARGGVLRELPLDIRDADAVAALCRRLAEEDALPDVLVNAAGVLRLGAFDALSIDDWQQCLAVNVSGPFYLLRALMPHFKARRAGAIVNVASNAAHVPRIDMAAYGASKAAMASLSHNAALELAPYGVRCNVVSPGSTDTPMLRGMWQDEHGAARTIAGKPEAFRLGIPLGKLATPADVAGAVLYLASDLAGHVTMQDIVVDGGATLAA

SEQ ID NO: 91628 - protein, 144 aa, Chromobacterium violaceum
  REGION 1..144: note = tr|A0A447T9Q1|A0A447T9Q1_CHRVL 2,3-dihydro-2,3-dihydroxybenzoate dehydrogenase; OS = Chromobacterium violaceum OX=536 GN=entA_2 PE=4 SV=1
MVGLDFTGQCVWVTGAAQGIGQEVARRFVEAGARVIALDLKFNSPAARGGVLRELPLDIRDANAVAALCRRLAEEDALPDVLVNAAGVLRLGAFDALSIDDWQQCLAVNVSGPFYLLRALMPHFKARRAGAIVNVASNAATCRA

SEQ ID NO: 91629 - protein, 255 aa, unidentified
  source 1..255: note = Ciceribacter sp.
  REGION 1..255: note = tr|A0A4Q2TV34|A0A4Q2TV34_9RHIZ 2,3-dihydro-2,3-dihydroxybenzoate dehydrogenase; OS = Ciceribacter sp. F8825 OX=2509717 GN=EUU22_02370 PE=4; SV = 1
MQLTGLAGKAAFVTGAAGGIGRAVVDGLVASGVRVFATDRQIDPAWSAAEGPVQGAALDISDEGAVQRVIAEADTEMGGFDFGVNVAGILDTTPVADLKGDVWRRVFDVNCHGAFFVCRALAARMAERRQGSIVVVGSNAAGIPRKNMAAYAASKAAATMFVRCLGLEVAEHGVRCNVVAPGSTLTPMQTGMWTTPASQERVIEGDLASYRTGIPLKKLAMPEDIANAVLFLLSDQAGHITMADLYVDGGATLRG

SEQ ID NO: 91630 - protein, 251 aa, Citrobacter amalonaticus
  REGION 1..251: note = tr|A0A515AE94|A0A515AE94_CITAM 2,3-dihydro-2,3-dihydroxybenzoate dehydrogenase; OS = Citrobacter amalonaticus OX=35703 GN=dhbA PE=4 SV=1
MAGFDFHGKTVWVTGAGKGIGYATALAFVEAGAQVTGFDREFALQDYPFVTEVMDVADAGQVAEVCQRLLVQTDRLDVLVNAAGILRMGATDALSPHDWQQTFAVNVGGAFNLFQQTMAQFRHQRGGAIVTVASDAAHTPRIGMSAYGASKAALKSLALTVGLELAGSGVRCNLVSPGSTDTDMQRTLWVSDDAEQQRIRGFGEQFKLGIPLGKIARPQEIANTILFLASDLASHITLQDIVVDGGSTLGA

SEQ ID NO: 91631 - protein, 251 aa, Citrobacter amalonaticus
  REGION 1..251: note = tr|A0A0F6RE00|A0A0F6RE00_CITAM 2,3-dihydroxybenzoate-2,3-dehydrogenase OS=Citrobacter amalonaticus Y19 OX=1261127 GN=F384_02635 PE=4 SV=1
MAGFDFRGKTVWVTGAGKGIGYATALAFVEAGAQVTGFDCEFALQDYPFTTEVMDVADAGQVAEVCQRVLAHTERLDVLVNAAGILRMGATDALSSHDWQQTFAVNVGGAFNLFQQTMAQFRRQQGGAIVTVASDAAHTPRIGMSAYGASKAALKSLALTVGLELAGSGVRSNLVSPGSTDTDMQRTLWVREDAEQQRIRGFGEQFKLGIPLGKIARPQEIANTILFLASDLASHITLQDIVVDGGSTLGA

SEQ ID NO: 91632 - protein, 251 aa, Citrobacter braakii
  REGION 1..251: note = tr|A0A1R0G0L2|A0A1R0G0L2_CITBR 2,3-dihydro-2,3-dihydroxybenzoate dehydrogenase; OS = Citrobacter braakii OX=57706 GN=dhbA PE=4 SV=1
MSGFDFAGKTVWVTGAGKGIGYTTALAFVKAGAEVTGFDREFSQNNYPFATEVLDVANAEQVAEVCQRVLQTRERLDVLVNAAGILRMGATDALSIEEWQQTFAVNVGGAFNLFQQTMAQFRRQQGGAIVTVASDAAHTPRIGMSAYGASKAALKNLALTVGLELAGSGVRCNVVSPGSTDTDMQRTLWVSDDAEQQRIRGFGEQFKLGIPLGKIARPQEIANTILFLASDLASHITLQDIVVDGGSTLGA

SEQ ID NO: 91633 - protein, 251 aa, Citrobacter freundii
  REGION 1..251: note = tr|A0A381GQN4|A0A381GQN4_CITFR 2,3-dihydroxybenzoate-2,3-dehydrogenase OS=Citrobacter freundii OX=546 GN=entA PE=4 SV=1
MSGFDFAGKTVWVTGAGKGIGYTTALAFVKAGAEVTGFDREFSQDNYPFVTEVLDVANAGQVAEVCQRLLQTRERLDVLVNAAGILRMGATDALSIEEWQQTFAVNVGGAFNLFQQTMAQFRRQQGGAIVTVASDAAHTPRIGMSAYGASKAALKNLALTVGLELAGRGVRCNVVSPGSTDTDMQRTLWVSDDAEQQRIRGFGEQFKLGIPLGKIARPQEIANTILFLASDLASHITLQDIVVDGGSTLGA

SEQ ID NO: 91634 - protein, 251 aa, Citrobacter gillenii
  REGION 1..251: note = tr|A0A3E2KW01|A0A3E2KW01_9ENTR 2,3-dihydro-2,3-dihydroxybenzoate dehydrogenase; OS = Citrobacter gillenii OX=67828 GN=DZA29_05465 PE=4 SV=1
MVGFDFTGKTVWVTGAGKGIGYTTALAFVDAGARVTGFDLAFDGEAYPFATEVMNVADAPQVAQVCERLLANTERLDVLVNAAGILRMGPTDALSAEDWQQTFAVNVGGAFNLFQHTMAQFRRQQGGAIVTVASDAAHTPRIGMSAYGASKAALKSLALTVGLELATSGVRCNVVSPGSTDTDMQRTLWVSDDAEQQRIRGFGEQFKLGIPLGKIARPQEIANTVLFLASDLASHITLQDIVVDGGSTLGA

SEQ ID NO: 91635 - protein, 158 aa, Citrobacter koseri
  REGION 1..158: note = tr|A0A381GZQ8|A0A381GZQ8_CITKO Short chain dehydrogenase OS=Citrobacter koseri OX=545 GN=dhbA PE=4; SV = 1
MGKLTGKTALITGASQGIGEGIARVFARHGANLILLDISDEAEKLADELGGRGHRCTAIKADVRDFASVAAAVARAKKIEGKIDILVNNAGVCRLGNFLDMSEEDRDFHIDINIKGVWNVTKAVLPEMVERQRWAYRHDVLRDRGYGGRSRRNGLCPV

SEQ ID NO: 91636 - protein, 247 aa, unidentified
  source 1..247: note = Citrobacter pasteurii
  REGION 1..247: note = tr|A0A0A1RK68|A0A0A1RK68_9ENTR 2,3-dihydro-2,3-dihydroxybenzoate dehydrogenase [enterobactin] siderophore OS=Citrobacter pasteurii; OX = 1563222 PE=4 SV=1
MHIDLTGKKALVTGASRGLGRAIALSLAKAGADVVITYEKSAEKAQAVADEITALGRHGEAIQANSADAQAIQNAVNRTVQSLGGLDILVNNAGIARGGPLESLSLEDIDALINVNIRGVVVAIQAALPHLPEGGRIINIGSCLANRVAQPGIAVYAMTKSALNSLTRGLARDLGPRGITVNLVHPGPTDSDMNPADGEQAESQRQLIATGHYGTPEDVAAAVTFLASPEAGQISGTGLDVDGGLNA

SEQ ID NO: 91637 - protein, 251 aa, unidentified
  source 1..251: note = Citrobacter portucalensis
  REGION 1..251: note = tr|A0A5B0T583|A0A5B0T583_9ENTR 2,3-dihydro-2,3-dihydroxybenzoate dehydrogenase; OS = Citrobacter portucalensis OX=1639133 GN=dhbA PE=4 SV=1
MAGFDFAGKTVWVTGAGKGIGYTTALAFANAGAEVTGFDREFPQDNYPFATEVLDVANAGQVAKVCQRVIKARERLDVLVNAAGILRMGATDALSAEEWQQTFAVNVGGAFNLFQQTMAQFRRQQGGAIVTVASDAAHTPRIGMSAYGASKAALKSLALTVGLELAGSGVRCNVVSPGSTDTDMQRTLWVSDDAEQQRIRGFGEQFKLGIPLGKIARPQEITNTILFLASDLASHITLQDIVVDGGSTLGA

SEQ ID NO: 91638 - protein, 251 aa, Citrobacter rodentium
  REGION 1..251: note = tr|D2TMN5|D2TMN5_CITRI 2,3-dihydro-2,3-dihydroxybenzoate dehydrogenase; OS = Citrobacter rodentium (strain ICC168) OX=637910 GN=entA; PE = 4 SV=1
MAGFDFRGKTVWVTGAGKGIGYATARAFAEAGAQVTGFDRAFVLSDYPFACEVMDVADAEQVSDVCQRLLAQTERLDVLVNAAGILRMGATDALSQDDWQQTLAVNVGGAFNLFQQTMAQFRRQQGGAIVTVASDAAHTPRIGMSAYGASKAALKSLALSVGLELAGSGVRCNVVSPGSTDTDMQRTLWQSDDAEQQRIRGFGEQFKLGIPLGKIARPQEIASTIMFLASDLASHITLQDIVVDGGSTLGA

SEQ ID NO: 91639 - protein, 251 aa, Citrobacter rodentium; identical to SEQ ID NO: 91638
  REGION 1..251: note = tr|A0A482PUV7|A0A482PUV7_CITRO 2,3-dihydro-2,3-dihydroxybenzoate dehydrogenase; OS = Citrobacter rodentium OX=67825 GN=dhbA PE=4 SV=1

SEQ ID NO: 91640 - protein, 251 aa, Citrobacter sp.
  REGION 1..251: note = tr|A0A0V9JZ23|A0A0V9JZ23_9ENTR 2,3-dihydro-2,3-dihydroxybenzoate dehydrogenase; OS = Citrobacter sp. 50677481 OX=1736699 GN=APU02_00765 PE=4; SV = 1
MAGFDFQGKTVWITGAGKGIGYTTALAFTKAGAQVTGFDREFALDDYPFVTETLDVANAGQVAEVCQRLLAQTERLDVLVNAAGILRMGATDALSADDWQQTFAVNVGGAFNLFQQTMAQFRRQQGGAIVTVASDAAHTPRIGMSAYGASKAALKSLALTVGLELSGNGVRCNVVSPGSTDTDMQRTLWISDDAEQQRIRGFGEQFKLGIPLGKIARPQEIANTILFLASDLASHITLQDIVVDGGSTLGA

SEQ ID NO: 91641 - protein, 251 aa, Citrobacter sp.
  REGION 1..251: note = tr|A0A4Y5ZDX1|A0A4Y5ZDX1_9ENTR 2,3-dihydro-2,3-dihydroxybenzoate dehydrogenase; OS = Citrobacter sp. CF971 OX=2566012 GN=dhbA PE=4 SV=1
MAGFDFAGKTVWVTGAGKGIGYTTALAFANAGAEVTGFDREFPQDNYPFTTEVLDVANAGQVAEVCQRVLKARERLDVLVNAAGILRMGATDALSAEEWQQTFAVNVGGAFNLFQQTMAQFRRQQGGAIVTVASDAAHTPRIGMSAYGASKAALKSLALTVGLELAGSGVRCNVVSPGSTDTDMQRTLWVSDDAEQQRIRGFGEQFKLGIPLGKIARPQEITNTILFLASDLASHITLQDIVVDGGSTLGA

SEQ ID NO: 91642 - protein, 251 aa, Citrobacter sp.
  REGION 1..251: note = tr|A0A4P6WH31|A0A4P6WH31_9ENTR 2,3-dihydro-2,3-dihydroxybenzoate dehydrogenase; OS = Citrobacter sp. LY-1 OX=2546350 GN=dhbA PE=4 SV=1
MVGFDFTGKTVWVTGAGKGIGYTTALAFANAGAEVTGFDREFPQDNYPFATEVLDVANAGQVAEVCQRVLQARERLDVLVNAAGILRMGATDALSVEEWQQTFAVNVGGAFNLFQQTMAQFRRQQGGAIVTVASDAAHTPRIGMSAYGASKAALKSLALTVGLELAGSGVRCNVVSPGSTDTDMQRTLWVSDDAEQQRIRGFGEQFKLGIPLGKIARPQEITNTILFLASDLASHITLQDIVVDGGSTLGA

SEQ ID NO: 91643 - protein, 251 aa, Citrobacter sp.
  REGION 1..251: note = tr|A0A4U6DYG7|A0A4U6DYG7_9ENTR 2,3-dihydro-2,3-dihydroxybenzoate dehydrogenase; OS = Citrobacter sp. wls830 OX=2576411 GN=dhbA PE=4 SV=1
MAGFEFAGKTVWVTGAGKGIGYTTALAFVKAGAQVTGFDREFPQDNYPFATEVLDVADAGQVAEVCQRVLKACERLDVLVNAAGILRMGATDALSVEEWQQTFAVNVGGAFNLFQQTMAQFRRQQGGAIVTVASDAAHTPRIGMSAYGASKAALKSLALTVGLELAGSGVRCNVVSPGSTDTDMQRTLWVSDDAEQQRIRGFGEQFKLGIPLGKIARPQEIANTILFLASDLASHITLQDIVVDGGSTLGA

SEQ ID NO: 91644 - protein, 251 aa, Citrobacter sp.; identical to SEQ ID NO: 91632
  REGION 1..251: note = tr|A0A4V6BJT0|A0A4V6BJT0_9ENTR 2,3-dihydro-2,3-dihydroxybenzoate dehydrogenase; OS = Citrobacter sp. wls831 OX=2576410 GN=dhbA PE=4 SV=1

SEQ ID NO: 91645 - protein, 251 aa, Citrobacter werkmanii
  REGION 1..251: note = tr|A0A4V1VFH5|A0A4V1VFH5_9ENTR 2,3-dihydro-2,3-dihydroxybenzoate dehydrogenase; OS = Citrobacter werkmanii OX=67827 GN=dhbA PE=4 SV=1
MAGFDFAGKTIWVTGAGKGIGYTTALAFVKAGAQVTGFDREFPQDNYPFATEVLNVADAGQVAEVCQRVLKACERLDVLVNAAGILHMGATDALSVEEWQQTFAVNVGGAFNLFQQTMARFRRQQGGAIVTVASDAAHTPRIGMSAYGASKAALKSLALTVGLELAGSGVRCNVVSPGSTDTDMQRTLWVSDDAEEQRIRGFGEQFKLGIPLGKIARPQEIANTILFLASDLASHITLQDIVVDGGSTLGA

SEQ ID NO: 91646 - protein, 251 aa, Citrobacter youngae
  REGION 1..251: note = tr|D4BCM9|D4BCM9_9ENTR 2,3-dihydroxybenzoate-2,3-dehydrogenase OS=Citrobacter youngae ATCC 29220 OX=500640 GN=CIT292_08243 PE=4 SV=1
MGEFDFAGKTVWVTGAGKGIGYTTALAFVDAGAKVIGFDREFSRQAYPFATEVLDVADADAVAEVCQRVLQTSERLDVLVNAAGILRMGATDALSAEEWLQTFAVNVGGAFNLFQQTMAQFRRQQGGAIVTVASDAAHTPRIGMSAYGASKAALKSLALTVGLELAGCGVRCNVVSPGSTDTDMQRTLWHSDDAEQQRIRGFGEQFKLGIPLGKIARPQEIANTILFLASDLASHITLQDIVVDGGSTLGA

SEQ ID NO: 91647 - protein, 251 aa, Citrobacter youngae
  REGION 1..251: note = tr|A0A549UKM1|A0A549UKM1_9ENTR 2,3-dihydro-2,3-dihydroxybenzoate dehydrogenase; OS = Citrobacter youngae OX=133448 GN=dhbA PE=4 SV=1
MAGFDFTGKTVWITGAGKGIGYTTALAFVDAGAQVTGFDREFALAEYPFATEVMDVANAQQVAQVCERLLANTGRLDILVNAAGILRMGPTDALSVEDWQQTFAVNVGGAFNLFQQTMAQFRRQRGGAIVTVASDAAHTPRIGMSAYGASKAALKSLALTVGLELAGSGVRCNVVSPGSTDTDMQRTLWVSDDAEQQRIRGFGEQFKLGIPLGKIARPQEIANTILFLASDLASHITLQDIVVDGGSTLGA

SEQ ID NO: 91648 - protein, 254 aa, unidentified
  source 1..254: note = Clostridioides difficile
  REGION 1..254: note = tr|A0A4V6KGF6|A0A4V6KGF6_CLODI Short-chain dehydrogenase OS=Clostridioides difficile OX=1496 GN=dltE; PE = 4 SV=1
MNLTGNTIFIPGATSGIGLALATRLHDKGNTVIVGGRRTELLDRIREDHPGLHTVAIDIADPAGVDAAARQVIAEHPDLDVLIAMAGIMRVEDWSSPAGFLDTAEATITTNLLGPIRLVAAFIDHLQTRPAATIMTVSSGLAFAPLRVTPTYNATKAAIHMLSESLRLQFAGTSVEVIELVPPAVRTDLMPGQRDSDFAMPLDEFADEVIDLIGTQPDATELLVERVKFLRWGEARGDYAGVVATLNDHDPHGS

SEQ ID NO: 91649 - protein, 248 aa, Clostridium beijerinckii
  REGION 1..248: note = tr|A0A1S8PPD4|A0A1S8PPD4_CLOBE 2,3-dihydro-2,3-dihydroxybenzoate dehydrogenase; OS = Clostridium beijerinckii OX=1520 GN=dhbA PE=3 SV=1
MVLITGASKGIGLKVVEKYLASGETVVATDREIENLNKYSDSHRIHWLKMDVTNRTEVKRVIDKVESEIGEINIFVNVAGIFKSCPVEDTTIEEWTKIFEVNTTGVFNVTQAVSDRMKSRKKGSIIVVSSNASKYPRVGMGAYAASKAATSMYTKCLALELSEYGIRCNIVSPGSTNTDMQKQLWNGSKIVPKSILNGDLKTYRLGIPLHKIAEPEDIAEVIFFLASDKAGHITMEEVTVDGGATMGV

SEQ ID NO: 91650 - protein, 317 aa, Clostridium chromiireducens
  REGION 1..317: note = tr|A0A1V4INJ9|A0A1V4INJ9_9CLOT 2,3-dihydro-2,3-dihydroxybenzoate dehydrogenase; OS = Clostridium chromiireducens OX=225345 GN=entA PE=4 SV=1
MKKSEEWININIPKQHSRSVIITGTGGLGYETALVLVRAGAEVIFAGRNEKKGAESVNKIRTIVPSANIRFESIDLADLASIEAFGARIKNQRQSLDLLINNAGVMTPPKRKVTKDGFELQFGTNYLGHFALTAHLMPLLRKGNKPRVVTVSSMANRERKAKINFDDLQSERNYHSMDAYDQSKLADLMFTLELQRRSDAAGWGIMSIASHPGISSTDLMANGPGEKSLLARMLNIFTFMRQSAQNGALPSLYAAAAPNAEGGGYYGPGGFYEIKGLPGQAKIPTKAQDVNVAKRLWEVSKQLTSVDFDKIASMCEK

SEQ ID NO: 91651 - protein, 251 aa, Clostridium sporogenes
  REGION 1..251: note = tr|A0A1V9ISD9|A0A1V9ISD9_CLOSG 2,3-dihydro-2,3-dihydroxybenzoate dehydrogenase; OS = Clostridium sporogenes OX=1509 GN=NCTC13020_03625 PE=4; SV = 1
MSKNHKFDKHFNNLNEENQEKYIEEMHEMADKAAKKNNLIFGAVVIPIVIVCILVVKQMVSFSFNLAKDDNGAKNNNTEITKDVKNNNKGTDKKAENKEIALNEKIAKYIQDKNNRQKSLKDAVSINKGSEKGVSVIFISQLYRNNGYDIPKNTISTKGLLEDLKKKNWTKETDYTKLQKGDICFTTVDNAGSPSHAYIFMGWVKEGKTDYAYVCDGQTSDYDDTLHKRNLSVSTAKKDKIAFFMKAPNEK

SEQ ID NO: 91652 - protein, 246 aa, unidentified
  source 1..246: note = Coccidioides posadasii
  REGION 1..246: note = tr|C5NZM6|C5NZM6_COCP7 Oxidoreductase,short chain dehydrogenase, putative OS=Coccidioides posadasii (strain C735) OX=222929 GN=CPC735_012370 PE=4 SV=1
MANQLPFPSFTRVWHNKIYPTIDPSQNPSIAAIGKKVVISGGGSGIGPHIVKAFAAAGALRIEEVKREFPGTEVDVLVADIADEPSVCKLAADIKRLHGTWDVFVSNAGYSPELLSVTDSITSEWFKAFDVNVKGNFFLVREVAPFAAATGAVFVHVSSGACHALPRPGHSAYCAAKLASTKIMEHFQRECSPIRFTSIHPGIIPTEMANTLFKQVFRRPSQSGLRAAKRILPGAGCCGATGTLES

SEQ ID NO: 91653 - protein, 260 aa, Cohnella sp.
  REGION 1..260: note = tr|A0A4V6RXI1|A0A4V6RXI1_9BACL 2,3-dihydro-2,3-dihydroxybenzoate dehydrogenase; OS = Cohnella sp. CC-MHH1044 OX=2565925 GN=E6C55_18500 PE=4; SV = 1
MGTAFEGKVALVTGAAQGIGEAIVHALCGQGAIVAAVDRQREPLMRLSAALAGQGSPARAYPLDLKDDEAILQTVARIEEELGAIDILVHAAGVLRTGSLSTYADEDWEELFAVNVGAVFRLTRAVSERMIPRRRGAIVTVSSNAAAVPRMGMGAYATTKAAATMLTKCFALELAAYGIRCNIVSPGSTDTPMLRGMWQDERGAQETLDGSLPAYRTGIPLRKLATPADIAEGVLYLASERAGHLTMHDLRIDGGATLGV

SEQ ID NO: 91654 - protein, 258 aa, Collimonas arenae
  REGION 1..258: note = tr|A0A0A1F8W2|A0A0A1F8W2_9BURK 2,3-dihydro-2,3-dihydroxybenzoate dehydrogenase of siderophore biosynthesis OS=Collimonas arenae OX=279058; GN = LT85_1813 PE=4 SV=1
MEFQGKVVLITGAAQGIGAAVAQAMAQQGAKLALFDVQQQALAQQVDALASNGAQVLGIGVNVTDSTAVNAAVERVEQELGHIDVLVNAAGILRLGSALDCSDADWEQTFNVNVGGVFRMCRAVANRMAPRGRGVIVTVASNASAVPRQHMAAYAASKAASAHFTRCLGLELAVHGIRCNVVSPGSTDTAMQRQLWTSEEHKQAVINGALEQFRLGIPLRRIADAADIADAVIFLASERARHITMHELCVDGGATLGA

SEQ ID NO: 91655 - protein, 270 aa, unidentified
  source 1..270: note = Comamonadaceae bacterium
  REGION 1..270: note = tr|A0A3M6Q972|A0A3M6Q972_9BURK 2,3-dihydro-2,3-dihydroxybenzoate dehydrogenase; OS = Comamonadaceae bacterium NML161473 OX=2478744 GN=dhbA; PE = 4 SV=1
MTSAASTPTPFAGQLTGQFAGQRVLVTGAAQGIGRCIAQSFAAQGAQVIGLDVLADAPDSPATPERPWRLLALDIADAAAVQAVSARLQQEEARLDVLVNAAGILRMGGLDDLTAQDWQRSMAVNAIGPFTLIQQWTPIFKRQRRGSIVNIASNAANLPRLGMLAYAASKAALLSLSRGVALELAPYGVRCNIVSPGSTDTPMLAGMLGDAAGQQRLIQGLPEQFKLGIPLGKIATPQDIAHSVLFLASEQAGHITMQQIVADGGATLGV

SEQ ID NO: 91656 - protein, 270 aa, unidentified
  source 1..270: note = Comamonadaceae bacterium
  REGION 1..270: note = tr|A0A3M6R8A4|A0A3M6R8A4_9BURK 2,3-dihydro-2,3-dihydroxybenzoate dehydrogenase; OS = Comamonadaceae bacterium NML180581 OX=2478745 GN=dhbA; PE = 4 SV=1
MTSAASTPTPFAGQLTGQFAGQRVLVTGAAQGIGRCIAQSFAAQGAQVIGLDVLADAPDSPATPERPWRLLALDIADAAAVQAVSARLQQEEARLDVLVNAAGILRMGGLDDLTAQDWQRSMAVNAIGPFTLIQQWTPIFKRQRRGSIVNIASNAANLPRMGMLAYAASKAALLSLSRGVALELAPYGVRCNIVSPGSTDTPMLAGMLGDAAGQQRLIQGLPEQFKLGIPLGKIATPQDIAHIVLFLASEQAGHITMQQIVADGGATLGV

SEQ ID NO: 91657 - protein, 286 aa, unidentified
  source 1..286: note = Comamonadaceae bacterium
  REGION 1..286: note = tr|A0A3M6Q7K0|A0A3M6Q7K0_9BURK 2,3-dihydro-2,3-dihydroxybenzoate dehydrogenase; OS = Comamonadaceae bacterium NML970147 OX=1076744 GN=dhbA; PE = 4 SV=1
MTSAASTPTPFAGQLESQSTGRPTGQLTGQLTGQFAGQRVLVTGAAQGIGRCIAQSFAAQGAQVIGLDVLADAPDSPATPERPWRLLALDIADAAAVQAVSARLQQEEARLDVLVNAAGILRMGGLDDLTAQDWQRSMAVNAIGPFTLIQQWTPIFKRQRRGSIVNIASNAANLPRLGMLAYAASKAALLSLSRGVALELAPYGVRCNIVSPGSTDTPMLAGMLGDAAGQQRLIQGLPEQFKLGIPLGKIATPQDIAHSVLFLASEQAGHITMQQIVADGGATLGV

SEQ ID NO: 91658 - protein, 282 aa, unidentified
  source 1..282: note = Comamonadaceae bacterium
  REGION 1..282: note = tr|A0A3P1W7H8|A0A3P1W7H8_9BURK 2,3-dihydro-2,3-dihydroxybenzoate dehydrogenase; OS = Comamonadaceae bacterium OH3737_COT-264 OX=2491055; GN = dhbA PE=4 SV=1
MTSAASTPTPFAGQLESQSTGRPTGQLTGQFAGQRVLVTGAAQGIGRCIAQSFAAQGAQVIGLDVLADAPDSPATPERPWRLLALDIADAAAVQAVSARLQQEDARLDVLVNAAGILRMGGLDDLTAQDWQRSMAVNAIGPFTLIQQWTPIFKRQRRGSIVNIASNAANLPRLGMLAYAASKAALLSLSRGVALELAPYGVRCNIVSPGSTDTPMLAGMLGDAAGQQRLIQGLPEQFKLGIPLGKIATPQDIAHSVLFLASEQAGHITMQQIVADGGATLGV

SEQ ID NO: 91659 - protein, 257 aa, unidentified
  source 1..257: note = Comamonadaceae bacterium
  REGION 1..257: note = tr|A0A4Q5WQ03|A0A4Q5WQ03_9BURK 2,3-dihydro-2,3-dihydroxybenzoate dehydrogenase; OS = Comamonadaceae bacterium OX=1871071 GN=EOO24_19445 PE=4; SV = 1
MQLTGFDGRIAFVTGAAGGIGQALVRQLLQAGSTVVATDVSAPTQAAADGAGGHLLPHALDVSDGDAVTRLVQQIEAEVGPIALGVNVAGVLGGTLVTDTSDAEWRRVFAVNCDGVFHVGRALAQVMQPRGQGALVTVGSNAAGVPRHAMAAYAASKAAATMFTRCLGLELAPHGIRCNIVAPGSTLTPMQTGMWADERGAERVIAGLPEQYKAGIPLRKLATPEDIANAVMFLLSDQAGHIAMSDLYVDGGATLRA

SEQ ID NO: 91660 - protein, 257 aa, Corallococcus exiguus
  REGION 1..257: note = tr|A0A5C5DNI5|A0A5C5DNI5_9DELT 2,3-dihydro-2,3-dihydroxybenzoate dehydrogenase; OS = Corallococcus exiguus OX=83462 GN=FH620_30155 PE=4 SV=1
MASTTGHAVVTGAAQGIGAAVARKLARTMPVAVFDQNAAGLELLVAELRQQGLKATAFPVDVRDKDGIEDAIASIDSKLGPIQVLANVAGILRMGSVLTQSDADWMTTFAVNTHGVFHVSRAVARHMVPRRSGAIVTVGSNAAGVPRMQMAAYAASKAASTMFTKCLGLELAEHGIRCNVVSPGSTDTAMQRGMWTDESGPARVIQGSLDTYRTGIPLRRIATPDDIADAVVFLASDQARHITMHDLCIDGGATLGV

SEQ ID NO: 91661 - protein, 257 aa, Corallococcus sp.
  REGION 1..257: note = tr|A0A3A8JP90|A0A3A8JP90_9DELT 2,3-dihydro-2,3-dihydroxybenzoate dehydrogenase; OS = Corallococcus sp. CA054A OX=2316733 GN=D7V88_00040 PE=3; SV = 1
MGAPTGIAVVTGAAQGIGAAVARKLARTMHVAVFDQNSAGLELLVAELRQQDLKATAFKVDVRDKDGVEDAVAIIEAKLGPIQVLANVAGILRMGAALELSDADWMSTFAVNTHGVFHVSRAVARRMVPRRSGAIVTVGSNAAGVPRMQMAAYAASKAASTMFTKCLGLELAEHGIRCNVVSPGSTDTAMQRALWSDDRGPEAVIAGSLQSFRTGIPLRRIATPDDIADSVVFLASDQARHITMHDLCIDGGATLGV

SEQ ID NO: 91662 - protein, 257 aa, Corallococcus sp.
  REGION 1..257: note = tr|A0A3A8HJU9|A0A3A8HJU9_9DELT 2,3-dihydro-2,3-dihydroxybenzoate dehydrogenase; OS = Corallococcus sp. CA054B OX=2316734 GN=D7V80_00965 PE=4; SV = 1
MSSTAGHAVVTGAAQGIGAAVARRLARTMPVAVFDQNAAGLELLVAELRQQGLKATAFPVDVRDKDGIEDAIAYIDGKLGPIQVLANVAGILHMGSVLTQSDADWMSTFAVNTHGVFHVSRAVARHMVPRRSGAIVTVGSNAAGVPRMQMAAYAASKAASTMFTKCLGLELAEHGIRCNIVSPGSTDTAMQRGMWTDESGPVRVIQGSLDTFRTGIPLRRIATPDDIADAVVFLASDQARHITMHDLCIDGGATLGV

SEQ ID NO: 91663 - protein, 257 aa, Corallococcus sp.
  REGION 1..257: note = tr|A0A3A5FWD1|A0A3A5FWD1_9DELT 2,3-dihydro-2,3-dihydroxybenzoate dehydrogenase; OS = Corallococcus sp. H22C18031201 OX=2249217; GN = DRW03_22445 PE=3 SV=1
MEQKTRVALVTGAAQGIGASVTRVLAEEGRVAALDRNAERLEATARELRAHSLDVTAFAVDVSDRQAVESTIELVERELGPIAVLANVAGILRVSPVLSITDEDWAATFAVNTQGVFHVSRAVAQRMVPRRTGVIVTVGSNASGVPRIGMAAYAASKAASAMFTKCLGLELAPHGIRCNIVSPGSTDTAMQRALWTDEQGGQAVIAGSLESFRLGIPLGRIASADDIAEAVRFLASDRARHITLHDLCVDGGATLGA

SEQ ID NO: 91664 - protein, 257 aa, Corallococcus sp.
  REGION 1..257: note = tr|A0A554G5C2|A0A554G5C2_9DELT 2,3-dihydro-2,3-dihydroxybenzoate dehydrogenase; OS = Corallococcus sp. Z5C101001 OX=2596829 GN=FOF48_20635; PE = 3 SV=1
MGATTGHAVVTGAAQGIGAAVARKLARTMPVAVFDQNAAGLELLVAELRQQGLKATAFPVDVRDKDGIEDAIAVIESRLGPIQVLANVAGILRVGPVLTQSDADWMSTFAVNTHGVFHVSRAVAKHMVPRRSGVIVTVGSNAAGVPRMQMAAYAASKAASTMFTKCLGLELAQHGIRCNVVSPGSTDTAMQRAMWADDSGRDAVIAGSLDTFRTGIPLRRIATPDDIADAVAFLASDQARHITMHDLCIDGGATLGV

SEQ ID NO: 91665 - protein, 253 aa, unidentified
  source 1..253: note = Corticibacter populi
  REGION 1..253: note = tr|A0A3M6QZL6|A0A3M6QZL6_9BURK 2,3-dihydro-2,3-dihydroxybenzoate dehydrogenase; OS = Corticibacter populi OX=1550736 GN=D8I35_05080 PE=4 SV=1
MQLTGFDQKIAFVTGAAGGIGQAIVDLLLQAGSTVVATDLHAPAPRPHAQLHPHALDVRDAVQVDALVARIEAELGPIEMGINVAGVLSDTAVAQTSDAQWRQVFAVNCDGVFHVSRALARVMQPRRSGRLVTVGSNAAGIPRHAMAAYAASKAAATMFTRCLGLELAPHGIRCNIVAPGSTLTPMQTGMWADADGAQRVIAGIPELYKSGIPLQKLATPEDVANAVMFMLSEQAGHITMSDLYVDGGATLRG

SEQ ID NO: 91666 - protein, 248 aa, Corynebacterium casei
  REGION 1..248: note = tr|G7I0P1|G7I0P1_9CORY 2,3-dihydro-2,3-dihydroxybenzoate dehydrogenase; OS = Corynebacterium casei UCMA 3821 OX=1110505 GN=dhbA PE=4; SV = 1
MGQAHVLVTGAAGGIGAAIVQKLLAQGANVTATDLPPFGTSGSNFGSTQCAEHTLDVTDTAQIAELTEMAWKSSFGPVDALVNAAGVFGGAPGVQTSDKELQRLFSINAFGVFAMCRAVGSKMAERGHGSIVTVGSNAGSLPRTNMVAYGASKAAASSITRSFGLELGRNGVRCNVVCPGTTRTPMIEGLDSEEGLITGDQSAFKTGIPLGRIAEPNDIAEVVVFLTSTSARHVTLQEVVVDGGASQR

SEQ ID NO: 91667 - protein, 249 aa, unidentified
  source 1..249: note = Corynebacterium geronticis
  REGION 1..249: note = tr|A0A3G6J2E6|A0A3G6J2E6_9CORY 2,3-dihydro-2,3-dihydroxybenzoate dehydrogenase; OS = Corynebacterium geronticis OX=2079234 GN=entA PE=4 SV=1
MQSKPSDLPRQKPHCLVTGANGGIGSAVCKLLQECGYRVSRWDLPNVDVSDPLSVEFGLEQLPMPVDFLIHTAGILEPDSALLPDRDQINRSIAVNLLGVINTCAPIAGQMKERRSGAIVVVSSNAGSVPRKGMATYGATKAAATNWVKTLALELAPFGVRCNIVSPGSTDTPMLRSLWNDPAGTASELMDRHAEVIAGSPDDFRLGIPLQRVAAPEDIARACAWLISPEAQHVTMHDLRIDGGATLDA

SEQ ID NO: 91668 - protein, 255 aa, unidentified
  source 1..255: note = Corynebacterium glyciniphilum
  REGION 1..255: note = tr|X5E6R7|X5E6R7_9CORY 2,3-dihydro-2,3-dihydroxybenzoate dehydrogenase; OS = Corynebacterium glyciniphilum AJ 3170 OX=1404245; GN = dhbA PE=4 SV=1
MAADLHGSVRHHVVTGAAGGIGSAVVTELLSAGHTVTAADISYPRGISRVERSGPGVLHHVGLDVGDSHQVDSVVRDVWNTVGAVDSLVNGAGVIAAGPGEDATDEDWERQFSVNAFGVFAMCRALGPRMAANGGGSIVTVGSNAGTVPRSSMTAYAASKAAASSVTRSFGLELGRQHVRCNVVCPGTTRTSMIEGLGSEATLVAGQPELYKSGIPLGRIASPEDIASVVVFLSGDGARHMTLQEVVVDGGASQR

SEQ ID NO: 91669 - protein, 218 aa, Corynebacterium imitans
  REGION 1..218: note = tr|A0A076NQA9|A0A076NQA9_9CORY Short-chain dehydrogenase OS=Corynebacterium imitans OX=156978 GN=entA; PE = 3 SV=1
MKTALITGASRGIGHAIAEELGKDHHIIAGASKDASEIVAALPSAEPFEVDLTDSAALCRAAARIEQVDVLIHAAGVLHKAPFDQLSEAQWRETMEVNVHAPVTLTRELLPALRRSRGLLLTINSGAGFFGVPENSAYCASKFALRGFTDALRLEEAGAIRITSLHPGRTNTDMIAAPAHGDAPKMDAASVAKAARLAVDAGPDAVVDFLRITPTGME
